United States Patent Application Publication US 2007/0054278 A1 - sequence listing, part 136

SEQ ID NO: 404648 - DNA, 201 bp, Homo sapiens
gcttctggtgagggctgcatctgcatcataacatagtggtggagacagggaattaggcgtggaaaagggaaaatgcaagaggaaaccttgctttataacarcctgctctcaagaactagtccattccctggagaagacattcatccatcttaatagccaaatcacctcttaaaggtaccacctcccaatactaccacattg

SEQ ID NO: 404649 - DNA, 201 bp, Homo sapiens
gttatctaacttaggtactcagcaacacctccaaagcatgctttcccaaaatcaaagtcttaatcatttcactctcgtgctcaggctggcatggtggtatrcacctgtagtcccagctactcagaaggctgaggtgggaggatcacttgagcccaggagttgaggctgccgtgagccatgatggcgccattgcattccagc

SEQ ID NO: 404650 - DNA, 201 bp, Homo sapiens
ggcacaatcttggctcactgcaatctctacttcctgggctcaagcaatcctcctacctcagcctcccaagtagctgggactacaggcatgcaccaccacgyccaactaatttttgcatttttagtaaagatggggttttgccatgttgcccaaactggtcttgaactcctgagctcaagcaatccacccacctcagcctcc

SEQ ID NO: 404651 - DNA, 201 bp, Homo sapiens
caaactcctgacctcaagtgatccacccacctcagcctcccaaagtgctgggattataagcatgaggcactgtgcccggctatttttttttttttttttttgagagacaggctggagtgcagtgatgcggtcataactctctgtaacctcaaactcctgtgggatcctcccacttcagcctcctgagtagccgggagtaca

SEQ ID NO: 404652 - DNA, 201 bp, Homo sapiens
cacctcagcctcccaaagtactgggattacaggcgtgagccaccacacccagccccaaccatcctttatttgcccagtagatgtcaaatgttgctcaaccrgggcctgaggctgagacttcccatgtgtcccacctcgagatggcagagccttgtggcccaaggagggaccccatctagcctgcctccctgggtagcactg

SEQ ID NO: 404653 - DNA, 201 bp, Homo sapiens
tgcacatgtatcccatactgtaacttttttttgaaaacagaatatgtcgtactgttgaattttttttttttttttttttgagacagagtctcactctgtckcccaggctggagtgcagtggtacgatcttggctcactgcaacctccgcttcccaggttcaggcaattcttctgcctcagtctcccaagtagctgggacta

SEQ ID NO: 404654 - DNA, 201 bp, Homo sapiens
gcgcaaaccctactgtgaagtgtgcattcaagggatctaagttgcgctctccttgtgagaatctaatgcctgatgatctgtcactatctcctgtcacccccagaagggaccgtctagtcacaggaaaacaagttcagggtttccactgattctacatgatggtagaattatttcattatatattacaatgtaataataata

SEQ ID NO: 404655 - DNA, 201 bp, Homo sapiens
tgggtggagttgtctaaggctagcaccagactatgcagagatttgcaggcagggcctggtccctggagagtgccgtgtacagatgtctggcttattgaagygtctgaacacaatggaatgtaaacagaaagtggttttaactttttctaacagttgccttcagctgtgttccccttcctgcccttagcaacatcgtgagca

SEQ ID NO: 404656 - DNA, 201 bp, Homo sapiens
ggagcgcaaaccctactgtgaagtgtgcattcaagggatctaagttgcgctctccttgtgagaatctaatgcctgatgatctgtcactatctcctgtcacmcccagaagggaccgtctagtcacaggaaaacaagttcagggtttccactgattctacatgatggtagaattatttcattatatattacaatgtaataata

SEQ ID NO: 404657 - DNA, 201 bp, Homo sapiens
agcacatcagcagcctttgctgcaaaccgtgagcttttcacgcactgtcagcacctaaacacctgccatagctgcaagagccgggtgctgccacactcacyggattggcaatgacgcagatcatggcttccgggcagtgctgggcacaggcagcggtcagggtggccacaatcgtggcattggtgttgaacaggtcgtccc

SEQ ID NO: 404658 - DNA, 201 bp, Homo sapiens
gaacctggaaggtggaggttggagtgagccgagatttgggccactgcattccagcctgggtgacagagtgagaccctgtctcaaaaaagaaaaaaataaakaaaaaagaagtccgcaacccccaacccccagtaccagtctgtggtctgttaggaaccaggcagcacagcaggaggtgagcagcaggtgagcaggtgaagc

SEQ ID NO: 404659 - DNA, 201 bp, Homo sapiens; identical to SEQ ID NO: 90356

SEQ ID NO: 404660 - DNA, 201 bp, Homo sapiens
aggcccacagggaggagggccaggcatgacccaaccccccacttctttttgcagaaattcaccatcaccttggctctgtcattctgatcttttccacccarggtatcagccgcagttgtgccgccatcatagcctacctcatgcatagtaacgagcagaccttgcaggtatgcgttccccgggccaggctcgcaccacggc

SEQ ID NO: 404661 - DNA, 201 bp, Homo sapiens
ttatattactttgtggtcattcatctaaaatagagttatgttacccttgtgtgttattgattcttcccagcaggatgcctggtttgcttttatgtgaaccracagagctttacaacatcctgaatcaggccacaaaactctccagattaacagaccccaactatctctgtttattgggtaagtacttggaaaaaagcggag

SEQ ID NO: 404662 - DNA, 201 bp, Homo sapiens
cagtctccagccagtgccgggcatccctgcggtccaggctggcctggagagggtcagagctgcccgcgaaccggggacgcacgtggcccgggccggggggmctccgcctgcaggccgcccctcgtctggcctacctgggccgaggtgctgaagctgcggcggagagcagcgctggcaggccgggcgagggcggagagcatg

SEQ ID NO: 404663 - DNA, 201 bp, Homo sapiens
cacctgtcctaagtttactcattccctaagaccttcatcgcttccacctgtcctaagtttactcattcctgtcccatatcaagtgtcacttctcacttatyttggtatcccctgcagcacccagcatagttgttggcaagcacaggtacttaatgtacttatctgtatacagctgggcccccacttcaccgtagcgcaaaa

SEQ ID NO: 404664 - DNA, 201 bp, Homo sapiens
ctcacttattttggtatcccctgcagcacccagcatagttgttggcaagcacaggtacttaatgtacttatctgtatacagctgggcccccacttcaccgyagcgcaaaagcatttggtacattcaacttacaatggggttgcctgtgggaacccattgcaagttgaaaatacacaaagttaaactcgccttttgacttag

SEQ ID NO: 404665 - DNA, 201 bp, Homo sapiens
tggcccttctgctgtgatgaaaaccccacaatggggatgcctgcattctgcgttccacctgatgacctgtgtggtccttccgtgtagttttgcaggcgatrctgacaagcttctgcacatccggatagaagattccccggaagcccagattcttcccttcttacgccacatgtgtcacttcattggtaaggagcgttcctt

SEQ ID NO: 404666 - DNA, 201 bp, Homo sapiens
tcatgccaggctgccctgtttctgcatccagcccttaagccgtgttgctggcactgtgcaagtgcctcctgtctctgaaagctgcctctgatccaagtggmaagggcccaggaccaatcgtgaagttcactttctctctttgtattcatagaggtcctgggcctatgtcaagaagtgcaaaaacaacatgtgtccaaatcg

SEQ ID NO: 404667 - DNA, 201 bp, Homo sapiens
aaaaattaggcatgatggtgcacacttgtagtcccagctactcggaaggctgaggtgggaggctcacttgagcccaggagtttgaggctgcagtgagtgaygatcgcgccactgcactccagcctgggcaacagagtgagacgctgtctctaagagaaaacagcaaaacaaaatgtaacccaaatatgacaagagttagtt

SEQ ID NO: 404668 - DNA, 201 bp, Homo sapiens
caccaacaggcctctcttgtgtgtgtgtgtttttttttttaagaaaaataatgaatatcttctcccggagtctgtggacctggagtgtgtgaagtactgcrtggtgtatgataacaacagcagcaccctggagatactcttaaaagatgatgatgatgattcagactctgatggtgatggcaaaggtgggttttatgcaac

SEQ ID NO: 404669 - DNA, 201 bp, Homo sapiens
aggttgtaggactagacacaaagcccacttctctcctctatacttaccactgccaaagtggcctggctttcagaggcagaggatgtggaacctgacttggsgggtgggagtgaggagatccttaagaggaatccacacgtggaaaaagtatgatggcaggtccagatggcggtgttgggaaaggccataatggtaactgac

SEQ ID NO: 404670 - DNA, 201 bp, Homo sapiens
ggtgcatgcccgtggtcccagctactcaggaggctgaagtgcgaagatcatttgagcccaggaattcaaggctgcagtgagcggtgactgcaccactgcastccagcctgggcaacagagtgagaccctgtctctaaaataaaataatatccagaacgctggccacagtgattggtcctgggtctgggatgaaagctgagc

SEQ ID NO: 404671 - DNA, 201 bp, Homo sapiens
gcttgaacctggaaggtggaggttggagtgagccgagatttgggccactgcattccagcctgggtgacagagtgagaccctgtctcaaaaaagaaaaaaawaaataaaaaagaagtccgcaacccccaacccccagtaccagtctgtggtctgttaggaaccaggcagcacagcaggaggtgagcagcaggtgagcaggtg

SEQ ID NO: 404672 - DNA, 201 bp, Homo sapiens
agctgttttacagcccatgtggtatgtatatggctcagataacgttgtattcaagattttattctctgcccacatttcactacacatttttttttttttttgagatggagtcttattctgtagcccaggctggagtgcagtggtgcaatcttggctcacttcaacctccgcctcccgggttcaagtgattctcctgcctca

SEQ ID NO: 404673 - DNA, 201 bp, Homo sapiens
accaaaggtgatctgcctgcctcagcctcgaaaagtgctgggattacagatgtgagccaccacgcccagctgatcctcctccttctttttttttttttttttcaagacagggtctcactctgttgcccagacgggattgtggtggtgtgatcacggcttactgcagccccacctcccagcctcaagtgattctcccacctc

SEQ ID NO: 404674 - DNA, 201 bp, Homo sapiens
ttggtcttgaactcctgaccaaaggtgatctgcctgcctcagcctcgaaaagtgctgggattacagatgtgagccaccacgcccagctgatcctcctcctyctttttttttttttttttcaagacagggtctcactctgttgcccagacgggattgtggtggtgtgatcacggcttactgcagccccacctcccagcctca

SEQ ID NO: 404675 - DNA, 201 bp, Homo sapiens
gggattataggtgtaagctaccatgcccagactgtctctatctttatctaacaaagaattaatctctaccaagaaatggaccgacctgtgccctcgctagsgtgcttaaatggatgggtcccatgtgtacataaggtgaacacaacatgggggagggaggggaagaagactgcctcactggtttctttgctttcactttgt

SEQ ID NO: 404676 - DNA, 201 bp, Homo sapiens
acccacttctggatcttcagctctcactcccacatcttgtgtgagtctcagggactcccaaatcccagctctgcattcccagttctgttaggcgttccatkggttccacaaactcaactgtccatttatcctgcccccctccctccatccctggtcccaaatggcacttgtgttcactaaatgtaaacttctagaaccatc

SEQ ID NO: 404677 - DNA, 201 bp, Homo sapiens
gcgcagtgatgcaatcatagctcactgcagcctccacctcccagactcaagtgatcctctcacctcagactcccgagtagctgggactacatgtgcacccycccacacccggctttttttgtctctacaaatatatctatatatatagatataaatatataaattagccaagtatggtggtgcatgcccgtggtcccagct

SEQ ID NO: 404678 - DNA, 201 bp, Homo sapiens
gaacccgggaggcggaggttgcagtgagcagagatcgcaccactgcactccagcctgggcaacagagtgggactccgtctcaaaaaaaaaaaaaaaaaaaagagctatactgtgttgaaagagtcctgtataaaggaggatgtcttaaatttgccattttgactctgttttgaacaggtcaccaggaaaatgagacttggt

SEQ ID NO: 404679 - DNA, 201 bp, Homo sapiens
gtcggcttctggtgagggctgcatctgcatcataacatagtggtggagacagggaattaggcgtggaaaagggaaaatgcaagaggaaaccttgctttatmacaacctgctctcaagaactagtccattccctggagaagacattcatccatcttaatagccaaatcacctcttaaaggtaccacctcccaatactaccac

SEQ ID NO: 404680 - DNA, 201 bp, Homo sapiens
accgtgtgtggtcatctggggcctgacagcatcactgcacagtcttctacagtagctgaggccagctaataacaggctttggttatcagaaaccaaaaccmaacaaaccaaaatccgaatcaagacgcttacccagtgggtttctgctcaggaaattaaactgtggaagcatatacaaccaacatttgaattcaaacaggt

SEQ ID NO: 404681 - DNA, 201 bp, Homo sapiens
ctactaaaaatacaaaaaattagccgggtgtggtggcgggcgcctgtagtcccagctactcaggaggctgaggcaggagaatggcatgaacccgggaggcrgaggttgcagtgagcagagatcgcaccactgcactccagcctgggcaacagagtgggactccgtctcaaaaaaaaaaaaaaaaaaaagagctatactgtg

SEQ ID NO: 404682 - DNA, 201 bp, Homo sapiens
gagcttttcacgcactgtcagcacctaaacacctgccatagctgcaagagccgggtgctgccacactcaccggattggcaatgacgcagatcatggcttcmgggcagtgctgggcacaggcagcggtcagggtggccacaatcgtggcattggtgttgaacaggtcgtcccgggtcatgcctggaaatgatccaatatgag

SEQ ID NO: 404683 - DNA, 201 bp, Homo sapiens
gagcctcaggcaggacaaggagctgcctaacaagaggtggaaggggttacgtacgttgcgaaagactccaaccctcctggtgagtcagatctgtcatctcsggctccagtatctcacactggttctccagcctaggtgtgcatcagagccacctgctgagctaatgaagcccactcaggactaggctcctggaagcgggat

SEQ ID NO: 404684 - DNA, 201 bp, Homo sapiens
ttgaacctgggaggcggaggttgtggtgagccgagatcgcaccactgcagtacagcctaggcaacagggcaagattccgtctcaaaaaaaaaaaaaaaaaattaggcatgatggtgcacacttgtagtcccagctactcggaaggctgaggtgggaggctcacttgagcccaggagtttgaggctgcagtgagtgatgatc

SEQ ID NO: 404685 - DNA, 201 bp, Homo sapiens
aaaatttaaatttaaaacagagaaacccccgtctctaaacatttagtttcatctaagaatcttactcaaaactcgaatcctggcctactggggacaggaarcaagtctccagggtcagcgcgcccagtacctttcacagcggctttggtctcgatgtggctcagatctgcggccactccgggtgtgtgcgcgatatcatag

SEQ ID NO: 404686 - DNA, 201 bp, Homo sapiens
caaaaccttggtgtcatccccgaccccttatctaatcacacatcagcaaatccttctggtaccatcaatgaatacccagaattcaatcatttcttaccacytgcacctagataaccacaatgaactcctaacctacctttctctcactcctaagaccatcttgttaaaatggaaggaagagcaagtcattacgcagctgaa

SEQ ID NO: 404687 - DNA, 201 bp, Homo sapiens
gttgctttgcctatttgtcatcggataggaaaatatacaaatacattgacagcctgtcttagtctcttttctgttgctgtcacagaatgcttgagattggktaatttatatagcaaagaagtttatttagcttactgttctggaggctaggaagttccagattgggtagctgcatctggtcggcttctggtgagggctgca

SEQ ID NO: 404688 - DNA, 201 bp, Homo sapiens
caggaggtggaggttgctgtgagccaagattgtgccattatactccatcctgggtgataagagctaaactccgtctcaaaagcgcgcgcgcgcgcgcgcacacacacacacacacacacacacacacacacacacacacacacacacacacacacacacacacacagcagataagctgagacatgctggaagagtaggtgt

SEQ ID NO: 404689 - DNA, 201 bp, Homo sapiens
ctcgcctccgggatctcgtgagatcacggccacttccgggagtcggaaaggaaagctgtgggaccatcctggcaaccccggtgtttggctgggttctagcstagccgtctgtgtggccggtgggggacctgcggtcggagtgggagggccagtctgcacccaagaggtggaagaggacgggctttaggctggaagcgcctt

SEQ ID NO: 404690 - DNA, 201 bp, Homo sapiens
ttagaggagccatttttccaggtggggccccaggcagaggctccgacagggagcctggccatagtcgcgcagccggggaggtggagcgcgtcccagacccragcccccgacctcagccaaacccattccttctgtccttggaggccagaggggactctgagcatcggaaaggtagggtcagggaggctgagagtccttagg

SEQ ID NO: 404691 - DNA, 201 bp, Homo sapiens
caagctcagcgtcctccctgtggcccttctgctgtgatgaaaaccccacaatggggatgcctgcattctgcgttccacctgatgacctgtgtggtccttcygtgtagttttgcaggcgatgctgacaagcttctgcacatccggatagaagattccccggaagcccagattcttcccttcttacgccacatgtgtcacttc

SEQ ID NO: 404692 - DNA, 201 bp, Homo sapiens
gtctcaaagtgaagctcatggtctggcttctccaggatcatcaagtgttgtctcttcaccagaagcaaatgcccatcaattgtgtccacctggactgtctkgggggttagggtggcttggcagttgagcgctgggtcaagcctgcagtatcctcgaactcctacaagaagcctgtggtcaggcccagcctctgacacctcc

SEQ ID NO: 404693 - DNA, 201 bp, Homo sapiens
gtagtattctgtggtatatgttaaccacatttaaaaaatccaatctggggccgggcacggtggctcatgcctgtaatcctagcactttggggggccaaggygggtggatcacttgaggtcagcagtttgagaccagcctggctaacatagtgaaaccccgtctctactaaaaatacaaaaattagctgggcatggtggtgc

SEQ ID NO: 404694 - DNA, 201 bp, Homo sapiens
agaaacccccgtctctaaacatttagtttcatctaagaatcttactcaaaactcgaatcctggcctactggggacaggaagcaagtctccagggtcagcgygcccagtacctttcacagcggctttggtctcgatgtggctcagatctgcggccactccgggtgtgtgcgcgatatcatagagggtcaggcggctcaccaa

SEQ ID NO: 404695 - DNA, 201 bp, Homo sapiens
acacatatgtatagatatacgtgtatatatacacatgtatgtatagatatacatatatacacacatacatatagatatacgtatatctatacacacataaktatatatatgtatccctatacatgtacatatgtatagatatacatatatctataaatgtacatatgtatatacttatatctatacatgtacatatgtata

SEQ ID NO: 404696 - DNA, 201 bp, Homo sapiens
ttgttgttttgggacagggtcttgctctgtcacccagactggagtgcagtgacacaatcgcagctcactgcagcctccgcctcctgggctcaagtgatccktccacttcagcctcctgagtagtagggactacaggcgcatgccactatgcctggcatttttgtatttttttttttttcatagagtcggggatcttgctgt

SEQ ID NO: 404697 - DNA, 201 bp, Homo sapiens
ttatatagaagtggcaatattattctcacccccattttacagaggtggggactgaggcacagagaagctaaccactccttagggccaggcagctgatagtraatcgcagagccaggattcagacctaaaagagtttgactccagggacagcataattggaggtgaagaagtggaggcggtaaatgaaacaccacgcttttg

SEQ ID NO: 404698 - DNA, 201 bp, Homo sapiens
ctctgtcacccagactggagtgcagtgacacaatcgcagctcactgcagcctccgcctcctgggctcaagtgatccgtccacttcagcctcctgagtagtwgggactacaggcgcatgccactatgcctggcatttttgtatttttttttttttcatagagtcggggatcttgctgttgtccaggctggtctggaactcct

SEQ ID NO: 404699 - DNA, 201 bp, Homo sapiens
ttgacagcctgtcttagtctcttttctgttgctgtcacagaatgcttgagattgggtaatttatatagcaaagaagtttatttagcttactgttctggagkctaggaagttccagattgggtagctgcatctggtcggcttctggtgagggctgcatctgcatcataacatagtggtggagacagggaattaggcgtggaa

SEQ ID NO: 404700 - DNA, 201 bp, Homo sapiens
cctcaagcaatcctcctgccttggcctcctgaagtgctgggattacaggtgcaaaccactgcatccagtctggtatttctggattcaatctccactgccaracactctccccatgagaaaggatatcactaattcaattgaccatggtttctctgacaccagggtacctaataggctgtggatcagtcagcagaccagctg

SEQ ID NO: 404701 - DNA, 201 bp, Homo sapiens
tttattgatctacggttttcatacagtgaagtatataggtctcaagtgttcagtttggttttgacaaattccacccttgtaacaaccacccaaaacaaackataaaacattgccattattccagaaagttctctcatgctcctttccattcatctgccaagacagctatttcctgatttctatgatcgtaaagttgctttg

SEQ ID NO: 404702 - DNA, 201 bp, Homo sapiens
gcctgagcatttaacaatgggaaatgtttagacaggaaaggaggagaaaaaaggccaaataaaatcctagcgggaaaaaataagcataggccagtattcargggacagtgaatagatcatttattttggagtggggacattagggcaagcagtgtcctttgtttatcttatcactgactgcatcttctggtaattatttac

SEQ ID NO: 404703 - DNA, 201 bp, Homo sapiens
gagccatttttccaggtggggccccaggcagaggctccgacagggagcctggccatagtcgcgcagccggggaggtggagcgcgtcccagacccgagcccycgacctcagccaaacccattccttctgtccttggaggccagaggggactctgagcatcggaaaggtagggtcagggaggctgagagtccttaggcggggt

SEQ ID NO: 404704 - DNA, 201 bp, Homo sapiens
actcgttggccagtggcttcggttgttgcccccatgtgcactttgggggtgaagttgtaggctagaaagtcctttttttttttttttttttttttttgagrtggagtcttgttctgttgcccaggctggagtgcagtggtgcaatctccacctcctgggttcaagcgattcttgaacctccactgcaccctctgcctcctg

SEQ ID NO: 404705 - DNA, 201 bp, Homo sapiens
ggctggagtgcagtggtgccatcttggctcaccgcaagctctgcctcccaggttcacgccattctcctgcctcggcctcccaagtaggtgggactacaggygcccaccagcacgcccggctaattttttgtatttttagtagagacagggtttcaccctgttagccaggatggtctcgatctcctgacctcaagtgatcca

SEQ ID NO: 404706 - DNA, 201 bp, Homo sapiens
taaactgcatgctcagttcctttattcagatggtgaggaaggtggccatcgtcatctctgcgtccttcttcagccctggcagtctgtgattttgcacttgrtaggcttatcttcagttcctgagggttgccagaccagcctcgggtgccagcttagatttcctctccctgggcaggactcacagcttcaggggtgctgtga

SEQ ID NO: 404707 - DNA, 201 bp, Homo sapiens
cccaggaggtggaggttgctgtgagccaagattgtgccattatactccatcctgggtgataagagctaaactccgtctcaaaagcgcgcgcgcgcgcgcgcacacacacacacacacacacacacacacacacacacacacacacacacacacacacacacacacacagcagataagctgagacatgctggaagagtaggt

SEQ ID NO: 404708 - DNA, 201 bp, Homo sapiens
attcccagttctgttaggcgttccatgggttccacaaactcaactgtccatttatcctgcccccctccctccatccctggtcccaaatggcacttgtgttsactaaatgtaaacttctagaaccatcttctgccacctccttcttatcagagacatcaagtcaggacatgaagaacttggcagctcaaccaccctcccaac

SEQ ID NO: 404709 - DNA, 201 bp, Homo sapiens
acccaggaggtggaggttgctgtgagccaagattgtgccattatactccatcctgggtgataagagctaaactccgtctcaaaagcgcgcgcgcgcgcgcrcacacacacacacacacacacacacacacacacacacacacacacacacacacacacacacacacacagcagataagctgagacatgctggaagagtagg

SEQ ID NO: 404710 - DNA, 201 bp, Homo sapiens
tcttgggcgtcgtaattaaaaggcaatgcgagcacctcctgggttctcaaaattaggtttaattagattcacctggtaaaaatgcggacccccccccccccgcagtcttaagcttcttcaatgaacccagacgtctgttttttattagctttctggtgattctgacacactgcagagtttaagaaccaccattctagaaga

SEQ ID NO: 404711 - DNA, 201 bp, Homo sapiens
ggacgcacgtggcccgggccggggggcctccgcctgcaggccgcccctcgtctggcctacctgggccgaggtgctgaagctgcggcggagagcagcgctgrcaggccgggcgagggcggagagcatggctggagcgggaggggcaccgactggcaggcacaggagctggtgacggggaagtgactccaacgacctccacac

SEQ ID NO: 404712 - DNA, 201 bp, Homo sapiens
gggttacaggtgcatgccaccgcgcccagccccacatctcaagttttaaactgacaatgactatcccttaactgccaaacaaatagacgttgatgacgacrtaggtcctctgagtagtttggtcgtatgttcctttgcaaattcagttcttaaatacgtttcctttccagatgtccgttccaaatgggagtatgacgaaag

SEQ ID NO: 404713 - DNA, 201 bp, Homo sapiens
cagagaactctggaaggtgcacgaacataaaatttgccaggcagcctccccagctgttcacaccaacttaagactcatgtaaacaccatcagacacggtawcgcatacgctgtcagaggggaaagaaatcagtagaatctttctggacagcaatttggaactttatagtaaaagctttgaaatattcatacctactaattc

SEQ ID NO: 404714 - DNA, 201 bp, Homo sapiens
taggctggaagcgccttagaggagccatttttccaggtggggccccaggcagaggctccgacagggagcctggccatagtcgcgcagccggggaggtggakcgcgtcccagacccgagcccccgacctcagccaaacccattccttctgtccttggaggccagaggggactctgagcatcggaaaggtagggtcagggagg

SEQ ID NO: 404715 - DNA, 201 bp, Homo sapiens
agagatagacatccctcttccctgaggaatatgctcatagctgcctttctccctccacacttcaggaactggatgcatttcagccataccccattgaaatygtgccagggaaggtcttcgttggcaatttcagtcaagcctgtgaccccaagattcagaaggacttgaaaatcaaagcccatgtcaatgtctccatggata

SEQ ID NO: 404716 - DNA, 201 bp, Homo sapiens
tgagttacctgtgcacattcccccttacacaagctcagcgtcctccctgtggcccttctgctgtgatgaaaaccccacaatggggatgcctgcattctgcrttccacctgatgacctgtgtggtccttccgtgtagttttgcaggcgatgctgacaagcttctgcacatccggatagaagattccccggaagcccagattc

SEQ ID NO: 404717 - DNA, 201 bp, Homo sapiens
cagaggctccgacagggagcctggccatagtcgcgcagccggggaggtggagcgcgtcccagacccgagcccccgacctcagccaaacccattccttctgyccttggaggccagaggggactctgagcatcggaaaggtagggtcagggaggctgagagtccttaggcggggtgggaggaaggggccatctcctcagatcc

SEQ ID NO: 404718 - DNA, 201 bp, Homo sapiens
agtcgcgcagccggggaggtggagcgcgtcccagacccgagcccccgacctcagccaaacccattccttctgtccttggaggccagaggggactctgagcwtcggaaaggtagggtcagggaggctgagagtccttaggcggggtgggaggaaggggccatctcctcagatccgggccgtcgtttcccaagttgcagagac

SEQ ID NO: 404719 - DNA, 201 bp, Homo sapiens
gtcgcgcagccggggaggtggagcgcgtcccagacccgagcccccgacctcagccaaacccattccttctgtccttggaggccagaggggactctgagcaycggaaaggtagggtcagggaggctgagagtccttaggcggggtgggaggaaggggccatctcctcagatccgggccgtcgtttcccaagttgcagagacc

SEQ ID NO: 404720 - DNA, 201 bp, Homo sapiens
ttccacccagggtatcagccgcagttgtgccgccatcatagcctacctcatgcatagtaacgagcagaccttgcaggtatgcgttccccgggccaggctcrcaccacggccaccccctgggaggtgaggtcagagcgcaacctgggaggagtggggccccagcactgctttgggaggaagaatcccagataactccaagtc

SEQ ID NO: 404721 - DNA, 201 bp, Homo sapiens
gcaatggaacgctgcagaaaaaaacgtaagtttactttcagatgcagagccctggtttcccaaccttgaaggcgtgcaagccaagagcaggtcctctgggmaatctgggagacctgggggaaccctgacaaatggaccggccctggagcgggactacctcgcccccttttccccggctttctcccccgcacctccaggcca

SEQ ID NO: 404722 - DNA, 201 bp, Homo sapiens
cattttccctctcggtggccctcttgggcaaagttcctttaaaatggcttctcggctgggtgcggtgactcacgcctgtaatcccagcacttcgggaggcygaggtgggtggatcacctgaggtcaggagttttgagaccagcctgcccaacatggtgaaaccccatctctacaaatacaaaaaattagttgggcacggtg

SEQ ID NO: 404723 - DNA, 201 bp, Homo sapiens
gcctcggcctcccaaagtgatggggttacagatgtgagccacctcacctggcccctcttgtgtatactttaaatcatctctagattatttataatacctaatacaatgtacatgctatgtaaataattgttatactgtatcgtttagggaataatgacaagaaaaaaagtctgtacatgttctgtacagatgcaaccatga

SEQ ID NO: 404724 - DNA, 201 bp, Homo sapiens
cccctggccctgccaaggcccctgccattggtgcttctccccagagactgagcagacccagtctccccgcctggccgccgctgtcctggccacagcccctkcttggctctcctcacactgccccttgccccatctctaggctgcgccttcttgagactcacctaccagggcaaagtgcttggggaatccttgggccaaagg

SEQ ID NO: 404725 - DNA, 201 bp, Homo sapiens
gcgcccacccactcccgtctatctccctgtaccttgggcgcagggtccagagaagagagggaagcagggacccatcgcagcaaacccaggcggaactcggrgctcctaactcacagcacctttctcgagggcctgccctgcctgtcacagcctgttcgtgatccccagagggcttgataggacctacaaagccccaacatt

SEQ ID NO: 404726 - DNA, 201 bp, Homo sapiens
gaattaggaagtatacgatttcttttattcacgcacaactcacacggatgctgcaaggagattagctacgtcaaagcaatggaacgctgcagaaaaaaacstaagtttactttcagatgcagagccctggtttcccaaccttgaaggcgtgcaagccaagagcaggtcctctgggaaatctgggagacctgggggaaccct

SEQ ID NO: 404727 - DNA, 201 bp, Homo sapiens
cagcgtcaggatctggggcaggctggctaccttgcagtggggtggggaagagtgggaagtttcaccctcaatccagcgggcagcagaagcaggactgtttyctatgtgcccaccgtggtggtcttccacacctctcaccctcacacattttctcaggtgtcctcccatcccccaagaatggtcaacaactccattagacaa

SEQ ID NO: 404728 - DNA, 201 bp, Homo sapiens
ttgaaggcgtgcaagccaagagcaggtcctctgggaaatctgggagacctgggggaaccctgacaaatggaccggccctggagcgggactacctcgccccyttttccccggctttctcccccgcacctccaggccagtgtcagggcctgccccgggcgccacagtctccagccagtgccgggcatccctgcggtccaggct

SEQ ID NO: 404729 - DNA, 201 bp, Homo sapiens
gtttatcaaaggttgtttatttatttgagatggagcctcacgctgttgcccaggctgcagtgcagtggcgcgatctcggctcactgcaacctccacctccrggttcacgcagttctcctgcctcagcctcccaagtagctgggattacaggtgtgcaccaccacacctggctaatttttgtatttttagcagagacaggga

SEQ ID NO: 404730 - DNA, 201 bp, Homo sapiens; identical to SEQ ID NO: 90390

SEQ ID NO: 404731 - DNA, 201 bp, Homo sapiens
agccctgctggctgcaccacgcggctggcacagtcagtgcagtccaggcccgggggctgcagccgtcccagtcccggtccaggccgcgagtcccggggctrgcaaccgcccttgcatacggccccgcccataccccgcccctgtcccggattggctggggcggggggcgtggcctttccccattggtgcccgtggcggcgc

SEQ ID NO: 404732 - DNA, 201 bp, Homo sapiens
aagtgatccacccgcctcggcctcccaaagtcctgggattacaggcgtgagccaccacgcctggctagatatgttgtatttaagattttattctcctctgygcactatatttcactatacagttttgaagcattcctgatcatttacatgattactgtcatctttgcttgaaggtatgttaaaaaagagtttaattcatta

SEQ ID NO: 404733 - DNA, 201 bp, Homo sapiens
gacaaattcagaaattctttttttttttttttgagacaaattctgtctctgtctgcccaggctggagtgcagtggtgcagtcttggctcactgcaacctcygcctcccaggttcaagtgattctcatgcctcagccccccgagtagctagaactgcaggtgtgcaccaacacgcccagctaattgttgtattgttttatag

SEQ ID NO: 404734 - DNA, 201 bp, Homo sapiens
agcatttaggtgggcaccccagccagcctcaggggcaccctgctaccctctgctgacatctgctgtttctgtctcctaacagtttcatgatcaacatgggrgactcccacgtggacaccagctccaccgtgtccgaggcggtggccgaagaagtatctcttttcagcatgacggacatgattctgttttcgctcatcgtgg

SEQ ID NO: 404735 - DNA, 201 bp, Homo sapiens
ggcccctgggtgctgcccgggcttccttaccttctcccagatggaagcctgcccagccctgccccggcttctgggcgtctggcccccggcagctccacgcygcctccctccttgctccctcgcctgccctccttgtgcatctgcagcaggggctcccctgcttcttgtcgtatgtacctgggacctcaccccaaaggccat

SEQ ID NO: 404736 - DNA, 201 bp, Homo sapiens
tggctcacgcctgtaatcccagtgcttagggaggctgaggcacaaagattgcttgagccaggagttcaagaccagcctgagcaacatagggagacccccacccccccgccatctctacaataaacaaaaaagagtggtgttaatttgttaatttaccgacaaggagagtattccttatctgaagtgcttgccagaagtgtt

SEQ ID NO: 404737 - DNA, 201 bp, Homo sapiens
gcatttgcagttgatgaacagtttagttagatatcagtgtgcaccggggctgtgcggtgcctgggagctttggaatgaggttcccagggtggccccagacmtgcatcagctcaggaggctgcattctgatggctcttttgtgccaagcttcactttcctctagaaacacatcctctccgctccagcctaacacgggtgacc

SEQ ID NO: 404738 - DNA, 201 bp, Homo sapiens
gagtatgacctggtaagctgccaccgcgtgctggccccagatggaggcagtgggtaggacagggagcaggtctgtagggcgcccctcagcagggggaggcyggcagggagtggggtcctgggaagacgtcctcggaagttgccttcccgtgagggtcattgccatccctgcccgggctgactgacggaagggccattcctg

SEQ ID NO: 404739 - DNA, 201 bp, Homo sapiens
gacctttgccctcctttgccacagtggctgtgacagtgagaagcaagtcccagaggaacttagaagggactcaaagccaggaaggaaagggggcggcctgkagggcccccgcctgccaggcctgcccagtgggtgttcaccggagccgtggctgaggtctgtggccctcaccaaccctgtgtctgccttccttaggggagg

SEQ ID NO: 404740 - DNA, 201 bp, Homo sapiens
tgtgtggcctcaattgagcatgttgggatttaactttctgttatatgtcagactcacttaaaaattaaagttagaaaaaggtgaaatggagaaatgacaattttcttttcttttcttttctttttttgagatggagtctcgctctgtcgcccaggctggagcgcagtgggctcagtgcagcctccacctcccccaggttca

SEQ ID NO: 404741 - DNA, 201 bp, Homo sapiens
gtgtggcctcaattgagcatgttgggatttaactttctgttatatgtcagactcacttaaaaattaaagttagaaaaaggtgaaatggagaaatgacaattttcttttcttttcttttctttttttgagatggagtctcgctctgtcgcccaggctggagcgcagtgggctcagtgcagcctccacctcccccaggttcaa

SEQ ID NO: 404742 - DNA, 201 bp, Homo sapiens
acacacaaataccacatcattttatagcagggacttgagcatccttggatttttgttttttgggtttttttgtgatggagttttgctcttgtagcccaggstggagtgcaatggcgcgatctcggctcaccacaacctctgcctcccaggtccaagcgattctcctgcctcagcctcccaagtagctgggattacaggcat

SEQ ID NO: 404743 - DNA, 201 bp, Homo sapiens
tgtggcctcaattgagcatgttgggatttaactttctgttatatgtcagactcacttaaaaattaaagttagaaaaaggtgaaatggagaaatgacaattttcttttcttttcttttctttttttgagatggagtctcgctctgtcgcccaggctggagcgcagtgggctcagtgcagcctccacctcccccaggttcaag

SEQ ID NO: 404744 - DNA, 201 bp, Homo sapiens
gtcaccttatggaggccaagggcctagcggagtcaccctgcccacactagacgttgcttagagttcagcttgaagccatgtgatgtgggtcactgcccaggaggacttttttctagtgctgtggcctggaggactttccctctagcctctcatgcaggtgtactgtgtgatgtggtgggtctcttttctaacaggaagccc

SEQ ID NO: 404745 - DNA, 201 bp, Homo sapiens
tatgttttgatatacatatctattatttatataacacaattggattgtatagccagccctgcatatccgtgagttcggagttcaagaattcaactgcagaytgaaaatatttggagaaaaaatggattgttgtgtctgtcctgaacacatactgtcatcttactgttccctaaacaatacagcatagcaactatttacaga

SEQ ID NO: 404746 - DNA, 201 bp, Homo sapiens
gtggcctcaattgagcatgttgggatttaactttctgttatatgtcagactcacttaaaaattaaagttagaaaaaggtgaaatggagaaatgacaattttcttttcttttcttttctttttttgagatggagtctcgctctgtcgcccaggctggagcgcagtgggctcagtgcagcctccacctcccccaggttcaagc

SEQ ID NO: 404747 - DNA, 201 bp, Homo sapiens
agtcaccttatggaggccaagggcctagcggagtcaccctgcccacactagacgttgcttagagttcagcttgaagccatgtgatgtgggtcactgcccaggaggacttttttctagtgctgtggcctggaggactttccctctagcctctcatgcaggtgtactgtgtgatgtggtgggtctcttttctaacaggaagcc

SEQ ID NO: 404748 - DNA, 201 bp, Homo sapiens
aggctccttgtagcattttggggtgactcttgggttttgccttcttgctagattgtgcttgagctctcccttaatcatctcttatgtggggtttataaggsccttttctatctgctgtttatatgaccttcacaggaagcactgcgaaaatgacaccagtttacagattaagaaccgggggctcaagaatgttaacgggcc

SEQ ID NO: 404749 - DNA, 201 bp, Homo sapiens
gaattgctggattggaaggtagatgtgtttgcaatcatgatagaagctacaaatcgtccccgtaggagtcacaccgtggcacgcgctcaagaatagcgacrtgtgagaaaactgttccccacagccttgccaacagtttgttattaaagtttagatttttgtcagttttctaggcttaaaaaaaaaactcagtatagttgt

SEQ ID NO: 404750 - DNA, 201 bp, Homo sapiens; identical to SEQ ID NO: 90403

SEQ ID NO: 404751 - DNA, 201 bp, Homo sapiens
tggcctcaattgagcatgttgggatttaactttctgttatatgtcagactcacttaaaaattaaagttagaaaaaggtgaaatggagaaatgacaattttcttttcttttcttttctttttttgagatggagtctcgctctgtcgcccaggctggagcgcagtgggctcagtgcagcctccacctcccccaggttcaagca

SEQ ID NO: 404752 - DNA, 201 bp, Homo sapiens
aggtcagttcctgacactgtccctggcggcagactgccctcatgccccttggccaggggacgcctgcaccctcactcgagtgtgggagacttcctcctggyggggacctgctggaggcctgaagatgcggctgcctggagttaacagcaaggtcagccattcccagggttgctgcccctgtctctggcgagggactcagcc

SEQ ID NO: 404753 - DNA, 201 bp, Homo sapiens; identical to SEQ ID NO: 90404

SEQ ID NO: 404754 - DNA, 201 bp, Homo sapiens
gcctgcctcagcctcccaaagtgctgtgattacaggcgttagccaccacggccggccccaatgtgtgttttaaatctttgcacttaaatgtttttgatttytgcacattttgtgttgcacgtgtcataatgcattcaccgattcccttcattcccttgagtagttattgcgccctggattctgcgccaaggaagtgtgtgc

SEQ ID NO: 404755 - DNA, 201 bp, Homo sapiens
ccatctgctggcccctgctggtgtccaggagagagctgtgaccctcctttttccttaagtcctggagctgagagtgagaagccatggggtgcacgtactcrtctccacctgaggagcccgctctgagaaggtcagttcctgacactgtccctggcggcagactgccctcatgccccttggccaggggacgcctgcaccctc

SEQ ID NO: 404756 - DNA, 201 bp, Homo sapiens
gcatgggggcaccgggctccatgcctctggaggcctctggccctcggtggctgcacagaagggctctttctctctgctgagctgggcccagcccctccacrtgatttccagtgagtgtaaataattttaaataacctctggcccttggaataaagttctgttttctgtatttgcctggtattgtgtgagtagatctgggac

SEQ ID NO: 404757 - DNA, 201 bp, Homo sapiens
tcctgacctcaagtgatatgcctgcctcagcctcccaaagtgctgtgattacaggcgttagccaccacggccggccccaatgtgtgttttaaatctttgcrcttaaatgtttttgatttctgcacattttgtgttgcacgtgtcataatgcattcaccgattcccttcattcccttgagtagttattgcgccctggattct

SEQ ID NO: 404758 - DNA, 201 bp, Homo sapiens
gagggagactgaatctcgcctgacagcaatgaactgataccttccttccctataagcaggtgacagacaatatttaataaaatcaaaagaggctgggtgcratggcttacacctgtaatcccaacactttgggaggccaaggtgggtggatcacttgaggccaggagtttgagaccagccccagcaacatggtgagaccct

SEQ ID NO: 404759 - DNA, 201 bp, Homo sapiens
ggaaggcccagcctcaatccttcttgctcccgtgccgctgactgtgaaacttgtggtgcacaaccctcagggtggtgaagaaattgccgaggaaaaggagraggaagggaaagccgcacataagcacctgccggaggaatagggtgagggctggacatgggcctggccccccatccatcctgtccagggaccccggctcac

SEQ ID NO: 404760 - DNA, 201 bp, Homo sapiens
gcagaggcccaggagggagactgaatctcgcctgacagcaatgaactgataccttccttccctataagcaggtgacagacaatatttaataaaatcaaaaraggctgggtgcaatggcttacacctgtaatcccaacactttgggaggccaaggtgggtggatcacttgaggccaggagtttgagaccagccccagcaaca

SEQ ID NO: 404761 - DNA, 201 bp, Homo sapiens
tagagtaggcgctaataacttatttcttgtcagaggccaggtaataaatattttttaggctttgcatgccaagaagtaaaatctaggatgttatatataaygagaggcaacaagtttccatgttttttgttgatgaaattcaaataaggctggttgcggtggttcacacctgtaatcccagcactttgggaggccaaggcg

SEQ ID NO: 404762 - DNA, 201 bp, Homo sapiens
gaggtcgggccccaagactcggggtttgccgggcgcctcagttcaccgcggccgcctggctctctgcgtcggggtgggccctcgggcctgggcactgcgcrtctggcccgacgctcgggcggaaggcatggctcccaccccggccctcctccgcgtcgcccttcccctagagctgatctcccgcggcggcctgagggtcga

SEQ ID NO: 404763 - DNA, 201 bp, Homo sapiens
tacgagctggcgcagtacgcctcggagccctcggagcaggagctgctgcgcaagatggcctcctcctccggcgagggcaaggtgcgccccctcagcccccrcaacctccgccccgtcaccccgccgttttccgagctccgtgggccccaatcagccccatctcacccccgtgtctcttaggagctgtacctgagctgggtg

SEQ ID NO: 404764 - DNA, 201 bp, Homo sapiens
acgtgctgtacgagctggcgcagtacgcctcggagccctcggagcaggagctgctgcgcaagatggcctcctcctccggcgagggcaaggtgcgccccctyagcccccgcaacctccgccccgtcaccccgccgttttccgagctccgtgggccccaatcagccccatctcacccccgtgtctcttaggagctgtacctga

SEQ ID NO: 404765 - DNA, 201 bp, Homo sapiens
ctagtcgtggacacctgcagcagacgtatgttcactgcgtgtttctgggctcccacacatttctaagccctcttgaagttaacttcgggtaatggcctgtragaggaagtcacgtatgtcacttctggatggaagcatttaagagccagggccaggccctccagcaatcttcttcccatcaggacggcccggaagttgaac

SEQ ID NO: 404766 - DNA, 201 bp, Homo sapiens
tagctgggattacagagcatgcaccaccatgcccagctactttttgtatttttagtttcaccatgttggccaggctggtcttgaactcctgacctcaggtsatcttcccactttggcctcccaaagtgctgggataacaggtgtgagccaccgcgcccggcctcaatacacatgtgattgccttgaatgcatagcaatgac

SEQ ID NO: 404767 - DNA, 201 bp, Homo sapiens
tcaccttatggaggccaagggcctagcggagtcaccctgcccacactagacgttgcttagagttcagcttgaagccatgtgatgtgggtcactgcccaggaggacttttttctagtgctgtggcctggaggactttccctctagcctctcatgcaggtgtactgtgtgatgtggtgggtctcttttctaacaggaagcccc

SEQ ID NO: 404768 - DNA, 201 bp, Homo sapiens
gccacccagtcaaagtaggcacttttggcaaaggaggagcagagggaaggaaaagagctcaggtttaaacgactggaatcattcctacatgattcctggcrgcagaaacatgacaaggtgtgtctcagacgactagaagtaaaacctcacaccttggaatcgccagataaacattccttggcctttgttgtacgcgtcgaa

SEQ ID NO: 404769 - DNA, 201 bp, Homo sapiens
aaggttcactgtaatctccacctcccaggctcaggcagtcttcccacctcagcctcccgagtagctgggactaaaggtgtgcaccactatgcccagctaatttttttttttttttttttgaagcagaatcttgttctttcaaccagtctggagtacagcggtgcgatctcggctcactgcaacctctgcctcccaggctca

SEQ ID NO: 404770 - DNA, 201 bp, Homo sapiens
taaaaagtgtggcagtatcaggcccagcgtggtggctgacacctgtaatcccagcactctgggaggccaaagcaggtggatcacatgaggccaggagttcragaccagcctggccaacatggcaaaaccctgtctctacaaaaagtacaaaaattagctgggcatggtggtgcgtgcctgtaatcccagctactcgggagg

SEQ ID NO: 404771 - DNA, 201 bp, Homo sapiens
acatggcaaaaccctgtctctacaaaaagtacaaaaattagctgggcatggtggtgcgtgcctgtaatcccagctactcgggaggctgaggcaggagaatygcttgaatccaggaggtggaagttgcagtgagctgagatcacgctactgcattccagcctgggcgatgaagtgagaccaaaaaaaaaaaggcagtatcaa

SEQ ID NO: 404772 - DNA, 201 bp, Homo sapiens
ggcgtgccctcttggtgatggaatttgtatttttgcctcccatggtgcagagagcgtcccatttccatctgggtccctaccttagtgcggggccgcctgtsggagggaagcttctcagagaatggccgttgaattaaccaaggctaaatctgtatgtgtggctgcctctagggaaacctgtggcctccaggctgggtttgg

SEQ ID NO: 404773 - DNA, 201 bp, Homo sapiens
gtgagctgagatcacgctactgcattccagcctgggcgatgaagtgagaccaaaaaaaaaaaggcagtatcaaataaaaacttagacttacagcttctttaaaaaaaaaaaaaaaatagaggatctggtcatactggacccacagtgatgcccaccagctgtggagcagctgagcagcggccccattctgcacgaggcctg

SEQ ID NO: 404774 - DNA, 201 bp, Homo sapiens
tgggggaagacagggaccagacttaatttaatgtgattgtgtggcgccctggcagtgggatcagtgtggcttcctttatggagtgcagccctgccatagcmacctgcaggctgtcttctagagcctagaagagctttgttccgcagacatgacttcctttttttttttaatgggaaacggggagggcgtggggagaagggc

SEQ ID NO: 404775 - DNA, 201 bp, Homo sapiens
tgagctgagatcacgctactgcattccagcctgggcgatgaagtgagaccaaaaaaaaaaaggcagtatcaaataaaaacttagacttacagcttctttaaaaaaaaaaaaaaaatagaggatctggtcatactggacccacagtgatgcccaccagctgtggagcagctgagcagcggccccattctgcacgaggcctgt

SEQ ID NO: 404776 - DNA, 201 bp, Homo sapiens
acagaacatcaccactgcaaacggagcccaccttgccaggcatttccccaactgccctgatgggaggggaaggtgtgtctttcatggcacacaggatgctycccgctgacatggacccagtgtcttaagctctgtttgcccgcaattcttttgtgtgggggaagacagggaccagacttaatttaatgtgattgtgtggcg

SEQ ID NO: 404777 - DNA, 201 bp, Homo sapiens
gagctgagatcacgctactgcattccagcctgggcgatgaagtgagaccaaaaaaaaaaaggcagtatcaaataaaaacttagacttacagcttctttaaaaaaaaaaaaaaaatagaggatctggtcatactggacccacagtgatgcccaccagctgtggagcagctgagcagcggccccattctgcacgaggcctgtg

SEQ ID NO: 404778 - DNA, 201 bp, Homo sapiens
aacttggcagtagacgctaggttctgaaagggagctggtccaaagcagcttccccatgtgttgctaagggcaggggacagtctcaggagaaatcgagtccrctgcagaaaatccaaccggatttgcagtttccagaaatgttcctcagcgtcgcctgtgacgggaacaaaatgaaccgcacatctcggttcatctcggtcc

SEQ ID NO: 404779 - DNA, 201 bp, Homo sapiens
gatgaagaaaacggtgagtttcctgcatgtctttactcttctcaggaagcctcggccccgatgggcatgtaatcaagtctagcagacggctggcgtcaccrcatagaggatgtcccggtggccaggagagggaacgcagcccggctcgcttgggagtcattcttgcctaaccaaagccctgaagcagctctgctgttgctg

SEQ ID NO: 404780 - DNA, 201 bp, Homo sapiens
gaggatgatccttggtgaccagctccatattgctttgtggagaagaaacctgagtcctgggaggtcaagtaacccgttcagactcccacaaccagagcctscggcatctgtactgcccagtcagtacagagctccggtaactaggtgcacttcagttatctagagtaggcgctaataacttatttcttgtcagaggccagg

SEQ ID NO: 404781 - DNA, 201 bp, Homo sapiens
cagtatcaaataaaaacttagacttacagcttctttaaaaaaaaaaaaaaaatagaggatctggtcatactggacccacagtgatgcccaccagctgtggrgcagctgagcagcggccccattctgcacgaggcctgtgcgctgcattcactctgaccctccagcccgctcaggctgctgtgctcatgttgcctctactgg

SEQ ID NO: 404782 - DNA, 201 bp, Homo sapiens
gcagctgccctccccacgtgttcatcagagtccctgtccgcagagacagctgctggcttctgtctaagctccagcaaaccactttctgttttcaccaaagrctggcgtttccaaccattagccccatgccacaaggctctgaaggtcaagaaatctgggtccgcctagcagagcccactctccgtcctgccagagcaggct

SEQ ID NO: 404783 - DNA, 201 bp, Homo sapiens
ccccggcaccggggtggcacccttcataggcttcatccaggagcgggcctggctgcgacagcagggtgagtggggtcccatgggggagagggggtgacgaytgggagccccgcgctcaccccggcccctgccacgcaggcaaggaggtgggggagacgctgctgtactacggctgccgccgctcagatgaggactacctgt

SEQ ID NO: 404784 - DNA, 201 bp, Homo sapiens
gccctggagctttcacaggcctggagttgaattaccgcttcacccaccctgagcctcactgccttgtcaaggtggatagaaacccttgcgcactgcacagsgtggtgaggattaaacaaaataaaatagaaagcttcttgaatgctagccagcatgcagtaggcactcagtaagaagtcattcccttcgcctgttttgtct

SEQ ID NO: 404785 - DNA, 201 bp, Homo sapiens
tggtctcgaacctctggcctcagcacttctccagcctcggcctcccaaagtgctgagattataggcgtgagccactatgcctgtttctcttgtgacaggtrttggggactactgtgccctagagccactttctgagtgttgcagtttgtctttgatgttcaatgtggagctcatttggaattctattaaagaatccttagt

SEQ ID NO: 404786 - DNA, 201 bp, Homo sapiens
tggtcaaggctgacgttagcacatgagagctgggattccagcctggggcttcctgcaccacgcttttgctccctcggacccctagctcttgtcatggccaycccagcccacccctcctttccatcccctttgattgcacacaatagcagagccactttgtgccagatcagatgatcttactgtctgagggtatggcctttt

SEQ ID NO: 404787 - DNA, 201 bp, Homo sapiens
ggtggcacttgtctgaaatggtcctaggaaccatgggaagagatggggaggtgttttaaaaggtcagggctatgtgactagctcagatcagtgttgtgtgttttttttttttttagacagagtctcactctgtcacccaggctggagtgcagtggtgtgatcttggctcactgcaacctctgtctcctgggttcaagcaat

SEQ ID NO: 404788 - DNA, 201 bp, Homo sapiens
gtctcgaattctggggttcaagtggtcctcctgctttgacctcctaaagtgctgagattacaggtgtgagccaccgttcctggctttcttatttcttcttyttttttttttttttttttctgatggaagctcttgaagttataggacctttcatggttccagagaggctggccgcccctacaagagcttcgatgtccttgt

SEQ ID NO: 404789 - DNA, 201 bp, Homo sapiens
ctgggtgccccagggtgcacagtcctgagctttggggatggggtggggtcggggcgtgcctggcaccaggtaccgttgccacatgggcctcccctgagccrctccccctctcctctcctcggcccagcttggaggaggacttcatcacctggcgagagcagttctggccggccgtgtgtgaacactttggggtggaagcca

SEQ ID NO: 404790 - DNA, 201 bp, Homo sapiens
tgcacgcgcggctcgagtgggcggggcggcggcccaatggccacgcccccacccccgcggccggcgaaggcggtggtagcgcctcagtggtgtgggcctgmgccctgcccaggtgcccgcagagagcagccgggctgccagcggtgagtgctatctttcgcggcgacggcggggtgggtgaggtcgggccccaagactcgg

SEQ ID NO: 404791 - DNA, 201 bp, Homo sapiens
tgggtttgtataattcccttataacaagatccagcttccacccgaggcaacagagtgaacaacaacaacaaaaaaagaggtgacctgggtgcttttactascctacattcagatgtgggagcaaagaaatgacttaaagttggagtttatatttaaaagggaagcggaatgtaagtttggaaaatttgcaggctggccatg

SEQ ID NO: 404792 - DNA, 201 bp, Homo sapiens
caccttatggaggccaagggcctagcggagtcaccctgcccacactagacgttgcttagagttcagcttgaagccatgtgatgtgggtcactgcccaggaggacttttttctagtgctgtggcctggaggactttccctctagcctctcatgcaggtgtactgtgtgatgtggtgggtctcttttctaacaggaagcccca

SEQ ID NO: 404793 - DNA, 201 bp, Homo sapiens
accttatggaggccaagggcctagcggagtcaccctgcccacactagacgttgcttagagttcagcttgaagccatgtgatgtgggtcactgcccaggaggacttttttctagtgctgtggcctggaggactttccctctagcctctcatgcaggtgtactgtgtgatgtggtgggtctcttttctaacaggaagccccag

SEQ ID NO: 404794 - DNA, 201 bp, Homo sapiens
ttcaagtgattctcctgcctcagcttcccgagtagctgggattataggtgcgcggcaccgcgcccagctaatttttgtatttttagtagagacagggtttyactgtgttggccaggctggtctcgaactcctgacctcaggcgatctgcctgcctcggcctcccaaagtgctgggattacagcaggcgtgagccaccacgc

SEQ ID NO: 404795 - DNA, 201 bp, Homo sapiens
ttatggaggccaagggcctagcggagtcaccctgcccacactagacgttgcttagagttcagcttgaagccatgtgatgtgggtcactgcccaggaggacwtttttctagtgctgtggcctggaggactttccctctagcctctcatgcaggtgtactgtgtgatgtggtgggtctcttttctaacaggaagccccagtgg

SEQ ID NO: 404796 - DNA, 201 bp, Homo sapiens
tatggaggccaagggcctagcggagtcaccctgcccacactagacgttgcttagagttcagcttgaagccatgtgatgtgggtcactgcccaggaggacttttttctagtgctgtggcctggaggactttccctctagcctctcatgcaggtgtactgtgtgatgtggtgggtctcttttctaacaggaagccccagtggg

SEQ ID NO: 404797 - DNA, 201 bp, Homo sapiens
atgtccttgtgctttagggaggagccagagaaacagaggtcaagctctggcactagcaccgtgtgtggcctcaattgagcatgttgggatttaactttctrttatatgtcagactcacttaaaaattaaagttagaaaaaggtgaaatggagaaatgacaattttcttttcttttcttttctttttttgagatggagtctc

SEQ ID NO: 404798 - DNA, 201 bp, Homo sapiens
atatcctgtgttgtctaatcatagagtttctttacattttgccgttaatatcttttacatcagaaaaaatatgtttttttcctggtccaagacctcagagkgtgtgtgtgtgtgtgtgtgtgtgtgtgtgtgtgtgtgtgtgtcttagatcactcagtctttgtttatctttcatggccttaacatttttgaaaatgtgag

SEQ ID NO: 404799 - DNA, 201 bp, Homo sapiens
atggaggccaagggcctagcggagtcaccctgcccacactagacgttgcttagagttcagcttgaagccatgtgatgtgggtcactgcccaggaggacttttttctagtgctgtggcctggaggactttccctctagcctctcatgcaggtgtactgtgtgatgtggtgggtctcttttctaacaggaagccccagtgggt

SEQ ID NO: 404800 - DNA, 201 bp, Homo sapiens
taggtagatttgaaatgaaacaacccagggatattcctgaaaacagcagcattgaccgcagccaatgtaaatcaggtgtggatcgtcctgggtagtaggartttataaatgccacagaggatgtttgctgccagacatacctgaattttaggacctgctgttggttaactctgggttgatccacccttaaccccttgaaaa

SEQ ID NO: 404801 - DNA, 201 bp, Homo sapiens
tggaggccaagggcctagcggagtcaccctgcccacactagacgttgcttagagttcagcttgaagccatgtgatgtgggtcactgcccaggaggacttttttctagtgctgtggcctggaggactttccctctagcctctcatgcaggtgtactgtgtgatgtggtgggtctcttttctaacaggaagccccagtgggtg

SEQ ID NO: 404802 - DNA, 201 bp, Homo sapiens
ttcgctgagcagatagcttattataaaaagtatttgtacaacatccgcatttcagagaatgggatgctagctgccagttgcgtggtggtgtggaaacttakgagtgatcttaattttccaaaattcttcaggtctagcacttgaagaaataataggtagatttgaaatgaaacaacccagggatattcctgaaaacagcag

SEQ ID NO: 404803 - DNA, 201 bp, Homo sapiens
ggaggccaagggcctagcggagtcaccctgcccacactagacgttgcttagagttcagcttgaagccatgtgatgtgggtcactgcccaggaggacttttttctagtgctgtggcctggaggactttccctctagcctctcatgcaggtgtactgtgtgatgtggtgggtctcttttctaacaggaagccccagtgggtgc

SEQ ID NO: 404804 - DNA, 201 bp, Homo sapiens
ctggggagatgtccaacagggtgttgaaaagatggcacagagtatcagatatctgggtgaatttctccacagctctctctctgggtgagtgtggagttcaktcccttctttggacaggtattgtgccccaccctgagggctactgcattcatccaacctgttggagggactggttcctggacataggaaacctggcacctg

SEQ ID NO: 404805 - DNA, 201 bp, Homo sapiens
ctctgaccctccagcccgctcaggctgctgtgctcatgttgcctctactggccctgagaagctctgcagtgccccctgcacctgtgctttgctcctggaaygctagagtgctttaaagaaaaataaagcttcttatggaacatttcaaacaccagagtgtagggcacaggagagtggaccccatacgcctccagcccccag

SEQ ID NO: 404806 - DNA, 201 bp, Homo sapiens
accgcatggcgtgccctcttggtgatggaatttgtatttttgcctcccatggtgcagagagcgtcccatttccatctgggtccctaccttagtgcggggcygcctgtcggagggaagcttctcagagaatggccgttgaattaaccaaggctaaatctgtatgtgtggctgcctctagggaaacctgtggcctccaggctg

SEQ ID NO: 404807 - DNA, 201 bp, Homo sapiens
aaggggtatggatttttttccccagctttattgaggtataaatgacaaaaattatatatatttatcagagcatctaagtttttttctttttctttctttcttttttttttttgagatggagtcttactctgtggcccaggctggagttcagtggcacaatcttggctcactgcaacctctgcctcctgggtccaagtgatt

SEQ ID NO: 404808 - DNA, 201 bp, Homo sapiens
ttttttttaaagacatggtctcgctctgttgcccaggctgggtcttaacctcctggcctcaagcagtctccctgcctcagccttgcaaagttctgagatcrctcactgtgtaggatccaaagtcccacaggatccagggctcctgtgggctctctctcctgtgggcctggcagctttgctcacccttatggaacaacaccg

SEQ ID NO: 404809 - DNA, 201 bp, Homo sapiens
ggatcagtgtggcttcctttatggagtgcagccctgccatagcaacctgcaggctgtcttctagagcctagaagagctttgttccgcagacatgacttcctttttttttttaatgggaaacggggagggcgtggggagaagggctctgatataaacagttaccaaggagacccgagtcggggttggaaaggttttctcctt

SEQ ID NO: 404810 - DNA, 201 bp, Homo sapiens
ctaaatcccacatcagtgtccctggctaccggtatttcagtgagcacaggtgatttctgttatagccacagagcagtagggagtaatagggcttagtgtgrggaaggtatgtggcccagggctatatcaggaactctcaccatgatttctggtggcttctagaattggcatttatttattttgttttagagacacggtctc

SEQ ID NO: 404811 - DNA, 201 bp, Homo sapiens
ttttattgccaaataatgttttaatatatggattcttacttatttttccgtgacttttaggatcaatttgttgaggaaaaaaaagctgttcagatttttttttttttttttttttttggtagagactgggtctcactctgttgcccaggctgttctcaaactcctgggcttaagcagtcctcctggtgtggcctcccaggg

SEQ ID NO: 404812 - DNA, 201 bp, Homo sapiens
gagccgagatcgcaccactgcactccagcctaggcgacaagagcaaaactctgtctcaagaaaaaaaaaaacaatttttaatgatttaacaatgatttgtrgaaaattcaggaactttaaaaagtataagaacatttattgtaatccctaagttttttttggtggtggttttgttttgagactcagtctcactcctgtcac

SEQ ID NO: 404813 - DNA, 201 bp, Homo sapiens
agggcctcggcttggcggtggagctcacacggccctccccacaggtccaccccaactctgtgcacatctgtgcggtggttgtggagtacgagaccaaggcyggccgcatcaacaagggcgtggccaccaactggctgcgggccaaggagcctgccggggagaacggcggccgtgcgctggtgcccatgttcgtgcgcaagt

SEQ ID NO: 404814 - DNA, 201 bp, Homo sapiens
gtgttagccaggatggtctcgatctcctgacctcgtgatccacccgccttggcctcccaaagtgctgggattacaggcatgggccaccgtgcccggacgayctgacttactttttaaagcatccccctgtctgctgtgtggggaatggcccgtccatcagaattctcttgcggtgattacgtaggtgcagatgtaccgcta

SEQ ID NO: 404815 - DNA, 201 bp, Homo sapiens
tgggttgcctcatttctgctctcagagaggttatgggatgtgcccagggcacaggctggagagacaggctccgccagctctaagagagaaggaattggtgyggggatcagaccaagtcctgcaggaggggtgttgggcaggttcttaaaggtagagccacaccctgaagctgaaaggactttagagcagagggcccgatat

SEQ ID NO: 404816 - DNA, 201 bp, Homo sapiens
cctgggccctgaagctccaaggacaaaagactcctgtcccttttcccttcctctccattctgggtctcccaccaccaccaagtcctgtaagtttttagtcttttttttttttttttttgagacagattcttgctctgttgttcagagtgcagtgacacaatctcagctcactgcaacctctgcctcccaggttcaagtgat

SEQ ID NO: 404817 - DNA, 201 bp, Homo sapiens
  misc_feature (1)...(201): n = A,T,C or G
ttgcccaactccctggagccttcctgatgctctgggtttatgtcgctgggtgccccagggtgcacagtcctgagctttggggatggggtggggtcggggcntgcctggcaccaggtaccgttgccacatgggcctcccctgagccgctccccctctcctctcctcggcccagcttggaggaggacttcatcacctggcgag

SEQ ID NO: 404818 - DNA, 201 bp, Homo sapiens
  misc_feature (1)...(201): n = A,T,C or G
gtggcttggggcagacggctctatggccactggtgcaccccaggctcagtctgccgtgtatccccatatccccacagggcccttctcaccagaccccgtgncccgagtgggtgtgagtgtccacgacctgtccacggcccggccccaggagactggcactcgcccagtttgtactgagctcacttagccaccttactctgc

SEQ ID NO: 404819 - DNA, 201 bp, Homo sapiens
agggtttcaccatgttggccaggctggtctcaaacgcctgacctcaggtgatccacctgcctcggcctcccaaagtgctgggattacaggtgtgagccacygtgcccagcccatctcagggttttgatcagggaggggacatgacctgacttacttttttttttttttgagatggaatctcgctctgtcgcccaggctgga

SEQ ID NO: 404820 - DNA, 201 bp, Homo sapiens
gggccccggcaccggggtggcacccttcataggcttcatccaggagcgggcctggctgcgacagcagggtgagtggggtcccatgggggagagggggtgaygactgggagccccgcgctcaccccggcccctgccacgcaggcaaggaggtgggggagacgctgctgtactacggctgccgccgctcagatgaggactacc

SEQ ID NO: 404821 - DNA, 201 bp, Homo sapiens
ccaggggagaggtgatgtttgagttgggtcttggaggattgctaggagttctctgagcccacccaggcacaccagctctggggggcatgtagggtgtagaytgcatgaggctgaggtcgcgtggtggcacttgtctgaaatggtcctaggaaccatgggaagagatggggaggtgttttaaaaggtcagggctatgtgact

SEQ ID NO: 404822 - DNA, 201 bp, Homo sapiens
aatcccagcacttgggaggccaaggcaggtggatcagttgagatcgggagtttgacatcagcctggacaacgtggtgaaaccccatctctacaaaaaaaamaaaaaaacaaaaaaaccaaaaattagccaggcatgttggcgggtgcctgtaattccagctacctgggaggctgaggcaggagaattgcttgaacctggga

SEQ ID NO: 404823 - DNA, 201 bp, Homo sapiens
ccctgtctctaaaaacaaacgcgcgccctccgccgtcaggctggatggagggaacccagggagacgacttgggcctgaagcctcgccaatttcaggtgagsaaacagggccgtggaggagacaatgtggcgatcacaagcaagcggcggcccgaaggaggaggctagaccggcgggcgcacagccacagttctgcagtgat

SEQ ID NO: 404824 - DNA, 201 bp, Homo sapiens
cccatggcgggtggggtaggggatcctaacttcttcagggcgagggccagctcctggagccgcttcttctgccgcgtgatggagctggtgcaattgttctraagtttggtcagctcctccagcttcaggcggtagagccgatgggtctcctgggggccggaggggagaggctcaggccagttggggagctactgagccaga

SEQ ID NO: 404825 - DNA, 201 bp, Homo sapiens
ggagagggggtgacgactgggagccccgcgctcaccccggcccctgccacgcaggcaaggaggtgggggagacgctgctgtactacggctgccgccgctcrgatgaggactacctgtaccgggaggagctggcgcagttccacagggacggtgcgctcacccagctcaacgtggccttctcccgggagcagtcccacaagg

SEQ ID NO: 404826 - DNA, 201 bp, Homo sapiens
ctggggcacctgttgctgcagagctggcccaaggtgtcaccccctcccgccgcagccacccatccccaggaggcggccgcctaccccaagtcctgcctgtstcttccctgcagaggagtccaacaagaagcacccattcccgtgccctacgtcctaccgcacggccctcacctactacctggacatcaccaacccgccgcg

SEQ ID NO: 404827 - DNA, 201 bp, Homo sapiens
agtgactgcatccctgtctctccaagattgatttccataagccacacggaaaagtcattctccagattttagggtcctgcggccagaattacttcctgcgrttacgcttggctgtgtttaacaccagtctcagactccaggggcccgcagccaggtttgagtggggacctgccaggtcaggtctgagccgagggaactcca

SEQ ID NO: 404828 - DNA, 201 bp, Homo sapiens
  misc_feature (1)...(201): n = A,T,C or G
ggccccagggccagggaggcatcagagagcataggccttgtttccagcaccagctggggcacctgttgctgcagagctggcccaaggtgtcaccccctccngccgcagccacccatccccaggaggcggccgcctaccccaagtcctgcctgtgtcttccctgcagaggagtccaacaagaagcacccattcccgtgccct

SEQ ID NO: 404829 - DNA, 201 bp, Homo sapiens
ccctgaagctgaaaggactttagagcagagggcccgatataggaagggcagatcagctggaatccagcccatcctgtccagggctggtacacggggcattsctggtgtggaatagtacttttgataaaaaagcgtagtagtactcaagataaagagaccagggtccaggacccagctcctgaactggcccttgttccctca

SEQ ID NO: 404830 - DNA, 201 bp, Homo sapiens
gacttcctgtctggttggaggccccagacttggccccagggccagggaggcatcagagagcataggccttgtttccagcaccagctggggcacctgttgcygcagagctggcccaaggtgtcaccccctcccgccgcagccacccatccccaggaggcggccgcctaccccaagtcctgcctgtgtcttccctgcagagga

SEQ ID NO: 404831 - DNA, 201 bp, Homo sapiens
ccagatgagcatttcttatctgaaaatctgaaatgctccaatgattcttccctttgaggatcatgttgacgctcaaaaagtttcagatttcagattttagrttagggacattcagcctgtagatgttattttacagagcaggaagttgggtgtagtggttcacacttgtgatcccagctctttgggaggccaaggcaggag

SEQ ID NO: 404832 - DNA, 201 bp, Homo sapiens
accagctgccctgctttctgtaggcctgccccagcctggctggagcgagaagccctgcatgtcggtggctttccggagtgcaagtttctctcttgtccacrgtgtagtccaggacgtgtgggggtgggggagctgtgctcctcatttggggaccagccaccttccagcctgtggcaccgtcagcttgggcctcacagttct

SEQ ID NO: 404833 - DNA, 201 bp, Homo sapiens
aaacgcaagcaacgctggggaaggaatgaccaatacggtgccctctgaggcctcagcccaggggccatctggcttgtctgtctcattagtaccattgttcyctgtcagcttgtggaagagctgatttgaaaccacctgttggaccgaaggaagccactgaccaatacctgttctgtgggtgaagctgtcgcccagagcacc

SEQ ID NO: 404834 - DNA, 201 bp, Homo sapiens
tgaggggaccggtcacttggggagttagaagggaggagggtgagggacagggagcgcgagtttcttggctgctgccttgtgatggataacagctagacagmtaggggagctcctgtgtcaccatggcactcctgactggttccagtggggccctgactgtctgctgcctcatgactctgtgggacaagtccttccagaatc

SEQ ID NO: 404835 - DNA, 201 bp, Homo sapiens
ccgcgcccggcctcaatacacatgtgattgccttgaatgcatagcaatgaccgaacatcaaggtgaaacgcaagcaacgctggggaaggaatgaccaatayggtgccctctgaggcctcagcccaggggccatctggcttgtctgtctcattagtaccattgttccctgtcagcttgtggaagagctgatttgaaaccacc

SEQ ID NO: 404836 - DNA, 201 bp, Homo sapiens
agcggagccctcgtgcgggttccaggcctgctttggtgggagtgctcagtacttttagccacacagagccgtggcctgcaaggctttcggagtacatctcyagcacatctgagaatccggaagcaactcagagtttctggaatggatttcacaaagtctgtgaataagaaggccccacaggccctactcaacagctttttt

SEQ ID NO: 404837 - DNA, 201 bp, Homo sapiens
gtgccggctgccctcctggcggccgccacatctcccaaaccaaacccaccctccccagctgctccactcccctctccttcgaggtcttggtgacgggcacyaccccacagccctctccaggctgcatttgcagttgatgaacagtttagttagatatcagtgtgcaccggggctgtgcggtgcctgggagctttggaatga

SEQ ID NO: 404838 - DNA, 201 bp, Homo sapiens
tgagacaggacctcactctgttgcctagactacagtgtagtggtgtgattatggctcaccgcaacctcaacctcctgggctcaggtgatcctcctacctcrgcctgccacatagctgggactacaggtgcgcaccgtcacacctggctaacttttgtattttgtggtagaagtggggttttgccatgttacccaggttggt

SEQ ID NO: 404839 - DNA, 201 bp, Homo sapiens
atgaacagtttagttagatatcagtgtgcaccggggctgtgcggtgcctgggagctttggaatgaggttcccagggtggccccagacctgcatcagctcargaggctgcattctgatggctcttttgtgccaagcttcactttcctctagaaacacatcctctccgctccagcctaacacgggtgaccttgtcctgcccac

SEQ ID NO: 404840 - DNA, 201 bp, Homo sapiens
ggccttccccatctggtgcgggttgaaccttgaacaggctcagtcatggccggggcgcggtcctgtccctgtttctgcaggccgacctgagcagcctgccrgagatcgacaacgccctggtggttttctgcatggccacctacggtgagggagaccccaccgacaatgcccaggacttctacgactggctgcaggagacag

SEQ ID NO: 404841 - DNA, 201 bp, Homo sapiens
tttctctctgctgagctgggcccagcccctccacgtgatttccagtgagtgtaaataattttaaataacctctggcccttggaataaagttctgttttctrtatttgcctggtattgtgtgagtagatctgggacctccacctgcatcaacttaactaactcagaccccaggaacccatgtggtggggccacccagccctc

SEQ ID NO: 404842 - DNA, 201 bp, Homo sapiens
tgccagggcactgcagcaaactcacaagtgatcattctcaatgcggcggacgctcaagtctgttgaactccatgcgaagtgctagcttgggacagttcacrgttccaacgtgagatccttgctgcattccttcttaggattttacatctttgcgaagctgggtttgcagtggttgttcagacctaactatacgtggaactg

SEQ ID NO: 404843 - DNA, 201 bp, Homo sapiens
tcttgttccttttgctgaaggtataaagaagaaactcagagattaaagactctttcagggcagaaggctcacacaggcttccagaacctcctcggagcgaytgtagggactgcctgacccggaagagagttgtcagtcaagaccgccagagttttcccatcagagtatttggcatagcagaggtggctcccaaactgtgcc

SEQ ID NO: 404844 - DNA, 201 bp, Homo sapiens
ctctgaggtttgggtgccaggtgggctggaagaggccctgggtgagtggggctggcctgcagaacgggacttggggccggggctgggcaagggcctcggcktggcggtggagctcacacggccctccccacaggtccaccccaactctgtgcacatctgtgcggtggttgtggagtacgagaccaaggccggccgcatcaa

SEQ ID NO: 404845 - DNA, 201 bp, Homo sapiens
gcaggagaattgcttgaatccgggaggcagaggttgcagtgagccgagatcgcaccactgcactccagcctgggtgacagagcgaggctctgtcccccggccccccccccccccgaaaaaaaaaaagtcatatcaaaaaagccaagttgaggccaggcacagtggctcacgcctgtaatcccagcactttgggaagccgaa

SEQ ID NO: 404846 - DNA, 201 bp, Homo sapiens
cctctgaggtttgggtgccaggtgggctggaagaggccctgggtgagtggggctggcctgcagaacgggacttggggccggggctgggcaagggcctcggyttggcggtggagctcacacggccctccccacaggtccaccccaactctgtgcacatctgtgcggtggttgtggagtacgagaccaaggccggccgcatca

SEQ ID NO: 404847 - DNA, 201 bp, Homo sapiens
catgtcacgtctgcctaccaggtgtcgttggtggaaggaccagttgagcatcttatgagggaactaggctggtgacatgggggttcccccacctccctccyggacggggcggctggccgggcggggggctgacccccccacctccctcccggacggggcggctggcggggcagaggggctcctcactgcccagtaggggcg

SEQ ID NO: 404848 - DNA, 201 bp, Homo sapiens
ctggcttgtgagattctcagcatctgtccagccccagtccccagaaccagtccgggaagccgctggggagggggcctctgaggtttgggtgccaggtgggstggaagaggccctgggtgagtggggctggcctgcagaacgggacttggggccggggctgggcaagggcctcggcttggcggtggagctcacacggccctc

SEQ ID NO: 404849 - DNA, 201 bp, Homo sapiens
cccacctccctcccggacggggcggctggccgggcggggggctgacccccccacctccctcccggacggggcggctggcggggcagaggggctcctcactkcccagtaggggcggccgggcagaggtgcccctcacctcccggatggggtggctggccgggcggggggctgacccccccacctccctcccggacggggcag

SEQ ID NO: 404850 - DNA, 201 bp, Homo sapiens
gtggctggccgggcggggggctgacccccccacctccctcccggacggggcagctggccgggcggggggctgacccccccacctccctcccggacggggcrgctggccgggcggggggctgacccccccacctccctcccggacggggcggctggccgggcggggggctgacccccccacctccctcccggacggggcggc

SEQ ID NO: 404851 - DNA, 201 bp, Homo sapiens
gactcagtcgggctggcttgtgagattctcagcatctgtccagccccagtccccagaaccagtccgggaagccgctggggagggggcctctgaggtttggrtgccaggtgggctggaagaggccctgggtgagtggggctggcctgcagaacgggacttggggccggggctgggcaagggcctcggcttggcggtggagct

SEQ ID NO: 404852 - DNA, 201 bp, Homo sapiens
ccacctccctcccggatggggcggctggccgggcaaaggggctcctcacttcccagtaggggcggctgggcagaggcgcccctcacctcccggacggggcrgctggccgggcggggggctgacccccccacctccctcccggacggagcggctggccgggcgggggctgacccccacctccctcccggacggggtggctgc

SEQ ID NO: 404853 - DNA, 201 bp, Homo sapiens
agaagatgctagtcttcaaagaacctctttactcttttactctttttctttttttttcgagacagagtctcattctatcgcccaggctggagtgcagtggyatgatcttggctcactgcaaccttcacctcctaggtgcaagtgattctcctgcctcagcagcctccagagtagctggaattacaggggtgcgccaccata

SEQ ID NO: 404854 - DNA, 201 bp, Homo sapiens
ataccatgaatccatagggaataggttccagcggctcaggctcttttccattggttctcacaaagtgtacttccctcaatggaacaggctggcacttcagktgaaccctttctctttgacttgcttcttttttgatcattttccttcacacatttcaggaaagatcttggttcttagagtgcttaatatgctcaatagaaa

SEQ ID NO: 404855 - DNA, 201 bp, Homo sapiens
  misc_feature (1)...(201): n = A,T,C or G
tgagccctgagttctctagtggagcaggatcatgttccttgaaatgaggttattttttgcctgagtgtgctgatggaatcatctgactgttgcacctgccnctccctgtagatcctccctgtctatgagcaaggatcccactttcagcccagcaccgtggagatggtggatggggagaccagcccacccaagctgctcacc

SEQ ID NO: 404856 - DNA, 201 bp, Homo sapiens
ggagcacatcgagaccatcaaagcccggatgtacgtgggcctcaccccagacaagcggttcctccctgggcacctgggcatgggacttgtggaaggtaagrgaggacagagcttgcagtgggtagtgggtggtgtcgcccaagtccctgagggtctcaggtgggccctcactgagctcgactctctccctgcaggttatga

SEQ ID NO: 404857 - DNA, 201 bp, Homo sapiens
ctcatcttctggcctcactaggttaaagttaaagtttaagcgcggtagccttcccccgaccatgcctctggagtttgtttgctgcatcggcggatgcgacracaccctgagggagatcctggacctgagattttcagggggcccccccagggctagccagccctctggccgcctgcaggctaaccagtccctgaacaggat

SEQ ID NO: 404858 - DNA, 201 bp, Homo sapiens
agtgagacgggggcggcgggaaggtggcagaggggaacgtgcttggacgaggggcgcgggacagtctgggagttgtagttccaggtcgctgtggggcgcgsgcctggcggaagtagctggagaaggcgggcggaagttccacgccaagatactggattcggtgctgaggcggcggctgcggcacgggaaaggctcagtgac

SEQ ID NO: 404859 - DNA, 201 bp, Homo sapiens
tgtcaagtcactgttgtgcaattctgttctcaccactcttattccactgtgaacttaagaaaactttggaacgagagactcgccagtgccaggctctggtkatctggactgactgtgatagagaaggcgaaaacatcgggtttgagattatccacgtgtgtaaggctggtaagtgctgctgctgctgctgactttctctac

SEQ ID NO: 404860 - DNA, 201 bp, Homo sapiens
tgctgggattacaggcgtgagccaccacgcccagccggcttcgttttttttaactaggtcataatcagaacctctcgaagtgtgcgtgcgcgcgcgcgcgygcgtgtgtgtgtgtgtgtatgtgtgttagagctgaatttcaggttttgtcatattggggaagttatattaaaccctctattctagaaactcgtttatggt

SEQ ID NO: 404861 - DNA, 201 bp, Homo sapiens; identical to SEQ ID NO: 90427

SEQ ID NO: 404862 - DNA, 201 bp, Homo sapiens
ccccagcctcccaaagtactgggattacaggcataagccaccacacccaaccactgcttggcctgttattttttattttttattttttgagatggagtttygctcttttttttttttaattttaattttatttttattttttttaattgatcattcttgggtgtttctcacagagggggatttggcagggtcacaggacaa

SEQ ID NO: 404863 - DNA, 201 bp, Homo sapiens
ttattttttattttttattttttgagatggagttttgctcttttttttttttaattttaattttatttttattttttttaattgatcattcttgggtgttyctcacagagggggatttggcagggtcacaggacaatagtggagggaaggtcagcagataaacaagtgaacaaaggtctctggttttcctaggcagaggac

SEQ ID NO: 404864 - DNA, 201 bp, Homo sapiens
actgcccttaattcattcaaccctgagtggatacagcacatgtttcagatagcacagggttgggggtaaggtcacagatcaacaggatcccaaggcagaakaatttttcttagtacagaacaaaatgaaaagtctcccacgtctacctctttctacacagacacggcaaccatccgatttctcaatcttttccccaccctt

SEQ ID NO: 404865 - DNA, 201 bp, Homo sapiens
gccaggggcccagttgccaggtgaccagatgcctggagtagctgaagcctgaagcgctgtgtgactcagccccgtacacccgcccattcgccccagactawaaataagacggtctctggggcgatcccaggccaaccgggtgacccgccacggccccagggccggtttcaatctcctcatcggtgactcggggatcaatac

SEQ ID NO: 404866 - DNA, 201 bp, Homo sapiens
cccccctttctattccacaaaacctccattgtcatcatggcccgttctcaatgagctgttgggtacacctcccagacagggtggtggccgggcagaggggmtcctcacttcccagtaggggcagccgggcagaggcgcccctcacctcccggacggggcggctggccgggcggggggctgacccccccacctccctcccgg

SEQ ID NO: 404867 - DNA, 201 bp, Homo sapiens
aggctgaggcaggagaatcaggcagcagtaccgtccagcttcagctcggcatcagagggagaccgtggagagagggagagggagaccgtggggagagggasagggacagggacagggacagggcgcagtttcgctcttgttgcctaggctggagtgcaatggtgcggtctcagctcaccacaacttctgcctcccgggttc

SEQ ID NO: 404868 - DNA, 201 bp, Homo sapiens
tgggatcttagatttcatctgcactgtttcccactgtccactcctgtgatgactggtgggggcttgtggtgggctgatagagggcctcacaggggacttgygtgggcttcctgatgcataaggaatggtggagagaggcctagggctaaagcagccctcactggactaaggagaagctggcatctggttgttaatgttttt

SEQ ID NO: 404869 - DNA, 201 bp, Homo sapiens
ggctgaggcaggagaatcaggcagcagtaccgtccagcttcagctcggcatcagagggagaccgtggagagagggagagggagaccgtggggagagggagmgggacagggacagggacagggcgcagtttcgctcttgttgcctaggctggagtgcaatggtgcggtctcagctcaccacaacttctgcctcccgggttca

SEQ ID NO: 404870 - DNA, 201 bp, Homo sapiens
taaacctttttctatctgtcatatcatgacatgtctctgagacacagcctttctgtttgtctctccttaatatagtaactcatgaccacaaagatggtatsgtagaattcaactggaaaaggcatcgactctttaaccacacggcttgcctagttctctatcagttgtgtgtggaggtaagaacccctaatgatctaggaa

SEQ ID NO: 404871 - DNA, 201 bp, Homo sapiens
agggcctgaggagcagtgtggcctcttctgtgcaggacattaggctaaggctaccagtgatgctcctgtccttgagaggtgatattctagggggagtttcrtactcctcttttcttcctagggagatgaacagcgactgtacgagtttattgttcgccatttcctggcttgctgctcccaggatgctcaggggcaggagac

SEQ ID NO: 404872 - DNA, 201 bp, Homo sapiens
ctgtatctggactctcctcccaagagttggttcggcaccagggcccatggtgagctcagtcttctgtctgccgtctgttctctgcaggaggcctgcggctyactgaccagctggttctcaaggtcacgcctgttgtgtgcatgtaagagtgttgtaggtgcctttgcagcgattgctggctgatgggtgtctgtctttgcc

SEQ ID NO: 404873 - DNA, 201 bp, Homo sapiens
ctggagtgcagtggcgtgatcttggttcactgcaacctccgtctcccgggctcaagcgagtctcctgcctcagcctcctgagtagctgggactataggtgmgcgccaccacacccagctaatttttgtatttttagtagagatggggtttcaccatgttggccagggtagtctcaatctattgaacttgtgatccgcccgc

SEQ ID NO: 404874 - DNA, 201 bp, Homo sapiens
cagagcttacagtgagccgagatcacgccactgcactccagcctggatgacagagcaagactccatgtgaaaaaaaaaaaaaatgtagatttctgggccasacgcggtggctcacgcctgtaatcacagcactttgggaggccaaggcaggcagatcacctgaggtcaggaatttgagaccagcctggccaacatggcaaa

SEQ ID NO: 404875 - DNA, 201 bp, Homo sapiens
ctaaaaatacaaaaattagccaggcatggcggtgggcacctgtagctgagattgtgccattgtactccagcctgggcaacaacagcaaaactctgtcttaaaacaaacaaacaaacaacaacaacaacaacaaaacagatctggctgggcacggtggctcatgcctgtaatcttagtactttgggaggccaaggcgggtgg

SEQ ID NO: 404876 - DNA, 201 bp, Homo sapiens
gaaatacagaggggtctcactatgttgcccaggctggtcttgaactcctggcctcaagagatcttcccacctcagcctcccaaagtgtggggattacaggygtgagccaccgcatctgggccagtcagagtttataaccctgccagattcatcctcaccagtggcctcctggcctggaggttttccacataccccttttct

SEQ ID NO: 404877 - DNA, 201 bp, Homo sapiens
atagctgctttgtgcttttgggatgtgagaaggctcatttttcccaatcaattcaatatgagtgcttgtgtatccagttaagtgtcatccagaaaagggartgttgtcctcgggcagctgaggaaaggctgccttagctgatggccaacagcggagagcatctactgcactcctatcatctgacatggcactttgtcccca

SEQ ID NO: 404878 - DNA, 201 bp, Homo sapiens; identical to SEQ ID NO: 90460

SEQ ID NO: 404879 - DNA, 201 bp, Homo sapiens
aaccatgaggattgctgagaagctctacactcaagggtaagtattttgggtttgggagtagaatttgaaccgtctttatcaggatgaaatatttgagaaayagagtttatgggttgggcacggtggctcacacctgtaatcccatcactttgggtggctgaggcaggcagatcacgaggtcaagagatcaagaccatcctg

SEQ ID NO: 404880 - DNA, 201 bp, Homo sapiens; identical to SEQ ID NO: 90471

SEQ ID NO: 404881 - DNA, 201 bp, Homo sapiens; identical to SEQ ID NO: 90434

SEQ ID NO: 404882 - DNA, 201 bp, Homo sapiens
agcattatgatcacaattttacttataagtgagaaaggtgagacccagacacatgaagtgggtattgctcagggtcccatagcaacagacaccaggatgartacataggccttcccagtcccatggccatgtgcccttgcagctgtcgtgacccttggcagaccataagcatcagcctcatttcttttttttttttttttt

SEQ ID NO: 404883 - DNA, 201 bp, Homo sapiens
ctgggattacaggcgtgagccaccacgcccagccggcttcgttttttttaactaggtcataatcagaacctctcgaagtgtgcgtgcgcgcgcgcgcgcgygtgtgtgtgtgtgtgtatgtgtgttagagctgaatttcaggttttgtcatattggggaagttatattaaaccctctattctagaaactcgtttatggttc

SEQ ID NO: 404884 - DNA, 201 bp, Homo sapiens
gttaacaacctaaaggttcctggatatggggtgatcactttataatttatgaggagttctctttttaataaaatatggtcccatctcagctcttcattacaaaaaaaaaaagctaatatacaatagtttgaggaaaatttaactgatgcaagaggcgtcagttatacaccatatcattagaatggtgattgtattcctgtg

SEQ ID NO: 404885 - DNA, 201 bp, Homo sapiens
cttacagtgagccgagatcacgccactgcactccagcctggatgacagagcaagactccatgtgaaaaaaaaaaaaaatgtagatttctgggccagacgcrgtggctcacgcctgtaatcacagcactttgggaggccaaggcaggcagatcacctgaggtcaggaatttgagaccagcctggccaacatggcaaaacccc

SEQ ID NO: 404886 - DNA, 201 bp, Homo sapiens
aggcgtgagccaccacgcccagccggcttcgttttttttaactaggtcataatcagaacctctcgaagtgtgcgtgcgcgcgcgcgcgcgcgtgtgtgtgygtgtgtatgtgtgttagagctgaatttcaggttttgtcatattggggaagttatattaaaccctctattctagaaactcgtttatggttctaaggggttg

SEQ ID NO: 404887 - DNA, 201 bp, Homo sapiens
gcgtgagccaccacgcccagccggcttcgttttttttaactaggtcataatcagaacctctcgaagtgtgcgtgcgcgcgcgcgcgcgcgtgtgtgtgtgygtgtatgtgtgttagagctgaatttcaggttttgtcatattggggaagttatattaaaccctctattctagaaactcgtttatggttctaaggggttgta

SEQ ID NO: 404888 - DNA, 201 bp, Homo sapiens; identical to SEQ ID NO: 90428

SEQ ID NO: 404889 - DNA, 201 bp, Homo sapiens
ggtctgcccacctcagcctcctgaagtgctgggattacagaccgtgagccaccatgcccggtttttttttttttttttttttgagtcagggtctcgctgcrttacccaggctggagtgcagtggcgcaatctcgtctcactgcaacctccgcctcctgggttcaagcgattctcatgcctcagtttcccaagtaactggcc

SEQ ID NO: 404890 - DNA, 201 bp, Homo sapiens
ggagtgggattgctggtttacttggtaactctacatttaacatttttaggaaccaccaaacttttctgaagtggctgtaccgtttttcatttccaccagcraggcactaggattccagtttatccacatccttactaacacttagtattatctctctttttgattttgccagtaggtctgaactgctatttcactggtttt

SEQ ID NO: 404891 - DNA, 201 bp, Homo sapiens
tagagacagggtttcagcatgttggccaggctggtctcgaactcctgacctcagatgatctgcccaccttggcctcccaaaatgctgggattacaggcatragccactgctcccagccttcactgcagttttaatttgcatttccttcatggcagagctacattttgaaaggtccctttggccacagcttaaagaatggtt

SEQ ID NO: 404892 - DNA, 201 bp, Homo sapiens
atgtcagtacttacaaggctgtgttaagggtgaggatttggtgaaaatggtcaggactatatagcacattgcctgatgtgttgtagatactcagcagataytacttttgttctctcctagttttagttctgaatggggcctgaaaatctcaactcccttttcgctttaaatatagtagatctgagtgggcaatttagcttc

SEQ ID NO: 404893 - DNA, 201 bp, Homo sapiens
gatgattgctacaccaggcttaggaaattattcacatattaaatacaacatccaagcttgggctacgtagcaagaccccatctctttaaaaaaaaaaaaawttttatttaaaaaaaaattttttttaagacagtctcgctgggttgcccaggctgaagtgcagtggcgcagtcttgactcactgcaacctccgccttctgg

SEQ ID NO: 404894 - DNA, 201 bp, Homo sapiens
agtgcagtggcacaatcttggctcactgcaacctctgactcccaggttcaagaggttctcctgcctcagcctcccgagtagctgggactacaggcgcgtgycaccatgcccagctaatttttgtatttttggtagagatggggtttcaccatgttggtcaggatggtctcaatctcttgattttgtgatccgcccgcctca

SEQ ID NO: 404895 - DNA, 201 bp, Homo sapiens
acagacaccaggatgagtacataggccttcccagtcccatggccatgtgcccttgcagctgtcgtgacccttggcagaccataagcatcagcctcatttctttttttttttttttttttttggagactgagttttgctcttgttgcccagactggagtgcaatggtgcaatcttggttcactgcaacttccacctcccagg

SEQ ID NO: 404896 - DNA, 201 bp, Homo sapiens
cagttctcctgcctcagcctcccaagtagctggaattacaggcatctgcctccacacccagctaatttgtttagtatttttagtaaagacggggtttcacwatgttggccaggctggtctcaaactcgtgacctcaggtgatctaccagcctcggcctcccaaagtgctaggattaacaggcaggagccatcacacctggt

SEQ ID NO: 404897 - DNA, 201 bp, Homo sapiens
ggaggataagaaaaagtttcataaaggaggtgccacgggagacataaagagctgtccaggaaaatatctcagataacaaaagtagatcctgaaatggtttyctggagaacttttctaagagcatgggtggaagttccctgctcatttttctttagttcccagggtcctaagacctgtttccagatcaaggatagtgggagt

SEQ ID NO: 404898 - DNA, 201 bp, Homo sapiens
aacttttctaagagcatgggtggaagttccctgctcatttttctttagttcccagggtcctaagacctgtttccagatcaaggatagtgggagtggagccrgggttgtgtgaatgctggctgacagctttacctgtttccagtgctagaagtcctggtgaccagccccaaggtttgtctacttctagacaatgaagtagac

SEQ ID NO: 404899 - DNA, 201 bp, Homo sapiens; identical to SEQ ID NO: 90426

SEQ ID NO: 404900 - DNA, 201 bp, Homo sapiens
ccccaagtaactgggattacaggcacacaccaccacacctggccaattgttgtatttttagtagagatggggtttcaccatgttggccaggctggtctcgractcctgacctaaagtgatccaactgtctcagcctcccaaagtgtatttgaatgcgtttttaattcttttgggtaaatttgtaggagtggaattgctgtg

SEQ ID NO: 404901 - DNA, 201 bp, Homo sapiens
tagtcttttgttcttctcctccttcttttaataaaatacattctttctgattttaaaaatatggccggacgcggtggcttatgcttgtaatcccaacactktgggaggacaaggcgggtggatcacgaggtcaggaaattgagaccatcttggccaacatggtgaaaccccatctctactagaaatagaaaaattagttgg

SEQ ID NO: 404902 - DNA, 201 bp, Homo sapiens
tccttcttttaataaaatacattctttctgattttaaaaatatggccggacgcggtggcttatgcttgtaatcccaacactgtgggaggacaaggcgggtrgatcacgaggtcaggaaattgagaccatcttggccaacatggtgaaaccccatctctactagaaatagaaaaattagttggacggggtggcatgtgcctg

SEQ ID NO: 404903 - DNA, 201 bp, Homo sapiens
tgatggaatcatctgactgttgcacctgccgctccctgtagatcctccctgtctatgagcaaggatcccactttcagcccagcaccgtggagatggtggayggggagaccagcccacccaagctgctcaccgaggccgacctcattgccctcatggagaagcatggcattggtcagtggctcctctgggtaactcgcatct

SEQ ID NO: 404904 - DNA, 201 bp, Homo sapiens
agtgtgggtgccaggggcccagttgccaggtgaccagatgcctggagtagctgaagcctgaagcgctgtgtgactcagccccgtacacccgcccattcgcyccagactaaaaataagacggtctctggggcgatcccaggccaaccgggtgacccgccacggccccagggccggtttcaatctcctcatcggtgactcggg

SEQ ID NO: 404905 - DNA, 201 bp, Homo sapiens
gcgccttgcggagtagctccagcaggacgcgggaggagaggtagcccccgaccaggaagcggtcccaggggctgctcccacgggggcagaactcaagctgmgtcctgcgcacggcccagcagcgagggtccctcgccacagtgtccacgcccggcaccaggctccacaggcccggctccagcaccagtggcaccaggagac

SEQ ID NO: 404906 - DNA, 201 bp, Homo sapiens
gagtagcttggattacaggcatgcgccaccatgcctggctaattttgtatttttagtagagacggggtttcaccatgttggtcaggctggtctcgaaattmcaacctcaggtgatccgcccgcctcggcctgggattacaggcgtgagccaccacatttggcccagttttactttttaatgtgggctggtgacaagcagaa

SEQ ID NO: 404907 - DNA, 201 bp, Homo sapiens
gcttgtgtatccagttaagtgtcatccagaaaagggaatgttgtcctcgggcagctgaggaaaggctgccttagctgatggccaacagcggagagcatctmctgcactcctatcatctgacatggcactttgtccccaggttctacctcagctgcatgggtttcccagagtgtcgctcagctgtgtggcttcctgactcgg

SEQ ID NO: 404908 - DNA, 201 bp, Homo sapiens
caggtagctgggattacaggcatgcaccaccacgcacagctaattttgtatttttagtagagacgggggtttcaccctgttggttaggctggtctcgaacyccacctcaggtgatccacctgccttggcctctcaaagtgctgggattacaggcgtgagccaccgtgcctggcccagcctcatttcttcagatgaagatgc

SEQ ID NO: 404909 - DNA, 201 bp, Homo sapiens
ctagcgacccttgcattctgagcaggggtagtcactgccttaccagagtcatcaaggatcctggctctgggttacttggtgaaggtaaaacaaggaatttsagtcaccacagtgttaagacactgaggcctaggcaagcccataccgtgctcccaggcaggcagggcagaggctgtccttgcctcgcggggaggggagtgg

SEQ ID NO: 404910 - DNA, 201 bp, Homo sapiens
tgcccaacagcgctggggcccgcacctggaggcactggcttttgagacactgggcagagaccccactgccctttgggatgaattcaccacctgcctcttayagaatccggccgaagacctgggatgttcacattcagctggatctctaggtttcttggactggaacacaggtggccccagctcaatatgctcaccagggtg

SEQ ID NO: 404911 - DNA, 201 bp, Homo sapiens
atttgattatcatctgtatggccaggtaggtgctaaaatatttctaaaatatttcaatcataagcaagagaaagtagtcagcctcgtcatatgtagaataygtcgctgtcttaagaataacaactgttaacaacctaaaggttcctggatatggggtgatcactttataatttatgaggagttctctttttaataaaatat

SEQ ID NO: 404912 - DNA, 201 bp, Homo sapiens
ttcctagggagatgaacagcgactgtacgagtttattgttcgccatttcctggcttgctgctcccaggatgctcaggggcaggagaccacagtggagatcracatcgctcaggaacgctttgtggcccatggcctcatgattctggcccgaaactatctggatgtgtatccatatgatcactggagtgacaaggtaataaa

SEQ ID NO: 404913 - DNA, 201 bp, Homo sapiens
  misc_feature (1)...(201): n = A,T,C or G
ttgaaccgtctttatcaggatgaaatatttgagaaatagagtttatgggttgggcacggtggctcacacctgtaatcccatcactttgggtggctgaggcnggcagatcacgaggtcaagagatcaagaccatcctggccaacatggtgaaatcccatctgtattaaaaatacaaaaattagctggacgtggtggcgtgcg

SEQ ID NO: 404914 - DNA, 201 bp, Homo sapiens
agctactggggaggctgaggcaggagaaccgtttgaacccaggaggcggaggttgcagtgaggtgagatcacaccgctgcactccagcctggtgagtgagygagactccatctcaaaaaaaaaaggaaaaagaaagaaataaagaaataagagtttatggggaaaaactgattgtctagatagcacccaagctctgaggta

SEQ ID NO: 404915 - DNA, 201 bp, Homo sapiens
agggaggacagttgtgttgtgagccctgagttctctagtggagcaggatcatgttccttgaaatgaggttattttttgcctgagtgtgctgatggaatcayctgactgttgcacctgccgctccctgtagatcctccctgtctatgagcaaggatcccactttcagcccagcaccgtggagatggtggatggggagaccag

SEQ ID NO: 404916 - DNA, 201 bp, Homo sapiens
caatgggatccaccaccagctgacccttcatgctctctaccaagttggtgacggtgtcaacccctgctcgaagtgtaggtggtctcttagtagcgacatcscctttgctggaagctttcttctcagcctgggccaacggtttcgatctcatcccttgctctgtctcttgtctgtactgtgggccagcttaagcaattgagt

SEQ ID NO: 404917 - DNA, 201 bp, Homo sapiens
catcttcaaggaatccttccctcaccacctgttcccccacactaggtcagagacccttactgacatgctgtcatagcactctattctacttgaaaggcatmtactagttacagttaaataatgggatgtgcgatcatttatttgatttttgtcactgcctctccttggactctaaactccaaaggacagtgattatatttt

SEQ ID NO: 404918 - DNA, 201 bp, Homo sapiens
ggtggcggggtcctgtaatcccagctactcacgaggctgaggcaggagaatcgcttcaacccgggaagtggagcttgcagtgagcctagattgcgccattrcattacagcctgggcgacagagtgagactccatctcaaaaaaaaattaggccaggcatggtggctcatacctgtaatcccagcactctgggaggccgagg

SEQ ID NO: 404919 - DNA, 201 bp, Homo sapiens
attttgggaggccaagacgggtgaatcacttgagcccaggaattcaagaccagcttgggcaacacggtaaaaccccatcttgctgggcgcagtggctcackcctgtaatcccaacacttcaggaggctgagctgggtggatcacctgaggtagggagtttaagaccaccaacctgaccaacatggtgaaactctgtctcta

SEQ ID NO: 404920 - DNA, 201 bp, Homo sapiens
cattgcattacagcctgggcgacagagtgagactccatctcaaaaaaaaattaggccaggcatggtggctcatacctgtaatcccagcactctgggaggcygaggtgggcggatcatgaggtcaagagattgagaccatcctggctaacacggtgaaaccctgtctctactaaaaatacaaaaaattagccgggcatgctg

SEQ ID NO: 404921 - DNA, 201 bp, Homo sapiens
ttttggggatacaccatgaacccattggaacagtttgctgtcattagattggagggctctctgtcatgtactgagttgggactctgttttcatttcttttvtaggcagagctgcaaccctcttgtcctctttgaagcagaaattgaaaagtactgcccagagaattttgtagacatcaaggtagggtcttttggaagacat

SEQ ID NO: 404922 - DNA, 201 bp, Homo sapiens
aaagtgtatttgaatgcgtttttaattcttttgggtaaatttgtaggagtggaattgctgtgacatgtgataactctgtaactttttgaggaaacaccaamattttccagagtggccaaagcattttacatttccactgacaatgtccaatttctccacatcctcaacaacacttgttattttacttgttttttttattat

SEQ ID NO: 404923 - DNA, 201 bp, Homo sapiens
cacactccaagagcagcattaaccttcagtcagatccccttagcttagagatgtcaagtcactgttgtgcaattctgttctcaccactcttattccactgygaacttaagaaaactttggaacgagagactcgccagtgccaggctctggtgatctggactgactgtgatagagaaggcgaaaacatcgggtttgagatta

SEQ ID NO: 404924 - DNA, 201 bp, Homo sapiens
gtaaggctggtaagtgctgctgctgctgctgactttctctactttggaactccataaatagagtgttcttgtttatatgtgcacatgggccacggatgagktcctctgcaggtactctccctcccagtctgtgagtcccaccagccatgtgtcctggagcaaatcactgagccattgggagcctcaacttccttgtctcta

SEQ ID NO: 404925 - DNA, 201 bp, Homo sapiens
ggctgcgacggcccgaagaccgtgccttttcccgcgccgccatggagatggccctccgaggcgtgcggaaagtcctctgtgtggccgaaaaaaacgacgcrgccaaggggatcgccgacctgctgtcaaacggtcgcatgaggcgggtaagaaagcgcgttccgatcagctgcgtgccttaagggaggcccaccgagcggg

SEQ ID NO: 404926 - DNA, 201 bp, Homo sapiens; identical to SEQ ID NO: 90430

SEQ ID NO: 404927 - DNA, 201 bp, Homo sapiens
gtcgcccaagtccctgagggtctcaggtgggccctcactgagctcgactctctccctgcaggttatgattccatgggctatgaaatgtctaagcctgacckccgggctgaactggaagctgatctgaagctgatctgtgatggcaaaaaggacaaatttgtggttctaaggcagcaagtgcagaaatacaagcaggttttc

SEQ ID NO: 404928 - DNA, 201 bp, Homo sapiens; identical to SEQ ID NO: 90435

SEQ ID NO: 404929 - DNA, 201 bp, Homo sapiens; identical to SEQ ID NO: 90440

SEQ ID NO: 404930 - DNA, 201 bp, Homo sapiens
acatcagatgcctcgtcctcttttcctttgtgttcgtcattttggcaaattactccaagatggcagttccagccaaaaggaaagacttttcttggaaagakaatttttatttttatgtacagaaaacacaacagtgtgtacttaacccagtttagtggcaaattctttagcctttgccttttctaggttggtaatgcaagc

SEQ ID NO: 404931 - DNA, 201 bp, Homo sapiens
tggcaaattctttagcctttgccttttctaggttggtaatgcaagctacagattttggacccagggcattgcctccccagtgacagcagatctcatatgtygttgtaatttgtcccaccagcttagccagagctcctttgtctaccagaaagttaacctttgtgaaggtgacagtggtgcaggtcttcctgtggaatttga

SEQ ID NO: 404932 - DNA, 201 bp, Homo sapiens
ctactaaaaatacaaaaaaattagccgggcgtggtggcaggtgcctgtagtcccagctactcgggaggctgaggcaggagaatggtgtgaacccgggaggyggagcttgcagtgagccgagatcacgccactggactccagcctgggcgacagagccagactccatctcaaaaaaaaaaaaaaaaaagaacttctatagac

SEQ ID NO: 404933 - DNA, 201 bp, Homo sapiens
ctcaagggaaggactttcagattatagtaagttgtgaaatttcacaggaattttgaggcatgttgatcttactgggtaatttttttttttttttttttttkttggagacaaagtttcagagtgagactctgtctcccaggctggagtgcagtggtgtgatctcggctcacagcaacctctgcctcctgggttcgagtgatt

SEQ ID NO: 404934 - DNA, 201 bp, Homo sapiens
cttcattacaaaaaaaaaaagctaatatacaatagtttgaggaaaatttaactgatgcaagaggcgtcagttatacaccatatcattagaatggtgattgyattcctgtgacttttggctttgaagagcttatatttatgtttatttcttcccaatcaggtttttaaaaatgtctttaatagaagctcctccctctcattt

SEQ ID NO: 404935 - DNA, 201 bp, Homo sapiens
tcctgacctcgtgatccacccaccttggcctcccaacgtgctgggattacaggcgtgagctaccacgcccagcagtaatttataatactaagatgacctargattatctgatccattgtgaatttttattaaatctttaaacagtcacttttggtgttcctcaaaattgccagacctttttcatgcagccattggattgca

SEQ ID NO: 404936 - DNA, 201 bp, Homo sapiens
acactgggcagagaccccactgccctttgggatgaattcaccacctgcctcttacagaatccggccgaagacctgggatgttcacattcagctggatctcyaggtttcttggactggaacacaggtggccccagctcaatatgctcaccagggtgttgccactcacctgttgaccgtccctaccagggacagatctgtgca

SEQ ID NO: 404937 - DNA, 201 bp, Homo sapiens
catgttgaccaggctggtctcgaactcctgacctcaggtggtctgcccacctcagcctcctgaagtgctgggattacagaccgtgagccaccatgcccggtttttttttttttttttttttgagtcagggtctcgctgcgttacccaggctggagtgcagtggcgcaatctcgtctcactgcaacctccgcctcctgggtt

SEQ ID NO: 404938 - DNA, 201 bp, Homo sapiens
actaatatagagtcagggtctggcctgcagtctgaacctgaaaggttccttctgaaacccacgcaagcgagccccagtggcctccctgcctgccagaggcygcagcccactgaactgattggtcttatcgtctcaggaattcggcaagcaatgcagagatgacccagtgcaggtcaccagagtcaccggtgtttgtctttg

SEQ ID NO: 404939 - DNA, 201 bp, Homo sapiens
ttatttatttattttatttattttttgagacggagttttattctgtcgcctaggctggagtgcagtggcacaatcttgactcattgtaacctccacctccygggttcaagcgattctcctgcctcagcctcccgagtagctgggactacaggtgcctgccaccacgcttggctaatttttcgtatttttagtagagacggg

SEQ ID NO: 404940 - DNA, 201 bp, Homo sapiens
agattaagggatgccgagatggctggtattttttctgggtgtctgtaagggtgttgccagaggagagtgacatgactcggtggactgagaaaggaagaccyaccctcaatgtgggtgggtaccatccaatcagctgccagcacggccagaacaacaggtggaagaagggggatgagcaccttgctgagtcttctccagccc

SEQ ID NO: 404941 - DNA, 201 bp, Homo sapiens
acctagaggcctacaccactattccatttgcttggcacagtcctgcttcccttgggtcctgcagtcacagctggaaggggtaggggagtcccctcaggacrtaagtcggggaaggaccagcagggtgcgagtggcacagctaggctggaagcagccctgcacgcagaccagagccctccccagcccacatgtgtcatctgg

SEQ ID NO: 404942 - DNA, 201 bp, Homo sapiens
tttcttttggggatacaccatgaacccattggaacagtttgctgtcattagattggagggctctctgtcatgtactgagttgggactctgttttcatttcttttctaggcagagctgcaaccctcttgtcctctttgaagcagaaattgaaaagtactgcccagagaattttgtagacatcaaggtagggtcttttggaag

SEQ ID NO: 404943 - DNA, 201 bp, Homo sapiens
cagcagccgccggcgagtcccagcgtcatggtcgtccagggctcgcagcctagcagcctccactggatacaggtcctgcagccagaggttccccgccagcycctccaggggccaggccaagaggaggcggtcgtcagcatcgaccccagggactgccacaagcacagccacagtgagctccaggcgttcgtgctgcacctc

SEQ ID NO: 404944 - DNA, 201 bp, Homo sapiens
ccaggcgttcgtgctgcacctcgagcagcagctcctccgaggccatgctgggccggatcaggcacccgagaaggctgccaatggccggccagttgacagargcagccagcgccttgcggagtagctccagcaggacgcgggaggagaggtagcccccgaccaggaagcggtcccaggggctgctcccacgggggcagaact

SEQ ID NO: 404945 - DNA, 201 bp, Homo sapiens
  misc_feature (1)...(201): n = A,T,C or G
attaagtggggcactcttctaggctgtcactgcgggcttagctggcggtggtcagtgtgatctagaaggattggcatgggctatccataggaaggatgganatgatgcactaacaggttaacatggtcttttctttcctggctttctaggatcccatggcaactgtggtagaggtcagatctaagcccaagagcaagtggc

SEQ ID NO: 404946 - DNA, 201 bp, Homo sapiens
ttcttttggggatacaccatgaacccattggaacagtttgctgtcattagattggagggctctctgtcatgtactgagttgggactctgttttcatttcttttctaggcagagctgcaaccctcttgtcctctttgaagcagaaattgaaaagtactgcccagagaattttgtagacatcaaggtagggtcttttggaaga

SEQ ID NO: 404947 - DNA, 201 bp, Homo sapiens
  misc_feature (1)...(201): n = A,T,C or G
aatgagctatatgggaatgaaatgaaggcatcttacctgcataggctgtccaggcaaaggagggattccggggtgagcaaggtgcccatgcgccacccggntggagctgttgtctgtattacctcagagtaaccagcaagtggcttccaggtacggatgccactcatgcggagcacatcgagaccatcaaagcccggatgt

SEQ ID NO: 404948 - DNA, 201 bp, Homo sapiens
atatcacccatcaccaggccacacaagaaaacactggagaaagacacggtcctgcttagcctcactgtttgtttttttgtttattttgtttttgtagactyaaacttctgggctcaagagatcttcccacctcagcctcccaagtagctgggactatagtcatgtaccactatgaccagctaattatttttaaaatttttt

SEQ ID NO: 404949 - DNA, 201 bp, Homo sapiens
acacagctctgcttgtctgtctcagtcatttcctcagccaggggcaggctctgcaggcacaggagccattaggcttgtttacatctgtaggcttctcacaragttggggaaatgcttgtttacatctgtaggcttctcacaaagctggggaaatcttagtcttttgttcttctcctccttcttttaataaaatacattctt

SEQ ID NO: 404950 - DNA, 201 bp, Homo sapiens; identical to SEQ ID NO: 90439

SEQ ID NO: 404951 - DNA, 201 bp, Homo sapiens; identical to SEQ ID NO: 90438

SEQ ID NO: 404952 - DNA, 201 bp, Homo sapiens
ctcaaggaattaagattatatatatatcctgattacaaaagaaaagtgtcattaaaaacgcaaatgttggccgggcacaagtggctgacacctgtaatccyaacacttcgggaggctgaggcaggcagatcatttgaggtcaggagttcgagaccagcccaggcaacatggcgaaaccgtctctactaaaaatgcaaaaat

SEQ ID NO: 404953 - DNA, 201 bp, Homo sapiens; identical to SEQ ID NO: 90479

SEQ ID NO: 404954 - DNA, 201 bp, Homo sapiens
gaaaacaaaaaacaccctgggagtctgcagaggtgtgggcctttcccatcccattctttctgctacaatcaaaatgatcgtttaaaaatggaaatctaggktgggcaaggtaactcctacctataatcctcacactttggaaggctgaggtgggaggatcccttgagcccaggagttcaagaccatcctggacatgatggc

SEQ ID NO: 404955 - DNA, 201 bp, Homo sapiens
ccaggtggtggactcccgagccactggcaggttccgcggcaccgagcccgagccccgagacggtaacgcgggggaagggggcaggaggtcgtcgggggcgyggcctctacgccctgagcagtgccctggacttgacctttcttttatttttttaatttatcttgctttcatttcctttccttttttctttcctttccttcc

SEQ ID NO: 404956 - DNA, 201 bp, Homo sapiens
tgaaaacaaaaaacaccctgggagtctgcagaggtgtgggcctttcccatcccattctttctgctacaatcaaaatgatcgtttaaaaatggaaatctagrttgggcaaggtaactcctacctataatcctcacactttggaaggctgaggtgggaggatcccttgagcccaggagttcaagaccatcctggacatgatgg

SEQ ID NO: 404957 - DNA, 201 bp, Homo sapiens
taatgtctctgaactgcagcttctgcctatgtagaatgggagcagtaacacagagcataaagacatgataggggcaaggagagcaagtgtgtaaagcactsagctccgggttttcatgcacaagtgtgctgcacacttgtgcctgacacttattcagtcgcactagctcatctatagaatgggaggtgatacacgcctagc

SEQ ID NO: 404958 - DNA, 201 bp, Homo sapiens
ggggtgacatctcaaaggccaggaattccgttgacttgttggctgccagtaggggcgggaggaaaggcggaggcgagccctggaggagggaggccacaacwccgagctgcccacctggtgctgagctggggccccgcctcctttctgttttatttttgaggaaataaaataaccaagtgctaaatcttgtagctctggggc

SEQ ID NO: 404959 - DNA, 201 bp, Homo sapiens
tgttttgttttgttttttgagacaggctgtggttctgtggcccagactggagtgcagtggcgccatctcagctcactgcaacctccgcctcccaggctcawgcgatcctcccaccttagcctcccaagtaggtgggaccacaggcatgtgccaccattcccggctaatttttaaatttttggtagagatggggtttcacca

SEQ ID NO: 404960 - DNA, 201 bp, Homo sapiens
tttgttttgttttttgagacaggctgtggttctgtggcccagactggagtgcagtggcgccatctcagctcactgcaacctccgcctcccaggctcaagcratcctcccaccttagcctcccaagtaggtgggaccacaggcatgtgccaccattcccggctaatttttaaatttttggtagagatggggtttcaccatgt

SEQ ID NO: 404961 - DNA, 201 bp, Homo sapiens
accaggctggggaggtccaagaggagctcccaagctctgctcctcaaggggtaccctggatccagcctgcggctcacgcttgcttcagtgcagctgtgtayccttctgacatgagcctggggcggttacgtcctggggtcctccactcccagggcaccctcacctacagtgatcccggcttctgaatcacacaggcacctg

SEQ ID NO: 404962 - DNA, 201 bp, Homo sapiens
agcttgtgtttatatgaggcctggcagagggaggcccctggctacccacctttgtgcccgggttcaccaccactggtttctgcgttccctggactctgccstgcacgggccgcacctcccccgccggccctcgcccatgctccagccccagccctagccccaacagcggcctctccctgcttcccttctgacatcctccct

SEQ ID NO: 404963 - DNA, 201 bp, Homo sapiens
gagagaaaaacccagagggatggtcctgatcagggctacccatgcccctgaggatggtggaatgaaggcagagtcgggggctgcataaaggaaagtctctyccagggaccaaagcttggagaactgagggtggaagggggattaaacagaagtgggtagggcagagccttctgcctgtgggctggatttcctcaggcaaga

SEQ ID NO: 404964 - DNA, 201 bp, Homo sapiens; identical to SEQ ID NO: 90478

SEQ ID NO: 404965 - DNA, 201 bp, Homo sapiens
ggagtacagtggcgcaatctcggctcaccacaacctccgcctcccgggttcaagtgattctcctgccttagcctcccgagtagctgggattacaggcatgygccaccacgcccggctaatgtttgtattattagtagagacggggtttctccatgttggtcaggctggtctcgaactcccaacctcaggtaatctgccccc

SEQ ID NO: 404966 - DNA, 201 bp, Homo sapiens
agggggattaaacagaagtgggtagggcagagccttctgcctgtgggctggatttcctcaggcaagaagcctgtgggtaagctctgtataatgcgaggagkagtccccacaaagcaggctggtcagtggtcacgctagtgtgagtctttcaaacatcccgtgtaagtagatactgtcattgcacagaggaggaaatggagc

SEQ ID NO: 404967 - DNA, 201 bp, Homo sapiens
gggggattaaacagaagtgggtagggcagagccttctgcctgtgggctggatttcctcaggcaagaagcctgtgggtaagctctgtataatgcgaggaggmgtccccacaaagcaggctggtcagtggtcacgctagtgtgagtctttcaaacatcccgtgtaagtagatactgtcattgcacagaggaggaaatggagcc

SEQ ID NO: 404968 - DNA, 201 bp, Homo sapiens
ggagtccccacaaagcaggctggtcagtggtcacgctagtgtgagtctttcaaacatcccgtgtaagtagatactgtcattgcacagaggaggaaatggarcctggcccaaggtctcaagaaacaacccagccgggattcagactcggcagcctgcgcacttaacagccgtgagcaaccaggaactccccagccctttctc

SEQ ID NO: 404969 - DNA, 201 bp, Homo sapiens
cgaagtcactgttgctgctgctagaagggccagagagagcccaggctggacaggcaaaacctggcctcgccagactcctggagcctgcacagagtgtgtgkctgagaagtccggattctggtgccagactgactgcctagtgagaagcctggcaccgccgggtcaggctagtgcactttttcttgtttgttttttgttttt

SEQ ID NO: 404970 - DNA, 201 bp, Homo sapiens
ggttttatggttgtgagaattaaatgagatggtggatataaaggatttagcaccatgcttgcatgggatgctctcaatatctcgagcaccacaaatacgargtaccattcatagcatccttctatttgtcccctcctccctgctcccctgctgtaggcattgaacctggccacatcccaggtaccgtgaacatccccttca

SEQ ID NO: 404971 - DNA, 201 bp, Homo sapiens
gttttatggttgtgagaattaaatgagatggtggatataaaggatttagcaccatgcttgcatgggatgctctcaatatctcgagcaccacaaatacgagrtaccattcatagcatccttctatttgtcccctcctccctgctcccctgctgtaggcattgaacctggccacatcccaggtaccgtgaacatccccttcac

SEQ ID NO: 404972 - DNA, 201 bp, Homo sapiens
aacatgtgaggttctgatccagcttccagtcccaaccactccacacaaggcagcctgacctcgaacatgctgcccagcctctgcaggcttccgtttctttyttcccccccaccccgagataagagtcttgctctgttgcgcgggctggagtgcaatggcacgatctcggctccctgaaacctctgcctcgcgggttcaagc

SEQ ID NO: 404973 - DNA, 201 bp, Homo sapiens
ccgcctcctgggctcaagtgatcctcctacctcagcctgtcaagtagctgggactacaggtgcatgccaccatgcctggctcattttttttttttttctakagagatggggccttgctatgttacccaactcctgggctcaagcaatccttccatctgggcctcccaaagtgctgggattacagatgtaagccaccatgcc

SEQ ID NO: 404974 - DNA, 201 bp, Homo sapiens
ctttttatatagtctcttctggacacctacagcagccctgcaaggggaggcaggcaggggtaggtaggctgggtcccactttgtgggtggggacaaggaargggcttctctgttaagacaaagtggcagagacttgaccccaggtcggcaggcttcaagttggggctgtttcccaaggctactgctgtgggtggggtgagc

SEQ ID NO: 404975 - DNA, 201 bp, Homo sapiens
acagaaactccctgacttcatctttactcagaaggggtgccctttatgtaataagaagaacacagtggggctgtgtcatcagggatggggacaacaaaacmggattcaacccgttgtgctttcaaatgcacttcaatccagcccactgtggaaacattttaaagctgggtttcttgggaaagaatgccctcgatgccagct

SEQ ID NO: 404976 - DNA, 201 bp, Homo sapiens; identical to SEQ ID NO: 90491

SEQ ID NO: 404977 - DNA, 201 bp, Homo sapiens
ggtggcgaagtggctgggggcgcagcatggcagggtgggtgggccagcctccaaagccagcgctttccttgtgccacccgcttcgtgcagcagccaatacrcagtggatactctcatttccatttttcctatggagaaactgaggctcagagagctgacataacttgctccagtgggatttgacctcacatctgacaccag

SEQ ID NO: 404978 - DNA, 201 bp, Homo sapiens; identical to SEQ ID NO: 90495

SEQ ID NO: 404979 - DNA, 201 bp, Homo sapiens
tacagcagccctgcaaggggaggcaggcaggggtaggtaggctgggtcccactttgtgggtggggacaaggaaggggcttctctgttaagacaaagtggcwgagacttgaccccaggtcggcaggcttcaagttggggctgtttcccaaggctactgctgtgggtggggtgagctgtaagcaagcccaggggctgagggaa

SEQ ID NO: 404980 - DNA, 201 bp, Homo sapiens
gactgtcagaggatatggtggactccagggtggtccccatattatctgccccctcgtgttcatgccccgtgtgaccctctccctttcactgcgggtgggamccgtgacttgcttttaaccaacagcctacggcaaaggtgatggatgccacttctgtgactatggtacacaacattgtaatgccccatcttgcaaggggac

SEQ ID NO: 404981 - DNA, 201 bp, Homo sapiens; identical to SEQ ID NO: 90487

SEQ ID NO: 404982 - DNA, 201 bp, Homo sapiens
gagtgagaagactgtcagaggatatggtggactccagggtggtccccatattatctgccccctcgtgttcatgccccgtgtgaccctctccctttcactgygggtgggacccgtgacttgcttttaaccaacagcctacggcaaaggtgatggatgccacttctgtgactatggtacacaacattgtaatgccccatcttg

SEQ ID NO: 404983 - DNA, 201 bp, Homo sapiens
caacaaaacaggattcaacccgttgtgctttcaaatgcacttcaatccagcccactgtggaaacattttaaagctgggtttcttgggaaagaatgccctcratgccagctgatccattgttcctcgttggtagggtgggcacacatcttagattcaagtttccaggcaaagcaggtgaaacacaacaggaagaaattgctc

SEQ ID NO: 404984 - DNA, 201 bp, Homo sapiens; identical to SEQ ID NO: 90490

SEQ ID NO: 404985 - DNA, 201 bp, Homo sapiens
atgccgctgtcttctcaagcaggtgtgattttgggcatctctacttcaagacaggtgttaggagaggagttgcaggcatcttaagtcatgagaaatgatartaggtggggctgggaataaattgagctccaagcagagcaaagatgttatttttatttgcaaagctatctatccttccagctatagctgatggaatcctcc

SEQ ID NO: 404986 - DNA, 201 bp, Homo sapiens
gacctcacatctgacaccaggtcacttgctctttctgcaactgtgtgcttaacagaaaaccagaggccccgatgtaatcctgggtctgccttcatctttckgtgtggccttaggtgagccgtgttgttttgccaagactcagcggattcatctgtaaaatggggacatatctgattagttatgtggttatctgtttagcat

SEQ ID NO: 404987 - DNA, 201 bp, Homo sapiens
tgtgagattggcctgtggcctcaccctgtgggtggcaccagctctggccatggctttcccctttgccccaattcctgactcttctgaagccagatttggcygagggccctcactgggtactgagacagttccagaaaggactctagagccagccgagtccctccactctgcttccatccaagttcttggaggggaccaaaa

SEQ ID NO: 404988 - DNA, 201 bp, Homo sapiens
agacaggagtggcctggggcatgtgtgagattggcctgtggcctcaccctgtgggtggcaccagctctggccatggctttcccctttgccccaattcctgrctcttctgaagccagatttggccgagggccctcactgggtactgagacagttccagaaaggactctagagccagccgagtccctccactctgcttccatc

SEQ ID NO: 404989 - DNA, 201 bp, Homo sapiens
ggtgtgggatcagggaggcaccctgtaggttcagcggtccagatgtaacacacaggggcatgggggtggcagacctgggggtcaggcattggccctgatcwtctctggaaggaatgaccctaaatggagcgagaagcagagcttagacacctggcggccacttcctgctcaccttaggcaagcgccttcctctttggctgt

SEQ ID NO: 404990 - DNA, 201 bp, Homo sapiens
cctcccaaagtgctgggattacagatgtaagccaccatgcctggcctttctactttattttcaggctattcaagtgaagcagtgggagtggagaaggaagraagaaatctgtaactggtgatcagttgattgtaaacaccactgccaatcaaactcgacttgtactaatagattttggaatcctctttggccccggggtga

SEQ ID NO: 404991 - DNA, 201 bp, Homo sapiens
cgggggagtgcggagggagaaagagcttctcccaggcctcaccctactgcacacaccgacttccttcctcacgcctgtctctctttcctggttcccacccrtgccaggtgacacgcagagctgaagccatggttcatcaggtgctctaccgggcgctggtctccaccaagtggctggcggagtccatcaggactggcaagc

SEQ ID NO: 404992 - DNA, 201 bp, Homo sapiens
tgtgcctgccagggtcactgggtgcttttagctgcagtagttagacttccccacacacctgtgaggtgggtgaggtttactttttttttttctttgagacrgagtctcgctcttgctgcctaggctgcagtgcaatggggtgatctcggctcactgcaacctccgcctcacaggttcaagcgtttctcctccctcagcctc

SEQ ID NO: 404993 - DNA, 201 bp, Homo sapiens
aggttcaagcgtttctcctccctcagcctcccgagtagctgggattacaggcgcatgccaccatacccggctaattttttatatctttagtagagacgggktttcaccatgttgaccaggctggtcttgaactgaccttgtgatccacccacctcagcctcccaaagtgctgggactacaggcgtgagccactgcatccgg

SEQ ID NO: 404994 - DNA, 201 bp, Homo sapiens
ttatatctttagtagagacgggttttcaccatgttgaccaggctggtcttgaactgaccttgtgatccacccacctcagcctcccaaagtgctgggactayaggcgtgagccactgcatccggcctaggtggggttttgtccccgttctgcaggagggagactgaggctcggaggttcagggcctgcttggctgtacccag

SEQ ID NO: 404995 - DNA, 201 bp, Homo sapiens
tggcccaacgtgcctttccaccaactggctgttctttttttttgtttgtttgttttttgagacggagtctcgctctgtcacccaggctggagtgcagtggygcgatcttggctcattttaagctccgcctcctgggttcacgccattctgctgcctcagcctcccgagtagctgggactacaggtgcccaccaccacacct

SEQ ID NO: 404996 - DNA, 201 bp, Homo sapiens
cagggagagccagaagccttcagctagacttgggaagagaagcatgggagcctctgctttctggcccaacgtgcctttccaccaactggctgttctttttktttgtttgtttgttttttgagacggagtctcgctctgtcacccaggctggagtgcagtggtgcgatcttggctcattttaagctccgcctcctgggttca

SEQ ID NO: 404997 - DNA, 201 bp, Homo sapiens
ggaaggaaaggaaagaaaaaaggaaaggaaatgaaagcaagataaattaaaaaaataaaagaaaggtcaagtccagggcactgctcagggcgtagaggccrcgcccccgacgacctcctgcccccttcccccgcgttaccgtctcggggctcgggctcggtgccgcggaacctgccagtggctcgggagtccaccacctgg

SEQ ID NO: 404998 - DNA, 201 bp, Homo sapiens; identical to SEQ ID NO: 90488

SEQ ID NO: 404999 - DNA, 201 bp, Homo sapiens
ctgccctgcccaggactggactcgggccatatccgtggtgccgtcaacatgcctttcatggacttcctgactgaggatggcttcgagaagggcccagaagrgctccgtgctctgttccagaccaagaaggtggatctctcgcagcctctcattgccacgtgccgcaagggagtcaccgcctgccacgtggccttggctgcc

SEQ ID NO: 405000 - DNA, 201 bp, Homo sapiens
gggctcaaagagatggagataggcctgtgtcaggccaaagtgcaggttgggcactgggagtggggccaaccatagagcccccacccctgccagggtgtggrctgctcgaggaagacaggagtggcctggggcatgtgtgagattggcctgtggcctcaccctgtgggtggcaccagctctggccatggctttcccctttgc

SEQ ID NO: 405001 - DNA, 201 bp, Homo sapiens
ccactgcatccggcctaggtggggttttgtccccgttctgcaggagggagactgaggctcggaggttcagggcctgcttggctgtacccagccccagtatrtgccttggccacactagtcagatccttcccctcccactcctgccaccctgctcctgccctgtcccataatccaggttgaatgggggtggggatttgggga

SEQ ID NO: 405002 - DNA, 201 bp, Homo sapiens
aaggaagaaagaaatctgtaactggtgatcagttgattgtaaacaccactgccaatcaaactcgacttgtactaatagattttggaatcctctttggcccyggggtgaaaggaccaggacatagctggcgtgatgatgtaccgaatcgtgtgcctgccagggtcactgggtgcttttagctgcagtagttagacttcccca

SEQ ID NO: 405003 - DNA, 201 bp, Homo sapiens
cctctgccctgcccaggactggactcgggccatatccgtggtgccgtcaacatgcctttcatggacttcctgactgaggatggcttcgagaagggcccagragagctccgtgctctgttccagaccaagaaggtggatctctcgcagcctctcattgccacgtgccgcaagggagtcaccgcctgccacgtggccttggct

SEQ ID NO: 405004 - DNA, 201 bp, Homo sapiens
gctgtgtcctctgccctgcccaggactggactcgggccatatccgtggtgccgtcaacatgcctttcatggacttcctgactgaggatggcttcgagaagrgcccagaagagctccgtgctctgttccagaccaagaaggtggatctctcgcagcctctcattgccacgtgccgcaagggagtcaccgcctgccacgtggc

SEQ ID NO: 405005 - DNA, 201 bp, Homo sapiens
tatagctgatggaatcctccaggccccattagtccccacccctcatacatcccctaagctgtgtcctctgccctgcccaggactggactcgggccatatcygtggtgccgtcaacatgcctttcatggacttcctgactgaggatggcttcgagaagggcccagaagagctccgtgctctgttccagaccaagaaggtgga

SEQ ID NO: 405006 - DNA, 201 bp, Homo sapiens
cctcccgagtagctgggactacaggtgcccaccaccacacctggctgattttttttgtatgtgtgtttttagtagagacggggtttcaccgtgttagccargatggtctcgatctcctgacctcgtgatccgcccacctcggcctcccaaagtactgggattacaggcgtgagccaccgcgcccggccaaactggctgttc

SEQ ID NO: 405007 - DNA, 201 bp, Homo sapiens
catggtgtggctcccgggctgctgtatgggactgaaaatccactctgcctatctctccctcccagggctgggagcttggctgagggaggagggaaggtgcrgggctgcctcttcctggctagggttaaggggttgccttctggggctgcctgctctggattccttagtaaaaggagaaagcgccagacagcttttcctggc

SEQ ID NO: 405008 - DNA, 201 bp, Homo sapiens
ttgcctgacttgttgaaaaacatctcttcctgtctgtacctcctacagagagaatgctgggaaaactgttctgcacactcttagagctggagggcctgaayggtgacctcacctgacagaggggagactgaggtgcacagaggcaggggccaaggccgcatagctagttagtgacagagccaggacagcagggtctctgcc

SEQ ID NO: 405009 - DNA, 201 bp, Homo sapiens
tctggacacctacagcagccctgcaaggggaggcaggcaggggtaggtaggctgggtcccactttgtgggtggggacaaggaaggggcttctctgttaagrcaaagtggcagagacttgaccccaggtcggcaggcttcaagttggggctgtttcccaaggctactgctgtgggtggggtgagctgtaagcaagcccaggg

SEQ ID NO: 405010 - DNA, 201 bp, Homo sapiens
atgcaatcaaacttccttttttaattcattattattatatttttgagacagagtcttgctctatcacccaggctggagtggcatgatcacagctcactgcmgcctcctgggctcaagtgatcctcctacctcagcctgtcaagtagctgggactacaggtgcatgccaccatgcctggctcattttttttttttttctata

SEQ ID NO: 405011 - DNA, 201 bp, Homo sapiens
aaatggagcgagaagcagagcttagacacctggcggccacttcctgctcaccttaggcaagcgccttcctctttggctgtagttttgtgcctccacaagcycttagtcctggagtcagccagatctgaggttccatccaggtgtgatactgatgcttagcctcaggctagtgccttcaccgctaactgttgttcgtgaaag

SEQ ID NO: 405012 - DNA, 201 bp, Homo sapiens
gcaatcaaacttccttttttaattcattattattatatttttgagacagagtcttgctctatcacccaggctggagtggcatgatcacagctcactgccgyctcctgggctcaagtgatcctcctacctcagcctgtcaagtagctgggactacaggtgcatgccaccatgcctggctcattttttttttttttctataga

SEQ ID NO: 405013 - DNA, 201 bp, Homo sapiens
gctcattgagatgaccgatggaggagtggactattcctttgaatgtattggtaatgtgaaggtcatggtgagtatgggcttcattcctttttagtttatgkaactgctttttttgaagtgcagttttagattaaaaattgttttgttttggcaaaggaaaagtctcttaataagaatttttctagtgaaagaaggggaaaa

SEQ ID NO: 405014 - DNA, 201 bp, Homo sapiens
ctttacatcccacagtgtggagaatgcaaattttgtctaaatcctaaaactaacctttgccagaagataaggttagtatctttttatgttcttcttaaaayacaagtgctgcgggataattaaggaatcacagagaccgaggggttgaggaggaattatttaataatttaggttcattaacccagtcggattaacgttcaa

SEQ ID NO: 405015 - DNA, 201 bp, Homo sapiens
cagaactttggtgcatttgaagtgcctgacaatgtagtccagcttccctcctgttttacctagagggctggagatatgagggcccaaaggggccacaactrttatcttaagtggactgaaaggaagacgaaattaaaactagcttctactccacttgtaggaaatgtgcttttaatctttggtgtagcccagccttctagg

SEQ ID NO: 405016 - DNA, 201 bp, Homo sapiens
gttggattgatgctatgtgctttttcaatttattgatatggtttaaatgctcccacagaattgtgtgagagagcaatatgtcattgattgaaaagtgggaracaaactggtagtaatggtcaggatttccccttttcagaactttggtgcatttgaagtgcctgacaatgtagtccagcttccctcctgttttacctagag

SEQ ID NO: 405017 - DNA, 201 bp, Homo sapiens
cagtgcatcacgtttaccatgcaaatatcttttggttggattgatgctatgtgctttttcaatttattgatatggtttaaatgctcccacagaattgtgtragagagcaatatgtcattgattgaaaagtgggaaacaaactggtagtaatggtcaggatttccccttttcagaactttggtgcatttgaagtgcctgaca

SEQ ID NO: 405018 - DNA, 201 bp, Homo sapiens
aattccagcactttgagagcccaaagtgggaggatcacttggcctccgaagttcaagaccaacctgggcaacacagatgtcatctctagaaaaaaaaaaaattttttttttttaattggccgggcatggtggcatgtgcctgtggtcctagctactaaggaggctgagttagaaagatggcttgatcccaggaggtcgaga

SEQ ID NO: 405019 - DNA, 201 bp, Homo sapiens
taattccagcactttgagagcccaaagtgggaggatcacttggcctccgaagttcaagaccaacctgggcaacacagatgtcatctctagaaaaaaaaaaaattttttttttttaattggccgggcatggtggcatgtgcctgtggtcctagctactaaggaggctgagttagaaagatggcttgatcccaggaggtcgag

SEQ ID NO: 405020 - DNA, 201 bp, Homo sapiens; identical to SEQ ID NO: 90517

SEQ ID NO: 405021 - DNA, 201 bp, Homo sapiens; identical to SEQ ID NO: 90518

SEQ ID NO: 405022 - DNA, 201 bp, Homo sapiens; identical to SEQ ID NO: 90520

SEQ ID NO: 405023 - DNA, 201 bp, Homo sapiens; identical to SEQ ID NO: 90521

SEQ ID NO: 405024 - DNA, 201 bp, Homo sapiens; identical to SEQ ID NO: 90524

SEQ ID NO: 405025 - DNA, 201 bp, Homo sapiens
tagaaggatagtgaatattggaaaagatggataagattataaatatcttataaatttcctttataaggcattgctgcaaggtgctaaattactaatgaatrtatttgaaattgtagtttacaacactttcttaatatttactggtcattatttttaaaacatttctttttcctgtgggttttaagaaacctaattccaact

SEQ ID NO: 405026 - DNA, 201 bp, Homo sapiens
catgtcccttccaagtcagaacctacctccctcttaggtaaccactgtcctgattcctttcactgtgaccttgtataaatagagtcatgcagtgcatgctsttttgtcaggtttctttttttcataatgtctgtgagatatatccaagctgcatatgcgtcagtagttccttcttgttgctctgtcttaatccattcaaaa

SEQ ID NO: 405027 - DNA, 201 bp, Homo sapiens
ttctgagattaaacgaaatcatttttatgaaccactgcccagtaagtgagagtaataaaacttacccactaaggctattaggaagactgcaggagataacstaactccttgacacagaaaaggtagttgtttttattgtactaggtaacaacactgaaagaactacctctttgaggaaatttaagatccccttgtgtgtgt

SEQ ID NO: 405028 - DNA, 201 bp, Homo sapiens
ctcaggtgatccgcccatctcggcctcccaaagtgctgggattacaggcgtgagcccctgcacccggcctacagaggccattttttatatctctatgtagwtcacctctcctttccctcaaccgtttgttctgttgctaccaataactactaacttattttgcaaagctatgctgtgccaaggattgtgttagggacttca

SEQ ID NO: 405029 - DNA, 201 bp, Homo sapiens
atgtgaagagaccaggggagtgactccaccttatgcctcaccctggtctcatcttgcccagctgtggtaccctatgttaaccttggctggtcttcacaaargcgactggaccctgggccctccctgtcccaggatcccctaacccctaccccagaatggtttgtcataatctggaaatttgttggctcatttttctttcaa

SEQ ID NO: 405030 - DNA, 201 bp, Homo sapiens
gctgccaattctaattgttaagatgccatggattataagcacatgctgattttagagaggttaaaatatgaaagaaatgtgtcttagagtcaatgaaatayagtattataataaaatgacttttcttgtatctgtacctctgaattgcatgcacacatacttacacattcgttgttttaatgtcctgatagatcattgcca

SEQ ID NO: 405031 - DNA, 201 bp, Homo sapiens
tttctaccccatgaaagaagcggggggatgtgaagagaccaggggagtgactccaccttatgcctcaccctggtctcatcttgcccagctgtggtaccctrtgttaaccttggctggtcttcacaaaggcgactggaccctgggccctccctgtcccaggatcccctaacccctaccccagaatggtttgtcataatctgg

SEQ ID NO: 405032 - DNA, 201 bp, Homo sapiens
ccatggattataagcacatgctgattttagagaggttaaaatatgaaagaaatgtgtcttagagtcaatgaaatatagtattataataaaatgacttttcytgtatctgtacctctgaattgcatgcacacatacttacacattcgttgttttaatgtcctgatagatcattgccactgcggtttgccacaccgatgccta

SEQ ID NO: 405033 - DNA, 201 bp, Homo sapiens
accaaccaaccattcactaagtgcatgtaagcaaatctaccctggttgtcccaaattgggattcaaccactttagaagtcttgttagacattttttcagtkgatacataatagttgtatgtacttaccgagcatgtgatattgatatgtgcatacaatatataatgatcacatcagaataactggaatatccatcacctca

SEQ ID NO: 405034 - DNA, 201 bp, Homo sapiens
gagccactgcgcctagccaagtctttctttttaagatcattttaatacatcgtcttgaattgaggaattgcttaacatatgtatgttatatatgctaaaarctgccaggcgtggtggctcacacctgtaatcccagcactttgggaggccgaggcaggtggatcacttgaggtcaggagtttgaaaccagcctggccaaca

SEQ ID NO: 405035 - DNA, 201 bp, Homo sapiens
aggttaaaatatgaaagaaatgtgtcttagagtcaatgaaatatagtattataataaaatgacttttcttgtatctgtacctctgaattgcatgcacacawacttacacattcgttgttttaatgtcctgatagatcattgccactgcggtttgccacaccgatgcctataccctgagtggagctgatcctgagggttgtt

SEQ ID NO: 405036 - DNA, 201 bp, Homo sapiens
tcatgaagttcgaatcaaggtaatgatacatttaaggcactgggaaaaaaagagacacaatgaggtctctggatagatgagtagatctgagatctgcagargataaatcccaaaggacagtgtcaaagaaaaggtgttgaaagtcatccagccttacaatcacaacatccttctcttatctttcacctttgcagcatgctt

SEQ ID NO: 405037 - DNA, 201 bp, Homo sapiens
tcctcagctaagtaacaagcatactgcagaaatttgttgaataaattaatgtgtgatttcttttaggatggaagagtgtagaaagtgtcccaaagttggtstctgaatatatgtccaaaaagataaaagttgatgaatttgtgactcacaatctgtcttttgatgaaatcaacaaagcctttgaactgatgcattctggaa

SEQ ID NO: 405038 - DNA, 201 bp, Homo sapiens
atcacttgaacccaggaggtggacattgccatgagccaggatcatgcactacactccagcctgggtgccagagggagactcttatctcaaaaaaaaaaaamcaaaaaaaaaaattaaaatataaattgttcaataacattgagctcactaaatgttaagtttggccttttgttgccattatctttaaaaactatgccatct

SEQ ID NO: 405039 - DNA, 201 bp, Homo sapiens
aatcacttgaacccaggaggtggacattgccatgagccaggatcatgcactacactccagcctgggtgccagagggagactcttatctcaaaaaaaaaaaaacaaaaaaaaaaattaaaatataaattgttcaataacattgagctcactaaatgttaagtttggccttttgttgccattatctttaaaaactatgccatc

SEQ ID NO: 405040 - DNA, 201 bp, Homo sapiens
tggctggtgcttcccggatcattggtgtggacatcaataaagataaatttgcaagggccaaagagtttggagccactgaatgtattaaccctcaggatttwagtaaacccatccaggaagtgctcattgagatgaccgatggaggagtggactattcctttgaatgtattggtaatgtgaaggtcatggtgagtatgggct

SEQ ID NO: 405041 - DNA, 201 bp, Homo sapiens
aggaaagacaattttgcattacatgggaaccagcacattttctgaatacacagttgtggctgatatctctgttgctaaaatagatcctttagcacctttgkataaagtctgccttctaggttgtggcatttcaaccggttatggtgctgctgtgaacactgccaaggtaagagactgacttgggttttttgcttctgcctt

SEQ ID NO: 405042 - DNA, 201 bp, Homo sapiens
ggagacagagtttcactctgtcgcccaggctggagtgcagtggtgcgatctcggctcgctgcaacccctgcctcccaggttcaagcaattctcctgcttcrgcctccctagtagctgggattacagatatgcgccaccacgcctggctagtttttgtattgttagtagagacggagtttcaccctgttggccaggctgatc

SEQ ID NO: 405043 - DNA, 201 bp, Homo sapiens
cctttacacattatattaacattcatattgcaaggcattccattcacaaatattacagtttgataaaaacttcacacacatactcccaaagtctataccakattcagtcaactttactaaatcattcaaataataaaagtaatgaaaacattattatattttaaagcaataaggtctgaggcactctgggaaagatgttct

SEQ ID NO: 405044 - DNA, 201 bp, Homo sapiens
agaccaggaccaaataacgtctttttatctttttttttttttttttttttttttggagacagagtttcactctgtcgcccaggctggagtgcagtggtgcratctcggctcgctgcaacccctgcctcccaggttcaagcaattctcctgcttcggcctccctagtagctgggattacagatatgcgccaccacgcctggc

SEQ ID NO: 405045 - DNA, 201 bp, Homo sapiens
tcccccttttagaccatatagggtaacttcatgacattgccatggcatttgtaaactcgtggcactggtgagactgccttttggtgtacaaatgcactatrattagcctataatgagccttgaagatgaccagaggtcactttcattgccatcttggttttgatgggtttttgctggcttctttaccccagcctgtcttat

SEQ ID NO: 405046 - DNA, 201 bp, Homo sapiens
gatccaggggatcttgctagtaacctctaactgaagcctcattctagcacatgctggttgggaaattcattgtatcattgaggccccttgcattgctgatytaaagataatagaagcttttgtctagagaacaggagtgactgtggtcatctcagttaccaggacatttaaaggagaaagaaaaaatccctaccatttgtg

SEQ ID NO: 405047 - DNA, 201 bp, Homo sapiens
cttgttgttgagacttccagagttctgtcctgggtagtttaaaagtctcaattggccaaaactttaatgaggttttagtaaatcttaatacagaggaaggraaatttcaaaagtatttacttcttcactgaaaggtgttggtcaaattcttcatctccatgctattttggagtttctcattactctttaactcatcaaaaa

SEQ ID NO: 405048 - DNA, 201 bp, Homo sapiens
agatcgagaccatcctgggtaacatggtgaaaccccatctttactaaaaatacaaaaaattagctgggcgtggtggcaggcgcctgtagtcccagctaccygggaggctgaggcaggagaatggcgtgaacctgggaggcagagcttgcaatgagctgagatcacgcaactgtactccagcctaggcgatagagcgagact

SEQ ID NO: 405049 - DNA, 201 bp, Homo sapiens
aggcttcttgttgattgtattccttctttagatacagtgagaaattgaagtacctaattttatttaaaatcttaccatttagtcgggcctggtggctcacrcctgtaatcccagtactttgggaggctgaggcgggtggatcacgaggtcaggagatcgagaccatcctgggtaacatggtgaaaccccatctttactaaa

SEQ ID NO: 405050 - DNA, 201 bp, Homo sapiens
ttgtgcaactgaagaaacatttatttttcacatgaggaaatgtgtagcttgtagaggtggctgatttaagtaacttgtgcagctctcaaggggtgtctgcmttctgtctcctttctaccccatgaaagaagcggggggatgtgaagagaccaggggagtgactccaccttatgcctcaccctggtctcatcttgcccagct

SEQ ID NO: 405051 - DNA, 201 bp, Homo sapiens
tgcttagaattgtcagtaaaaggaaaaggttaggctccattaagacattttttaaaggggagcaggccatcaaatttagtattcttgtttctttggattcytatgttgcataacttaattgttagtattctgaatctgacttgtggagttgaaatttatggcacattgaaatgaaaaaggttctaatgcagtgtctgattc

SEQ ID NO: 405052 - DNA, 201 bp, Homo sapiens
gaggggcagaaagagaaggaagctttgtctcggctcttcagttgggaagcagctttctttgctgcttctgggacagtcggaacggggtgggggggtgggaragccggagagtggggggcaggggctggtcaggtcggtatcccagtggaaatggcttaggagcggccacgcattgcttcttacacgaaattaagtaactcg

SEQ ID NO: 405053 - DNA, 201 bp, Homo sapiens
ggctcagaggggcagaaagagaaggaagctttgtctcggctcttcagttgggaagcagctttctttgctgcttctgggacagtcggaacggggtggggggstgggagagccggagagtggggggcaggggctggtcaggtcggtatcccagtggaaatggcttaggagcggccacgcattgcttcttacacgaaattaagt

SEQ ID NO: 405054 - DNA, 201 bp, Homo sapiens
aaacatgagatattcatgaattgcaatggcaaacgttttttaggttcgccaatatgaaaatgtaaagcagttttaagatgattaatattaaaataggccargtgcggtggctcacaactgtaattccagcactttgagagcccaaagtgggaggatcacttggcctccgaagttcaagaccaacctgggcaacacagatgt

SEQ ID NO: 405055 - DNA, 201 bp, Homo sapiens
cttacacattctttaatttcttttaattcctgttccacaaggtcatattaacaatgataagaataaataattgtgtggcagtttatgtagtgcattgtacwtcagtggtttcattccatctttataacaacctcactactatccccattttcacagatgagagaagactcagaaattaagaggttttgacacagagagggt

SEQ ID NO: 405056 - DNA, 201 bp, Homo sapiens
caaacatgagatattcatgaattgcaatggcaaacgttttttaggttcgccaatatgaaaatgtaaagcagttttaagatgattaatattaaaataggccragtgcggtggctcacaactgtaattccagcactttgagagcccaaagtgggaggatcacttggcctccgaagttcaagaccaacctgggcaacacagatg

SEQ ID NO: 405057 - DNA, 201 bp, Homo sapiens; identical to SEQ ID NO: 90523

SEQ ID NO: 405058 - DNA, 201 bp, Homo sapiens
gataattaaggaatcacagagaccgaggggttgaggaggaattatttaataatttaggttcattaacccagtcggattaacgttcaaaggactgagtcccraacaaagagtcaagctaccttttaagcatttcgtggggtggggggagacctttgtagggggagcatattacagaagcaagaaacaaagacagttattcaa

SEQ ID NO: 405059 - DNA, 201 bp, Homo sapiens
tgtctttaaggaacaactaccaagtgaacaagatgagcaaagtcctctattatacaagatttccttcggtggaacattatggtgacaaagcagcgtaatgrgctcttaagcagattgatttttatcaaactggacatatcagaattccttatgtataagagaaatatgcacatgctcctttcaagaaaagagtgataaccc

SEQ ID NO: 405060 - DNA, 201 bp, Homo sapiens
ttttgtcctcagctaagtaacaagcatactgcagaaatttgttgaataaattaatgtgtgatttcttttaggatggaagagtgtagaaagtgtcccaaagytggtgtctgaatatatgtccaaaaagataaaagttgatgaatttgtgactcacaatctgtcttttgatgaaatcaacaaagcctttgaactgatgcattc

SEQ ID NO: 405061 - DNA, 201 bp, Homo sapiens
tacaggcgactgccacctcccctggctaattttttgtatttttagtagagacggggtttcacctagccaggatggtctcgatctcctgacctcgtgatcckcccgcctcggcctcccaaagtgctgggattacaggcttgagccaccgcgcccggccagggacttcatattctttcttattcagttctcacaatcacccta

SEQ ID NO: 405062 - DNA, 201 bp, Homo sapiens
gcctcccgagtagctgggattaccggcgcccgtcaccatgctcggtatttttgtatttttagtagagacggggtttcgccatagtggccaggctggtctcsaactcctgacctcaggtgatccgcccatctcggcctcccaaagtgctgggattacaggcgtgagcccctgcacccggcctacagaggccattttttatat

SEQ ID NO: 405063 - DNA, 201 bp, Homo sapiens
atttccaacctcaccaatttacagaggccatttccctcccccccccctcccccgccagttcagacggagtttcgctctttgtttcccaggctggagtgcgrtagcgcgatcttgggtcactgcaacctttgcctcccgggttcaagcgattctcctgtctcagcctcccgagtagctgggattaccggcgcccgtcaccat

SEQ ID NO: 405064 - DNA, 201 bp, Homo sapiens
tgcagcctcgccggcgagtgcaccctggaacgcacaacttagcggcacgcaccacagctcgagcaccgcccttccggttggagccattgcaagccccccccacgccccgcccccctcgctaggcgctcgccacgcccatgcctccgtcgctgcgcggcccaccccggatgtcagccccccgcgccgaccagaatccgtgaa

SEQ ID NO: 405065 - DNA, 201 bp, Homo sapiens
cttagaaggtgagaaggcttcttgttgattgtattccttctttagatacagtgagaaattgaagtacctaattttatttaaaatcttaccatttagtcggscctggtggctcacgcctgtaatcccagtactttgggaggctgaggcgggtggatcacgaggtcaggagatcgagaccatcctgggtaacatggtgaaacc

SEQ ID NO: 405066 - DNA, 201 bp, Homo sapiens
attctgatagtgaggaagtagttatgggtatagcagggacaggaagttgattgcaaagtaagcaaacagcagtatcagccatggtgtgtttcttgtggacycaagtagcttgttacatttttattcatttttccaggagtgcagtgatcactggatgtgatcatatatctgtctgattttagcagtaaccaatattgagtc

SEQ ID NO: 405067 - DNA, 201 bp, Homo sapiens
ttttatagcaatttgtaaaggaagttacctatgtttctcagcattttctagtgagaaaatgaaggcataaagattaattaacttgctcagatcacacaggrtttgaacccaagtgctctgactttagggtgggtcctcctaagcaagatgttacatcacctctgtttagaatagcaaaagtaatttttgttaccatttatt

SEQ ID NO: 405068 - DNA, 201 bp, Homo sapiens
aatctcccagattacttgtttaggaaaaaaggtatttttacagtgaaaaggtctgacaaacaccaagtgatcaaactttgcatcagcaataaggtgacaasaacattatgtgcctcacgttgtacaatgaatggggcatacaactgccatttctgtagtcttccaccaagatgtttatcctgcatctatcctcatgaggaa

SEQ ID NO: 405069 - DNA, 201 bp, Homo sapiens
cttgaacccaggaggtggacattgccatgagccaggatcatgcactacactccagcctgggtgccagagggagactcttatctcaaaaaaaaaaaaacaamaaaaaaaattaaaatataaattgttcaataacattgagctcactaaatgttaagtttggccttttgttgccattatctttaaaaactatgccatctctag

SEQ ID NO: 405070 - DNA, 201 bp, Homo sapiens
agtttacacttgcaccagcattgtatgggagatccatttgtttataatgccattgacaaaattagtttatatttttggaaaacaaaattccatttattttrtaaagcaaatccagttactttggtaaaaccagaaccaaaaacaaaaaaatctaatcactttgaaagggaattttaaacgcagtctgaaagattttgcaac

SEQ ID NO: 405071 - DNA, 201 bp, Homo sapiens
caaaaaaaacgagttctgcaacaagtccgtcggattttagcaatgaaaccggcgccgtgcagcctcgccggcgagtgcaccctggaacgcacaacttagcrgcacgcaccacagctcgagcaccgcccttccggttggagccattgcaagccccccccacgccccgcccccctcgctaggcgctcgccacgcccatgcctc

SEQ ID NO: 405072 - DNA, 201 bp, Homo sapiens
ataagctccctcatgtcccttccaagtcagaacctacctccctcttaggtaaccactgtcctgattcctttcactgtgaccttgtataaatagagtcatgmagtgcatgctcttttgtcaggtttctttttttcataatgtctgtgagatatatccaagctgcatatgcgtcagtagttccttcttgttgctctgtcttaa

SEQ ID NO: 405073 - DNA, 201 bp, Homo sapiens
tagggcccgttgagcggagggccctgagtccaagggagggagtgcatggcatgggactaggctgctatcctcgggggcgcgcgaggctcggcgcccaagasgggatctggctcttggttctgaaactgggcccccagcgagcggctcagaggggcagaaagagaaggaagctttgtctcggctcttcagttgggaagcagc

SEQ ID NO: 405074 - DNA, 201 bp, Homo sapiens
tttgttggcaagtcttgttaagaacaaaatgccctagaatttttcaaaataattccttttacactcctcatgcaggaagcaattggggatttttctctgaycttctctgagaattcacggaggtaaaactcacaaaagtgtgaaagcccccctacgattgggtcccccaagaatctttaactctcaaactaatccataatg

SEQ ID NO: 405075 - DNA, 201 bp, Homo sapiens
acaagaacagctcagggaaggatgagaaaagatgtttctttgcctttcaatgcctgctaagtgcatgtctcatgaaatgaaaagacagaataaagcagttstgcagagcatgatctttggaatcaaatacacatccacttactaactcagtgaccctgaacaaacagcttctctcaacctcagtttcctcatctgtaaaat

SEQ ID NO: 405076 - DNA, 201 bp, Homo sapiens
cctttcccccaggtcagttaaccacttgtaaaaatcccagtacactaggctcgagtaaaatagtttcttttgttggcaagtcttgttaagaacaaaatgcmctagaatttttcaaaataattccttttacactcctcatgcaggaagcaattggggatttttctctgatcttctctgagaattcacggaggtaaaactcac

SEQ ID NO: 405077 - DNA, 201 bp, Homo sapiens
acatactcagtctaaagttgctgattattttaatgttttgcaattttggacattttctagtaagacaaatggccttaaacatattggagtttgaaagaaawaaactctaaacagtctttcagacttaaactggtagttgcttttccttattactgagtgtctttattcagagaaggtgaaagattataattgttactatag

SEQ ID NO: 405078 - DNA, 201 bp, Homo sapiens
gatactcgctggagacagtccgtctacaggcatgtctgataggcacaagttctttattcacacaaaactaacatatagagtagaatttatgggatgatgaygtcgtttgggatagaggtatggaaaaaactgcattatgtccaaaactttactacagtggagccagtcaacatgtgtacaacttaacacctaacaaaaatg

SEQ ID NO: 405079 - DNA, 201 bp, Homo sapiens; identical to SEQ ID NO: 90522

SEQ ID NO: 405080 - DNA, 201 bp, Homo sapiens; identical to SEQ ID NO: 90525

SEQ ID NO: 405081 - DNA, 201 bp, Homo sapiens
ctgcaacccctgcctcccaggttcaagcaattctcctgcttcggcctccctagtagctgggattacagatatgcgccaccacgcctggctagtttttgtaytgttagtagagacggagtttcaccctgttggccaggctgatctccaactactgacctcaagtgatccacacgcctcagcctcccaaagtgctgggattac

SEQ ID NO: 405082 - DNA, 201 bp, Homo sapiens
tggaatatccatcacctcaaacaatgatcatttctaaaagaacattccaaagctgctcttttagctgttttgaaatatacaataaattattaattgttggraaacttttgaaagttatctttaagctgcttttttggacaagaggtatataattgcaatacagatggatattaacttccactgtatatttcattaaagctg

SEQ ID NO: 405083 - DNA, 201 bp, Homo sapiens
agcaaatctgcttcatagccagtcacattctgtatagaataaaacagttggtagttgtcatatcactgcacaaataggagattgccacagagaagtgtggygatttgttctcctagccacagaatcaatttaaaaattgtagaaattggctgggtgtggtggcttacacctgtaatccaagcactgtgggaggctgaagtg

SEQ ID NO: 405084 - DNA, 201 bp, Homo sapiens
ttccaaagtactgggattataggagtgagccactgcacctggcccaccgttttaatgatgggattttaaaataattccatctgatccataagttgtacctyttaaaatgagttcagtattctgacagtatgatctagaaggatagtgaatattggaaaagatggataagattataaatatcttataaatttcctttataag

SEQ ID NO: 405085 - DNA, 201 bp, Homo sapiens
gcacgtgctccgctacacctggctaattttattttttgtagagatagggtgttgctatgttgcccaggctactcttgaaatcctggctccaagttgtcctyctgtctcaactttccaaagtactgggattataggagtgagccactgcacctggcccaccgttttaatgatgggattttaaaataattccatctgatccat

SEQ ID NO: 405086 - DNA, 201 bp, Homo sapiens
aagaaaagaaccaataagttttagggatttttgtgtgtatagacattgtcatccggatgtaacttgctttgaagcagtgtttctgttgtgagtgtctcttrctgtaaatatttgttcatatttttgtgaattcagtactgtgtaccattgtattaatagtaactttttataaagcaaaccataaatatactgacttttctt

SEQ ID NO: 405087 - DNA, 201 bp, Homo sapiens
aaagaatttcttcaggcatatgttaagcatgcagatttcttggaccccatgccagacctgctgaatcagattctctcggaacttgtgttcttaacctgctyttgcatatgcactgtagaaggccattaaatatttgatgagtacaactttttaaccaaaagatacttttctatctgaccaggtaatcatctcaattaaatc

SEQ ID NO: 405088 - DNA, 201 bp, Homo sapiens
attgaggactgttagttacacttcagaaaaatgcctcctgaaagatataaattagccagtttggctatctgttttcattagttgatctggttaatggtttstaatctctacttgcatagatactggttttgactttatcctttatgatgttatatttgctcacagaggttgttttatttttttttatttttgagacaggat

SEQ ID NO: 405089 - DNA, 201 bp, Homo sapiens
gtcaaattcttcatctccatgctattttggagtttctcattactctttaactcatcaaaaaattcattcttttaaatgccttttgtcctcagctaagtaamaagcatactgcagaaatttgttgaataaattaatgtgtgatttcttttaggatggaagagtgtagaaagtgtcccaaagttggtgtctgaatatatgtcc

SEQ ID NO: 405090 - DNA, 201 bp, Homo sapiens
aaatgtaaagcagttttaagatgattaatattaaaataggccaagtgcggtggctcacaactgtaattccagcactttgagagcccaaagtgggaggatcrcttggcctccgaagttcaagaccaacctgggcaacacagatgtcatctctagaaaaaaaaaaaattttttttttttaattggccgggcatggtggcatgt

SEQ ID NO: 405091 - DNA, 201 bp, Homo sapiens
ttgttcaagaaactcctctggaatacagtgatttctcacattaaggaaggctaaacaaacttaaattgttctcattaagatatagcagttatttttagtcrggtgcagtggatcacacctgtaatcccagccctttgagaggctgaggcaggtggttcacttgagtccaacagttagagaacagcctgcacatcttggtga

SEQ ID NO: 405092 - DNA, 201 bp, Homo sapiens
gactcacaatctgtcttttgatgaaatcaacaaagcctttgaactgatgcattctggaaagaggtaggctttctctttatatatcatagaatgtaataatratgttgagtttgaggggatggagagtcgaaaaacacaattttagttgtcttaaaggtatcatttaaaacttagtatgttgcttccttttacagcattcga

SEQ ID NO: 405093 - DNA, 201 bp, Homo sapiens
ctttaactcatcaaaaaattcattcttttaaatgccttttgtcctcagctaagtaacaagcatactgcagaaatttgttgaataaattaatgtgtgatttmttttaggatggaagagtgtagaaagtgtcccaaagttggtgtctgaatatatgtccaaaaagataaaagttgatgaatttgtgactcacaatctgtcttt

SEQ ID NO: 405094 - DNA, 201 bp, Homo sapiens
ctgatcttctctgagaattcacggaggtaaaactcacaaaagtgtgaaagcccccctacgattgggtcccccaagaatctttaactctcaaactaatccayaatgagcctctggcaattcatcaattacagctcagactttcctactccagtaacagttcctgcaaaagtgtgtttctatggtaagttgtgattctttgaa

SEQ ID NO: 405095 - DNA, 201 bp, Homo sapiens
caggtgaagaaattgccactcgtccattccagctggtaacaggtcgcacatggaaaggcactgcctttggaggtaattcgatggatgagatgactgcattytctcttttgttagttgcattggcagatgtttaatcccagccacctaattttttttatattaacaagaatcttcatgagttccttctcattataagttgtt

SEQ ID NO: 405096 - DNA, 201 bp, Homo sapiens
tctcatatttattgtaaatcaatcttttacaaaataccagatcatcccaatatctacaggcactataatagatcactttcaactaaaatttatatttatayttatagtaagaatatttaagatttaattagttaaagtttaaataaaaagatgtttgcaaagcctccaggagaaatcagtacactgtgtaaaagttaacta

SEQ ID NO: 405097 - DNA, 201 bp, Homo sapiens
gtcaaaccaggtacaggattcacactcagggaacacgtgtggttcaccatccaggatttcccagcctggataaggaaaccaaggcaatgagagacgaaagkgcttgcacaaggtcaccgcgcagccaggacttcaggagtttcctctttccctctctgcctgcctgacccaagcatgtatgcattcaggcactcatgtatt

SEQ ID NO: 405098 - DNA, 201 bp, Homo sapiens
ttggttaaaaattctcatatttattgtaaatcaatcttttacaaaataccagatcatcccaatatctacaggcactataatagatcactttcaactaaaayttatatttatacttatagtaagaatatttaagatttaattagttaaagtttaaataaaaagatgtttgcaaagcctccaggagaaatcagtacactgtgt

SEQ ID NO: 405099 - DNA, 201 bp, Homo sapiens; identical to SEQ ID NO: 90545

SEQ ID NO: 405100 - DNA, 201 bp, Homo sapiens
  misc_feature (1)...(201): n = A,T,C or G
ccacagcactatcccgtgcaaaaaaggggaatgaaggatcaaaagacatgatctcttccctctacacactcacaatccagttaagcctattacatgatatngtgcattatgagtaggaactatgcgactccacgttaaggatgctaaatattcactttattccagatggcttccctgttatgttgtcatgaggcatgtggc

SEQ ID NO: 405101 - DNA, 201 bp, Homo sapiens
cttatgtattaatgtaaatacttttagaagtaaagggttaataactaggacattgccataccatcattttcacataaactttacctataaaatgttaatgyaccaacaatttttcttgatcatgtggaatgtatagcataggtgattagaaataaaaattatgtttaattttaaaaagttgctttagcctgtagattcacc

SEQ ID NO: 405102 - DNA, 201 bp, Homo sapiens; identical to SEQ ID NO: 148693

SEQ ID NO: 405103 - DNA, 201 bp, Homo sapiens
ccagaatcattgcggtggacatcaacaaggacaaatttgcaaaggccaaagagttgggtgccactgaatgcatcaaccctcaagactacaagaaacccatycaggaagtgctaaaggaaatgactgatggaggtgtggatttttcgtttgaagtcatcggtcggcttgacaccatggtatgtaccatgacatgccctgaga

SEQ ID NO: 405104 - DNA, 201 bp, Homo sapiens
caccgcgcagccaggacttcaggagtttcctctttccctctctgcctgcctgacccaagcatgtatgcattcaggcactcatgtattgtacccttcaaccrttatgtaccgagtatctactagaagccaggcaccaggttagagcctggagatatgtgaggatcaaaagagacacagtgcctaccagtgtggcattcatag

SEQ ID NO: 405105 - DNA, 201 bp, Homo sapiens
atttcaggaatttgggtatgttaaattcatctagttacaatcttttctgaatctgaacagcttctctttattctgtagatggtggctgtaggaatctgtcrcacagatgaccacgtggttagtggcaacctggtgaccccccttcctgtgattttaggccatgaggcagccggcatcgtggagagtgttggagaaggggtg

SEQ ID NO: 405106 - DNA, 201 bp, Homo sapiens
tacattaaataaatttacagtaaaatgatagtttattccaagctaatcatgactgatttgtaaatctaaagttagaaaagtctttaatggcaagttatctktataataagaaaccataattcaaatgtgttattatttttattcaaattttttatgaacacaggaaagttgtctgacagaagtttgatgagaggaatttga

SEQ ID NO: 405107 - DNA, 201 bp, Homo sapiens
tttttaattgtttaattacataaacctgtgcaactatgtccagtcctttttttgtgttaggagtgtaccacactgtaaaatatctcactatgataattcartttaaaggttctgaggcttctctctgcattgtgtgacaaacaggctcatatcaataagactggttgatggagctagaggacgttattctaagtaaagtaa

SEQ ID NO: 405108 - DNA, 201 bp, Homo sapiens
tctcatcaatataacaaagaaaggaatacagtatttgatgaataatttaaaattcatatctaaattagaaatgatatgctgaaatatgatatgcaatatayacctcaatatgtaatgtatactgaactgcagtggaaataagctattcttaagtacctttaacaggaatgtatagaacctgtgtctattagtctttatttc

SEQ ID NO: 405109 - DNA, 201 bp, Homo sapiens
ggtgggcagagaagacagaaacgacatgagcacagcaggaaaagtaagcaaaaaatatattactgttggtaatatattctcatcaatataacaaagaaagkaatacagtatttgatgaataatttaaaattcatatctaaattagaaatgatatgctgaaatatgatatgcaatatacacctcaatatgtaatgtatactg

SEQ ID NO: 405110 - DNA, 201 bp, Homo sapiens
tgcattcaaagttgcagcttagtgcagacaaagggaatacaaggcagaacgacctatgtgggattgaaagaagagaaacaaggaattccagaggccggggkgggtgggaagtgaggaaaagagaaagtgattacaatttatcactttaacttaatatttaaactaatgaaaacaaaatcttatctagaatttggaagtcaa

SEQ ID NO: 405111 - DNA, 201 bp, Homo sapiens
gtgccccaaaactgataaattaattcaaagaaagatgtggtatctgagaagctgatgctctcaccctgagaagagggaagggattccccaggatgagggtkaggaggctccaggatggcaggtgtggcctgatgcaaagcacctcctgcccacatggaagtaagtcaaagactccagggagatacacagctgggaataaaa

SEQ ID NO: 405112 - DNA, 201 bp, Homo sapiens
ctggaagggggctgtttatggtggtatgtagttgggctcaagtgccaaattctcattaatctcaatatatctcattaatctcaatataatctcaatatatrtgcccttttacaattgacaaggcaagattttgaaaacaaatcaaaaataaatttaaattccttttctatctacagtctccaaatcaactagatatggaac

SEQ ID NO: 405113 - DNA, 201 bp, Homo sapiens
gagaagacagaaacgacatgagcacagcaggaaaagtaagcaaaaaatatattactgttggtaatatattctcatcaatataacaaagaaaggaatacagyatttgatgaataatttaaaattcatatctaaattagaaatgatatgctgaaatatgatatgcaatatacacctcaatatgtaatgtatactgaactgcag

SEQ ID NO: 405114 - DNA, 201 bp, Homo sapiens
tatatttctcatatatgcatatgcatatacatatatatgttaaaaattattaaagagtcacaaagaccatcattttctaaaaatatgtattcatgagaagwtggtttatagaaagggcattagttctagtgtaaatgttccatttgtaatcttcacaagaatgaactatcttagaattaatacaaatcaactttattctct

SEQ ID NO: 405115 - DNA, 201 bp, Homo sapiens
ccagctactccggaggctgaggcaagagaatcacttgaacccaggaggcggaggttgcagtgagccaagatcgcgccattgcactccagcctgggtgacayagtgaaactctgtctcaaaaaaaaaaaagaaaaaagaaaaaaaagaaaagtcaacagactttaccaacccccagaatttaaaagctacgtatctcatagc

SEQ ID NO: 405116 - DNA, 201 bp, Homo sapiens
ccagaattctctagaatcctactgaaaatgtctccagaaaccaacaagtttccattgctgaggttttctagaaggtccagcagtgtgggtaacagggagtrgcaccctaagatcaaagctctcggcagccttgacctaggacagatgccacagaggaataaaatgtcaagagaattcaactttttccagggctacagcttt

SEQ ID NO: 405117 - DNA, 201 bp, Homo sapiens
tttttctaccataggggattgtctagcagagaatgaaaaaggtggaaagatgagaaaatatagagtcccttggttttccattaccagttcagtctttgcayggagcgtatgtaggatcatactgtgagaagttgaaaacagttgctttgcatttcctattctgctggagtcaaattacgttgattactgcaaatctgaatg

SEQ ID NO: 405118 - DNA, 201 bp, Homo sapiens
cacatatacttcagaagtggtaaatttcaagcagaaattctttaaaggctcctcatctgagtaggctgaaaatctagtagtatgctttattttatgaaacygaggttcagatatataaagatatttgcccaaagcctcagtgctgagactaaaatatatttttaatatgagagctgagactaaaatatctttttcaaatct

SEQ ID NO: 405119 - DNA, 201 bp, Homo sapiens
tgcagggggaagcccattcaccacttccttggcaccagcaccttctcccagtacacggtggtggatgagaatgcagtggccaaaattgatgcagcctcgcmcctggagaaagtctgcctcattggctgtggattctcgactggttatgggtctgcagttaacgttgccaaggtgagaatgacaatgggtgataaaactgct

SEQ ID NO: 405120 - DNA, 201 bp, Homo sapiens
ataccagatcatcccaatatctacaggcactataatagatcactttcaactaaaatttatatttatacttatagtaagaatatttaagatttaattagttaaagtttaaataaaaagatgtttgcaaagcctccaggagaaatcagtacactgtgtaaaagttaactattagtacagtggaagtaatttttttaatctgtg

SEQ ID NO: 405121 - DNA, 201 bp, Homo sapiens
aataccagatcatcccaatatctacaggcactataatagatcactttcaactaaaatttatatttatacttatagtaagaatatttaagatttaattagttaaagtttaaataaaaagatgtttgcaaagcctccaggagaaatcagtacactgtgtaaaagttaactattagtacagtggaagtaatttttttaatctgt

SEQ ID NO: 405122 - DNA, 201 bp, Homo sapiens
gacaaataaataatgaaaatgaattggcagaaaaataaatctcaattgaatttttaaattatatttgcaattatgttggttctttctagaaagggctctgmgaattatacatgctttaccacaacgaagatgggttttacagtacactgccaagcactagaaatatatgctgaactttatttttaagaacatctatggata

SEQ ID NO: 405123 - DNA, 201 bp, Homo sapiens
tatgctgctactgactggacgcacctggaagggggctgtttatggtggtatgtagttgggctcaagtgccaaattctcattaatctcaatatatctcattmatctcaatataatctcaatatatatgcccttttacaattgacaaggcaagattttgaaaacaaatcaaaaataaatttaaattccttttctatctacagt

SEQ ID NO: 405124 - DNA, 201 bp, Homo sapiens
gaaggatcaaaagacatgatctcttccctctacacactcacaatccagttaagcctattacatgatattgtgcattatgagtaggaactatgcgactccamgttaaggatgctaaatattcactttattccagatggcttccctgttatgttgtcatgaggcatgtggcacaagcgtcatcgtaggggtacctcctgcttc

SEQ ID NO: 405125 - DNA, 201 bp, Homo sapiens
ttgtagctaacatttaggagggtgctcctatctgcaaaactccatgatgagtgctttacaaggattatttcatttattcacaaacagtcctttaaaatgaygccattattcatcttcatctcacagataaggaaattaaggcaaaaaaaattcagtgaaataataagtccaagtacacagaacaagtaaggaactgggttg

SEQ ID NO: 405126 - DNA, 201 bp, Homo sapiens; identical to SEQ ID NO: 148714

SEQ ID NO: 405127 - DNA, 201 bp, Homo sapiens
agccaccgcgcccggccttgaatgggaatcttattaaaaaaaaaaaaataggggactgggcattgtggctcatacctgtaaccccggtgctttgggaggcygaggcaggtggatcacttgagctcaggagttccagactagcctggacaacatggcaaaaacctgtctttacaaaaaaacacaaaaattagccaggcatag

SEQ ID NO: 405128 - DNA, 201 bp, Homo sapiens
aatgtctcttctttcctattgcagtatccgtaccgtcctgacgttttgaggcaatagagatgccttcccctgtagcagtcttcagcctcctctaccctacragatctggagcaacagctaggaaatatcattaattcagctcttcagagatgttatcaataaattacacatgggggctttccaaagaaatggaaattgatg

SEQ ID NO: 405129 - DNA, 201 bp, Homo sapiens
aaatgtgcattgtcataggtttctgacaaacaatttgtgatttttattaaaattttaaacatgcatatcccaagcaatatcacacttgggaattgactccrtaattataattatctgtgtataagaatatagaaacaagactattagcagcagccttacttgtagaagaaacaaaaatttttaaactctctgattgattga

SEQ ID NO: 405130 - DNA, 201 bp, Homo sapiens
ctgcaagttattatccactgttgttttatattccttattataccaggaacgtgggcacacaaaaatgattttttgaagatgctaatgtagaattaatgtasaattgaaatgacaggcatactcaggatgttgtgagtgagattaagattggagaaaaaaagaaaagaaaagaaaaccaaaaaagatgaacttcctttttct

SEQ ID NO: 405131 - DNA, 201 bp, Homo sapiens
taaatgtgcattgtcataggtttctgacaaacaatttgtgatttttattaaaattttaaacatgcatatcccaagcaatatcacacttgggaattgactcyataattataattatctgtgtataagaatatagaaacaagactattagcagcagccttacttgtagaagaaacaaaaatttttaaactctctgattgattg

SEQ ID NO: 405132 - DNA, 201 bp, Homo sapiens; identical to SEQ ID NO: 90543

SEQ ID NO: 405133 - DNA, 201 bp, Homo sapiens
tatttcctacattaaataaatttacagtaaaatgatagtttattccaagctaatcatgactgatttgtaaatctaaagttagaaaagtctttaatggcaakttatctttataataagaaaccataattcaaatgtgttattatttttattcaaattttttatgaacacaggaaagttgtctgacagaagtttgatgagagg

SEQ ID NO: 405134 - DNA, 201 bp, Homo sapiens
cttagtgcctgacacagggaggtgttcagtccatacatactagttttgagtggagcagaattgccaggcacagtgatcccctttgctgtgactaattgggkgtctgattctctgctgtaaagacaaagaggctgctctctctatcctacttcgtttttcctgttttcttactcttcttccttcctcgccaccccatgtgca

SEQ ID NO: 405135 - DNA, 201 bp, Homo sapiens
ccagagcaagttacaaatctttctaagtctcagtttttataatctctaaaatggacataatatgggaacctacctcttagtgttgatgtttaggttgaagkttaagaaaatgcacgaagaatgtgacaaatagtaagaacttactgcaagttattatccactgttgttttatattccttattataccaggaacgtgggcac

SEQ ID NO: 405136 - DNA, 201 bp, Homo sapiens
tgaatcccaacactccatactagatgtgctaccagagcaagttacaaatctttctaagtctcagtttttataatctctaaaatggacataatatgggaacytacctcttagtgttgatgtttaggttgaagtttaagaaaatgcacgaagaatgtgacaaatagtaagaacttactgcaagttattatccactgttgtttt

SEQ ID NO: 405137 - DNA, 201 bp, Homo sapiens
aacttaggagactgatctctacactaaatataaaggccacaaaagagaatgggccctaaaaccacaggagggatgctagtatgacagggatggaaagaagygaagcatgactgtgagatggcgttaacatatctccacaagggcgaccttgtcctagatctcaaagtttggggaggatttgaatgggccagagggacagaa

SEQ ID NO: 405138 - DNA, 201 bp, Homo sapiens
tgcaaatctgaatgatcagagccactcagccttcctgaaaagagaacactcacatttgcccaaaaaaaaccccacaaaaaaacaaaagtctatttaaacarccataattataacatggtgtctttgaagcctcttccttctacctatataaagctgacactaagtgtctgcatatttaaataattttcaggacatcctcaa

SEQ ID NO: 405139 - DNA, 201 bp, Homo sapiens
ttcacgccattctcctgcctcagcctcccgagcagctgggactacaggcgcgcgccaccatgcccggctaattttttgtgtgtgtatttttagtagaggcrgggtttcaccgtgttaaccaggatggtttcgattacctaacctcgtgatccgcccgcctcggcctcccaaagcgctgggattacaggcgtgagccaccgc

SEQ ID NO: 405140 - DNA, 201 bp, Homo sapiens
acgaataaagatgtcatttacaataatttttcttctgaatttgctgtttatgggatcatgaaattttagacctaagaattcatttagtaattcattcaacrattagagagcacctataaatgcctcaggcaccataggttctgctaggctctgacagcaaaagtaaatgaaatgaagcgtttgcccttgaggaccatctag

SEQ ID NO: 405141 - DNA, 201 bp, Homo sapiens; identical to SEQ ID NO: 90549

SEQ ID NO: 405142 - DNA, 201 bp, Homo sapiens; identical to SEQ ID NO: 90561

SEQ ID NO: 405143 - DNA, 201 bp, Homo sapiens
aaataccagatcatcccaatatctacaggcactataatagatcactttcaactaaaatttatatttatacttatagtaagaatatttaagatttaattagttaaagtttaaataaaaagatgtttgcaaagcctccaggagaaatcagtacactgtgtaaaagttaactattagtacagtggaagtaatttttttaatctg

SEQ ID NO: 405144 - DNA, 201 bp, Homo sapiens
taggcactttctaacaatcatcacttaatctatttttgcattttctgaaaacacaggtcaccccaggctctacctgtgctgtgtttggcctgggaggggtyggcctatctgctgttatgggctgtaaagcagctggagcagccagaatcattgcggtggacatcaacaaggacaaatttgcaaaggccaaagagttgggtg

SEQ ID NO: 405145 - DNA, 201 bp, Homo sapiens
aaaataccagatcatcccaatatctacaggcactataatagatcactttcaactaaaatttatatttatacttatagtaagaatatttaagatttaattagttaaagtttaaataaaaagatgtttgcaaagcctccaggagaaatcagtacactgtgtaaaagttaactattagtacagtggaagtaatttttttaatct

SEQ ID NO: 405146 - DNA, 201 bp, Homo sapiens
atcctaaaagaaagtgcctaacttgttgtgaagagctgaagttttcagagaaatttctggaattcttctttgtcccatttttgtttttctcaaaaaaaaaagacctaggattttttaaagcattcatttcataaaaaaagataagcatagtcactttgaaaagtcaagaattggttaaaaattctcatatttattgtaaat

SEQ ID NO: 405147 - DNA, 201 bp, Homo sapiens
atctagttacaatcttttctgaatctgaacagcttctctttattctgtagatggtggctgtaggaatctgtcgcacagatgaccacgtggttagtggcaamctggtgaccccccttcctgtgattttaggccatgaggcagccggcatcgtggagagtgttggagaaggggtgactacagtcaaaccaggtacaggattca

SEQ ID NO: 405148 - DNA, 201 bp, Homo sapiens
catttgttgtcaaggaaaggtataaatataaattttaaatttttaaaaaatgatcaaagagtacatacagtataattccagtaaaatacaaaagaatttatgtttgtacagaaaaaaattccaaaggatatatatcaagacttcaaaatcaattaatattagatattttccatgtgttactttgctatttctacttctatt

SEQ ID NO: 405149 - DNA, 201 bp, Homo sapiens
acatttgttgtcaaggaaaggtataaatataaattttaaatttttaaaaaatgatcaaagagtacatacagtataattccagtaaaatacaaaagaatttatgtttgtacagaaaaaaattccaaaggatatatatcaagacttcaaaatcaattaatattagatattttccatgtgttactttgctatttctacttctat

SEQ ID NO: 405150 - DNA, 201 bp, Homo sapiens
caacttatgacttcaagagtgggaaaacactgtcaccatctctctgtttgattttctaggtaatcaaatgcaaagcagctgtgctatgggaggtaaagaarcccttttccattgaggatgtggaggttgcacctcctaaggcttatgaagttcgcattaaggtgaaatatttttccatttatatttcattttacatttaaa

SEQ ID NO: 405151 - DNA, 201 bp, Homo sapiens
ccctcaaatacattttagaaacacaatttcaggaatttgggtatgttaaattcatctagttacaatcttttctgaatctgaacagcttctctttattctgyagatggtggctgtaggaatctgtcgcacagatgaccacgtggttagtggcaacctggtgaccccccttcctgtgattttaggccatgaggcagccggcat

SEQ ID NO: 405152 - DNA, 201 bp, Homo sapiens
attttcactaagacacctcagatgctccttggactctcacaacaagcatgtgggttgtctaaatgttaacacaatgtctcttctttcctattgcagtatcygtaccgtcctgacgttttgaggcaatagagatgccttcccctgtagcagtcttcagcctcctctaccctacaagatctggagcaacagctaggaaatatc

SEQ ID NO: 405153 - DNA, 201 bp, Homo sapiens; identical to SEQ ID NO: 90583

SEQ ID NO: 405154 - DNA, 201 bp, Homo sapiens
attacctccacctggtctctcccttgacatgtagggattatagggattataattcaagatgagatttgggtggggacacaaagtctaaccatatcaccaayttagtatgccattgtactatattaatcaattttttaaaatcttttggattttgtttacctagttgatttcattgtggctatttttatttcatcataaagc

SEQ ID NO: 405155 - DNA, 201 bp, Homo sapiens
ccttaaattatatggggcctttgggccattgcaaggttttaggagtttattctgagagagaaataaaaccacagaggcttctgagggaggtgtcacctgayctgacttccattttaacactctccttctggctgctctatggggaatactctaaatggggcaaagggcacaagcagggagaccatggaagaagtcattata

SEQ ID NO: 405156 - DNA, 201 bp, Homo sapiens
acactggaaggacttagattatcactcaacaattaatattgttttaggagagatggagccagggccactctgctcaaggtaggtgacacagtgagtccttytttttccctccttcacaaagtctcgttttctagtgccttcatacagagttgtactgggtgctttgaaggtactcccaatattagagtctgctttatacaa

SEQ ID NO: 405157 - DNA, 201 bp, Homo sapiens
ccagtagtgtttctatagggatgaattatgtaacaggaagttccgatttaatccattattattaatatacacaagaatgtgtattaaagtgaatttattcrattcataatagcaccaacaaaaatcctggacccaaagccaaaaccaacaacaacaacaaaagggattgtcacattttatgggaacagttcagattcacac

SEQ ID NO: 405158 - DNA, 201 bp, Homo sapiens
aaccttcaattttctaaccatgccacctgtatggcagcccgcagcaccagaccttcagttagacctgtaaaacagatctgagattcctggaactagaaagytccaacctggcatagcgtaaagagacttggaaaaatggaataaagccacttttgctcaagattgagtggcagattaactcaccttaatgcttttggtaat

SEQ ID NO: 405159 - DNA, 201 bp, Homo sapiens
accatatcataccactctcagctgactagatggcaaggtagtcaacccttctagataattgttttaagtaggatcttccttgtatatgtagatttcttggygaaagcaattctgtctcttgaatgtcagcaaagtaagcatcagaaggtgactgaggagaggtgaaaagggattattccaaatgttgtggtctattccccc

SEQ ID NO: 405160 - DNA, 201 bp, Homo sapiens
taatttaaaatggttaataatcatagctaaagacttcttttaaaatcttctgggagtcagattgttttgaggttactttttgcaaagaatgaggaactcamttgtgcctggagaaatgacaacttcgtggaacgttttcctccctttctttggacagagcttaaccttggctttggacaccagttgttgagtaggcattgc

SEQ ID NO: 405161 - DNA, 201 bp, Homo sapiens
gtaactaacctgcacattgtgcacatgtaccctaaaacttaaagtataataataataataaataaataaataaaatagatctattttattagaaaaaaaaataaaataggtctattttattagaaaaaaaaaagaatctttgacctaatacattattaaaagaaaaacctttatcaagaaatgcaattgaaaatgaagttt

SEQ ID NO: 405162 - DNA, 201 bp, Homo sapiens
atattaatcaattttttaaaatcttttggattttgtttacctagttgatttcattgtggctatttttatttcatcataaagctgctatttatttcaagtargccacaaaatttccttattttacagttttcaaagtgctttctcaaatgtgcattattcagatccctgtaagccaggtattatttttaccatttttagatg

SEQ ID NO: 405163 - DNA, 201 bp, Homo sapiens
ctaatttaaaatggttaataatcatagctaaagacttcttttaaaatcttctgggagtcagattgttttgaggttactttttgcaaagaatgaggaactcmcttgtgcctggagaaatgacaacttcgtggaacgttttcctccctttctttggacagagcttaaccttggctttggacaccagttgttgagtaggcattg

SEQ ID NO: 405164 - DNA, 201 bp, Homo sapiens
aaaacatgtggaaaaatgctcaccatcactggccatcagagaaatgcaaatcaaaaccacaatgagataccatctcacaccagttagaatggcaatcattraaaagtcaggaaacaacaagtgctggagaggatgtggagaaataggaacacttttacactgttggtgggactgtaaactagttcaaccattgtggaagtc

SEQ ID NO: 405165 - DNA, 201 bp, Homo sapiens
tctaatttaaaatggttaataatcatagctaaagacttcttttaaaatcttctgggagtcagattgttttgaggttactttttgcaaagaatgaggaactyacttgtgcctggagaaatgacaacttcgtggaacgttttcctccctttctttggacagagcttaaccttggctttggacaccagttgttgagtaggcatt

SEQ ID NO: 405166 - DNA, 201 bp, Homo sapiens
ttttgcaacctactcatctgacaaagggctaatatccagaatctacaatgaactcaaacaaatttacaagaaaaaaacaaacaaccccatcaaaaagtggrcaaaggacaggaacagacacttctgaaaagaagacatttatgcagccaaaaaacatgtggaaaaatgctcaccatcactggccatcagagaaatgcaaat

SEQ ID NO: 405167 - DNA, 201 bp, Homo sapiens
cctgagaaaaacaagaaatggggaagggattccctatttaataaatggtgctgggaaaactggctagccatatgtagaaagctgaaactggatcccttccytacaccttatacaaaaattaattcaagatggattaaagacttaaacattagacctaaaaccataaaaaccctagaagaaaacctaggcattaccattcag

SEQ ID NO: 405168 - DNA, 201 bp, Homo sapiens; identical to SEQ ID NO: 90581

SEQ ID NO: 405169 - DNA, 201 bp, Homo sapiens
caaaccactgctcaaggaaataaaagaggatacaaagaaatggaagaacattccatgctcatgggtaggaagaatcaatatcatgaaaatggccatactgsccaaggtaatttatagattcaatgccatccccatcaagctaccaatgactttcttcacagaattggaaaaaactactttcaagttcatatggaaccaaaa

SEQ ID NO: 405170 - DNA, 201 bp, Homo sapiens; identical to SEQ ID NO: 90582

SEQ ID NO: 405171 - DNA, 201 bp, Homo sapiens
taccagtctgtgtcttttaattggagcatttagtccatttacatttaaagttaatattgttatgtgtgaatttgatcctgtcatgatgatgttagctggtyattttgctcattagttgatgcagtttcttcctagtctcgatggtctttacattttggcatgattttgcagcagctggtaccggttgttcctttctatgtt

SEQ ID NO: 405172 - DNA, 201 bp, Homo sapiens
cagtcatttttactttaatgtatttacatttttcctatgctaatttttgaattgaattaattaatacgtgtatttgatgtatcaaacagtattactggtcrtggagtactggctgatggcaccaccagatttacatgcaagggcaaaccagtccaccacttcatgaacaccagtacatttaccgagtacacagtggtggat

SEQ ID NO: 405173 - DNA, 201 bp, Homo sapiens; identical to SEQ ID NO: 90585

SEQ ID NO: 405174 - DNA, 201 bp, Homo sapiens; identical to SEQ ID NO: 90586

SEQ ID NO: 405175 - DNA, 201 bp, Homo sapiens
acttaattcaatttagtttggttcaaatggctttctaaggcttatctgaagtggtgatattggtatgaaaatatcacaagaatttcccttgtattttagtscatggtacactaaaaatgccacaaacactgaccacattgattgctgtttctgccttaaagggcaaatgtgtatagaaatttaattaaggactaaagttgc

SEQ ID NO: 405176 - DNA, 201 bp, Homo sapiens
caagtatgaattcatgcaaattttatctacaacatctacctcatggaggtctcaaacagcaatcaaaaagcctgtctacaagatgaaatgactttcactcrttgggcctataaataattattgagcttccactatgtgccaaggacgtggatttcattagtaaaaggaactgtatattgagatccaaatttttactaattt

SEQ ID NO: 405177 - DNA, 201 bp, Homo sapiens
atttccttattttacagttttcaaagtgctttctcaaatgtgcattattcagatccctgtaagccaggtattatttttaccatttttagatgaagaccaakgttgtgaaagcaaataaataactggtcaaacctcctggggtagtgccaggatataaactaattgcaaaacttgtgctcttttgaccatataacaaacttc

SEQ ID NO: 405178 - DNA, 201 bp, Homo sapiens
ttttcatactactataaaaaaaaaaaactgcccgagactgggtcatttataaagcaaacagattcaattgactcacagttcagcatggctgggggcttcargaaacttataatcatggtggaaggcaaagaggaagcaaggcaccttcttcacaggctgcaggaaggagaagtgtcgagcaaagcgggaagagccccttac

SEQ ID NO: 405179 - DNA, 201 bp, Homo sapiens
tgagggaggtgtcacctgatctgacttccattttaacactctccttctggctgctctatggggaatactctaaatggggcaaagggcacaagcagggagascatggaagaagtcattataatgctggaaggaaaggatgctggcttggagtgatggggctggtgagaagtagtcagctcttggatacattttgaagataga

SEQ ID NO: 405180 - DNA, 201 bp, Homo sapiens
tggaaaacttaaaatattatatatgctcttctgttcatatttatactagtcagggagtctgtaagttaaaggcataattcagacccattataatacttgcytatttcttaggttattaaatgcaaagcagctgtgctttgggagcagaagcaacccttctccattgaggaaatagaagttgccccaccaaagactaaagaa

SEQ ID NO: 405181 - DNA, 201 bp, Homo sapiens
atcctgtgaccacttttggatggggttcttcattttttttcttgtatatttgtttaagttccttgtaaattctgcatattagacctttgtcagatgagtasatcacaaaaatctcctcccattctgtaggttgcctgttcactctgacgatagtttcttttgctgtgcagaagctctttagtttaattagatcccatttgt

SEQ ID NO: 405182 - DNA, 201 bp, Homo sapiens
tgaattaattaatacgtgtatttgatgtatcaaacagtattactggtcgtggagtactggctgatggcaccaccagatttacatgcaagggcaaaccagtmcaccacttcatgaacaccagtacatttaccgagtacacagtggtggatgaatcttctgttgctaagattgatgatgcagctcctcctgagaaagtctgtt

SEQ ID NO: 405183 - DNA, 201 bp, Homo sapiens
tgtcgcacagatgaccatgtgataaaaggaacaatggtgtccaagtttccagtgattgtgggacatgaggcaactgggattgtagagagcattggagaagsagtgactacagtgaaaccaggtatatgcaggtgtcaaaccacaagtttgaaataattaggctttgattagcctatcaaaggaaatagcacacactaggaa

SEQ ID NO: 405184 - DNA, 201 bp, Homo sapiens
attagagggatccttaacacaattcagggaattaaaaggatacaagaatggattttactgagtaatgtttaatttggcaaaacctcaacctttagaaggcraaccttacggtgtttataaaccttagaatatatttttaaaagttttacctatagtatgggctcaattcacatttgttaatttcatattttaacattaatg

SEQ ID NO: 405185 - DNA, 201 bp, Homo sapiens
ttgttcagtttccatgtagttgagcggttttgagtgagtttcttaatcctgagttctagtttgattgcactgtggtctgagagacagtttgttataatttstgttcttttacatttgctgaggagagctttacttccaactatgtggtcaattttggaataggtgtggtgtggtgctgaaaaaatgtatattctgttgatt

SEQ ID NO: 405186 - DNA, 201 bp, Homo sapiens
gtcattcaggagcaggttgttcagtttccatgtagttgagcggttttgagtgagtttcttaatcctgagttctagtttgattgcactgtggtctgagagayagtttgttataatttctgttcttttacatttgctgaggagagctttacttccaactatgtggtcaattttggaataggtgtggtgtggtgctgaaaaaat

SEQ ID NO: 405187 - DNA, 201 bp, Homo sapiens
aatttctctctacacactgctttgaatgtgtcccagagattctcgaatgctgtgtatttgttttcattggtttcaaagaacatctttatttctgccttcawttcgttatgtacccagtagtcattcaggagcaggttgttcagtttccatgtagttgagcggttttgagtgagtttcttaatcctgagttctagtttgatt

SEQ ID NO: 405188 - DNA, 201 bp, Homo sapiens
tatgtgtcaaggaatttatccatttcttctagattttctagtttatttgcgtagaggtgtttgtagtattctctgatggtagtttgtatttctgtgggatyggtggtgatatcccctttatcattttttattgcatctatttgattctcctctctttttttctttattagtcttgctagcggtctatcaattttgttgatc

SEQ ID NO: 405189 - DNA, 201 bp, Homo sapiens
aagtaaattggagttcaaggaattaagaatctttgacctcttattattttgagatacgtcccatcaatacctagtttattgagagtttttagcatgaagcrttgttgaattttgtcaaaggccttttctgcatctattgagataatcatgtggtttttgtctttggttctgtttatatgcagattacatttattgatttgc

SEQ ID NO: 405190 - DNA, 201 bp, Homo sapiens
gttcttttctttgtgtccataggtactcaatatttagcttccacttataagtgagaacatgtagtatttagttttctgtttctgcattcgtttgctcaggrtaatggcctccagctccttccatgtccctgcaaagaatatgatcttatttttttatggctgcatagtattctgtggcaaatatgtaccacattttcttta

SEQ ID NO: 405191 - DNA, 201 bp, Homo sapiens
aggatgggtaacgggcagtgccagaggactggggtggaggtggaggtgaatgctattttataaagttcaaggaaggcctccttgataaggtaacattggarcaaaaacataaataagatattcagaaatcttgggaaagaatattccaggaaggagacgtagtaaatacaacagggtgttggcaagaaccataagaacggg

SEQ ID NO: 405192 - DNA, 201 bp, Homo sapiens
aatgaatgcagaatataccataaggttacaagtgcaaaggataataataaaggatgggtaacgggcagtgccagaggactggggtggaggtggaggtgaawgctattttataaagttcaaggaaggcctccttgataaggtaacattggagcaaaaacataaataagatattcagaaatcttgggaaagaatattccagga

SEQ ID NO: 405193 - DNA, 201 bp, Homo sapiens
gtatggcagcccgcagcaccagaccttcagttagacctgtaaaacagatctgagattcctggaactagaaagctccaacctggcatagcgtaaagagactwggaaaaatggaataaagccacttttgctcaagattgagtggcagattaactcaccttaatgcttttggtaatttaagaataaatagtccttaatttatca

SEQ ID NO: 405194 - DNA, 201 bp, Homo sapiens
ggcttgcagaccattgcaaagttgtgacggctgtgagtcatattgctgaaggtggaactctgaagccagactatctatgtgaaggcacaagctgctgttayatacaacagagtgaactgagcatcagtcagaaaaagtctatgtttgcagaaatacagatccaagacaaagacaggatgggcactgctggaaaagtaagtg

SEQ ID NO: 405195 - DNA, 201 bp, Homo sapiens
catactgaaattatactgatgctttcagaattagctcagatacccttatcagagttgcgtaacaaagaaaactaattgttaaggactttgagcccagaggwtttccaataacagaatttacttgaagtttctatgacagatagaaaggacaattgtttaaactatcctttcttgaaagatatgaaaacaagtcattaaaaa

SEQ ID NO: 405196 - DNA, 201 bp, Homo sapiens
aactatcctttcttgaaagatatgaaaacaagtcattaaaaactctcattttacatttcagcattcgaacggtcctgacgttttgagatccaaagtggcargaggtctgtgttgtcatggtgaactggagtttctcttgtgagagttccctcatctgaaatcatgtatctgtctcacaaatacaagcataagtagaagatt

SEQ ID NO: 405197 - DNA, 201 bp, Homo sapiens
tatctccacacctagtgtccactactataagatgacaagctttaacctgcctatcaagccctaccaggtgcaagaactgggctaggtgcaaatgggatgcwgagatgcagacacaaattcaatcatccaggaactcacagtcataatctgtatgcttcatgatgttcatggttctcttcatccttaccatgctaatagtct

SEQ ID NO: 405198 - DNA, 201 bp, Homo sapiens
tgggttttccactggatatggcgctgctgttaaaactggcaaggtaagaaacagggtaggctagtttatttgttcttctttccttttcttaaatgatttgyttggaatcttgaagagttttggaaaaaaaaaaaacatttaaaagaatgtattgcatattcaggctgccaagcaacacaatgccaaatcaactaaaagaaa

SEQ ID NO: 405199 - DNA, 201 bp, Homo sapiens
cattaaggtaagcgtgagccctagagaacttaagccaaaagcgttatcaaacttatattgaatatagcactgttgtgaggctggattcttaaataaggagrtgcttcccatgtttggagtattaattcctttactggctcttatatattgttaaggatctggttgtactcgatgtgaaattaatgagttcattatcctttt

SEQ ID NO: 405200 - DNA, 201 bp, Homo sapiens
tgacatctgctatatagagaggtttttctaaaattaatatttcttcgaggtagcctttaaaaatggaattacatgggtaaacatgccacaacatccttaawtatcttgatgtaccatgcaaattactttctaaagggttgacataggtaagatggcccattttaccatttatctgacaatactgtgtattctcattaagtt

SEQ ID NO: 405201 - DNA, 201 bp, Homo sapiens
ggagatattccttgaggaatgaaatgcttggtgagcaggcatacagtgagggaaacactggatatggtgtttcagagaatgtcagtggaagcaggggtaarttggaaatagtatatccaatgtcagcaagacattggtggaaaatagagaaattgatttatattggcattattcataatttgatttccggatagctgggca

SEQ ID NO: 405202 - DNA, 201 bp, Homo sapiens
tgtgtgcttatttgcaggtttgaaaagcagagatgatgtcccaaaactagtgactgagttcctggcaaagaaatttgacctggaccagttgataactcatrttttaccatttaaaaaaatcagtgaaggatttgagctgctcaattcaggacaaaggtaactgtttcttatgatgatcttgtctcttctccacaggctact

SEQ ID NO: 405203 - DNA, 201 bp, Homo sapiens
aaagggcaaatgtgtatagaaatttaattaaggactaaagttgcactgaaatttttttaaagcaagtaaaaaacaaggtggcttaatttaatttcatgacyttgtcatagtacataggtcatttcagagcttatgtcacactgtaagagacacaggaagcaaacgatctcctccgttttaaactcagattgatgccctggc

SEQ ID NO: 405204 - DNA, 201 bp, Homo sapiens
catgggagaacaaagtttttcctctttctgcaacattacttggggcataaaaaagcaagaggctagttggtatggatgaggttttatagagaaggcttttyagggaaaatgaaacttgaagaacaaaacaataagagatataagaagttgaacctccttgctttgactatttgtgggaagtgggaagattatagattattc

SEQ ID NO: 405205 - DNA, 201 bp, Homo sapiens
agggcaaatgtgtatagaaatttaattaaggactaaagttgcactgaaatttttttaaagcaagtaaaaaacaaggtggcttaatttaatttcatgacttkgtcatagtacataggtcatttcagagcttatgtcacactgtaagagacacaggaagcaaacgatctcctccgttttaaactcagattgatgccctggcat

SEQ ID NO: 405206 - DNA, 201 bp, Homo sapiens
agaaaaagtctatgtttgcagaaatacagatccaagacaaagacaggatgggcactgctggaaaagtaagtggaacatttctgtcccctcctcatcatgayctaatgatgtgaggctgatacttagaactttgaatccattaaagtaattaaacacttggagatattccttgaggaatgaaatgcttggtgagcaggcata

SEQ ID NO: 405207 - DNA, 201 bp, Homo sapiens; identical to SEQ ID NO: 90577

SEQ ID NO: 405208 - DNA, 201 bp, Homo sapiens
tgtttcctttatgactttttttaacttttattttaggttcaggggtacatgtgcaggtttgctacataggcaaattgtgtatcatggggtttggtgtacarattattttgtcacccagataataagcatggtacctaattggtggttttttcatccttaccctccctccaccttccaccctcaaatgggccctggtgtcca

SEQ ID NO: 405209 - DNA, 201 bp, Homo sapiens
gtagtcccagctaactggggaggctgagatgggaagaccacttgagcccaggaactagagtacaatctgggcaacagagtgtgatattgtcttaaaaaaawttttttttttaattcattacagacttgataggcacagaattgtatctcatttttatttttttaaaaggcgtttttatgagtgagaacaaacatgtcacaa

SEQ ID NO: 405210 - DNA, 201 bp, Homo sapiens
attattcataatttgatttccggatagctgggcaattgctccaggaagccaaatgtttccacaaggacacttcaatcgtctcagtagcatgtgctgcactygctgcagtagttcaatgggaaaccagggtctcatgcccagatgttggaagaaacgttcctgccattaagaatggaaaatgctaattctgggatgcaaaat

SEQ ID NO: 405211 - DNA, 201 bp, Homo sapiens
acaggcaacaacgtgggatacacctttgaagttattgggcatcttgaaaccatggtaagacccaaaatttgagaagccacaaaatacccaagttattagayatgcacaaggtaaatttaattgtctataactttattaatagtcaataatggaaatatctctgcgatagtcagttttactcaggcaaaaactgataatcac

SEQ ID NO: 405212 - DNA, 201 bp, Homo sapiens
cctctccacaggtcaaacctggttccacttgcgtcgtctttggcctgggaggagttggcctgtcagtcatcatgggctgtaagtcagctggtgcatctagratcattgggattgacctcaacaaagacaaatttgagaaggccatggctgtaggtgccactgagtgtatcagtcccaaggactctaccaaacccatcagtg

SEQ ID NO: 405213 - DNA, 201 bp, Homo sapiens
ctgtgcttttttttttttttttttgagataatgagtaggaaaaagaaaaaaacttgggtttatttttttcacaatccttgacctccttgaaatgaaattcycatcagccagcacaccgatttcatgagctaagtgaaatggagagtttatgggaagcagatgtgaagccctcatcttgtgaaaaatctgctttggattctt

SEQ ID NO: 405214 - DNA, 201 bp, Homo sapiens; identical to SEQ ID NO: 90576

SEQ ID NO: 405215 - DNA, 201 bp, Homo sapiens
ttgtctataactttattaatagtcaataatggaaatatctctgcgatagtcagttttactcaggcaaaaactgataatcacatagcaattttgcctaaaawgtcaaacacttaagagcaggttcactggaccaaagttaaataccatatcataccactctcagctgactagatggcaaggtagtcaacccttctagataat

SEQ ID NO: 405216 - DNA, 201 bp, Homo sapiens
cacaatgtagagaatgcaatgcttgtcgcaacccagatggcaacctttgcattaggagcgagtaggtttcagtcatttttactttaatgtatttacatttktcctatgctaatttttgaattgaattaattaatacgtgtatttgatgtatcaaacagtattactggtcgtggagtactggctgatggcaccaccagattt

SEQ ID NO: 405217 - DNA, 201 bp, Homo sapiens
ctaaatttatttacaaatgactcagagttatgattttttatttcttctattaaaaaatgggatatatgtgcagagcgtgcaggtttgttacacaggtataygtgcgccatggtggtttgctgcatctgttgactcgtcctccaggttccctcccctcaccccccacctcctaacaggccctgatgtgtgttgttcccctct

SEQ ID NO: 405218 - DNA, 201 bp, Homo sapiens
tttctgcatctattgagataatcatgtggtttttgtctttggttctgtttatatgcagattacatttattgatttgcatatattgaaccagccttgcatcrcaggtatgaaagcccatttgatcatggtggataagctttttgatgtgctgttggattcggtttgccagtattttattgaggatttttgcatcaatgttca

SEQ ID NO: 405219 - DNA, 201 bp, Homo sapiens
attgttgaattttgtcaaaggccttttctgcatctattgagataatcatgtggtttttgtctttggttctgtttatatgcagattacatttattgatttgyatatattgaaccagccttgcatcgcaggtatgaaagcccatttgatcatggtggataagctttttgatgtgctgttggattcggtttgccagtattttat

SEQ ID NO: 405220 - DNA, 201 bp, Homo sapiens
caagtaaattggagttcaaggaattaagaatctttgacctcttattattttgagatacgtcccatcaatacctagtttattgagagtttttagcatgaagsattgttgaattttgtcaaaggccttttctgcatctattgagataatcatgtggtttttgtctttggttctgtttatatgcagattacatttattgatttg

SEQ ID NO: 405221 - DNA, 201 bp, Homo sapiens
actggcaaggtaagaaacagggtaggctagtttatttgttcttctttccttttcttaaatgatttgcttggaatcttgaagagttttggaaaaaaaaaaaacatttaaaagaatgtattgcatattcaggctgccaagcaacacaatgccaaatcaactaaaagaaaaataaaaaattcagattagaaattttatttcttc

SEQ ID NO: 405222 - DNA, 201 bp, Homo sapiens
tggctgggggcttcaggaaacttataatcatggtggaaggcaaagaggaagcaaggcaccttcttcacaggctgcaggaaggagaagtgtcgagcaaagcrggaagagccccttacaaaaccatcagatcttgtgaaaactcactcactatcatgagaacagcatgagggaaactgccccatgattcaattacctccacct

SEQ ID NO: 405223 - DNA, 201 bp, Homo sapiens
caccttatacaaaaattaattcaagatggattaaagacttaaacattagacctaaaaccataaaaaccctagaagaaaacctaggcattaccattcaggayataggcatgggcaaggacttcatgtctaaaacaccaaaagcaatggcaacaaaagccaaaattgacaaatgggatctaattaaactaaagagcttctgca

SEQ ID NO: 405224 - DNA, 201 bp, Homo sapiens; identical to SEQ ID NO: 90590

SEQ ID NO: 405225 - DNA, 201 bp, Homo sapiens
acagcaagactctgtctcaaaaaaaaaaaaagaaaaaagaaaaaatattactgccttattgtccggtgtgggaatagtcattaagatggggaaactgaggytcaaagagaagtgacccagacagaagaccacacagcaggttttgacagaacttgaactagaatgtgggcccctgcctcccaggtttgttctgtgttgtac

SEQ ID NO: 405226 - DNA, 201 bp, Homo sapiens
tctgactcactcccgttcaaagctcatttcttttctgataattttgagagtgtctggaacagcttttgttttcttggtggggtggcaaccttactgggcgygctgtgggttttgcatccaaggctgcatctccggttcctgctagcctttcatcttgctcaggtggggactcgcgtgcatctcaggcccaaggtcctcccg

SEQ ID NO: 405227 - DNA, 201 bp, Homo sapiens
gacccagacagaagaccacacagcaggttttgacagaacttgaactagaatgtgggcccctgcctcccaggtttgttctgtgttgtactctacaggtccarggatgtcgccatcagagctggggtcaggtctctctcctggcacctgccactttgtagtgaaatgtgcttagtgtatctcttgccctgccacctccccccc

SEQ ID NO: 405228 - DNA, 201 bp, Homo sapiens
aagctaccatagtctgtgtcctcacttcttcaggcttctcttcacatgtccccttaccaggggcatcttgcccaacccttcatcttcagtttggtgtgcaygtacctcgtctctcccacacctgcctacttttttacttttcttcacagcatgtagctgtcactctttaatatgattgtttgcttgtatgtcttttcagcc

SEQ ID NO: 405229 - DNA, 201 bp, Homo sapiens; identical to SEQ ID NO: 90597

SEQ ID NO: 405230 - DNA, 201 bp, Homo sapiens
gaaaactgtgagaccgctggggacatgtgggtaaagtggtggctgttgtgggtcacgcagttccaaggaggtgctaaaggaggtctgagaaggaggaggtsggggctgggccttggggaaggttttctgggaggaggttaatctgagctgggctttgaagagtggtggatgtggaagaacttccaggcgggaggggatggc

SEQ ID NO: 405231 - DNA, 201 bp, Homo sapiens
  misc_feature (1)...(201): n = A,T,C or G
ggtgagcagatgcaggggccatggtctcaattgatctgggttccctggctcggagctctgtgggcagggctctggcctgctgggggcctgcagtgtgtgtnttgcttctctgagtttgctgagcttctctgagtttctttttgccataagacccctctcctcctttctccccaccgctgtttcctccaagatgggaagaag

SEQ ID NO: 405232 - DNA, 201 bp, Homo sapiens
  misc_feature (1)...(201): n = A,T,C or G
aactgaagaaccgctacatcatcatgcggagcggggcccgtcagcacgagagggacagtgaccgccgctccagcatccccatcactgtgcggtgagcaggngggcagggctgggccatggcagatggggcttgctttacacagcagggtgtgcttggcaaccaggggcagtggtccaggcttttcacttggcacaggccca

SEQ ID NO: 405233 - DNA, 201 bp, Homo sapiens
gacgagtttgacaaggtgagtctgatgaggtgggtagtagccaaaaggtgggtggcaccagggtatgtgacttcctgtgctcagccagcagaaatcacctytgacttgggagacatgttttcaatccctgggccggtcactctagtaactgtgggaagctgcttaacctcttcaagcctcagttcccatatctgaagagtg

SEQ ID NO: 405234 - DNA, 201 bp, Homo sapiens
  misc_feature (1)...(201): n = A,T,C or G
ccatctttgggggcacagacatgaagaaggccattgcctgcctgctctttgggggctcccgaaagaggtaggggcttgagttcccttgggtttggggaggnggctgatgatggggctcacagtaggataattactggataatcaggactgggcactcttttttgtatttcctgggcccctcagtctgccaggcacctttgc

SEQ ID NO: 405235 - DNA, 201 bp, Homo sapiens
cctgctttgcctaccaaggccgcagctttgctggggccgtgagcccccaggaggaggaggagttccgtcgcctggctgccctcccaaatgtctatgaggtyatctccaagagcatcgccccctccatctttgggggcacagacatgaagaaggccattgcctgcctgctctttgggggctcccgaaagaggtaggggcttg

SEQ ID NO: 405236 - DNA, 201 bp, Homo sapiens
  misc_feature (1)...(201): n = A,T,C or G
cactgcctgcagctgcttctagagatccactgggatgggctgggcaggggtgtgcccttaggattggcacagatctgatgccctgtggctctgagacaccntgaacagggtccctctacattggtgacttctgtctcaccaggatacccagacagcgttgtagggaacccagggttgggagggaaaagcagtccagggtaa

SEQ ID NO: 405237 - DNA, 201 bp, Homo sapiens
cgtagctcactggctcttggcttcagttttcccacctccacaccaaggaggtgggatttagatggtcttgaagacctcctcgagtctgacatgcagggagkcagtgaagtgtagacatggtagacatgggctctgggtcatacctgccttcactctatgactttgggcaagttggttggcctctctgagccttgatttccc

SEQ ID NO: 405238 - DNA, 201 bp, Homo sapiens
ggaggttcttgtctcccctggtttgtgaagtgcggaaaaccagaggtgaggctagtgggagtgggactgggactgggagccagcaggcatctggatttcckggtgtagttggagtgggacaggagtttctcgggaactggggttggagtccgggagcgcggccgggggtccccctgctccggactcagggcagggacccag

SEQ ID NO: 405239 - DNA, 201 bp, Homo sapiens
ctccttgatctcaatgatgatccatgtttcttgatttaaggccgggcaaacctagacccctcttgtctgaatttggcctggcttctcccattgtaggaagyccgaagggagggaaggacccaggcctgggagtcaagagtcttgggtcccagcctctagcccactgtgtgactgtagggaaattacattccttctctggcc

SEQ ID NO: 405240 - DNA, 201 bp, Homo sapiens
  misc_feature (1)...(201): n = A,T,C or G
gactaagatcaaaagggagatggattatggggacacctagcagtctccaccacagtcttaccactttgggcaagcacctccctggtaacgggctggctggngaggaagggaatagcggaccgaggctaccctgagcacgctgttgcccccacaggcagctggaggccattgtgcgcatcgcggaagccctcagcaagatga

SEQ ID NO: 405241 - DNA, 201 bp, Homo sapiens
cacagcgtctaacagtggggaagaggcggttttcaccctgcagacgtgcctggcttttcttcacctgttttttaagagaggcacccatatttctccccagwgttgatgtttgtggcagctgcccacagccagatttcacttaaatcttttccgattgttgtcccccagcccatatgagtgggcagctgtggtgtggtggga

SEQ ID NO: 405242 - DNA, 201 bp, Homo sapiens
aatcatcttcggcagacagtccgggcggcggggctggagggctcagaacggtccaatcgctggccgcgaggctccggcgaaccaatgggagcgcagcggcygcggcgtccgaacaccgcctcttgtttttcccgcgaaactcggcggctgagcgtggaggttcttgtctcccctggtttgtgaagtgcggaaaaccagagg

SEQ ID NO: 405243 - DNA, 201 bp, Homo sapiens
tatgtagattattgagatactttacattcttaggagctctgagtctttgaaatcgtgcgtattttgcacgattaaggacatctcagttaggactttcccartttcaggggctctatggcagtatgtggcgtgtaggtctatatagagacgacaagggactcacgatgggggcaggctttccctgggagtcaggagtcctca

SEQ ID NO: 405244 - DNA, 201 bp, Homo sapiens
acatgacaccgcactcggctaatttttttagttttagtagagacagggttttaccatgttggccaggctggtcttgaactcctgacctcgtgatccacctrcctcggcctcccaaagtgctgggattacaggtgtgagccactgtgcccagccaaggtgtttctttataggaccagtacctaaggactggaagtcaggaga

SEQ ID NO: 405245 - DNA, 201 bp, Homo sapiens
cctgggcatgggtggaatcagagacttgctgtccaagtcagaatctcagcttttctcctttctcctctaccctcctctcaggtacctgtgtgacaaggtcrtccctgggaacagggttaccatcatgggcatctactccatcaagaagtttggcctgactaccagcaggggccgtgacagggtgggcgtgggcatccgaag

SEQ ID NO: 405246 - DNA, 201 bp, Homo sapiens
ggtctatatagagacgacaagggactcacgatgggggcaggctttccctgggagtcaggagtcctcatcctagccctgaggctaactcctcttctctgggyctcagtttgctcatctgtgagttgggcctcacaagactgtgtcacagggctgtggtgaggcttaggtgagccatggatgtgatgccctcagcggggagaa

SEQ ID NO: 405247 - DNA, 201 bp, Homo sapiens
ggcattctcatgcctcagtagctgggactacaggcgtatgctaccatgcccggctaatcttcgtatttttagtagagactgggtgttgccatgtggcccargctggtgttgaactcctggcctcaagtaatccaccctcctcagcttcctaaagtgttgggattacaggcatgagccacctcactgggccccaagtttgag

SEQ ID NO: 405248 - DNA, 201 bp, Homo sapiens
ggagtcctcatcctagccctgaggctaactcctcttctctgggcctcagtttgctcatctgtgagttgggcctcacaagactgtgtcacagggctgtggtsaggcttaggtgagccatggatgtgatgccctcagcggggagaacatctgggcacaccgaggcccagggcagcatccccttccagagggagacgcactgag

SEQ ID NO: 405249 - DNA, 201 bp, Homo sapiens
tcatcgcggcctctgcggtccgtgccaaggccacccgcatctctatccagtgccgcagctgccgcaacaccctcaccaacattgccatgcgccctggcctygagggctatgccctgcccaggaagtgcaacacgtgagtctgtggcccagagggactgtgggaggtgacctgagtgaagatcagaaaggatgagaacaagt

SEQ ID NO: 405250 - DNA, 201 bp, Homo sapiens
gccaaggaggtagctgatgaggtgacccggccccggccttctggggaggaggtgctccaggacatccaggtcatgctcaagtcggacgccagcccttccascattcgtagcctgaaggtgggttggagggcagtggctgctgcatggtgcagagggctttggatgcagccagacctgagtgctagctgtgtgaccttgagt

SEQ ID NO: 405251 - DNA, 201 bp, Homo sapiens
ggtgcatgcctgtagacccagctcctcaggtggctgaggtggaaggatcactggagcccaggagttcgaggctgcagtgagctatgatcatgccactacaytccagcctggtccacagagcgagactttgtctcaaaaaaaaaaaaaaaaaaaaaaaattgcagttctatgactaagatcaaaagggagatggattatggg

SEQ ID NO: 405252 - DNA, 201 bp, Homo sapiens
ggcttcaccttcaaatacaggtgcggctcctgcggggccgggggctcgagttccagtgtggccgctcacacgcctctaccagcctgctagagtcctggacwgtcagggcacagatgggcccagacgggggaaagagccggtcctgggtcacagggctcatcccggcagcctcacgccttggtataaggctttgtgtatttt

SEQ ID NO: 405253 - DNA, 201 bp, Homo sapiens
  misc_feature (1)...(201): n = A,T,C or G
ctggctcggagctctgtgggcagggctctggcctgctgggggcctgcagtgtgtgtcttgcttctctgagtttgctgagcttctctgagtttctttttgcnataagacccctctcctcctttctccccaccgctgtttcctccaagatgggaagaagcagcttctctccagacccttgaacacaatcctcttgacccaggt

SEQ ID NO: 405254 - DNA, 201 bp, Homo sapiens
tctaccctcctctcaggtacctgtgtgacaaggtcgtccctgggaacagggttaccatcatgggcatctactccatcaagaagtttggcctgactaccagyaggggccgtgacagggtgggcgtgggcatccgaagctcctacatccgtgtcctgggcatccaggtggacacagatggctctggtgagttggctttggggt

SEQ ID NO: 405255 - DNA, 201 bp, Homo sapiens
gctgccccctggaagccaggtgagcagtcagtcctgcccatgttagaaatgagacagctgacactcgaaggggcctttccctggtgcccaagatcacagtygcttggctggaatgcaagtctcctggcccctaggccagcgttttccacaccataagccatactgtctggtttcggtcagcctttcaacagactgtcccag

SEQ ID NO: 405256 - DNA, 201 bp, Homo sapiens
gtgccgcagctgccgcaacaccctcaccaacattgccatgcgccctggcctcgagggctatgccctgcccaggaagtgcaacacgtgagtctgtggcccasagggactgtgggaggtgacctgagtgaagatcagaaaggatgagaacaagtagcaagcactgcctgcagctgcttctagagatccactgggatgggctgg

SEQ ID NO: 405257 - DNA, 201 bp, Homo sapiens
gagtgggcatggcctctgcaaggaggtgatgccaagcagggagctgcatgaaggggacagtgtggctccttgggggaagagctgctcaggtggaggcagcrctaagtgtcagtttccccaggagggagcaggtttggtgcatttgaatggggaggcacttgggtgaggaatggggtgggtggggcctgttcctcctgtccc

SEQ ID NO: 405258 - DNA, 201 bp, Homo sapiens
cacctggtgaagatccctggcatcatcatcgcggcctctgcggtccgtgccaaggccacccgcatctctatccagtgccgcagctgccgcaacaccctcascaacattgccatgcgccctggcctcgagggctatgccctgcccaggaagtgcaacacgtgagtctgtggcccagagggactgtgggaggtgacctgagtg

SEQ ID NO: 405259 - DNA, 201 bp, Homo sapiens
  misc_feature (1)...(201): n = A,T,C or G
ggtggagatggaggatctggccagctttgatgaggacctggccgactacttgtacaagcagccagccgagcacctgcagctggtgagtgggaccccatccntgagcttcccagggctgctctgccccagttactaatagcctgtgcccttccctttctccagctggaggaagctgccaaggaggtagctgatgaggtgacc

SEQ ID NO: 405260 - DNA, 201 bp, Homo sapiens
ctattctataggtgcgcagactgaggcttagagaaaggtttagagcttcggttctagagtcagatgggacttaagtcccagctctacctcttaattgctgygaccttgagcaagtggcttagcctccgtgtgcctcagtgtctggtacacagtgggcactcaggaagtgtgggccctttaggtcaaaggagcctgagtaca

SEQ ID NO: 405261 - DNA, 201 bp, Homo sapiens
cccctcatagtaacctgggtggaaggttttgagatctttgattagggttctaacctgggcttgcatatcctgaaattgcatgcagatgttctgaggagagmggatctgtagcttctgttaacttcattagtggcaacagagtatgtaggggtcaggctcttgctccctgggcaagttatgtgactttgtcaagcttcagtt

SEQ ID NO: 405262 - DNA, 201 bp, Homo sapiens
aatgacttcgttgaggtcacacagcgactaagtgtccctccacaccaccctgtctctgactgggggacttggagacttccctgtttcaacatctcattttkaaaacaggaaatgaaaacccagaggcaaaatgagctcacagagccatgaagaggcaaaaagggcgagtggcccctcaaggaggctggggggcgtgaagag

SEQ ID NO: 405263 - DNA, 201 bp, Homo sapiens; identical to SEQ ID NO: 90607

SEQ ID NO: 405264 - DNA, 201 bp, Homo sapiens
aggtccaaggatgtcgccatcagagctggggtcaggtctctctcctggcacctgccactttgtagtgaaatgtgcttagtgtatctcttgccctgccaccyccccccccaattgtgctgcgaggtctttaaaagcaggagctgtgcctgaggctcctctgaaccccagggtccagatagcctggcactgggtggatgctct

SEQ ID NO: 405265 - DNA, 201 bp, Homo sapiens
tgggaggtgacctgagtgaagatcagaaaggatgagaacaagtagcaagcactgcctgcagctgcttctagagatccactgggatgggctgggcaggggtrtgcccttaggattggcacagatctgatgccctgtggctctgagacaccatgaacagggtccctctacattggtgacttctgtctcaccaggatacccaga

SEQ ID NO: 405266 - DNA, 201 bp, Homo sapiens
tgccttttagatttatctgaaggcctccttggggtggttacaacataccccttcccccccgtgatttttggaagctggaagttagatgcaaaggcctgactgtgtttcgatttcacataccgggcaagaacgcttatgggtggtattggatccctcattgcatccctccatccactatgctgagactgaccaggtgctagg

SEQ ID NO: 405267 - DNA, 201 bp, Homo sapiens
gccttttagatttatctgaaggcctccttggggtggttacaacataccccttcccccccgtgatttttggaagctggaagttagatgcaaaggcctgactgtgtttcgatttcacataccgggcaagaacgcttatgggtggtattggatccctcattgcatccctccatccactatgctgagactgaccaggtgctaggt

SEQ ID NO: 405268 - DNA, 201 bp, Homo sapiens
gccctccatggagagcccagcctgcagcagcccagcgtggcccaaccgtcctcaggctgccctgattgggaccaagttctctttgcccaggcctagaatctgtgtgtgtgtgtgtgtgtgtgtgtgtgtgtgtgtgtgtgtgtgtgtgtgtgtgtgtgtaaacgtgtatataagaaggcatctttgccatctcctccccct

SEQ ID NO: 405269 - DNA, 201 bp, Homo sapiens
ccctccatggagagcccagcctgcagcagcccagcgtggcccaaccgtcctcaggctgccctgattgggaccaagttctctttgcccaggcctagaatctgtgtgtgtgtgtgtgtgtgtgtgtgtgtgtgtgtgtgtgtgtgtgtgtgtgtgtgtgtaaacgtgtatataagaaggcatctttgccatctcctccccctt

SEQ ID NO: 405270 - DNA, 201 bp, Homo sapiens
ctgccctgattgggaccaagttctctttgcccaggcctagaatctgtgtgtgtgtgtgtgtgtgtgtgtgtgtgtgtgtgtgtgtgtgtgtgtgtgtgtgkgtaaacgtgtatataagaaggcatctttgccatctcctcccccttttcgtcgtctgtcgcctgttaggctgggatcaccaccaccctgaactcccgctgc

SEQ ID NO: 405271 - DNA, 201 bp, Homo sapiens
ccctgagttgtgaggattgaatgacagaaggcactagtgacagtgatgctggaggaaggagtgttgccaagtgcctcggtcactttgcctaatttcagaargtcactctgagttggtatgttttgtgtttttaaaaaagctaggattcataaaattaaatagaaatcagtgaaataaaatatttgatatttaaaatacatt

SEQ ID NO: 405272 - DNA, 201 bp, Homo sapiens
agtgaagtgtagacatggtagacatgggctctgggtcatacctgccttcactctatgactttgggcaagttggttggcctctctgagccttgatttccccrggcctatcgatgtttgctaggatttttgtaaggattgcacaagatgatgagtaagtgcttggcatagccctgccctgggtaaatactcagtgagtcgcag

SEQ ID NO: 405273 - DNA, 201 bp, Homo sapiens
attgcttgaacccaggaggcagagattgcagtgagctgagatcgtgccattgcacttcagcctgggcaacagagtgagactctgtctcaaaaaaaaaaaawatatatatatgtgtacacacacacacacacacacacactcactcttacacactactttctttgtgccaggcattctgaattactattcagtattttctat

SEQ ID NO: 405274 - DNA, 201 bp, Homo sapiens
aggcccgcaaatcgcagctgcagaggcgcttcaaggagttcctgcggcagtaccgagtgggcaccgaccgcacgggcttcaccttcaaatacaggtgcggytcctgcggggccgggggctcgagttccagtgtggccgctcacacgcctctaccagcctgctagagtcctggacagtcagggcacagatgggcccagacgg

SEQ ID NO: 405275 - DNA, 201 bp, Homo sapiens
tcttgaagacctcctcgagtctgacatgcagggaggcagtgaagtgtagacatggtagacatgggctctgggtcatacctgccttcactctatgactttgrgcaagttggttggcctctctgagccttgatttccccaggcctatcgatgtttgctaggatttttgtaaggattgcacaagatgatgagtaagtgcttggc

SEQ ID NO: 405276 - DNA, 201 bp, Homo sapiens
gaggcagagattgcagtgagctgagatcgtgccattgcacttcagcctgggcaacagagtgagactctgtctcaaaaaaaaaaaatatatatatatgtgtmcacacacacacacacacacacactcactcttacacactactttctttgtgccaggcattctgaattactattcagtattttctatatgaataaattataa

SEQ ID NO: 405277 - DNA, 201 bp, Homo sapiens
gctctacctcttaattgctgtgaccttgagcaagtggcttagcctccgtgtgcctcagtgtctggtacacagtgggcactcaggaagtgtgggccctttakgtcaaaggagcctgagtacaaagttccccgtgagcctggggatgtctgggctctgtcggagtcccctcgggcagcacgtgccgttagccagccatgtgct

SEQ ID NO: 405278 - DNA, 201 bp, Homo sapiens; identical to SEQ ID NO: 90603

SEQ ID NO: 405279 - DNA, 201 bp, Homo sapiens
cccaggagttcgaggctgcagtgagctatgatcatgccactacattccagcctggtccacagagcgagactttgtctcaaaaaaaaaaaaaaaaaaaaaaaattgcagttctatgactaagatcaaaagggagatggattatggggacacctagcagtctccaccacagtcttaccactttgggcaagcacctccctggta

SEQ ID NO: 405280 - DNA, 201 bp, Homo sapiens
ccaggagttcgaggctgcagtgagctatgatcatgccactacattccagcctggtccacagagcgagactttgtctcaaaaaaaaaaaaaaaaaaaaaaaattgcagttctatgactaagatcaaaagggagatggattatggggacacctagcagtctccaccacagtcttaccactttgggcaagcacctccctggtaa

SEQ ID NO: 405281 - DNA, 201 bp, Homo sapiens
acagagccatgaagaggcaaaaagggcgagtggcccctcaaggaggctggggggcgtgaagaggaagtcttgccctgagaggctaaagggcaccacacagygagctgacagcagacacgtggagatggggcttttggagggctctgtgggctggcactaagcctcctaaaccagcgtacaaatgagttagcgagttcagcg

SEQ ID NO: 405282 - DNA, 201 bp, Homo sapiens
ttctcctctaccctcctctcaggtacctgtgtgacaaggtcgtccctgggaacagggttaccatcatgggcatctactccatcaagaagtttggcctgacyaccagcaggggccgtgacagggtgggcgtgggcatccgaagctcctacatccgtgtcctgggcatccaggtggacacagatggctctggtgagttggctt

SEQ ID NO: 405283 - DNA, 201 bp, Homo sapiens
gacttctccccggctcctactcagggctcaccaccacctatttcatacttactagttgttttagagacagggtttctctgtattgtctggtctggaatccyccagctctggttattcacaggcatagtcacagtgcactacagccttgaactcctgacctcaagcgatcctactgcctcgacctcccaagtagctgggact

SEQ ID NO: 405284 - DNA, 201 bp, Homo sapiens
cgaaagaggtaggggcttgagttcccttgggtttggggaggcggctgatgatggggctcacagtaggataattactggataatcaggactgggcactcttytttgtatttcctgggcccctcagtctgccaggcacctttgccagcccccaagcttgccatcagctggctagtggctgatctgcgcacctgtctcagcgat

SEQ ID NO: 405285 - DNA, 201 bp, Homo sapiens
ggggaaggttttctgggaggaggttaatctgagctgggctttgaagagtggtggatgtggaagaacttccaggcgggaggggatggcaggagcaggtgaaraccccggcctgggcaaggtactgagtggctggagggccgagtgggagtctaggggatgaggggccaggtggtgtaagaggccttgagtgccgagatgggg

SEQ ID NO: 405286 - DNA, 201 bp, Homo sapiens
tgtgggcaacaccatcctccaagcagctgagcatgggctgagtgacgtggggagagaggccgttctctgggctccgtggggctggagccagctcagcatgyggtgcctgtggcaaaaatgctgcagtggaccctgcgtgtcctgggcatgggtggaatcagagacttgctgtccaagtcagaatctcagcttttctccttt

SEQ ID NO: 405287 - DNA, 201 bp, Homo sapiens
gtttgtggagaagtgttctcccattggggtgagtggcctgggatacctttgccaccttggcttgcagggaggaaggctgcagggcagggcctctgggtccycaggacacctgtggtgggctggctcacccggaatctcttcctcctttctcttggctgcggtcaggatggccgaggagatgggaggaagaagggagccaac

SEQ ID NO: 405288 - DNA, 201 bp, Homo sapiens
ttgagaccagcttgggcaacatagcaagaccccgtttcaatttaaaaggaagaaggggaaagaaaaaaggaaaaacaggtgaagttacttctgtttaactygctatatctaaaatctcatttcaacatgttgtttgatatgtagattattgagatactttacattcttaggagctctgagtctttgaaatcgtgcgtattt

SEQ ID NO: 405289 - DNA, 201 bp, Homo sapiens
cctgggcctcagtcccttatatatgaaacagaggagttgacattgggttatgagtaatagaacctcagttctggttagtaaatttttcaaagaaaaaaacrtagtggtttatagaattggtaagtccggcggcttaaggcccaggtagatctggattctcaaacaactgtctctgcctttctgttctgcttcccttggtgg

SEQ ID NO: 405290 - DNA, 201 bp, Homo sapiens
agcttgtagcttaacagcccccaggaaagaggaggccccgtcttttccagtacttctatcaaaagtcccaggatagactcctattggcttgggtagatccwatgtccatgcccaagttggggtggacaagatacatgccccaagtcggggtggacaagctgaacccacccctttatggaccagggcagaggagcaaggagc

SEQ ID NO: 405291 - DNA, 201 bp, Homo sapiens
agtaacttgcccaaggtcacatgccagaggtagtggagccaggatgtgaacccagctgcttgcctccagaggctgtgctcttaaccacagtgcttcgattsttgtcgtacagcgctttggtgatcttttgaaggagctaaaacccaggggttgagggctctttgaatgcactaccagtggggggctggtgggtccctgatt

SEQ ID NO: 405292 - DNA, 201 bp, Homo sapiens
cagtaccgagtgggcaccgaccgcacgggcttcaccttcaaatacaggtgcggctcctgcggggccgggggctcgagttccagtgtggccgctcacacgcstctaccagcctgctagagtcctggacagtcagggcacagatgggcccagacgggggaaagagccggtcctgggtcacagggctcatcccggcagcctcac

SEQ ID NO: 405293 - DNA, 201 bp, Homo sapiens
agtcagggcacagatgggcccagacgggggaaagagccggtcctgggtcacagggctcatcccggcagcctcacgccttggtataaggctttgtgtatttygttttactttattttattttattttattattaacgtatttgtttattattttgagacggagtctcgctctgtcgccaggctggagtgcagtggcacgatc

SEQ ID NO: 405294 - DNA, 201 bp, Homo sapiens
tgttcatctgcttcctatcatccttccatgtcatgtctgagaccttacaaactcaagttccctgtaggtgtaaaaggtgaagatggcagttaggattcacytcacttcgctcattcatttatttataccagtcttgcaccttcattgattgagcacctgctgcctgccagatactgttctgggtgctgggctgcagcactg

SEQ ID NO: 405295 - DNA, 201 bp, Homo sapiens; identical to SEQ ID NO: 90591

SEQ ID NO: 405296 - DNA, 201 bp, Homo sapiens
caagtggctttcagtagcagtctggccattttactggctcctggacataagggagacggggctcaggcctgtgatactgcgaggctggggaacagcctgtkcgttggtcagtggtccccaaatatgttcttgccacagcagtcacatgggatgctctgctaagcatctgggctggacgcagtggctcatgcttgtaattcc

SEQ ID NO: 405297 - DNA, 201 bp, Homo sapiens
gacccggccccggccttctggggaggaggtgctccaggacatccaggtcatgctcaagtcggacgccagcccttccagcattcgtagcctgaaggtgggtyggagggcagtggctgctgcatggtgcagagggctttggatgcagccagacctgagtgctagctgtgtgaccttgagtgaggcacttgacctttctgaacc

SEQ ID NO: 405298 - DNA, 201 bp, Homo sapiens
ctaagtccccaggtagccttggggagttccctccctccctctgggtctcagtctccacatccttaggatggttgagctaaggctttccctacatcagtgaytgtcagttggcctgggggctagaggggaggggatgggatagggtagatgctgatcagacttccccacacctaccgtcccaggagagtctgaggtgctccc

SEQ ID NO: 405299 - DNA, 201 bp, Homo sapiens
cccttccagcattcgtagcctgaaggtgggttggagggcagtggctgctgcatggtgcagagggctttggatgcagccagacctgagtgctagctgtgtgrccttgagtgaggcacttgacctttctgaacctgtctcctcctggagacaaaaggatcgtttgttgttttttgctttttgttatgaaaaattacacaccca

SEQ ID NO: 405300 - DNA, 201 bp, Homo sapiens
agtgcatgtctgtaagctggcagggggctgggggaaagggtaggtgccctaagagtccctcctggcctcacaccagcctctccccactgtcctgcaggaartgtggcccccggctgtcagcagaggctgcagagaaactgaagaaccgctacatcatcatgcggagcggggcccgtcagcacgagagggacagtgaccgcc

SEQ ID NO: 405301 - DNA, 201 bp, Homo sapiens
gcccaggatatttactggcatatctcagatgcgtcctggctccccttaaccaacaagcttcccgatggctctattacagtcggacatgatgtcacacctgstgaagatccctggcatcatcatcgcggcctctgcggtccgtgccaaggccacccgcatctctatccagtgccgcagctgccgcaacaccctcaccaacat

SEQ ID NO: 405302 - DNA, 201 bp, Homo sapiens
acagcagggtgtgcttggcaaccaggggcagtggtccaggcttttcacttggcacaggcccatagtagctctgggcaggaagagtccctttggagcataarctatggcctccttgatctcaatgatgatccatgtttcttgatttaaggccgggcaaacctagacccctcttgtctgaatttggcctggcttctcccattg

SEQ ID NO: 405303 - DNA, 201 bp, Homo sapiens
ttctccagctggaggaagctgccaaggaggtagctgatgaggtgacccggccccggccttctggggaggaggtgctccaggacatccaggtcatgctcaaktcggacgccagcccttccagcattcgtagcctgaaggtgggttggagggcagtggctgctgcatggtgcagagggctttggatgcagccagacctgagtg

SEQ ID NO: 405304 - DNA, 201 bp, Homo sapiens
tggggttggagtccgggagcgcggccgggggtccccctgctccggactcagggcagggacccaggcgtcggaggggaggaggtgccaggcgctgcccccarcctgttctggccgtttgttcccaccccaggcgcagtcatgtcgggattcgacgatcctggcattttctacagcgacagcttcgggggcgacgcccaggcc

SEQ ID NO: 405305 - DNA, 201 bp, Homo sapiens; identical to SEQ ID NO: 90599

SEQ ID NO: 405306 - DNA, 201 bp, Homo sapiens
aatacatttagaaatacaaagtgtcaagcaaaacgtgaatttggaaatctatggaacattagataaggtatttaaaagtaattgccatgtaaaaatgacaygaacttgaagtaagattatttgatttttctaaaaatacaagaaagcttggtgcatccgcctggtcattgttgaatcacaaatgtatttttgtgcagaaga

SEQ ID NO: 405307 - DNA, 201 bp, Homo sapiens
gagaggggagcattcaggctgagtaatagttggggctcggcttagtggaatctccagtcaggcctcagtgacacctagagaggcagggaggtggggcaagsgggggagctggattcccgagctggtgctgccactcagggtggctgagctcttcactcacctgtgacctggctcccttaggcttgtcttctcagatctgtc

SEQ ID NO: 405308 - DNA, 201 bp, Homo sapiens
tgtgtgtgtgtgtgtgtgtgtgtgtgtgtgtgtgtgtgtgtgtgtgtgtgtaaacgtgtatataagaaggcatctttgccatctcctcccccttttcgtcrtctgtcgcctgttaggctgggatcaccaccaccctgaactcccgctgctccgtcctggctgctgccaactcagtgttcggccgctgggatgagacgaagg

SEQ ID NO: 405309 - DNA, 201 bp, Homo sapiens
gcatccctccatccactatgctgagactgaccaggtgctaggttgaggtggtgatggtcactttattgtaatgatgcaggcatggagtcttgaattccgcytccccagcctcgcttctgcttcccacagcctcttcctgctttctttgagagccccagcaaaacttctgctcatgtctggttctctcgttcagccggagga

SEQ ID NO: 405310 - DNA, 201 bp, Homo sapiens
tcccagtcctgtacactagtggctcaggagctttgtgaagggcaagggctggccataggaaggagtggatcggctgagaatttatgttttactttttattrtggataattcaaacattagaatataaagagaatcgtataacgaatcctcttgtactcatcacccagcttaataattagcaactagaggccaatttttttt

SEQ ID NO: 405311 - DNA, 201 bp, Homo sapiens
ccataggaaggagtggatcggctgagaatttatgttttactttttattatggataattcaaacattagaatataaagagaatcgtataacgaatcctcttrtactcatcacccagcttaataattagcaactagaggccaatttttttttttttttttttttgagatggagtttttgctcttgttgcccaggctggagtgc

SEQ ID NO: 405312 - DNA, 201 bp, Homo sapiens; identical to SEQ ID NO: 90628

SEQ ID NO: 405313 - DNA, 201 bp, Homo sapiens
tttttactatccttcacaatagtcttgtgaaataggtcactcactactgttattaaaattgtgtgaggaaagtaattaagccacaaagagtgacttgcccktagttagaaatcaagtctatagcagttagaatagtaattaataatgagacattataaagcattttatatttgccaggaatgtagtaccttctattactgt

SEQ ID NO: 405314 - DNA, 201 bp, Homo sapiens; identical to SEQ ID NO: 90629

SEQ ID NO: 405315 - DNA, 201 bp, Homo sapiens
cctccacggcctggaacttctggttcttgggagggatagggcacatcttgtaggtcacctcgtcgccctccactggcacgtactccccctcgatgctggcrggcaggaagaggggtattagcccagcagcaggccctgtgccccagacaatcctgtggcctggccttgggggcagcctggccctaagcctccctaggccag

SEQ ID NO: 405316 - DNA, 201 bp, Homo sapiens
agggagtggggagtttgagagattcctgggcgtcttcaaagatccagtcctgcttctgtggggcagaagaaatagagagagagcagccagatagttccctyactgatttgacaaacacttgagcacttcctattgccagggattgtgccaggcccttgagaaatggctggggcaaagcaagcagaacctgcccttatgcag

SEQ ID NO: 405317 - DNA, 201 bp, Homo sapiens
acgtggactgtgtgcccagccagggcctggcacacagcaggtcctctgagctgccatccgctccctcccctctgcagaaagagaagatccgggagaagttmgtggaagccctgaaaacagagtttgctggcaaagggctgaggttctctcgaggtacgtccaccctgcagaggacctgggaggcctggtacagggcccctc

SEQ ID NO: 405318 - DNA, 201 bp, Homo sapiens
gaggtcccaccagcctggtctccagaacctggggcctgagggaggagaagtgtgggtccctcagagggaacctggagatacttgggcccctgattttttgmggggagtgtggattcttgtcccctttgaagtcctaggaggctggggtcccaggtggggctagatttgaattcagggccgttctggttctctctggctccc

SEQ ID NO: 405319 - DNA, 201 bp, Homo sapiens
tgggcgtcttcaaagatccagtcctgcttctgtggggcagaagaaatagagagagagcagccagatagttcccttactgatttgacaaacacttgagcacytcctattgccagggattgtgccaggcccttgagaaatggctggggcaaagcaagcagaacctgcccttatgcagtttacattctcatttctccctgctga

SEQ ID NO: 405320 - DNA, 201 bp, Homo sapiens
tctcgtggggagtgtggggggccagctgagtgagcaccacctccacggcctggaacttctggttcttgggagggatagggcacatcttgtaggtcacctcrtcgccctccactggcacgtactccccctcgatgctggcgggcaggaagaggggtattagcccagcagcaggccctgtgccccagacaatcctgtggcctg

SEQ ID NO: 405321 - DNA, 201 bp, Homo sapiens
cccatgctcatttctgagtatttgctttgttgagctggttacagataacaggatcgagccctgccctgaggtggacactgatgtgggatccagattgcccygtctcctcgcccttcctactcgtgtctctcctctgaggtctccttcagaagacccagcccacagccccattggcagccccatcccttctggatttaggcc

SEQ ID NO: 405322 - DNA, 201 bp, Homo sapiens
gctcagtttttctcccattgggtctcattgtgagtgagtccccaaaagccccctcaccagctggatgcatcagtaagcaggcttcattcatgccctccctrtgggtaacccaccctccagtctgggggcctcaaggaccaaccaacaggtctcctagcgtgggggagcagtgggatgggctttactgggcagtggctgatg

SEQ ID NO: 405323 - DNA, 201 bp, Homo sapiens
agaacagaagggagcccctctgcagaggggcaggggagcacagagtggaaatgatgccctctgccagagagtactgcatggcttccagaggaggaagctgratcttggaggatgagtggcagggaagccagggaagggcggttctgacagaaggacctgcatggatgcctgtgtgcagaggcccacaggtgtgactggctt

SEQ ID NO: 405324 - DNA, 201 bp, Homo sapiens
accctggccggatgagcttcccccacccacttcatggtcttgttcattctccaacctgtgtcataacttccttgaggatcctaagtctgtcccgtgtcctrttcctggccctcagtaggcactcaagggttgttgaatgaatgaatgaacaagcagcccttctgttagccttgtctgcccctcccagcagggaataacagt

SEQ ID NO: 405325 - DNA, 201 bp, Homo sapiens; identical to SEQ ID NO: 90631

SEQ ID NO: 405326 - DNA, 201 bp, Homo sapiens
gagtctgctaggcagatgcttgtcctgaggcagaggccctggggtttctgtaagatttctgggagcactggtgggtcctgagagttcacagagcctgtcayacctctcatgtgttcttccccacatccccgggtggggcactaactccatctgactgatgagcggcagaacctcaggtgaaggctcttgctgcaaaacaat

SEQ ID NO: 405327 - DNA, 201 bp, Homo sapiens
aggtgcgctatagcagatgggacgtgggcatgtcaagatagtgagccctggctttaccctaccctagcagggtgacatgctgagcctgccggttgcctcctggcagcagtttagtctgcttactgctctgtggtgtccaaatgtattattttgttaatgtgccttaacttggaaaagcttggaagcctcatggtaacagca

SEQ ID NO: 405328 - DNA, 201 bp, Homo sapiens
gtggggagcttaaataacttccccagggtcacagcagttaagtggtggagctgggttgggcaatctgactatagttcttcaatccgaactaccacactgtkctgggaaaggaggggccatatgaggtgagagggactggccgagattctagaggtagcaggatctagaagaagtgatccatcacagaaggagagacctgag

SEQ ID NO: 405329 - DNA, 201 bp, Homo sapiens
ggatcacttaaggccaggagtttgagaccagcctggccaacatggtgaaacactgtgtctactaaaaatacaaaaaaattagtcaggcatggtggcgagcrcctgtaatcccggccactcgggaggctgaggcaggagagccgcttgaacccaggaggtggatgttgcagtgagctgagaccacaccacagcactccagcc

SEQ ID NO: 405330 - DNA, 201 bp, Homo sapiens
tagatgaatcatcaaattaacacagctctagagggctgcttatctaggatgagaatccacctgcctgcttggcctctccacttgggtatcagatagtccartgtccagaaccaaactcctgatctcaccgtgcatgcctgctcttcccgttgccttccccatttcgtttatagcaacccattttcccagttacttaggtcc

SEQ ID NO: 405331 - DNA, 201 bp, Homo sapiens
cgtcagcctcttgccccttcttaggctcacacagtgcacatccgacgctcagcttcccggcttcccgcaggccctgcttccaggcttgtagatctgagccrctgagatctaggacatgtgccagggggttctttctgatcatgaatgtgcagcaggaaggcctcgcagacctcagcaccagcgcacacttgctaggggcac

SEQ ID NO: 405332 - DNA, 201 bp, Homo sapiens
caagcaccctcctgaatctcctccaacgccctgggcaagctcagagtttctctggacctggttcagaccccaccccccgatacctgcctggggctcccagyacgcgcacccccgccctcttctcatcagaggccacaaacctgcgcgctcctacaacaccccgcgcctgagaggcgggaaacgtggcgcctgcgaggcaag

SEQ ID NO: 405333 - DNA, 201 bp, Homo sapiens
ggtggcattgtcctggccaatgcttgtggcccctgcattggccagtgggacaggtaagaggcgtatcttttgacaagacagccccttgtgcacagggtacrgagccccagaagttggagggggaattattggggtggagagaagagactccagccaaggtctctagctccagggactcttgcccattagaagcctctggca

SEQ ID NO: 405334 - DNA, 201 bp, Homo sapiens
ggtcttctgggcccatacgtagtaaataatataataatagtctctcacctttgcacaagatttgaggcctgttttaattcttcataatattatttgattcmtgtaatcgtaggaatgaggtggtttttctcatttgatgataaagctggtagaaagtaggtgaaagttctgattctcaagagtgtcaccgaagtgctgtgg

SEQ ID NO: 405335 - DNA, 201 bp, Homo sapiens
gactaatagctatggtttggatagtgttttacagcttaatgagcactttcacttatggtcttatttaaccttcccagtaccccgtgtgatcaccagagctrgttatatccctattttctatctcctctgggttttagtcaatgagggcttttcttacattgatacaccttacatgatagaacttgactttgatcccagcga

SEQ ID NO: 405336 - DNA, 201 bp, Homo sapiens
cacctggcctcttcacgtcttttgattctctaggttaatgatgtggaaatagttgtttcttcctgtctcatgatttaagggagtcaggcaagattatttgrtaagataaatgattatagagttcttgaacttggaagagaagaatagtatcacaccattttgaaccgaaaaggatcttggaaagtatgagtattagactgg

SEQ ID NO: 405337 - DNA, 201 bp, Homo sapiens
ggggacagctgcccacaacagggctgctaccttctggggctggctttctgcttgctttatgggctcagagtgaatcttctggagatgagatgcacactcayagcattcagagctcattccctcatgcgttcaacaaattgaacattctttatgtgccaggcactgggctaggtactgaggttcagtgtgaacaagtcaggc

SEQ ID NO: 405338 - DNA, 201 bp, Homo sapiens
tgcttgctggttgctgtgtggccacgtcacttccttctcaacctcacagcacctcctgtgcaggcagggagggcgctgctagtgagaaggaagcagctctrttccctgggaggggaggtggggcccgaggaaacttgccttctgagagtctgtccttgtgggaactgaggactcagcaccccacgcatccccattccctgc

SEQ ID NO: 405339 - DNA, 201 bp, Homo sapiens
cactcaggctggagtgtagtggtgcgatctcggctcattgcagccttgaactcctgggctcaagtgatcttcctgcctcggcctgcaagtagctgggaccrcaggtgcacagctaatttttatttattttattcttatttttattttttgagacagtctcgctctgtcttgtaggctggagtgcagtggcacgatctcggc

SEQ ID NO: 405340 - DNA, 201 bp, Homo sapiens
  misc_feature (1)...(201): n = A,T,C or G
aatctagctgatgaattcaaggatcacttggtgcctgaccctggctgccattatgaccaactaattgaaattaacctcagtgaggtgaggagacaattaantgggttcaagaagtttctgagagtagtggggagcagggcgggtcctgcctaaatactcactgagggccgggtggtggctcacagctgtaatcccagcact

SEQ ID NO: 405341 - DNA, 201 bp, Homo sapiens
tttttattttttgagacagtctcgctctgtcttgtaggctggagtgcagtggcacgatctcggctcattgcatccttgtctcccaggttcaaccaattctygtgcctcagcctcccgagtaactggaattacaggtgtgcactaccatgcctggctaatttttgtatttttagtagagacagggtttcgccatgttggcca

SEQ ID NO: 405342 - DNA, 201 bp, Homo sapiens
cacctggacacaaaccatgttgctaacgcccaattattgatttgtctcaataggacatcaaccaggaagtttataatttcctggcaactgcaggtgccaartatggcgtgggcttctggaagcctggatctggaatcattcaccaggtaaagctgggctcagtctgccgtcccaagggcccaagccagagaagtatgttcc

SEQ ID NO: 405343 - DNA, 201 bp, Homo sapiens
tcacagctttctggttcctctgtggagcctccccggccctccccgtgcctggcacagtggcttccagtggatcctctgtgggatctcttcacattatgttcccagcatctgccaagtgctttctgcactggatcatgtgctctgtggggacagggactgtggcttatttattcctctctagctctgggtttgggaccaggt

SEQ ID NO: 405344 - DNA, 201 bp, Homo sapiens
tctgtccagccacacccacagaccggggagctcactgtcacggccagcgtcatcgtgacatcttctgcagtcctcatgtctgcctgacctctccccctgghtgtggaccacaagtgtctacaccgtgtggaccacaagtgtctacaccgtgtagaccaccccgaattctgtgtgcccagccttcgtggatccaacttttac

SEQ ID NO: 405345 - DNA, 201 bp, Homo sapiens
  misc_feature (1)...(201): n = A,T,C or G
ctcttgccccttcttaggctcacacagtgcacatccgacgctcagcttcccggcttcccgcaggccctgcttccaggcttgtagatctgagccgctgaganctaggacatgtgccagggggttctttctgatcatgaatgtgcagcaggaaggcctcgcagacctcagcaccagcgcacacttgctaggggcacccctagt

SEQ ID NO: 405346 - DNA, 201 bp, Homo sapiens
aaaccccgtctctactaaaaaaaaaaaaaaaaatacaaaaattagctcggcatagtgccatgtgcctataatcccagctattcaggaggctgaggcaagakaatcgcttgaacccgggacgcagaggttgcagtcagccgagatcgcaccactgcactccagcctgggcgacagagcgacactgtctcaaaaacaaaacaa

SEQ ID NO: 405347 - DNA, 201 bp, Homo sapiens
gatggtaccactgcattccagcctgggcaacaaaggcagactcaaaactgcagactcaagcaacagagcctgcctccaaaaaaaaaaaaaaaaaaaaaaargaaagaaaagaaaaattactttttcttggcagaaaagaaaaatatgtttattgtagagaatattcacaatcaagaagaatttttaaaactcctaatctca

SEQ ID NO: 405348 - DNA, 201 bp, Homo sapiens
tgcataggaaagagcctcggccacttaatctacatgatgatctgtaaggctgagagcctggatcatgtcactggacttctttgtgttccttggaaactagkgctgaaaatgtgagctagattccatctcaaatgtcctcagaacattcgtgtataatgtgaagtaggggaagtgacatctagaataagtctcagggacaga

SEQ ID NO: 405349 - DNA, 201 bp, Homo sapiens
gtaccactgcattccagcctgggcaacaaaggcagactcaaaactgcagactcaagcaacagagcctgcctccaaaaaaaaaaaaaaaaaaaaaaaagaargaaaagaaaaattactttttcttggcagaaaagaaaaatatgtttattgtagagaatattcacaatcaagaagaatttttaaaactcctaatctcaaccc

SEQ ID NO: 405350 - DNA, 201 bp, Homo sapiens
tggaaaactatgcgtaccctggtgttcttctgattggcactgactcccacacccccaatggtggcggccttgggggcatctgcattggagttgggggtgcmgatgctgtggatgtcatggctgggatcccctgggagttgaagtgccccaaggtgagggtggggagggactcattctgggctggctgtggggtggtggttg

SEQ ID NO: 405351 - DNA, 201 bp, Homo sapiens
taaaatcctggtctccttgtttgttccttcagctaagatgaatgaacaatattatgcagtttgcacactgcctcccaataaccaggctgtctcaaataacyaactaacacggtttctctgagaagcttgtatatttaccccttttgtgcttagatacatttgagaagtgatggttactaccttaatagtcatgtatgcaaa

SEQ ID NO: 405352 - DNA, 201 bp, Homo sapiens
ttttgtccccatggagcttatattttagtggactttactttcccatctggtccaagtctctgtcttctcatgtaaacaagggacagaatgacctgtagtartcccacttggcacaattgttagggtaagagagctgttgtcatctcgccagcagcatcctttcttcccttgtcttgcctagccgtgtggtgcctggctccc

SEQ ID NO: 405353 - DNA, 201 bp, Homo sapiens
aaacagatctgtgggcatctggctactggtcaccctgatgggagactcccacttaggtgtaaaattaggaagttgttttgtggctgaggaagtgctataaygatgcttaggatggagaagacataattgtggttttcagtgatttgaagggctggttgtggaagactgactagcctcatttgatctggttccaaaggatag

SEQ ID NO: 405354 - DNA, 201 bp, Homo sapiens
cccttttcccatctgccacagctctgaacccgtgctgttgctcatcacggcttctgccagaggcacttaacttgagtttgaaagcacaatccagaaggccrgtggtcgtgtcacggctctgccttcatctgtttcatcagtaagtctttcttgaacttcttctatgtgttggacattgtcctaggttctgaatatattgtg

SEQ ID NO: 405355 - DNA, 201 bp, Homo sapiens
ttggagaacatcaggttcagtggttaccagatgtggctatctcagagtaacctggtaatcttttactgatgcttaggccctactgcaggtgatctggttcrgagctctgggagtgatagggcttagaagctgagtttttacaaaaccttccaggtgattttgatacagctggaataatccagttcctcctcctcccctttt

SEQ ID NO: 405356 - DNA, 201 bp, Homo sapiens
gtcttggccttctgttacaaagggcactgcaatgcaggtgtctccctttctacctcagtacaaatgcccaggcctttatggcagctcctgggccaaagttyggagccgtgagtgatggcagctcacatctgccaccggctagctgctaagcatacagcagctcgtgtgtttgtttctttaaaaagaaaatgcccaggggcc

SEQ ID NO: 405357 - DNA, 201 bp, Homo sapiens
cacatggactgagagggagaggcagggcgggaggaggccgtgcagctagcaccaggccacccttctgctcttctccccacagactgaaccggccgctgacmctctcggagaagattgtgtatggacacctggatgaccccgccagccaggaaattgagcgaggcaagtcgtacctgcggctgcggccggaccgtgtggcca

SEQ ID NO: 405358 - DNA, 201 bp, Homo sapiens
acatttcaaaaaaccaaaacgcttttgattattgtcaaattgccgctaaacaattctgctattctatattttaaggagtatgcttttcttcactatttgcstggtttattttttctttttctgattacaaaagaaatgtatatatcatgcaacatttaaaagttacaggccgggcacggtgtcttacacctgtaatcctag

SEQ ID NO: 405359 - DNA, 201 bp, Homo sapiens
ctttgggggacacattcaaaccacaacacatggtggccttgcccttgaagttagtctacagggtaagcatatttcttgcccatgtgtagagaatgaaattwaaaaaaaaaaatacagggtaagcatgttgatatggccccctcttttaacagtttccatgtgacatttcatgcactacagcctctcactgctctgaagcca

SEQ ID NO: 405360 - DNA, 201 bp, Homo sapiens
ctggagacagaggttgcagtgagctgagatcacaccagacagcacagatctagaacatgttcatcaggacaggaagtcctcttggacagcactggatgttrggaacagacactttcacatagttggaaagcagaacggcacagtgattaagggtgaaatgtgtagctgatttcatttgtgtttaacactgtgaagtgtatc

SEQ ID NO: 405361 - DNA, 201 bp, Homo sapiens
gaagcggtgaatggccttcacttgagaatctgtctgttccatttggggacttgggatagacagaggtagaaggaaaattggagacagcattagagattgtstagtccacatcctcattaaacagatgaagagattgagatacctgtcgaggctgccggtgacttcctaactgtgtggccacacacggttaggagccaagtc

SEQ ID NO: 405362 - DNA, 201 bp, Homo sapiens
  misc_feature (1)...(201): n = A,T,C or G
tcaagggatgagtcggcccgctgtcaccacatctctctgagtgggaggagaagcaatgcagctccctggtgtgaagatgcaggtggccgcgtagcaggtgngtgggaccctggcccggccaccagccaatgcccggggctctgttgctccacaggcatggcgacaatctgcaacatgggtgcagaaattggggccaccact

SEQ ID NO: 405363 - DNA, 201 bp, Homo sapiens
cactgactcccacacccccaatggtggcggccttgggggcatctgcattggagttgggggtgccgatgctgtggatgtcatggctgggatcccctgggagytgaagtgccccaaggtgagggtggggagggactcattctgggctggctgtggggtggtggttggtggggatgaacgggagacggtgggacccaggaggga

SEQ ID NO: 405364 - DNA, 201 bp, Homo sapiens
gctggggccctgagctctgatccccatggcctcccctcaccggcccaggtttttacccagggcctcaagggatgagtcggcccgctgtcaccacatctctytgagtgggaggagaagcaatgcagctccctggtgtgaagatgcaggtggccgcgtagcaggtgtgtgggaccctggcccggccaccagccaatgcccggg

SEQ ID NO: 405365 - DNA, 201 bp, Homo sapiens
cacaggaacccagcttatctgtcctcgggacaggccaggtgacaaggccagatatccctaaccctgatccctctgacctggcaggaaggacatcaagaagkgggagaagaacacaatcgtcacctcctacaacaggaacttcacgggccgcaacgacgcaaaccccgagacccatgcctttgtcacgtccccagaggtgag

SEQ ID NO: 405366 - DNA, 201 bp, Homo sapiens
ctggagcagtgggtggggaggggggagacacagccacggggagagcagaggtagctctggctgctgaaccagaagtggatgtcagtttgccaccagctcakctttaggagaagccaaggtttcaccctgaagggtttttgttatctgagttcagagggcaaatcccagcagggttaggcaccctgagacgcacagatcaga

SEQ ID NO: 405367 - DNA, 201 bp, Homo sapiens
cttgcagcccctgaagtgcatcatcaagcaccccaacgggacccaggagaccatcctcctgaaccacaccttcaacgagacgcagattgagtggttccgckctggcagtgccctcaacagaatgaaggaactgcaacagtgagggcagtgcctccccgccccgccgctggcgtcaagttcagctccacgtgtgccatcagt

SEQ ID NO: 405368 - DNA, 201 bp, Homo sapiens
ctttttcggccagaagtggtggctcatgcttgaaatcccagcatttcaggaggccaatgcaggtggattacttgagtctaggggttcaagaccagcctggrcaacatggaaaaaccccgtctcttaaaagaaaatgcaaaaattggccaggggcagtggctcacacctgtaatcccagcactttgggaggccgagatgggt

SEQ ID NO: 405369 - DNA, 201 bp, Homo sapiens; identical to SEQ ID NO: 90641

SEQ ID NO: 405370 - DNA, 201 bp, Homo sapiens; identical to SEQ ID NO: 90643

SEQ ID NO: 405371 - DNA, 201 bp, Homo sapiens
  misc_feature (1)...(201): n = A,T,C or G
agtccccacccaagtggaacgttgaggtcctgagttcagactccctgtccctggccactgttgaggttgccacatggactgagagggagaggcagggcggnaggaggccgtgcagctagcaccaggccacccttctgctcttctccccacagactgaaccggccgctgacactctcggagaagattgtgtatggacacctg

SEQ ID NO: 405372 - DNA, 201 bp, Homo sapiens
atgtcggggaggggggcggtcttctgggcccatacgtagtaaataatataataatagtctctcacctttgcacaagatttgaggcctgttttaattcttcrtaatattatttgattcatgtaatcgtaggaatgaggtggtttttctcatttgatgataaagctggtagaaagtaggtgaaagttctgattctcaagagtg

SEQ ID NO: 405373 - DNA, 201 bp, Homo sapiens
acagaggcatgacagcatctacggttgccaggcctggagtctggagaagaaactaggaccctgtaccaccttttgaggaccctgcggaacgtggaatgtcrgggaggggggcggtcttctgggcccatacgtagtaaataatataataatagtctctcacctttgcacaagatttgaggcctgttttaattcttcataata

SEQ ID NO: 405374 - DNA, 201 bp, Homo sapiens
cgagatggtaccactgcattccagcctgggcaacaaaggcagactcaaaactgcagactcaagcaacagagcctgcctccaaaaaaaaaaaaaaaaaaaaraaagaaagaaaagaaaaattactttttcttggcagaaaagaaaaatatgtttattgtagagaatattcacaatcaagaagaatttttaaaactcctaatc

SEQ ID NO: 405375 - DNA, 201 bp, Homo sapiens
agggcagagacagcagccttggtttcttcattggcctagtcagtgcccagggtgggcctggtgtttggcaggtgctcaggtgggtggtgagtgaactctcmagaacagtttatgtttcacgtgctccatccccgtcccttgttgatttcagacattgccaatctagctgatgaattcaaggatcacttggtgcctgaccct

SEQ ID NO: 405376 - DNA, 201 bp, Homo sapiens; identical to SEQ ID NO: 90646

SEQ ID NO: 405377 - DNA, 201 bp, Homo sapiens
ctggaaaggcccccagttctccaggtggccccacagagaaagcaaagtggcttctcagagttgggggttggagtcaacccggggccctcacacctccccarcctccctttactcaccaggacctggcactcaggggacagcccacccactgcaggaccctctgggccccaggaatcccctgtaggtgccacctgggtctga

SEQ ID NO: 405378 - DNA, 201 bp, Homo sapiens
ctttaatgcgacctcatctttgtcagtgcacaaaatggcgccctacagcctactggtgactcggctgcaggtgagcgagctcagggacctctgggttcacsggggcggggtgcctcctactgtgccggcggctgtgggcgaggcagggcgaggcgggcccaacctggggccaacttctcgtgtacctgtcccggttgtggg

SEQ ID NO: 405379 - DNA, 201 bp, Homo sapiens
cacaaacctgcgcgctcctacaacaccccgcgcctgagaggcgggaaacgtggcgcctgcgaggcaagcccctaaggaagagacgggaacccccgaccccycagctcctaataccacccctgcccagacagccaggggtagggcgcagtctcaccaacaccagcctgcttgcggcaaaagatcaaatcaggatgatgttta

SEQ ID NO: 405380 - DNA, 201 bp, Homo sapiens
ggagaagaaactaggaccctgtaccaccttttgaggaccctgcggaacgtggaatgtcggggaggggggcggtcttctgggcccatacgtagtaaataatrtaataatagtctctcacctttgcacaagatttgaggcctgttttaattcttcataatattatttgattcatgtaatcgtaggaatgaggtggtttttctc

SEQ ID NO: 405381 - DNA, 201 bp, Homo sapiens
gctttattccttgactgagcttcagctcagcctcacaggctgcctgttgagcttgcagagaatgcccgtctcaagtgtgtaggtgcagagctgctgcctgyggggccagagcagggcttgggatttgtatgcagttcatagtgtacgactgatgtaggcagcaaaagagaattagtcagatgagcgaatctgtcatcagcc

SEQ ID NO: 405382 - DNA, 201 bp, Homo sapiens
catattacataattacatacttgctattctttgggaacccattcatattatttcatgcctcacagtaactcagaataacattcatatcatttcattcctcrcataatactgcagatattattctttttttccaagtgaggaaattggggtgaaatgtgcttgtcatgtaggtagtaagtgacagagctgggctttggagtc

SEQ ID NO: 405383 - DNA, 201 bp, Homo sapiens
aaggaggttcatcatgttcagtgcccttgaggaaggcgggttctgaatttcccagataccagatagatgagatcccactgccaggggcccatgagcagaasgggtttgagagggatgggagactttccaaggcaaattctaacaaattacaaataatctggagaggagaaagagaggcacctaaataaatcagtttagagt

SEQ ID NO: 405384 - DNA, 201 bp, Homo sapiens
cgccaggtgggtgaggccaggcaggtagggccagacaggtgaggacggtgccctcctctgccttataaccttacccccgcttgcctgacagaaacatggcwtcaggtgggtggtgatcggagacgagaactacggcgagggctcgagccgggagcatgcagctctggagcctcgccaccttgggggccgggccatcatcac

SEQ ID NO: 405385 - DNA, 201 bp, Homo sapiens
aaattactttttcggccagaagtggtggctcatgcttgaaatcccagcatttcaggaggccaatgcaggtggattacttgagtctaggggttcaagaccakcctgggcaacatggaaaaaccccgtctcttaaaagaaaatgcaaaaattggccaggggcagtggctcacacctgtaatcccagcactttgggaggccgag

SEQ ID NO: 405386 - DNA, 201 bp, Homo sapiens
cagagatggatccaggctgagtccaggccgagactctggcaccagtctggggtcctcccacaccccttcctcacacttaacacagacgtgtagtcacatgygcccagacacgaccacagcctcctgtcctggataccaatttcataagtgaccgatttgtaaatgaaaaagctgatgtattaattattaattggaaagaga

SEQ ID NO: 405387 - DNA, 201 bp, Homo sapiens
tactgtgccggcggctgtgggcgaggcagggcgaggcgggcccaacctggggccaacttctcgtgtacctgtcccggttgtgggcccggcacccgtgcccrcttctctggtgccctaggtcaaggcgtccccggcacagtcagctttcctggccctgtccctgcctcgcaagaagcgtgggcccaagcagcggcggccggg

SEQ ID NO: 405388 - DNA, 201 bp, Homo sapiens
tctgttcttgagaactggatctgtgtcatctggagagcagagggacagatggatatgaagacccattttgtcatcctcagttaatcctcagggacattcartgatgaacccatcctaaagcttcagcattgctgagcttttttatatagcttcaatcatttgcttccaaggtcttgggtttttaagcccatgtgctatttt

SEQ ID NO: 405389 - DNA, 201 bp, Homo sapiens
cccagatgggttcagaaaatgaagctctccaggctagtcaggcccccgatgaccgaatgccgcctgctttccagagaccaacctgaagaaacagggcctgytgcctctgaccttcgctgacccggctgactacaacaagattcaccctgtggacaagctgaccattcagggcctgaaggacttcacccctggcaaggttag

SEQ ID NO: 405390 - DNA, 201 bp, Homo sapiens
gcctttatggcagctcctgggccaaagtttggagccgtgagtgatggcagctcacatctgccaccggctagctgctaagcatacagcagctcgtgtgtttstttctttaaaaagaaaatgcccaggggccatgggagtactttgcagctttactttcttcccgccttgatgtcacgtcttcagcagcctcagtccattagg

SEQ ID NO: 405391 - DNA, 201 bp, Homo sapiens
caggccatcctcatcccatccctagtgatcaaggtcactctccctgcccgtggctgagttgggcctggttctaggctgtgtccactgcagcccacaggccygtcagcctcttgccccttcttaggctcacacagtgcacatccgacgctcagcttcccggcttcccgcaggccctgcttccaggcttgtagatctgagccg

SEQ ID NO: 405392 - DNA, 201 bp, Homo sapiens
ggaggaggcaaccctggcagggcctcttcattttccctcggtaggagctaggctgggctgcgccacaggaacccagcttatctgtcctcgggacaggccakgtgacaaggccagatatccctaaccctgatccctctgacctggcaggaaggacatcaagaagggggagaagaacacaatcgtcacctcctacaacaggaa

SEQ ID NO: 405393 - DNA, 201 bp, Homo sapiens
gggtctgacctgggccatcaggcacagactggcctaggatttggtttgcctgctgacctcttaggtccccaggcagtgccctgtctccctgacccccctgyggggccaagggcacacagtacccaccacttccacccacacccaccttctccttgcagcccctgaagtgcatcatcaagcaccccaacgggacccaggaga

SEQ ID NO: 405394 - DNA, 201 bp, Homo sapiens
cctattgcttggcacataatagagtgcaaatgtgctgctaggaaagagggtacacgataagctactgtcaacctcttcttttttttttgagacggagtctygctctgtcacccaggctggagtgcagtggtgtaatcttggctcactgcaacctctgcctcccaggttcaagcgattctcctgcctcagcctcccaagtag

SEQ ID NO: 405395 - DNA, 201 bp, Homo sapiens
ataacagaatatcacatactgggtaatttataaaggaatttaggccgggcgtagtggctcatgcctgtaatccctgcactttgggaggccgaggcaggcgratcacctgaggtcaggagtttgagaccagcctggccaacatgatgaaaccccgtctctactaaaaatacaaaaaattaggccaggcgcagtggcttatgc

SEQ ID NO: 405396 - DNA, 201 bp, Homo sapiens
caggcatggtggtgcgtgcctgtaatcccagctactgggaagctgaggcaggagaaattgaagcttgaacccaggaggcggcggtatcagtgagccgagaycccaccactgcactcccacctgggcggcaagactccgtctcaaaaaaaaaaaaaaaaggaagggaattaggcaccaccttttgaagggatgaggaaacat

SEQ ID NO: 405397 - DNA, 201 bp, Homo sapiens
gacagtggctgtcatgtttcttcttgcagaaagctctgggtgtgcggcagtaccatgtggcctcagtcctgtgccaacgggccaaggtggcgatgagccaytttgagcccaacgagtacatccattatgacctgctagagaagaacattaacattgttcgcaaacggtaaggctgcagatgggaggctgtgactgtcaagg

SEQ ID NO: 405398 - DNA, 201 bp, Homo sapiens
tcggcgcaggctgtacctcaggctagtgctgtttttattcatagagatgctcagagttgccagttggtctgctgttgccagcagatccagcaccttagggacttttttttttttttttttttttttttttttgaggtagggtcttgctctgttacccaggctggagtgcagtggttcgatcatggcttactgcagccttga

SEQ ID NO: 405399 - DNA, 201 bp, Homo sapiens
tcaaggatggctgttcgtatgagccctctgacgtgcctacacgtgtacatgatattgctgtaaaaggggtcatagtcctaatgtgttcagcatcatggccratggctacagcatctttcttcaaatgacgccacgtcatgagttagcctgtcctttattgttggatatttcggttgcttgcaactggtctctgttaaaaaa

SEQ ID NO: 405400 - DNA, 201 bp, Homo sapiens
ggcgcaggctgtacctcaggctagtgctgtttttattcatagagatgctcagagttgccagttggtctgctgttgccagcagatccagcaccttagggacytttttttttttttttttttttttttttttgaggtagggtcttgctctgttacccaggctggagtgcagtggttcgatcatggcttactgcagccttgacc

SEQ ID NO: 405401 - DNA, 201 bp, Homo sapiens
cttgcctcactgtccagctcgagacactatctccttagcatcggcctcagctgctgttgtcttcacagccggccataccaccttcccgcaggctggtaggrtccactgtccagccccagggctagttgctggtccaccaggagagaaggcccaggcctggctcactgatggatccctgccagggataaagaacacgcacat

SEQ ID NO: 405402 - DNA, 201 bp, Homo sapiens
gatcgcttgagcctgaaaggttgaggctgcagtgagctacaattgtgccactacactccagcctgggtgacagagcaagaccctgtctcaaaataataacwataataataataataataataataatgaaaatggaacattcaccatgtgctggccctattccagattccaggtgtggagagaccgggtagattagcgtca

SEQ ID NO: 405403 - DNA, 201 bp, Homo sapiens
gctaccccatccctctgcccctcactagtgaacagctcttcatggagatggctgaccggatggcacaggatggatggcgggacatgggctacacatacctmaacattgatgactgctggatcggtggtcgcgatgccagtggccgcctgatgccagatcccaagcgcttccctcatggcattcctttcctggctgactacg

SEQ ID NO: 405404 - DNA, 201 bp, Homo sapiens
caaggctagcgccttagtcttcttcagctgcaggaccgatatgccttatcgctaccactcctcccttggccagctgaacttcaccgggtctgtgatatatraggtgagcacccggctgcctgcagccacccgcctgggcttcagatttctgtgggagggtattatggggggtggttgttcacatatggcctcccctgagcc

SEQ ID NO: 405405 - DNA, 201 bp, Homo sapiens
acaactggccctcacagtcctgcttctagcccttccattctatctcggtcattgccctgtgacattttgttgttgttgcaatttatagctttatagttatmtgttagtcaacaagcatttactacctgattgatcctatgatgattataagaattacaagtgctaagccaggtggagggagcaacctggaggagcaggaac

SEQ ID NO: 405406 - DNA, 201 bp, Homo sapiens
gtgtgttgggggagaggtgggccatcatgggcagaggccgggccagcatgctgggaccatctcctttggtccgtgggagccactggaggtttaatgggacrgggtcagatatgccttgaggaggctccttgagggtcctgcttgagcccactgtgtcctcaaacccccacaggttcactccctgggcctgaagttgggtat

SEQ ID NO: 405407 - DNA, 201 bp, Homo sapiens
ctatggattgcttgccctggggtcaggagtcccccttggtccattcagctgtggctagggcaagtgggtgtggccagtggtaggtacagggactttgtccsgttctgtttcttaccactgtcaccttgggacatttattgacttgacctagtttataagctttttgacaacaggagcccatttgatcatctgaacaacctg

SEQ ID NO: 405408 - DNA, 201 bp, Homo sapiens
cttcgagagtctgagtaactttatcccaaggctacacagttggtacaaacaagactggacttcagtgtcacctcaaagcctttttttttttttttttttttgagatggagtctcactctgtagcccaggctggagtgcagtggctccatctcagctcactgcaacctctggctcccaggttcaagcgattttcctgcctca

SEQ ID NO: 405409 - DNA, 201 bp, Homo sapiens; identical to SEQ ID NO: 90674

SEQ ID NO: 405410 - DNA, 201 bp, Homo sapiens
acttcgagagtctgagtaactttatcccaaggctacacagttggtacaaacaagactggacttcagtgtcacctcaaagcctttttttttttttttttttttgagatggagtctcactctgtagcccaggctggagtgcagtggctccatctcagctcactgcaacctctggctcccaggttcaagcgattttcctgcctc

SEQ ID NO: 405411 - DNA, 201 bp, Homo sapiens
ccatgacccctcccctcccccgcgtctggggaagggcgctccctcctctccaccagtaggggggccaggccaccgcacacccggcctcccgcccgccccascgtcttcctggattcttttgttggaggagaggcgggctgggggtgcgggaccgccgggccagtggccactgcggggagccccaacccggttgtcgcccta

SEQ ID NO: 405412 - DNA, 201 bp, Homo sapiens
tatggattgcttgccctggggtcaggagtcccccttggtccattcagctgtggctagggcaagtgggtgtggccagtggtaggtacagggactttgtcccsttctgtttcttaccactgtcaccttgggacatttattgacttgacctagtttataagctttttgacaacaggagcccatttgatcatctgaacaacctgt

SEQ ID NO: 405413 - DNA, 201 bp, Homo sapiens
ccgagctccctgaaaaagaaattcttggcctttttaaaggcttacaactttaaggggtccatgtgaaagggtcgtgatacatcacgcaagcgtgggaaacrtgactggaggctacatgcatcagctaacagaacaaaaagttttacaatgcttttttcatacagtatctggaatttgcagataacacaagtagtttaggtc

SEQ ID NO: 405414 - DNA, 201 bp, Homo sapiens
tcagctgtggctagggcaagtgggtgtggccagtggtaggtacagggactttgtcccgttctgtttcttaccactgtcaccttgggacatttattgacttracctagtttataagctttttgacaacaggagcccatttgatcatctgaacaacctgtgatgtagccagggcatattaccacccccatcacccccatgggg

SEQ ID NO: 405415 - DNA, 201 bp, Homo sapiens; identical to SEQ ID NO: 90651

SEQ ID NO: 405416 - DNA, 201 bp, Homo sapiens
tgcccacccccctaccgccgactcctgttcttgatggaaaataaaaagctgaagctcagatggaaggtgacttaactcccccaaggccacagggctagggratggtgtttgctgaaccaggcctcctccacatacagccatctttccctaatccctaattgctcttcctcggctacaagtttggggatggtccctgtgtct

SEQ ID NO: 405417 - DNA, 201 bp, Homo sapiens
ccacataagtgcacatagcaagggtgaggcacagagcttctatacacccgtgatggcctgcagagagcttggacttccctccagagcaggaggagctggtytgtttgtttttgagacagggtctcactctgtcacccaggctggagtgcagtggcacaatttcgactcactgcaatctctacctgccaggttcaagcaatt

SEQ ID NO: 405418 - DNA, 201 bp, Homo sapiens
agggctcccacttctgtagggcatactggaagcccagcacagacaggccaaagtccaggcagaaggcttctacatcctctagcggggggggtctctgtgcmgccactctcatggtggcattggtgatgtccctccccactgcaggcccaggacgtctactcaggtgacatcatcagtggcctccgagatgaaaccaacttc

SEQ ID NO: 405419 - DNA, 201 bp, Homo sapiens
tgatggggattcagggctcccacttctgtagggcatactggaagcccagcacagacaggccaaagtccaggcagaaggcttctacatcctctagcgggggsggtctctgtgccgccactctcatggtggcattggtgatgtccctccccactgcaggcccaggacgtctactcaggtgacatcatcagtggcctccgagat

SEQ ID NO: 405420 - DNA, 201 bp, Homo sapiens
agaagtgatggggattcagggctcccacttctgtagggcatactggaagcccagcacagacaggccaaagtccaggcagaaggcttctacatcctctagcrgggggggtctctgtgccgccactctcatggtggcattggtgatgtccctccccactgcaggcccaggacgtctactcaggtgacatcatcagtggcctcc

SEQ ID NO: 405421 - DNA, 201 bp, Homo sapiens; identical to SEQ ID NO: 90659

SEQ ID NO: 405422 - DNA, 201 bp, Homo sapiens; identical to SEQ ID NO: 90662

SEQ ID NO: 405423 - DNA, 201 bp, Homo sapiens
tcgcgatgccagtggccgcctgatgccagatcccaagcgcttccctcatggcattcctttcctggctgactacgtgagccgcaccccagccctgcccttgscctcagggctagaccactcctttcaccctacctcgcttagggctcacttacgtgattgagatctcacagtctagtgggggaaacagacaaatgaacaccg

SEQ ID NO: 405424 - DNA, 201 bp, Homo sapiens
taactccatattacagataaggaaactgaggcccgagggggaaaggtctcacttaggtgagctgattgggtgcctatcctggctggcttacttcttaagcstctctgaggcctcttgagggtctgtggtagagagcaaagagctctggactggggctcaggagacctggagtctggccaatggtcccgacttaacgatttt

SEQ ID NO: 405425 - DNA, 201 bp, Homo sapiens
cagggtcagatatgccttgaggaggctccttgagggtcctgcttgagcccactgtgtcctcaaacccccacaggttcactccctgggcctgaagttgggtrtctacgcggacatgggcaacttcacctgcatgggttacccaggcaccacactggacaaggtggtccaggatgctcagaccttcgccgagtggaaggtaga

SEQ ID NO: 405426 - DNA, 201 bp, Homo sapiens
acggggagggtggccatggagacccacccagcgcccacctggctgagcttcccaattccccctacccaggggttagggggattgtggctcccaggctcccwaaatatgagtggcagcatagcccaccctggaagcatttgaggctctgggtatgtggggaggcacctactgtttggagcttgtttcttcacatctgttggg

SEQ ID NO: 405427 - DNA, 201 bp, Homo sapiens
cgcgatgccagtggccgcctgatgccagatcccaagcgcttccctcatggcattcctttcctggctgactacgtgagccgcaccccagccctgcccttggsctcagggctagaccactcctttcaccctacctcgcttagggctcacttacgtgattgagatctcacagtctagtgggggaaacagacaaatgaacaccga

SEQ ID NO: 405428 - DNA, 201 bp, Homo sapiens
tccgcccacctcggcctcccaaagtgctggaattacaggagtgagccaccgtgcctggcctgtccacatttttaaggtaggctaggctcagctatgatgtktgccaggttaggtgtattaagtacatttttgacatgatattttcttttttattattttgggatggggtctcgcactgtcacagcccaggctagagttcag

SEQ ID NO: 405429 - DNA, 201 bp, Homo sapiens; identical to SEQ ID NO: 90686

SEQ ID NO: 405430 - DNA, 201 bp, Homo sapiens; identical to SEQ ID NO: 90673

SEQ ID NO: 405431 - DNA, 201 bp, Homo sapiens
aacggggagggtggccatggagacccacccagcgcccacctggctgagcttcccaattccccctacccaggggttagggggattgtggctcccaggctccytaaatatgagtggcagcatagcccaccctggaagcatttgaggctctgggtatgtggggaggcacctactgtttggagcttgtttcttcacatctgttgg

SEQ ID NO: 405432 - DNA, 201 bp, Homo sapiens
caagatggctgctgccctgaatgccacaggccgccccatcgccttctcctgcagctggccagcctatgaaggcggcctccccccaagggtaagccattctsccccctgcctgatggcgcttcccacacccaggcctccttacctcctgagtgccaggcttcagggacggggccttccagagccagggctgctctcaccaca

SEQ ID NO: 405433 - DNA, 201 bp, Homo sapiens; identical to SEQ ID NO: 90661

SEQ ID NO: 405434 - DNA, 201 bp, Homo sapiens
gggtgtggccagtggtaggtacagggactttgtcccgttctgtttcttaccactgtcaccttgggacatttattgacttgacctagtttataagctttttracaacaggagcccatttgatcatctgaacaacctgtgatgtagccagggcatattaccacccccatcacccccatggggtttttgttttttattgattta

SEQ ID NO: 405435 - DNA, 201 bp, Homo sapiens
acaaacaagactggacttcagtgtcacctcaaagcctttttttttttttttttttttgagatggagtctcactctgtagcccaggctggagtgcagtggcwccatctcagctcactgcaacctctggctcccaggttcaagcgattttcctgcctcagcctcccaggtagctgggattacaggtgtgcgccaccacacccg

SEQ ID NO: 405436 - DNA, 201 bp, Homo sapiens
cttccctcttccccactctctgtctctcctgctgagcctcctcaactcctgtgtgggtccctgggctgcagcgtgtgattctggtgctggactctgccttyccctcgacatccaggtgaactacagtctgctggcggacatctgcaacctctggcgtaactatgatgacatccaggactcctggtggagcgtgctctccat

SEQ ID NO: 405437 - DNA, 201 bp, Homo sapiens
gagatggggtttctccgtgttggtcaggctggtttcgaactcctgacctcaggtgatctgccctcctcagcctcccaaagtgctgggattacaggcgtgarccaccgcgcctggccttttgttttttgagtcagagtctcactctgttgcccaggctggagtgcagtggtgcaatctcggctcactgcaacctccacattc

SEQ ID NO: 405438 - DNA, 201 bp, Homo sapiens
agcataggggccgggctcagagtaggtgttgatgagtatctgctgagtcagggaaggtgggcagatagggttagataagctggggtgctggaggcccgtgscatcctccctaaacctgtgtgacatggagctgtgaactgggggacccagaactcagggagggccagggaggcaatggtaggtcctgtctgagcaagggac

SEQ ID NO: 405439 - DNA, 201 bp, Homo sapiens
gccagtggtaggtacagggactttgtcccgttctgtttcttaccactgtcaccttgggacatttattgacttgacctagtttataagctttttgacaacargagcccatttgatcatctgaacaacctgtgatgtagccagggcatattaccacccccatcacccccatggggtttttgttttttattgatttatttattt

SEQ ID NO: 405440 - DNA, 201 bp, Homo sapiens
acctcccaggttcaagcgattctcctgcctcaaccgcccgagtagctgggattacaggcgcctgctatgacacccagctaattttttttttttttttttttagtagagatggggtttcaccatgttggccagactggtctcaaactcctgacctcatgatctgcccgcctcagcctcccaaagtgctgggattacaggtgt

SEQ ID NO: 405441 - DNA, 201 bp, Homo sapiens
gcataggggccgggctcagagtaggtgttgatgagtatctgctgagtcagggaaggtgggcagatagggttagataagctggggtgctggaggcccgtggsatcctccctaaacctgtgtgacatggagctgtgaactgggggacccagaactcagggagggccagggaggcaatggtaggtcctgtctgagcaagggacc

SEQ ID NO: 405442 - DNA, 201 bp, Homo sapiens; identical to SEQ ID NO: 90652

SEQ ID NO: 405443 - DNA, 201 bp, Homo sapiens
actcctcccttggccagctgaacttcaccgggtctgtgatatatgaggtgagcacccggctgcctgcagccacccgcctgggcttcagatttctgtgggasggtattatggggggtggttgttcacatatggcctcccctgagccgtgggcttagggcctctggcaggtgcccatggggagctgcaggcactgagagctgc

SEQ ID NO: 405444 - DNA, 201 bp, Homo sapiens
attcctttcctggctgactacgtgagccgcaccccagccctgcccttggcctcagggctagaccactcctttcaccctacctcgcttagggctcacttacrtgattgagatctcacagtctagtgggggaaacagacaaatgaacaccgacttttggcctattctgttgagtgagagccagaaagggcatctcacacagcc

SEQ ID NO: 405445 - DNA, 201 bp, Homo sapiens
accggatggcacaggatggatggcgggacatgggctacacatacctcaacattgatgactgctggatcggtggtcgcgatgccagtggccgcctgatgccrgatcccaagcgcttccctcatggcattcctttcctggctgactacgtgagccgcaccccagccctgcccttggcctcagggctagaccactcctttcacc

SEQ ID NO: 405446 - DNA, 201 bp, Homo sapiens
aggagtgagccaccgtgcctggcctgtccacatttttaaggtaggctaggctcagctatgatgtttgccaggttaggtgtattaagtacatttttgacatratattttcttttttattattttgggatggggtctcgcactgtcacagcccaggctagagttcagtggcacgatctcagctcactgcagcctccgcctctg

SEQ ID NO: 405447 - DNA, 201 bp, Homo sapiens
cttaactcccccaaggccacagggctagggaatggtgtttgctgaaccaggcctcctccacatacagccatctttccctaatccctaattgctcttcctcrgctacaagtttggggatggtccctgtgtctacctccttgaggagatgagagctgactactcctcttctctgcccccagctgctcattgggaactttggtc

SEQ ID NO: 405448 - DNA, 201 bp, Homo sapiens
ccactcctttcaagccagcttgcttatggctcatcgcacaatctctggtggtcatttacactgatacctggcttagggctcagcaaggtcatggtttttayagcccagattcaatcagagctgaggcagggtgtgggtgagggccgggctgggtccctgagctaccccatccctctgcccctcactagtgaacagctcttc

SEQ ID NO: 405449 - DNA, 201 bp, Homo sapiens
ggccagctgtaggctaatgtgcgttgtcgcactttttttttttttttttttgagacggagtctcactctgtcacccaggctggagtggagtagagtggcgygatctcggctcactgcaacctccatctcccaggttcaagcaagtctcctgctcagcctcctaagtagctgggattacaggcactcaccacctcaccccgg

SEQ ID NO: 405450 - DNA, 201 bp, Homo sapiens
gtagagagcaaagagctctggactggggctcaggagacctggagtctggccaatggtcccgacttaacgatttttcaactttactgtggtgtgaaagcgaygcacattcagtagaaaccacagtacgtatacaacctgtgtttcagtattcagtaaattgcatgaaatattcaacaatttattataaaataggctttgtgt

SEQ ID NO: 405451 - DNA, 201 bp, Homo sapiens
gagaaccgcctgtacagtccctacagtaactccatattacagataaggaaactgaggcccgagggggaaaggtctcacttaggtgagctgattgggtgccyatcctggctggcttacttcttaagcctctctgaggcctcttgagggtctgtggtagagagcaaagagctctggactggggctcaggagacctggagtctg

SEQ ID NO: 405452 - DNA, 201 bp, Homo sapiens; identical to SEQ ID NO: 90680

SEQ ID NO: 405453 - DNA, 201 bp, Homo sapiens; identical to SEQ ID NO: 90681

SEQ ID NO: 405454 - DNA, 201 bp, Homo sapiens; identical to SEQ ID NO: 90664

SEQ ID NO: 405455 - DNA, 201 bp, Homo sapiens; identical to SEQ ID NO: 90665

SEQ ID NO: 405456 - DNA, 201 bp, Homo sapiens
actgaaacaggttgggctttctctagggtaccccaagatggctgctgccctgaatgccacaggccgccccatcgccttctcctgcagctggccagcctatkaaggcggcctccccccaagggtaagccattctgccccctgcctgatggcgcttcccacacccaggcctccttacctcctgagtgccaggcttcagggacg

SEQ ID NO: 405457 - DNA, 201 bp, Homo sapiens
gcaggcagcctctgtagggctgagcaacatacagatggggtgggatgagggctggagctgtgggggcaactgatagtcaccatcccctcctcccttgcccsctagtgctcttgctgggacatgtggcccaggtgctgatgctggacaatgggctcctgcagacaccacccatgggctggctggcctgggaacgcttccgct

SEQ ID NO: 405458 - DNA, 201 bp, Homo sapiens
agtaactccatattacagataaggaaactgaggcccgagggggaaaggtctcacttaggtgagctgattgggtgcctatcctggctggcttacttcttaascctctctgaggcctcttgagggtctgtggtagagagcaaagagctctggactggggctcaggagacctggagtctggccaatggtcccgacttaacgatt

SEQ ID NO: 405459 - DNA, 201 bp, Homo sapiens
cccagaactcagggagggccagggaggcaatggtaggtcctgtctgagcaagggaccccagccagtagccaccttctgtgcccaggaaaaatctctcatcraagtgtacatgcggcctctgtccaacaaggctagcgccttagtcttcttcagctgcaggaccgatatgccttatcgctaccactcctcccttggccagct

SEQ ID NO: 405460 - DNA, 201 bp, Homo sapiens
ctagtgaacagctcttcatggagatggctgaccggatggcacaggatggatggcgggacatgggctacacatacctcaacattgatgactgctggatcggyggtcgcgatgccagtggccgcctgatgccagatcccaagcgcttccctcatggcattcctttcctggctgactacgtgagccgcaccccagccctgccct

SEQ ID NO: 405461 - DNA, 201 bp, Homo sapiens
caggcagcctctgtagggctgagcaacatacagatggggtgggatgagggctggagctgtgggggcaactgatagtcaccatcccctcctcccttgccccstagtgctcttgctgggacatgtggcccaggtgctgatgctggacaatgggctcctgcagacaccacccatgggctggctggcctgggaacgcttccgctg

SEQ ID NO: 405462 - DNA, 201 bp, Homo sapiens
ttttttgtatttttagtagagacgggatttcaccgtgttagccagaatggtctcgatctcctgacctcgtgatccgcccgtctcggcctcccaaagtgcgagaaagaggtgtttttgagtgagctggagcacggtgccactcctcagggctgtcgagtccctgcttgtgtgtgtgaaaaggcggtagaatgtggtggttag

SEQ ID NO: 405463 - DNA, 201 bp, Homo sapiens
ccccgtctccaggaggacactcactttcaccggtttgggcaaaatggcgccgctgcgggtaacgatgactgacctcgacggtaccaggctccggcctgagmcgctccatgcggcggagacatcgccatctttcctcaagctaggcccgctccggagagccccggacctgacgggtgccaatactagccagcgagccgctcc

SEQ ID NO: 405464 - DNA, 201 bp, Homo sapiens
ctcgctgtgtcgctcaggctggagtgcagtggtgcgatctcggctcactgcaagctccgcctcccggattcacgtcattctcctgcctcagcctcagcctyccgaatagctgggattacaggcgcccgccaccacgccggccatttttttttgtatttttagtagagacgggatttcaccgtgttagccagaatggtctcg

SEQ ID NO: 405465 - DNA, 201 bp, Homo sapiens
tgggacgggataaagtccgagaaatgtttatgaagaatgcccatgtcacagaccccagggtggttgatcttctggtcattaaggtaactgaccctccctgmccaatttaaaagatcagccaacttgtccactacttcttagtctttccaaatgaacattttgtctccaagtttagaaagcagctactggttcggcagtgat

SEQ ID NO: 405466 - DNA, 201 bp, Homo sapiens; identical to SEQ ID NO: 90691

SEQ ID NO: 405467 - DNA, 201 bp, Homo sapiens
taagccagtcaggttaggtagtcatgggataggagcctgttaacctgtatgtttctcctcttggtaccagttaaccacagagttaaagaatctgaaaagtstcagaaatgatttaccctgaccacctcattgtccagacatagaaactttgcccagacagagtagttacttgcccaaggtcattcaacaagtccatgctga

SEQ ID NO: 405468 - DNA, 201 bp, Homo sapiens
gaggcgactgcgggtgcttcaggggaagagggtcacccgagcctaccatgggccggacctggcggcggcgcggtggtcagaccggccgtgcctagcattcstacgtgctatcggagctttggtctcttttgtccttcgcaattggcgggaggacgatgactgtcagtgacacactcactttgtgggtgaggcagcggaggc

SEQ ID NO: 405469 - DNA, 201 bp, Homo sapiens; identical to SEQ ID NO: 90690

SEQ ID NO: 405470 - DNA, 201 bp, Homo sapiens
gtttagaaagcagctactggttcggcagtgattattgctgtgtttcagagaaatacttgaacttggaggttatcatctggttaaatagataagattcatcragggaacatccactgggacttgcattttataaccataaaaaaagatatagggaggaaagtttgaactcttcttgaacctcatccctagaagttaccactt

SEQ ID NO: 405471 - DNA, 201 bp, Homo sapiens
ggaaaagacattcgcccgcggtccgcacgcgctgcttgcaaaggggtggggttgtggagtggatgctttggcaagatggcggggagcggcgtccgccaagytacttctaccgccagcaccttcgtgaagcccattttcagtcgggacatgaacgaggccaagcggagggtgcgcgagctctaccgcgcctggtatcgggag

SEQ ID NO: 405472 - DNA, 201 bp, Homo sapiens
catctattcctcagtttcttcatctttaaaatgggaataataattccttcttcagaaggttactgtattaagttaaaatatctagagtgcttagaacaggrcttgatgcatatttaactcattaaatattagctgctgccgttgtttttgttgttatttttgttatttatagggctttccttagcagcagcttccaagcag

SEQ ID NO: 405473 - DNA, 201 bp, Homo sapiens
tttctaaaccgacccctcccaagaccttccctcaaattctgttttgggaagaaagtcccaaagtcagaagggtcttgagaggaggaaaagaaggcagagggctacaggagcctagaaagcaagggaagaggagagaaaagaaggggtcaaggagtatgcatccctatggggaagatcagtgatctgtagctggccagttac

SEQ ID NO: 405474 - DNA, 201 bp, Homo sapiens
caaagccgtgagcaacgtgatcgcctccctcacctgcgggcgccgcttcgagtacgacgaccctcgcttcctcaggctgctggacctagctcaggagggaytgaaggaggagtcgggcttcctgcgcgaggtgcggagcaagggtctctgcagggcgagctcctgagaggtgccggggctggactggggcctccgaagggc

SEQ ID NO: 405475 - DNA, 201 bp, Homo sapiens
atgatgagaacctgcgcatagtggtgggtaacctgttccttgccgggatggtgaccaccttgaccacgctggcctggggcctcctgctcatgatcctacayctggatgtgcagcgtgagcccagctggggcccaaggcagggactgagggaggaagggtacagctgggggcccctgggcttagctgggacacccggggctt

SEQ ID NO: 405476 - DNA, 201 bp, Homo sapiens
ggcagaagggcacaaagcgggaactgggaaggcgggggacggagaaggcaaccccttacccgcatctcccacccccaggacgcccctttcgccccaacggyctcttggacaaagccgtgagcaacgtgatcgcctccctcacctgcgggcgccgcttcgagtacgacgaccctcgcttcctcaggctgctggacctagctc

SEQ ID NO: 405477 - DNA, 201 bp, Homo sapiens
aaaaggttggaccagtgcatcacccggcgagccgcatctgggctgacaggtgcagaattggaggtcatttgggggctaccccgttctatcccctgagtatsctctcggccctgctcaggccaaggggagccctgagagcagcttcaatgatgagaacctgcgcatagtggtgggtaacctgttccttgccgggatggtgac

SEQ ID NO: 405478 - DNA, 201 bp, Homo sapiens
tcacctccctgctgcagcacttcagcttctccgtggccgccggacagccccggcccagccactctcgtgtcgtcagctttctggtgaccccatccccctaygagctttgtgctgtgccccgctagaatggggtacctagtccccagcctgctccctagccagaggctctaatgtacaataaagcaatgtggtagttccaac

SEQ ID NO: 405479 - DNA, 201 bp, Homo sapiens
  misc_feature (1)...(201): n = A,T,C or G
ctgggcaagaagtcgctggagcagtgggtgaccgaggaggccgcctgcctttgtgccgccttcgccgaccaagccggtgggtgatgggcagaagggcacanagcgggaactgggaaggcgggggacggagaaggcaaccccttacccgcatctcccacccccaggacgcccctttcgccccaacggcctcttggacaaagc

SEQ ID NO: 405480 - DNA, 201 bp, Homo sapiens
agtgaggcagccatggggctagaagcactggtgcccctggccatgatagtggccatcttcctgctcctggtggacctgatgcaccggcaccaacgctgggmtgcacgctacccgccaggtcccctgccactgcccgggctgggcaaccttgctgcatgtggacttccagaacacaccatactgcttcgaccaggtgaggga

SEQ ID NO: 405481 - DNA, 201 bp, Homo sapiens
agtcgggcttcctgcgcgaggtgcggagcaagggtctctgcagggcgagctcctgagaggtgccggggctggactggggcctccgaagggcaggatttgcrtagatgggtttgggaaaggacattccaggagaccccactgtaagaagggcctggaggaggaggggacatctcagacatggtcgtgggagaggtgtgcccg

SEQ ID NO: 405482 - DNA, 201 bp, Homo sapiens
  misc_feature (1)...(201): n = A,T,C or G
ccaggatcaggaggctgggtctcctccttccacctgctcactcctggtagccccgggggtcgtccaaggttcaaataggactaggacctgtagtctggggngatcctggcttgacaagaggccctgaccctccctctgcagttgcggcgccgcttcggggacgtgttcagcctgcagctggcctggacgccggtggtcgtg

SEQ ID NO: 405483 - DNA, 201 bp, Homo sapiens
ttggaggtcatttgggggctaccccgttctatcccctgagtatcctctcggccctgctcaggccaaggggagccctgagagcagcttcaatgatgagaacstgcgcatagtggtgggtaacctgttccttgccgggatggtgaccaccttgaccacgctggcctggggcctcctgctcatgatcctacacctggatgtgca

SEQ ID NO: 405484 - DNA, 201 bp, Homo sapiens
gaggtcatttgggggctaccccgttctatcccctgagtatcctctcggccctgctcaggccaaggggagccctgagagcagcttcaatgatgagaacctgygcatagtggtgggtaacctgttccttgccgggatggtgaccaccttgaccacgctggcctggggcctcctgctcatgatcctacacctggatgtgcagcg

SEQ ID NO: 405485 - DNA, 201 bp, Homo sapiens
atggctggggcctgagactggtccagatgaacgcagagcacaggagggattgagaccccgttctgtctggtgtaggtgctgaatgctgtccccgtcctccygcacatcccagcgctggctggcaaggtcctacgcttccaaaaggctttcctgacccagctggatgagctgctaactgagcacaggatgacctgggaccca

SEQ ID NO: 405486 - DNA, 201 bp, Homo sapiens
ctccgtgtccaccttgcgcaacttgggcctgggcaagaagtcgctggagcagtgggtgaccgaggaggccgcctgcctttgtgccgccttcgccgaccaakccggtgggtgatgggcagaagggcacaaagcgggaactgggaaggcgggggacggagaaggcaaccccttacccgcatctcccacccccaggacgcccct

SEQ ID NO: 405487 - DNA, 201 bp, Homo sapiens
gaagccggaggccttcctgcctttctcagcaggtgcctgtggggagcccggctccctgtccccttccgtggagtcttgcaggggtatcacccaggagccargctcactgacgcccctcccctccccacaggccgccgtgcatgcctcggggagcccctggcccgcatggagctcttcctcttcttcacctccctgctgcag

SEQ ID NO: 405488 - DNA, 201 bp, Homo sapiens
acctcccttcatatatgacaccccaaaatggaagacaaatcatgtcagggagctatatgccagggctacctcccagggctcagtcggcaggtgccagaacrttccctgggaaggccccaggaaaacccaggaccgagccaccgccctcagcctgtcaccttgtgtccaaaattggtgggttcttggtctcactgacttcaa

SEQ ID NO: 405489 - DNA, 201 bp, Homo sapiens
ggctaccccgttctatcccctgagtatcctctcggccctgctcaggccaaggggagccctgagagcagcttcaatgatgagaacctgcgcatagtggtggstaacctgttccttgccgggatggtgaccaccttgaccacgctggcctggggcctcctgctcatgatcctacacctggatgtgcagcgtgagcccagctgg

SEQ ID NO: 405490 - DNA, 201 bp, Homo sapiens
ccctctgcagttgcggcgccgcttcggggacgtgttcagcctgcagctggcctggacgccggtggtcgtgctcaatgggctggcggccgtgcgcgaggcgmtggtgacccgcggcgaggacacggccgaccgcccgcctgcgcccatctaccaggtcctgggcttcgggccgcgttcccaaggcaagcggcggtgggggac

SEQ ID NO: 405491 - DNA, 201 bp, Homo sapiens
actggggcctctcggcaattttggtgactcttgcaaggtcatacctgggtgacgcatccaaactgagttcctccatcacagaaggtgtgacccccaccccygccccaggatcaggaggctgggtctcctccttccacctgctcactcctggtagccccgggggtcgtccaaggttcaaataggactaggacctgtagtctg

SEQ ID NO: 405492 - DNA, 201 bp, Homo sapiens
cgacgtgatagggcaggtgcggcgaccagagatgggtgaccaggctcacatgccctacaccactgccgtgattcacgaggtgcagcgctttggggacatcrtccccctgagtgtgacccatatgacatcccgtgacatcgaagtacagggcttccgcatccctaaggtaggcctggcgccctcctcaccccagctcagcac

SEQ ID NO: 405493 - DNA, 201 bp, Homo sapiens
cttcacctgccccgagtcctgtcttcctgctctgccttctggggctgtggcccttgctggcctggagccccaaccaagggcagggactgctgtcctccacrtctgtcctcaccgacataatgggctgggctgggcacacaggcagtgcccaagagtttctaatgagcatatgattacctgagtcctgggcagaccttctta

SEQ ID NO: 405494 - DNA, 201 bp, Homo sapiens
tgaccgaggaggccgcctgcctttgtgccgccttcgccgaccaagccggtgggtgatgggcagaagggcacaaagcgggaactgggaaggcgggggacggrgaaggcaaccccttacccgcatctcccacccccaggacgcccctttcgccccaacggcctcttggacaaagccgtgagcaacgtgatcgcctccctcacc

SEQ ID NO: 405495 - DNA, 201 bp, Homo sapiens
ccacaggccgccgtgcatgcctcggggagcccctggcccgcatggagctcttcctcttcttcacctccctgctgcagcacttcagcttctccgtggccgcyggacagccccggcccagccactctcgtgtcgtcagctttctggtgaccccatccccctacgagctttgtgctgtgccccgctagaatggggtacctagtc

SEQ ID NO: 405496 - DNA, 201 bp, Homo sapiens
aagggtacagctgggggcccctgggcttagctgggacacccggggcttccagcacaggcgtggccaggctcctgtaagcctaacttcctccaacacaggasgaaggagagtgtcccctgggtgctgacccattgtggggacgcatgtctgtccagtccgtgtccaacaggagatcgacgacgtgatagggcaggtgcggcg

SEQ ID NO: 405497 - DNA, 201 bp, Homo sapiens
ctcccctccccacaggccgccgtgcatgcctcggggagcccctggcccgcatggagctcttcctcttcttcacctccctgctgcagcacttcagcttctcsgtggccgccggacagccccggcccagccactctcgtgtcgtcagctttctggtgaccccatccccctacgagctttgtgctgtgccccgctagaatgggg

SEQ ID NO: 405498 - DNA, 201 bp, Homo sapiens
cggcccagccactctcgtgtcgtcagctttctggtgaccccatccccctacgagctttgtgctgtgccccgctagaatggggtacctagtccccagcctgytccctagccagaggctctaatgtacaataaagcaatgtggtagttccaacttgggtcccctgctcacgccctcgttgggatcatcctcctcagggcaacc

SEQ ID NO: 405499 - DNA, 201 bp, Homo sapiens
catcctagagtccagtccccactctcaccctgcatctcctgcccagggaacgacactcatcaccaacctgtcatcggtgctgaaggatgaggccgtctggragaagcccttccgcttccaccccgaacacttcctggatgcccagggccactttgtgaagccggaggccttcctgcctttctcagcaggtgcctgtgggga

SEQ ID NO: 405500 - DNA, 201 bp, Homo sapiens
gcgggagaccttgtggagcgccagggttggagtgggtggcggagggtggggccaaggccttcatggcaacgcccacgtgcccgtcccgcccccaggggtgwtcctgtcgcgctatgggcccgcgtggcgcgagcagaggcgcttctccgtgtccaccttgcgcaacttgggcctgggcaagaagtcgctggagcagtgggt

SEQ ID NO: 405501 - DNA, 201 bp, Homo sapiens; identical to SEQ ID NO: 90719

SEQ ID NO: 405502 - DNA, 201 bp, Homo sapiens
cctttctcagcaggtgcctgtggggagcccggctccctgtccccttccgtggagtcttgcaggggtatcacccaggagccaggctcactgacgcccctccmctccccacaggccgccgtgcatgcctcggggagcccctggcccgcatggagctcttcctcttcttcacctccctgctgcagcacttcagcttctccgtgg

SEQ ID NO: 405503 - DNA, 201 bp, Homo sapiens
agctggaccgggctagggactgcgggagaccttgtggagcgccagggttggagtgggtggcggagggtggggccaaggccttcatggcaacgcccacgtgyccgtcccgcccccaggggtgatcctgtcgcgctatgggcccgcgtggcgcgagcagaggcgcttctccgtgtccaccttgcgcaacttgggcctgggcaa

SEQ ID NO: 405504 - DNA, 201 bp, Homo sapiens
cagacccgccagaagcccggtgggcgaggctgatgcgtcgaagtggcggtggcggggaccgcgcctatgctgcgggctcagtgtgggcgggacgggcgggrtcttccttgagtggaaaggtggtcagggtgggcagagacgaggtggggccaaaccccgccccaggcaggggagcaatgtgggtgagcaaagagtgggccc

SEQ ID NO: 405505 - DNA, 201 bp, Homo sapiens
gccccaccaccagcaaacatgggtggtgggttaaaccacaggctggatcagaagccaggctgagaaggggaagcaggtttgggggacgtcctggggaaggrcatttatacatggcatgaaggactggattttccaaaggccaaggaagagtagggcaagggcctggaggtggagctggacttggcagtgggcatgcaagcc

SEQ ID NO: 405506 - DNA, 201 bp, Homo sapiens
gaggatgccccaccaccagcaaacatgggtggtgggttaaaccacaggctggatcagaagccaggctgagaaggggaagcaggtttgggggacgtcctggrgaaggacatttatacatggcatgaaggactggattttccaaaggccaaggaagagtagggcaagggcctggaggtggagctggacttggcagtgggcatg

SEQ ID NO: 405507 - DNA, 201 bp, Homo sapiens
aggtcctgaggatgccccaccaccagcaaacatgggtggtgggttaaaccacaggctggatcagaagccaggctgagaaggggaagcaggtttgggggacktcctggggaaggacatttatacatggcatgaaggactggattttccaaaggccaaggaagagtagggcaagggcctggaggtggagctggacttggcagt

SEQ ID NO: 405508 - DNA, 201 bp, Homo sapiens
gcttcgaccaggtgagggaggaggtcctggagggcggcagaggtcctgaggatgccccaccaccagcaaacatgggtggtgggttaaaccacaggctggaycagaagccaggctgagaaggggaagcaggtttgggggacgtcctggggaaggacatttatacatggcatgaaggactggattttccaaaggccaaggaag

SEQ ID NO: 405509 - DNA, 201 bp, Homo sapiens
cagaacacaccatactgcttcgaccaggtgagggaggaggtcctggagggcggcagaggtcctgaggatgccccaccaccagcaaacatgggtggtgggtkaaaccacaggctggatcagaagccaggctgagaaggggaagcaggtttgggggacgtcctggggaaggacatttatacatggcatgaaggactggatttt

SEQ ID NO: 405510 - DNA, 201 bp, Homo sapiens
gaccttgtggagcgccagggttggagtgggtggcggagggtggggccaaggccttcatggcaacgcccacgtgcccgtcccgcccccaggggtgatcctgkcgcgctatgggcccgcgtggcgcgagcagaggcgcttctccgtgtccaccttgcgcaacttgggcctgggcaagaagtcgctggagcagtgggtgaccga

SEQ ID NO: 405511 - DNA, 201 bp, Homo sapiens
  misc_feature (1)...(201): n = A,T,C or G
ccctggtgatagccccagcatggctactgccaggtgggcccactctaggaaccctggccacctagtcctcaatgccaccacactgactgtccccacttggntggggggtccagagtataggcagggctggcctgtccatccagagcccccgtctagtggggaagacaaatcaggacctgccagaatgttggaggacccagc

SEQ ID NO: 405512 - DNA, 201 bp, Homo sapiens
ctaccccgttctatcccctgagtatcctctcggccctgctcaggccaaggggagccctgagagcagcttcaatgatgagaacctgcgcatagtggtgggtracctgttccttgccgggatggtgaccaccttgaccacgctggcctggggcctcctgctcatgatcctacacctggatgtgcagcgtgagcccagctgggg

SEQ ID NO: 405513 - DNA, 201 bp, Homo sapiens
gatgagaacctgcgcatagtggtgggtaacctgttccttgccgggatggtgaccaccttgaccacgctggcctggggcctcctgctcatgatcctacaccyggatgtgcagcgtgagcccagctggggcccaaggcagggactgagggaggaagggtacagctgggggcccctgggcttagctgggacacccggggcttcc

SEQ ID NO: 405514 - DNA, 201 bp, Homo sapiens
aggtcagtggtaaggacaggcaggccctgggtcttcctggagatggctggggcctgagactggtccagatgaacgcagagcacaggagggattgagacccsgttctgtctggtgtaggtgctgaatgctgtccccgtcctcccgcacatcccagcgctggctggcaaggtcctacgcttccaaaaggctttcctgacccag

SEQ ID NO: 405515 - DNA, 201 bp, Homo sapiens
gtgaccaggctcacatgccctacaccactgccgtgattcacgaggtgcagcgctttggggacatcatccccctgagtgtgacccatatgacatcccgtgayatcgaagtacagggcttccgcatccctaaggtaggcctggcgccctcctcaccccagctcagcaccagcccctggtgatagccccagcatggctactgcc

SEQ ID NO: 405516 - DNA, 201 bp, Homo sapiens
ggggaggctgggcaaaaggttggaccagtgcatcacccggcgagccgcatctgggctgacaggtgcagaattggaggtcatttgggggctaccccgttctrtcccctgagtatcctctcggccctgctcaggccaaggggagccctgagagcagcttcaatgatgagaacctgcgcatagtggtgggtaacctgttccttg

SEQ ID NO: 405517 - DNA, 201 bp, Homo sapiens
gacccagcccagccaccccgagacctgactgaggccttcctggcaaagaaggagaaggtgagagtggctgccacggtggggggcaagggtggtgggttgarcgtcccaggaggaatgaggggaggctgggcaaaaggttggaccagtgcatcacccggcgagccgcatctgggctgacaggtgcagaattggaggtcattt

SEQ ID NO: 405518 - DNA, 201 bp, Homo sapiens
accccaaaatggaagacaaatcatgtcagggagctatatgccagggctacctcccagggctcagtcggcaggtgccagaacattccctgggaaggccccakgaaaacccaggaccgagccaccgccctcagcctgtcaccttgtgtccaaaattggtgggttcttggtctcactgacttcaagaatgaagccgtggaccct

SEQ ID NO: 405519 - DNA, 201 bp, Homo sapiens
ctagggactgcgggagaccttgtggagcgccagggttggagtgggtggcggagggtggggccaaggccttcatggcaacgcccacgtgcccgtcccgcccmcaggggtgatcctgtcgcgctatgggcccgcgtggcgcgagcagaggcgcttctccgtgtccaccttgcgcaacttgggcctgggcaagaagtcgctgga

SEQ ID NO: 405520 - DNA, 201 bp, Homo sapiens
cccaaaatggaagacaaatcatgtcagggagctatatgccagggctacctcccagggctcagtcggcaggtgccagaacattccctgggaaggccccaggraaacccaggaccgagccaccgccctcagcctgtcaccttgtgtccaaaattggtgggttcttggtctcactgacttcaagaatgaagccgtggaccctca

SEQ ID NO: 405521 - DNA, 201 bp, Homo sapiens
tgacccattgtggggacgcatgtctgtccagtccgtgtccaacaggagatcgacgacgtgatagggcaggtgcggcgaccagagatgggtgaccaggctcrcatgccctacaccactgccgtgattcacgaggtgcagcgctttggggacatcatccccctgagtgtgacccatatgacatcccgtgacatcgaagtacag

SEQ ID NO: 405522 - DNA, 201 bp, Homo sapiens
cagtccgtgtccaacaggagatcgacgacgtgatagggcaggtgcggcgaccagagatgggtgaccaggctcacatgccctacaccactgccgtgattcaygaggtgcagcgctttggggacatcatccccctgagtgtgacccatatgacatcccgtgacatcgaagtacagggcttccgcatccctaaggtaggcctgg

SEQ ID NO: 405523 - DNA, 201 bp, Homo sapiens; identical to SEQ ID NO: 90728

SEQ ID NO: 405524 - DNA, 201 bp, Homo sapiens
ccccacaggccgccgtgcatgcctcggggagcccctggcccgcatggagctcttcctcttcttcacctccctgctgcagcacttcagcttctccgtggccrccggacagccccggcccagccactctcgtgtcgtcagctttctggtgaccccatccccctacgagctttgtgctgtgccccgctagaatggggtacctag

SEQ ID NO: 405525 - DNA, 201 bp, Homo sapiens; identical to SEQ ID NO: 90730

SEQ ID NO: 405526 - DNA, 201 bp, Homo sapiens
gtggagtcttgcaggggtatcacccaggagccaggctcactgacgcccctcccctccccacaggccgccgtgcatgcctcggggagcccctggcccgcatrgagctcttcctcttcttcacctccctgctgcagcacttcagcttctccgtggccgccggacagccccggcccagccactctcgtgtcgtcagctttctgg

SEQ ID NO: 405527 - DNA, 201 bp, Homo sapiens
cactttgtgaagccggaggccttcctgcctttctcagcaggtgcctgtggggagcccggctccctgtccccttccgtggagtcttgcaggggtatcacccrggagccaggctcactgacgcccctcccctccccacaggccgccgtgcatgcctcggggagcccctggcccgcatggagctcttcctcttcttcacctccc

SEQ ID NO: 405528 - DNA, 201 bp, Homo sapiens
tcgcctccctcacctgcgggcgccgcttcgagtacgacgaccctcgcttcctcaggctgctggacctagctcaggagggactgaaggaggagtcgggcttyctgcgcgaggtgcggagcaagggtctctgcagggcgagctcctgagaggtgccggggctggactggggcctccgaagggcaggatttgcatagatgggtt

SEQ ID NO: 405529 - DNA, 201 bp, Homo sapiens
aaccctggccacctagtcctcaatgccaccacactgactgtccccacttggatggggggtccagagtataggcagggctggcctgtccatccagagccccmgtctagtggggaagacaaatcaggacctgccagaatgttggaggacccagcgcctgcagggagagggggcagtgtgggtgcctctgagaggtgtgactgc

SEQ ID NO: 405530 - DNA, 201 bp, Homo sapiens
  misc_feature (1)...(201): n = A,T,C or G
ggaggccgcctgcctttgtgccgccttcgccgaccaagccggtgggtgatgggcagaagggcacaaagcgggaactgggaaggcgggggacggagaaggcnaccccttacccgcatctcccacccccaggacgcccctttcgccccaacggcctcttggacaaagccgtgagcaacgtgatcgcctccctcacctgcgggc

SEQ ID NO: 405531 - DNA, 201 bp, Homo sapiens; identical to SEQ ID NO: 90696

SEQ ID NO: 405532 - DNA, 201 bp, Homo sapiens
cctccccacaggccgccgtgcatgcctcggggagcccctggcccgcatggagctcttcctcttcttcacctccctgctgcagcacttcagcttctccgtgsccgccggacagccccggcccagccactctcgtgtcgtcagctttctggtgaccccatccccctacgagctttgtgctgtgccccgctagaatggggtacc

SEQ ID NO: 405533 - DNA, 201 bp, Homo sapiens
ctatcccctgagtatcctctcggccctgctcaggccaaggggagccctgagagcagcttcaatgatgagaacctgcgcatagtggtgggtaacctgttccytgccgggatggtgaccaccttgaccacgctggcctggggcctcctgctcatgatcctacacctggatgtgcagcgtgagcccagctggggcccaaggcag

SEQ ID NO: 405534 - DNA, 201 bp, Homo sapiens
tctatcccctgagtatcctctcggccctgctcaggccaaggggagccctgagagcagcttcaatgatgagaacctgcgcatagtggtgggtaacctgttcyttgccgggatggtgaccaccttgaccacgctggcctggggcctcctgctcatgatcctacacctggatgtgcagcgtgagcccagctggggcccaaggca

SEQ ID NO: 405535 - DNA, 201 bp, Homo sapiens
gagggacttggtgaggtcagtggtaaggacaggcaggccctgggtcttcctggagatggctggggcctgagactggtccagatgaacgcagagcacaggarggattgagaccccgttctgtctggtgtaggtgctgaatgctgtccccgtcctcccgcacatcccagcgctggctggcaaggtcctacgcttccaaaaggc

SEQ ID NO: 405536 - DNA, 201 bp, Homo sapiens
cagcaggtgcctgtggggagcccggctccctgtccccttccgtggagtcttgcaggggtatcacccaggagccaggctcactgacgcccctcccctccccrcaggccgccgtgcatgcctcggggagcccctggcccgcatggagctcttcctcttcttcacctccctgctgcagcacttcagcttctccgtggccgccgg

SEQ ID NO: 405537 - DNA, 201 bp, Homo sapiens
gtggaggctggcacttggggagggacttggtgaggtcagtggtaaggacaggcaggccctgggtcttcctggagatggctggggcctgagactggtccagrtgaacgcagagcacaggagggattgagaccccgttctgtctggtgtaggtgctgaatgctgtccccgtcctcccgcacatcccagcgctggctggcaagg

SEQ ID NO: 405538 - DNA, 201 bp, Homo sapiens
gccactggcagcacagtcaacacagcaggttcactcacagcagagggcgaaggccatcatcagctccctttataagggaagggtcacgcgctcggtgtgcygagagtgtcctgcctggtcctctgtgcctggtggggtgggggtgccaggtgtgtccagaggagcccagttggtagtgaggcagccatggggctagaagca

SEQ ID NO: 405539 - DNA, 201 bp, Homo sapiens
cctctcggcaattttggtgactcttgcaaggtcatacctgggtgacgcatccaaactgagttcctccatcacagaaggtgtgacccccacccccgccccasgatcaggaggctgggtctcctccttccacctgctcactcctggtagccccgggggtcgtccaaggttcaaataggactaggacctgtagtctggggtgat

SEQ ID NO: 405540 - DNA, 201 bp, Homo sapiens
aaaatggaagacaaatcatgtcagggagctatatgccagggctacctcccagggctcagtcggcaggtgccagaacattccctgggaaggccccaggaaarcccaggaccgagccaccgccctcagcctgtcaccttgtgtccaaaattggtgggttcttggtctcactgacttcaagaatgaagccgtggaccctcacgg

SEQ ID NO: 405541 - DNA, 201 bp, Homo sapiens
gacaaatcatgtcagggagctatatgccagggctacctcccagggctcagtcggcaggtgccagaacattccctgggaaggccccaggaaaacccaggacygagccaccgccctcagcctgtcaccttgtgtccaaaattggtgggttcttggtctcactgacttcaagaatgaagccgtggaccctcacggtgagtgtta

SEQ ID NO: 405542 - DNA, 201 bp, Homo sapiens
caacaggagatcgacgacgtgatagggcaggtgcggcgaccagagatgggtgaccaggctcacatgccctacaccactgccgtgattcacgaggtgcagcrctttggggacatcatccccctgagtgtgacccatatgacatcccgtgacatcgaagtacagggcttccgcatccctaaggtaggcctggcgccctcctca

SEQ ID NO: 405543 - DNA, 201 bp, Homo sapiens
  misc_feature (1)...(201): n = A,T,C or G
atccccctgagtgtgacccatatgacatcccgtgacatcgaagtacagggcttccgcatccctaaggtaggcctggcgccctcctcaccccagctcagcancagcccctggtgatagccccagcatggctactgccaggtgggcccactctaggaaccctggccacctagtcctcaatgccaccacactgactgtccccac

SEQ ID NO: 405544 - DNA, 201 bp, Homo sapiens
atgggtgaccaggctcacatgccctacaccactgccgtgattcacgaggtgcagcgctttggggacatcatccccctgagtgtgacccatatgacatcccrtgacatcgaagtacagggcttccgcatccctaaggtaggcctggcgccctcctcaccccagctcagcaccagcccctggtgatagccccagcatggctac

SEQ ID NO: 405545 - DNA, 201 bp, Homo sapiens
gagccgcatctgggctgacaggtgcagaattggaggtcatttgggggctaccccgttctatcccctgagtatcctctcggccctgctcaggccaaggggarccctgagagcagcttcaatgatgagaacctgcgcatagtggtgggtaacctgttccttgccgggatggtgaccaccttgaccacgctggcctggggcctc

SEQ ID NO: 405546 - DNA, 201 bp, Homo sapiens
agggcaggtgcggcgaccagagatgggtgaccaggctcacatgccctacaccactgccgtgattcacgaggtgcagcgctttggggacatcatccccctgrgtgtgacccatatgacatcccgtgacatcgaagtacagggcttccgcatccctaaggtaggcctggcgccctcctcaccccagctcagcaccagcccctg

SEQ ID NO: 405547 - DNA, 201 bp, Homo sapiens
aaaggctttcctgacccagctggatgagctgctaactgagcacaggatgacctgggacccagcccagccaccccgagacctgactgaggccttcctggcaragaaggagaaggtgagagtggctgccacggtggggggcaagggtggtgggttgaacgtcccaggaggaatgaggggaggctgggcaaaaggttggaccag

SEQ ID NO: 405548 - DNA, 201 bp, Homo sapiens
ggtgaggtcagtggtaaggacaggcaggccctgggtcttcctggagatggctggggcctgagactggtccagatgaacgcagagcacaggagggattgagmccccgttctgtctggtgtaggtgctgaatgctgtccccgtcctcccgcacatcccagcgctggctggcaaggtcctacgcttccaaaaggctttcctgac

SEQ ID NO: 405549 - DNA, 201 bp, Homo sapiens
  misc_feature (1)...(201): n = A,T,C or G
accagcccctggtgatagccccagcatggctactgccaggtgggcccactctaggaaccctggccacctagtcctcaatgccaccacactgactgtccccncttggatggggggtccagagtataggcagggctggcctgtccatccagagcccccgtctagtggggaagacaaatcaggacctgccagaatgttggagga

SEQ ID NO: 405550 - DNA, 201 bp, Homo sapiens
  misc_feature (1)...(201): n = A,T,C or G
tgacccatatgacatcccgtgacatcgaagtacagggcttccgcatccctaaggtaggcctggcgccctcctcaccccagctcagcaccagcccctggtgntagccccagcatggctactgccaggtgggcccactctaggaaccctggccacctagtcctcaatgccaccacactgactgtccccacttggatggggggt

SEQ ID NO: 405551 - DNA, 201 bp, Homo sapiens
tgcctgctagtcccacaccgggcacctgtactcctcagcccttgggcagtggacgggaccaggtgccgtggagcagtgggaggcacccatccgggaggctygggcctcgcagggagcccaccgtagggaggcttgggcatggcaggctgcaagtcctgagccctgccccgcggggaggtgactgaggcctggcgacaattc

SEQ ID NO: 405552 - DNA, 201 bp, Homo sapiens
ggttgaacgtcccaggaggaatgaggggaggctgggcaaaaggttggaccagtgcatcacccggcgagccgcatctgggctgacaggtgcagaattggagrtcatttgggggctaccccgttctatcccctgagtatcctctcggccctgctcaggccaaggggagccctgagagcagcttcaatgatgagaacctgcgca

SEQ ID NO: 405553 - DNA, 201 bp, Homo sapiens
gtggacttccagaacacaccatactgcttcgaccaggtgagggaggaggtcctggagggcggcagaggtcctgaggatgccccaccaccagcaaacatggrtggtgggttaaaccacaggctggatcagaagccaggctgagaaggggaagcaggtttgggggacgtcctggggaaggacatttatacatggcatgaagga

SEQ ID NO: 405554 - DNA, 201 bp, Homo sapiens
aatgaggggaggctgggcaaaaggttggaccagtgcatcacccggcgagccgcatctgggctgacaggtgcagaattggaggtcatttgggggctaccccrttctatcccctgagtatcctctcggccctgctcaggccaaggggagccctgagagcagcttcaatgatgagaacctgcgcatagtggtgggtaacctgtt

SEQ ID NO: 405555 - DNA, 201 bp, Homo sapiens
gtggggacgcatgtctgtccagtccgtgtccaacaggagatcgacgacgtgatagggcaggtgcggcgaccagagatgggtgaccaggctcacatgccctrcaccactgccgtgattcacgaggtgcagcgctttggggacatcatccccctgagtgtgacccatatgacatcccgtgacatcgaagtacagggcttccgc

SEQ ID NO: 405556 - DNA, 201 bp, Homo sapiens
acggccgaccgcccgcctgcgcccatctaccaggtcctgggcttcgggccgcgttcccaaggcaagcggcggtgggggacagagaccgcgtttccgtgggmcccgggtggacagtgaccgtagcccaagcagcgccgacagggcgtggggtcctggacgtgaaacagagataaaggccagcgagtgggctgaggacagtgg

SEQ ID NO: 405557 - DNA, 201 bp, Homo sapiens
ggccctgctcaggccaaggggagccctgagagcagcttcaatgatgagaacctgcgcatagtggtgggtaacctgttccttgccgggatggtgaccacctygaccacgctggcctggggcctcctgctcatgatcctacacctggatgtgcagcgtgagcccagctggggcccaaggcagggactgagggaggaagggtac

SEQ ID NO: 405558 - DNA, 201 bp, Homo sapiens
ctcagacatggtcgtgggagaggtgtgcccgggtcagggggcaccaggagaggccaaggactctgtacccccgtccacgttggagatttcgattttaggtytctcctctgggcaaggagagagagggtggaggctggcacttggggagggacttggtgaggtcagtggtaaggacaggcaggccctgggtcttcctggaga

SEQ ID NO: 405559 - DNA, 201 bp, Homo sapiens
tggaggaggaggggacatctcagacatggtcgtgggagaggtgtgcccgggtcagggggcaccaggagaggccaaggactctgtacccccgtccacgttgkagatttcgattttaggtttctcctctgggcaaggagagagagggtggaggctggcacttggggagggacttggtgaggtcagtggtaaggacaggcaggc

SEQ ID NO: 405560 - DNA, 201 bp, Homo sapiens
tcgcttcctcaggctgctggacctagctcaggagggactgaaggaggagtcgggcttcctgcgcgaggtgcggagcaagggtctctgcagggcgagctccygagaggtgccggggctggactggggcctccgaagggcaggatttgcatagatgggtttgggaaaggacattccaggagaccccactgtaagaagggcctg

SEQ ID NO: 405561 - DNA, 201 bp, Homo sapiens
tcgagtacgacgaccctcgcttcctcaggctgctggacctagctcaggagggactgaaggaggagtcgggcttcctgcgcgaggtgcggagcaagggtctytgcagggcgagctcctgagaggtgccggggctggactggggcctccgaagggcaggatttgcatagatgggtttgggaaaggacattccaggagacccca

SEQ ID NO: 405562 - DNA, 201 bp, Homo sapiens
aaagccgtgagcaacgtgatcgcctccctcacctgcgggcgccgcttcgagtacgacgaccctcgcttcctcaggctgctggacctagctcaggagggacygaaggaggagtcgggcttcctgcgcgaggtgcggagcaagggtctctgcagggcgagctcctgagaggtgccggggctggactggggcctccgaagggca

SEQ ID NO: 405563 - DNA, 201 bp, Homo sapiens
cccctaccagaagcaaacatggatggtgggtgaaaccacaggctggaccagaagccaggctgagaaggggaagcaggtttgggggacgtcctggagaaggrcatttatacatggcatgaaggactggattttccaaaggccaaggaagagtagggcaagggcctggaggtggagctggacttggcagtgggcatgcaagcc

SEQ ID NO: 405564 - DNA, 201 bp, Homo sapiens
atccatgcagcagggcctccacctgtccctctccgtagtcccacacctggaacccagagccatctgcctcttcccagatcatggccgacagcactccaccrgactgcggctggagcaggcacaggattcacttattgagggctgtggcctggcacagatcatagcctatacccagggacagttgtgtcacttctgccacca

SEQ ID NO: 405565 - DNA, 201 bp, Homo sapiens
ccacgatcaggaggctgggtctcctccttccacctgctcactcctggtagccccgggggtcgtccaaggttcaaataggactaggacctgtagtctggggkgatcctggcttgacaagaggccctgaccctccctctgcagttgcggcgccgcttcggggacgtgttcagcctgcagctggcctggacgccggtggtcgtg

SEQ ID NO: 405566 - DNA, 201 bp, Homo sapiens
agaagggcctggaggaggaggggacatctcagacatggtcgtgggagaggtgtgcccgggtcagggggcaccaggagaggccaaggactctgtacctcctktccacgtcagagatttcgattttaggtttctcctctgggcaaggagagagggtggaggctggcacttggggagggacttggtgaggtcagtggtaaggac

SEQ ID NO: 405567 - DNA, 201 bp, Homo sapiens; identical to SEQ ID NO: 90739

SEQ ID NO: 405568 - DNA, 201 bp, Homo sapiens
gccaaccactccggtgggtgatgggcagaagggcacaaagcgggaactgggaaggcgggggacggggaaggcgaccccttacccgcatctcccacccccargacgcccctttcgccccaacggtctcttggacaaagccgtgagcaacgtgatcgcctccctcacctgcgggcgccgcttcgagtacgacgaccctcgctt

SEQ ID NO: 405569 - DNA, 201 bp, Homo sapiens; identical to SEQ ID NO: 90742

SEQ ID NO: 405570 - DNA, 201 bp, Homo sapiens
tcgtgctcaatgggctggcggccgtgcgcgaggcgctggtgacccacggcgaggacaccgccgaccgcccgcctgtgcccatcacccagatcctgggtttygggccgcgttcccaaggcaagcagcggtggggacagagacagatttccgtgggacccgggtgggtgatgaccgtagtccgagctgggcagagagggcgcg

SEQ ID NO: 405571 - DNA, 201 bp, Homo sapiens; identical to SEQ ID NO: 90745

SEQ ID NO: 405572 - DNA, 201 bp, Homo sapiens
gcttcgaccaggtgagggaggaggtcctggagggcggcagaggtgctgaggctcccctaccagaagcaaacatggatggtgggtgaaaccacaggctggaycagaagccaggctgagaaggggaagcaggtttgggggacgtcctggagaagggcatttatacatggcatgaaggactggattttccaaaggccaaggaag

SEQ ID NO: 405573 - DNA, 201 bp, Homo sapiens; identical to SEQ ID NO: 90747

SEQ ID NO: 405574 - DNA, 201 bp, Homo sapiens
aaaaaaataaagcaacatatcctgaacaaaggatcctccataacgttcccaccagatttctaatcagaaacatggaggccagaaagcagtggaggaggacraccctcaggcagcccgggaggatgttgtcacaggctggggcaagggccttccggctaccaactgggagctctgggaacagccctgttgcaaacaagaagc

SEQ ID NO: 405575 - DNA, 201 bp, Homo sapiens
ccccacaggccgccgtgcatgcctcggggagcccctggcccgcatggagctcttcctcttcttcacctccctgctgcagcacttcagcttctcggtgcccrctggacagccccggcccagccaccatggtgtctttgctttcctggtgagcccatccccctatgagctttgtgctgtgccccgctagaatggggtacctag

SEQ ID NO: 405576 - DNA, 201 bp, Homo sapiens
actggggcctctcggcaattttggtgactcttgcaaggtcatacctgggtgacgcatccaaactgagttcctccatcacagaaggtgtgacccccaccccygccccacgatcaggaggctgggtctcctccttccacctgctcactcctggtagccccgggggtcgtccaaggttcaaataggactaggacctgtagtctg

SEQ ID NO: 405577 - DNA, 201 bp, Homo sapiens
gggtggggggtccagagtataggcagggctggcctgtccatccagagcccccgtctagtggggagacaaaccaggacctgccagaatgttggaggacccarcgcctgcagggagagggggcagtgtgggtgcctctgagaggtgtgactgcgccctgctgtggggtcggagagggtactgtggagcttctcgggcgcagga

SEQ ID NO: 405578 - DNA, 201 bp, Homo sapiens
gtgacccggttcaaaccttttgcactgtgggtcctcgggcctcactgctcaccggcatggaccatcatctgggaatgggatgctaactggggcctctcggyaattttggtgactcttgcaaggtcatacctgggtgacgcatccaaactgagttcctccatcacagaaggtgtgacccccacccccgccccacgatcagga

SEQ ID NO: 405579 - DNA, 201 bp, Homo sapiens
aggtgctgaggctcccctaccagaagcaaacatggatggtgggtgaaaccacaggctggaccagaagccaggctgagaaggggaagcaggtttgggggacktcctggagaagggcatttatacatggcatgaaggactggattttccaaaggccaaggaagagtagggcaagggcctggaggtggagctggacttggcagt

SEQ ID NO: 405580 - DNA, 201 bp, Homo sapiens
ctgggcaacctgctgcatgtggacttccagaacacaccatactgcttcgaccaggtgagggaggaggtcctggagggcggcagaggtgctgaggctccccyaccagaagcaaacatggatggtgggtgaaaccacaggctggaccagaagccaggctgagaaggggaagcaggtttgggggacgtcctggagaagggcatt

SEQ ID NO: 405581 - DNA, 201 bp, Homo sapiens
ttcatatatgacaccccaaaacggaagacaaatcatggcgtcagggagctatatgccagggctacctacctcccagggctcagtcggcaggtgccagaacrttccctgggaaggccccatggaagcccaggactgagccaccaccctcagcctcgtcacctcaccacaggactggctacctctctgggccctcagggatgc

SEQ ID NO: 405582 - DNA, 201 bp, Homo sapiens
tcggggacgtgttcagcctgcagctggcctggacgccggtggtcgtgctcaatgggctggcggccgtgcgcgaggcgctggtgacccacggcgaggacacsgccgaccgcccgcctgtgcccatcacccagatcctgggtttcgggccgcgttcccaaggcaagcagcggtggggacagagacagatttccgtgggacccg

SEQ ID NO: 405583 - DNA, 201 bp, Homo sapiens
cctggccgtgatagtggccatcttcctgctcctggtggacctgatgcaccggcgccaacgctgggctgcacgctacccaccaggccccctgccactgcccrggctgggcaacctgctgcatgtggacttccagaacacaccatactgcttcgaccaggtgagggaggaggtcctggagggcggcagaggtgctgaggctcc

SEQ ID NO: 405584 - DNA, 201 bp, Homo sapiens
gcccaccccacatcagggacagcagtcctgccagcaccatcacaacagtcacctcccttcatatatgacaccccaaaacggaagacaaatcatggcgtcarggagctatatgccagggctacctacctcccagggctcagtcggcaggtgccagaacgttccctgggaaggccccatggaagcccaggactgagccaccac

SEQ ID NO: 405585 - DNA, 201 bp, Homo sapiens
gctaatgccttcatggccacgcgcacgtgcccgtcccacccccaggggtgttcctggcgcgctatgggcccgcgtggcgcgagcagaggcgcttctccgtstccaccttgcgcaacttgggcctgggcaagaagtcgctggagcagtgggtgaccgaggaggccgcctgcctttgtgccgccttcgccaaccactccggtg

SEQ ID NO: 405586 - DNA, 201 bp, Homo sapiens; identical to SEQ ID NO: 405539

SEQ ID NO: 405587 - DNA, 201 bp, Homo sapiens
ggcgcgctatgggcccgcgtggcgcgagcagaggcgcttctccgtgtccaccttgcgcaacttgggcctgggcaagaagtcgctggagcagtgggtgaccraggaggccgcctgcctttgtgccgccttcgccaaccactccggtgggtgatgggcagaagggcacaaagcgggaactgggaaggcgggggacggggaagg

SEQ ID NO: 405588 - DNA, 201 bp, Homo sapiens
cagcgctggctggcaaggtcctacgcttccaaaaggctttcctgacccagctggatgagctgctaactgagcacaggatgacctgggacccagcccagccmccccgagacctgactgaggccttcctggcagagatggagaaggtgagagtggctgccacggtggggggcaagggtggtgggttgagcgtcccaggaggaa

SEQ ID NO: 405589 - DNA, 201 bp, Homo sapiens
tatggggctagaagcactggtgcccctggccgtgatagtggccatcttcctgctcctggtggacctgatgcaccggcgccaacgctgggctgcacgctacycaccaggccccctgccactgcccgggctgggcaacctgctgcatgtggacttccagaacacaccatactgcttcgaccaggtgagggaggaggtcctgga

SEQ ID NO: 405590 - DNA, 201 bp, Homo sapiens
agaagtcgctggagcagtgggtgaccgaggaggccgcctgcctttgtgccgccttcgccaaccactccggtgggtgatgggcagaagggcacaaagcgggractgggaaggcgggggacggggaaggcgaccccttacccgcatctcccacccccaggacgcccctttcgccccaacggtctcttggacaaagccgtgagc

SEQ ID NO: 405591 - DNA, 201 bp, Homo sapiens
ggtggatgcacaaagagtgggccctgtgaccagctggacagagccagggactgcgggagaccagggggagcatagggttggagtgggtggtggatggtggsgctaatgccttcatggccacgcgcacgtgcccgtcccacccccaggggtgttcctggcgcgctatgggcccgcgtggcgcgagcagaggcgcttctccgt

SEQ ID NO: 405592 - DNA, 201 bp, Homo sapiens
cctgggtgtgacccatatgacatcccgtgacatcgaagtacagggcttccgcatccctaaggtaggcctggcgccctcctcaccccagctcagcaccagcmcctggtgatagccccagcatggctactgccaggtgggcccactctaggaaccctggccacctagtcctcaatgccaccacactgactgtccccacttggg

SEQ ID NO: 405593 - DNA, 201 bp, Homo sapiens
ggacagagacagatttccgtgggacccgggtgggtgatgaccgtagtccgagctgggcagagagggcgcggggtcgtggacatgaaacaggccagcgagtrgggacagcgggccaagaaaccacctgcactagggaggtgtgagcatggggacgagggcggggcttgtgacgagtgggcggggccactgccgagacctggc

SEQ ID NO: 405594 - DNA, 201 bp, Homo sapiens
caacaggagatcgacgacgtgatagggcaggtgcggcgaccagagatgggtgaccaggctcacatgccctacaccactgccgtgattcatgaggtgcagcrctttggggacatcgtccccctgggtgtgacccatatgacatcccgtgacatcgaagtacagggcttccgcatccctaaggtaggcctggcgccctcctca

SEQ ID NO: 405595 - DNA, 201 bp, Homo sapiens
ggccctgctcaggccaaggggaaccctgagagcagcttcaatgatgagaacctgcgcatagtggtggctgacctgttctctgccgggatggtgaccacctygaccacgctggcctggggcctcctgctcatgatcctacatccggatgtgcagcgtgagcccatctgggaaacagtgcaggggccgagggaggaagggtac

SEQ ID NO: 405596 - DNA, 201 bp, Homo sapiens
ggctaccccgttctgtcccgagtatgctctcggccctgctcaggccaaggggaaccctgagagcagcttcaatgatgagaacctgcgcatagtggtggctracctgttctctgccgggatggtgaccacctcgaccacgctggcctggggcctcctgctcatgatcctacatccggatgtgcagcgtgagcccatctggga

SEQ ID NO: 405597 - DNA, 201 bp, Homo sapiens
ggggctaccccgttctgtcccgagtatgctctcggccctgctcaggccaaggggaaccctgagagcagcttcaatgatgagaacctgcgcatagtggtggstgacctgttctctgccgggatggtgaccacctcgaccacgctggcctggggcctcctgctcatgatcctacatccggatgtgcagcgtgagcccatctgg

SEQ ID NO: 405598 - DNA, 201 bp, Homo sapiens
tggaggtcatttgggggctaccccgttctgtcccgagtatgctctcggccctgctcaggccaaggggaaccctgagagcagcttcaatgatgagaacctgygcatagtggtggctgacctgttctctgccgggatggtgaccacctcgaccacgctggcctggggcctcctgctcatgatcctacatccggatgtgcagcg

SEQ ID NO: 405599 - DNA, 201 bp, Homo sapiens
gccactgcccgggctgggcaacctgctgcatgtggacttccagaacacaccatactgcttcgaccaggtgagggaggaggtcctggagggcggcagaggtsctgaggctcccctaccagaagcaaacatggatggtgggtgaaaccacaggctggaccagaagccaggctgagaaggggaagcaggtttgggggacgtcct

SEQ ID NO: 405600 - DNA, 201 bp, Homo sapiens
ctggggcctgagacttgtccaggtgaacgcagagcacaggagggattgagaccccgttctgtctggtgtaggtgctgaatgctgtccccgtcctcctgcayatcccagcgctggctggcaaggtcctacgcttccaaaaggctttcctgacccagctggatgagctgctaactgagcacaggatgacctgggacccagccc

SEQ ID NO: 405601 - DNA, 201 bp, Homo sapiens
gtggaggctggcacttggggagggacttggtgaggtcagtggtaaggacaggcaggccctgggtctacctggagatggctggggcctgagacttgtccagrtgaacgcagagcacaggagggattgagaccccgttctgtctggtgtaggtgctgaatgctgtccccgtcctcctgcatatcccagcgctggctggcaagg

SEQ ID NO: 405602 - DNA, 201 bp, Homo sapiens
ccctctgcagttgcggcgccgcttcggggacgtgttcagcctgcagctggcctggacgccggtggtcgtgctcaatgggctggcggccgtgcgcgaggcgmtggtgacccacggcgaggacaccgccgaccgcccgcctgtgcccatcacccagatcctgggtttcgggccgcgttcccaaggcaagcagcggtggggaca

SEQ ID NO: 405603 - DNA, 201 bp, Homo sapiens; identical to SEQ ID NO: 90752

SEQ ID NO: 405604 - DNA, 201 bp, Homo sapiens
cgggctgggcaacctgctgcatgtggacttccagaacacaccatactgcttcgaccaggtgagggaggaggtcctggagggcggcagaggtgctgaggctsccctaccagaagcaaacatggatggtgggtgaaaccacaggctggaccagaagccaggctgagaaggggaagcaggtttgggggacgtcctggagaaggg

SEQ ID NO: 405605 - DNA, 201 bp, Homo sapiens
gattttaggtttctcctctgggcaaggagagagggtggaggctggcacttggggagggacttggtgaggtcagtggtaaggacaggcaggccctgggtctwcctggagatggctggggcctgagacttgtccaggtgaacgcagagcacaggagggattgagaccccgttctgtctggtgtaggtgctgaatgctgtcccc

SEQ ID NO: 405606 - DNA, 201 bp, Homo sapiens; identical to SEQ ID NO: 90753

SEQ ID NO: 405607 - DNA, 201 bp, Homo sapiens
cgggagaccagggggagcatagggttggagtgggtggtggatggtggggctaatgccttcatggccacgcgcacgtgcccgtcccacccccaggggtgttyctggcgcgctatgggcccgcgtggcgcgagcagaggcgcttctccgtgtccaccttgcgcaacttgggcctgggcaagaagtcgctggagcagtgggtga

SEQ ID NO: 405608 - DNA, 201 bp, Homo sapiens
cccgggctgggcaacctgctgcatgtggacttccagaacacaccatactgcttcgaccaggtgagggaggaggtcctggagggcggcagaggtgctgaggmtcccctaccagaagcaaacatggatggtgggtgaaaccacaggctggaccagaagccaggctgagaaggggaagcaggtttgggggacgtcctggagaag

SEQ ID NO: 405609 - DNA, 201 bp, Homo sapiens
tcagacatggtcgtgggagaggtgtgcccgggtcagggggcaccaggagaggccaaggactctgtacctcctatccacgtcagagatttcgattttaggtytctcctctgggcaaggagagagggtggaggctggcacttggggagggacttggtgaggtcagtggtaaggacaggcaggccctgggtctacctggagatg

SEQ ID NO: 405610 - DNA, 201 bp, Homo sapiens
taacgttcccaccagatttctaatcagaaacatggaggccagaaagcagtggaggaggacgaccctcaggcagcccgggaggatgttgtcacaggctgggscaagggccttccggctaccaactgggagctctgggaacagccctgttgcaaacaagaagccatagcccggccagagcccaggaatgtgggctgggctggg

SEQ ID NO: 405611 - DNA, 201 bp, Homo sapiens
tagagaaggaaacaccaagtgttcatgacaatgaatgaaggggacccagccccaattttgttgtcaagaaatttcacaacactgaggacagagtggaaccyaaaaacttccagagagaaaaaagtctgagcttcaggaattcaatattcatcagacttctcaacaccaacctttgaagctataagataatgaagaccttca

SEQ ID NO: 405612 - DNA, 201 bp, Homo sapiens
ctgggcagcagacctccagggtgccccatccagatggaatcagggagatggagggctcctgaggtatgtctccatgaaaatgatcatatggagaaatgacstgatctgtctaaatgtactgcaaagagatttctatttttggcagaaaatttggatgaattaattatataatagatgcacaaaaaactaaagaaagagaag

SEQ ID NO: 405613 - DNA, 201 bp, Homo sapiens
gcctggacgccggtggtcgtgctcaatgggctggcggccgtgcgcgaggcgctggtgacccacggcgaggacaccgccgaccgcccgcctgtgcccatcayccagatcctgggtttcgggccgcgttcccaaggcaagcagcggtggggacagagacagatttccgtgggacccgggtgggtgatgaccgtagtccgagct

SEQ ID NO: 405614 - DNA, 201 bp, Homo sapiens
gggctaatgccttcatggccacgcgcacgtgcccgtcccacccccaggggtgttcctggcgcgctatgggcccgcgtggcgcgagcagaggcgcttctccrtgtccaccttgcgcaacttgggcctgggcaagaagtcgctggagcagtgggtgaccgaggaggccgcctgcctttgtgccgccttcgccaaccactccgg

SEQ ID NO: 405615 - DNA, 201 bp, Homo sapiens
acgcccctttcaccccaacggcctcctgaacaaagcggcgagcaacgtgatcgcctccctcacctgcgggtgccgcttcgagtacgacgaccctcgcttcmtcaggctactggacctagctcagaagggattgaaggaggagctgggctttctgtgagagatgtggagcgagggaccgcagggtctctgcagggcgagctc

SEQ ID NO: 405616 - DNA, 201 bp, Homo sapiens; identical to SEQ ID NO: 405480

SEQ ID NO: 405617 - DNA, 201 bp, Homo sapiens
ggccagagcccagaatgtgggctgagctgggatccatgtgacagctttgaggctcaccgggagcagcctctggacaggagaggtcccatccaggaaacctygggcatggctgggaagtggggtacttggtgccgggtctgtatgtgtgtgtgactggtgtgtgtgagagagaatgtgtgccctgagtgtcagtgtgagtct

SEQ ID NO: 405618 - DNA, 201 bp, Homo sapiens
cagaaggcaaaggccatcatcagctccctttataagggaacggtcatgcactgggtgtgctgagagtgtcctgcctggtcctctgtgcctggtggggtggrggtgccaggtgtgtccagaggagcccaatgggcagtgaggcagccatggggctggatgcactggtgcccctggcagtgacagtggccatcttcctgctcc

SEQ ID NO: 405619 - DNA, 201 bp, Homo sapiens
attgtggggacgcgtgtctgtccaggccgtgtccaacagatcgacaacgtgatagggcaggtgtggtgaccagagatgggtgaccaggctcgcatgccctrcaccactgccgtgattcacgaggtgcagcgctttggggacatcgtccccctgggtgtgacccatatgacatcccgtgacatcgaagtacagggcttccgc

SEQ ID NO: 405620 - DNA, 201 bp, Homo sapiens
accctgcacccactggcagcacagtcaacacagcaggttggctcacagcagaaggcaaaggccatcatcagctccctttataagggaacggtcatgcactsggtgtgctgagagtgtcctgcctggtcctctgtgcctggtggggtggaggtgccaggtgtgtccagaggagcccaatgggcagtgaggcagccatggggc

SEQ ID NO: 405621 - DNA, 201 bp, Homo sapiens
ggcctgaccctgcacccactggcagcacagtcaacacagcaggttggctcacagcagaaggcaaaggccatcatcagctccctttataagggaacggtcaygcactgggtgtgctgagagtgtcctgcctggtcctctgtgcctggtggggtggaggtgccaggtgtgtccagaggagcccaatgggcagtgaggcagcca

SEQ ID NO: 405622 - DNA, 201 bp, Homo sapiens
  misc_feature (1)...(201): n = A,T,C or G
gggccgcgctcccaaggcaagcggcggtgggggacagagactgcgtttccgtgggtcctgggtgggcggtgaccgtagcccaagctgggctgagagggcgnggggttgtgggccagtgagtgggttggggacagcgagccaggaaaccacttccattggggaggtgcgagtctgtgggcgggaggaagaggggcttgtgag

SEQ ID NO: 405623 - DNA, 201 bp, Homo sapiens
ggatcgggaggctgggtctcctccttccacctgctcactcctggtagccccgagggtcgtctaaggttcaaataggactaggacctgcagtctggggggamcctggcctgatggaggccctgacccaacggaggccctgaccctccctctacagctgcggcaccgctttggggacgtgttcagcctgcagctggcctggat

SEQ ID NO: 405624 - DNA, 201 bp, Homo sapiens
tggggctggatgcactggtgcccctggcagtgacagtggccatcttcctgctcctggtggacctgatgcagcagcaccaacgctggactgcacgctacccrccaggccccctgccactgcccgggctgggcaacttgctgcatgtggacttccagaacatatacaccttcaaccaggtgagggaggaggtcctgaggatcc

SEQ ID NO: 405625 - DNA, 201 bp, Homo sapiens
ggaaggcagaccaggacctgccagaatgttggaggaccccaatacctgtagggagagggggtagcgtgggcgctcccaggaggtgtgactgcgccctgccrtggggtcggagagggtgctctggagcttctcgggcacaggactagttgacagagtccagctgtgtgccaggcagtgtgtgtcccctgtgtgcttgggggt

SEQ ID NO: 405626 - DNA, 201 bp, Homo sapiens
gcaacgtgatcgcctccctcacctgcgggtgccgcttcgagtacgacgaccctcgcttcctcaggctactggacctagctcagaagggattgaaggaggarctgggctttctgtgagagatgtggagcgagggaccgcagggtctctgcagggcgagctcctgagaggtgccgggactgcagccggacctccaaggagcag

SEQ ID NO: 405627 - DNA, 201 bp, Homo sapiens
ccctggcctgatggaggccctgacccaacggaggccctgaccctccctctacagctgcggcaccgctttggggacgtgttcagcctgcagctggcctggaygccggtggtcgtgctcaatgggctggcggccgtgcgtgaggctctggtgacctgcggcgaggacaccgccgaccgcccgcctgcgcccatctaccaggtc

SEQ ID NO: 405628 - DNA, 201 bp, Homo sapiens
ctccctcacctgcgggtgccgcttcgagtacgacgaccctcgcttcctcaggctactggacctagctcagaagggattgaaggaggagctgggctttctgbgagagatgtggagcgagggaccgcagggtctctgcagggcgagctcctgagaggtgccgggactgcagccggacctccaaggagcagggtttgcatagag

SEQ ID NO: 405629 - DNA, 201 bp, Homo sapiens
cctttcaccccaacggcctcctgaacaaagcggcgagcaacgtgatcgcctccctcacctgcgggtgccgcttcgagtacgacgaccctcgcttcctcagkctactggacctagctcagaagggattgaaggaggagctgggctttctgtgagagatgtggagcgagggaccgcagggtctctgcagggcgagctcctgag

SEQ ID NO: 405630 - DNA, 201 bp, Homo sapiens
gtccaggccgtgtccaacagatcgacaacgtgatagggcaggtgtggtgaccagagatgggtgaccaggctcgcatgccctgcaccactgccgtgattcaygaggtgcagcgctttggggacatcgtccccctgggtgtgacccatatgacatcccgtgacatcgaagtacagggcttccgcatccctaaggtaggcctgg

SEQ ID NO: 405631 - DNA, 201 bp, Homo sapiens
acagtctcacttattgtgtgctttttgatttgaggttgccgtgaggcttgcaaatattatcttataactcattattttaaacggatgacaacactgattgygtaaacaaacataaagcaaaaggaagactaataaaaactctacactttaagttcatcttagtgctttttaactttttgttgtttctctttttttgttttt

SEQ ID NO: 405632 - DNA, 201 bp, Homo sapiens
cctccaaggagcagggtttgcatagagtggtttgggaaaggacattccagaagagctcactgctagaggaagggccttgaggaggaggagacatctcagawacggtcgtgggagaggtgtgcccgggtcagggggcaccaagaaaggccaaggaccctgtgcctcctgtccacattggagattttgatttttaggtttctc

SEQ ID NO: 405633 - DNA, 201 bp, Homo sapiens
aaccggtctctactaaacatacaaaaaatgagctgggcacagtggtgcacgcctgcaatcccagctacttgggaggctgaggcaggagaattgcttgaacytaggaggcagaggttgtagtgagtggagattgtgccattgccttgcaacctcggtgacacagccagacaatgtctaaataaacgaataagaaatcaggcc

SEQ ID NO: 405634 - DNA, 201 bp, Homo sapiens
gacccctgacccgcatctcccgcccccaggacgcccctttcaccccaacggcctcctgaacaaagcggcgagcaacgtgatcgcctccctcacctgcgggygccgcttcgagtacgacgaccctcgcttcctcaggctactggacctagctcagaagggattgaaggaggagctgggctttctgtgagagatgtggagcga

SEQ ID NO: 405635 - DNA, 201 bp, Homo sapiens
ctgctgcagcacttcagcttctcggtgcccaccggacagccccggcccagccactctcgtgtcgtcggctttctggtgacgccatccccctatgagctttrtgctgtgccccgctagagttgctcctcagctgggaccctgttgtacaataaattagtctagtggctcccacttggtttctgtatccagtctgggcccctg

SEQ ID NO: 405636 - DNA, 201 bp, Homo sapiens
tgctgcagcacttcagcttctcggtgcccaccggacagccccggcccagccactctcgtgtcgtcggctttctggtgacgccatccccctatgagctttgwgctgtgccccgctagagttgctcctcagctgggaccctgttgtacaataaattagtctagtggctcccacttggtttctgtatccagtctgggcccctgc

SEQ ID NO: 405637 - DNA, 201 bp, Homo sapiens
gaccctcaggcagccctggaggatgctgtcacaggctggggcaagggccttcaggctaccaactgggagctctgggaacagccctgttgcaaacaggaagycatggcccggccagagcccagaatgtgggctgagctgggatccatgtgacagctttgaggctcaccgggagcagcctctggacaggagaggtcccatcca

SEQ ID NO: 405638 - DNA, 201 bp, Homo sapiens
ccaaatttgttccgatgacaagtgaaatttaaatgtgagattgaactgaacaaaccctcatctcatgaaggacggggtgtgtgtgtggcgttgatctttakcctgtctcacaccagttcagaaaacactagacccaggattgaaaaagcaaaccacagcagaaccatccttttgtcattaatttgtctcaaagtgggaagg

SEQ ID NO: 405639 - DNA, 201 bp, Homo sapiens
accaacctgtcatcggtgctgaaggatgaggccgtctgggagaagcccttccgcttccaccccgaacacttcctggatgcccagggccactttgtgaagcyggaggccttcctgcctttctcagcaggtgcctgtggggagcccggctccctgtccccttccgtggagtcttgcaggggtatcacccgggagccaggctca

SEQ ID NO: 405640 - DNA, 201 bp, Homo sapiens
ggccttcaggctaccaactgggagctctgggaacagccctgttgcaaacaggaagtcatggcccggccagagcccagaatgtgggctgagctgggatccaygtgacagctttgaggctcaccgggagcagcctctggacaggagaggtcccatccaggaaacctcgggcatggctgggaagtggggtacttggtgccgggt

SEQ ID NO: 405641 - DNA, 201 bp, Homo sapiens
ccccactttttactacacaggccacccctcttggctctaacagcaaaatgatattagtttgagcatctgtgtgtgtgtgtgtgtgtgtgtgtgtgtgtgtkttttcttgagacagggtcttgctctgtcaccgaggctggagtgcagtgatgccatcagggctcactgcagccttgacttcctgggttcaagcaatcctcc

SEQ ID NO: 405642 - DNA, 201 bp, Homo sapiens
gtggagtcttgcaggggtatcacccgggagccaggctcactgacgcccctcccctccccacaggccgccgtgcatgcctcggggagcccctggcccgcatrgagctcttcctcttcttcacctccctgctgcagcacttcagcttctcggtgcccaccggacagccccggcccagccactctcgtgtcgtcggctttctgg

SEQ ID NO: 405643 - DNA, 201 bp, Homo sapiens
catcctagagtccagtccccactctcaccctgcatctcctgcccaggggatgatgctcttcaccaacctgtcatcggtgctgaaggatgaggccgtctggragaagcccttccgcttccaccccgaacacttcctggatgcccagggccactttgtgaagctggaggccttcctgcctttctcagcaggtgcctgtgggga

SEQ ID NO: 405644 - DNA, 201 bp, Homo sapiens
tgctgacccattgtggggacgcgtgtctgtccaggccgtgtccaacagatcgacaacgtgatagggcaggtgtggtgaccagagatgggtgaccaggctcrcatgccctgcaccactgccgtgattcacgaggtgcagcgctttggggacatcgtccccctgggtgtgacccatatgacatcccgtgacatcgaagtacag

SEQ ID NO: 405645 - DNA, 201 bp, Homo sapiens
cctacgcccggatgtgcagcgtgagcccagctggggcccagtgcagggggcaagggaggaagggtacaggtgggggcccctgagcttagctgggacacccrggactccaagcacaggcttggccaggttcctgtaagcctaacctcctccaacacaggaggcaggagagtgtcagggctggtcccctgggtgctgacccat

SEQ ID NO: 405646 - DNA, 201 bp, Homo sapiens
accgctttggggacgtgttcagcctgcagctggcctggatgccggtggtcgtgctcaatgggctggcggccgtgcgtgaggctctggtgacctgcggcgargacaccgccgaccgcccgcctgcgcccatctaccaggtcctgggcatcgggccgcgctcccaaggcaagcggcggtgggggacagagactgcgtttccgt

SEQ ID NO: 405647 - DNA, 201 bp, Homo sapiens
gggaaggcagaccaggacctgccagaatgttggaggaccccaatacctgtagggagagggggtagcgtgggcgctcccaggaggtgtgactgcgccctgcyatggggtcggagagggtgctctggagcttctcgggcacaggactagttgacagagtccagctgtgtgccaggcagtgtgtgtcccctgtgtgcttggggg

SEQ ID NO: 405648 - DNA, 201 bp, Homo sapiens
cctgtgcccagctggacagggccagggactgcgggagaccaggaaaagcacagggttggagtgggcggcggagggcggggccaaggcctccatgaccacgyccatgtgtccgtcccgcccccaggggtgtttctggcacactacggacacgcgtggcgcgagcagaggcgcttctccgtgtccaccttgcgcaacttgggc

SEQ ID NO: 405649 - DNA, 201 bp, Homo sapiens
atgggctggcggccgtgcgtgaggctctggtgacctgcggcgaggacaccgccgaccgcccgcctgcgcccatctaccaggtcctgggcatcgggccgcgytcccaaggcaagcggcggtgggggacagagactgcgtttccgtgggtcctgggtgggcggtgaccgtagcccaagctgggctgagagggcgcggggttgt

SEQ ID NO: 405650 - DNA, 201 bp, Homo sapiens
tcctgggtgggcggtgaccgtagcccaagctgggctgagagggcgcggggttgtgggccagtgagtgggttggggacagcgagccaggaaaccacttccaytggggaggtgcgagtctgtgggcgggaggaagaggggcttgtgagtgggcggggcaactgccgagacccaccaggaaccgggtgggcggagctggcgcct

SEQ ID NO: 405651 - DNA, 201 bp, Homo sapiens
ctgtccacattggagattttgatttttaggtttctcctctggcagcccagggcaaggagagagggtggaggctggcacttggggagggacttggggaggtsagtggtggggacaggtaggccctgggtcttccctggaggcagctggggcctgagactggtccaggtgaacgcagagcacaggagggattgagaccccgtt

SEQ ID NO: 405652 - DNA, 201 bp, Homo sapiens
ggcatcgggccgcgctcccaaggcaagcggcggtgggggacagagactgcgtttccgtgggtcctgggtgggcggtgaccgtagcccaagctgggctgagwgggcgcggggttgtgggccagtgagtgggttggggacagcgagccaggaaaccacttccattggggaggtgcgagtctgtgggcgggaggaagaggggct

SEQ ID NO: 405653 - DNA, 201 bp, Homo sapiens
  misc_feature (1)...(201): n = A,T,C or G
ttttgatttttaggtttctcctctggcagcccagggcaaggagagagggtggaggctggcacttggggagggacttggggaggtgagtggtggggacaggnaggccctgggtcttccctggaggcagctggggcctgagactggtccaggtgaacgcagagcacaggagggattgagaccccgttctgtgtcagctgtaga

SEQ ID NO: 405654 - DNA, 201 bp, Homo sapiens
acctgtagtcccagctacttgggaggctgaggcaggagaatggcatgaacccatgaggcagagcttgaagtgagctgagaacacaccattacactccagtytgggcgacagagcgagactctgtctcaaaaaaaaaaaaaaaaaaaaaaaaaaaaaaaaatcaacggctgggcgcggtggctcacacctgtaatcccagca

SEQ ID NO: 405655 - DNA, 201 bp, Homo sapiens
gattttatattctaagaccattgtgaggattaaggagttaatacatgaaagctcttaggacagagccttggcacctaacgagcactcagtgacttatcagygtggattgtttctccctattctgtcggtcagttgggtggttttcctctcatctggctggcctggggctggacaatctaggacggtctcacattctgaagg

SEQ ID NO: 405656 - DNA, 201 bp, Homo sapiens
ggatcaaaagaaaatgggcttgaaaaagggagttgtaactggaagtgttagattccacaattctaaattactttgcaattgcaggcaagttactgaccccytctgggcctcagtttccatttttaaaatggggataaaatattgctgtccttccagccatgcattgtttttgttgttgttgttgtttgttttgttttgttt

SEQ ID NO: 405657 - DNA, 201 bp, Homo sapiens
gtgcccctagcaagtgtgcgctggtgctgaggtctgcgaggccttcctgctgcacattcatgatcagaaagaaccccctggcacatgtcctagatctcagyggctcagatctacaagcctggaagcagggcctgcgggaagccgggaagctgagcgtcggatgtgcactgtgtgagcctaagaaggggcaagaggctgacg

SEQ ID NO: 405658 - DNA, 201 bp, Homo sapiens
cgtcccctcctgctctggtgctctgagatccatgtgcgtctggccgtggtgcctggctggggaccccatgttccccttcctgggtcctggcctccaagagygcttgttcctctctgtttggcccaggccttgtgcatggggctgggacctgcttttcctgtgacttcccagccacagtgatctcaccctgagattggtttt

SEQ ID NO: 405659 - DNA, 201 bp, Homo sapiens
aatgagaacagcatcacatgtgggttctgttttgggctgttctcacgttgctataaagaaatacctgggcctggcgtggtggctcacgcctgtaatcccarcactttgggaggccgaggcaggcagatcacctgaggtcatgagtttgagacaagcctggtcaacatggtgaaaccccgtgtctactaaaactacaaaaat

SEQ ID NO: 405660 - DNA, 201 bp, Homo sapiens
tcactcacagaacagtcactggttttggattcttgttttccttgcaagaacaaaaggttctctagaatccttcagccaccaatgaaatgatcaggcaggaraaaaactttagatgggagtcttgtcatcaaaaataaatacagttgcatggagctgcttaagatctgaaccaaactcaaaataggaagacgggggctaaaa

SEQ ID NO: 405661 - DNA, 201 bp, Homo sapiens
tttttttttgtatctttagttgagacggggtttcatcatgttagccaggatggtctcgatctcctgacctcgtgatccgcccgccttgggctcccaaagtkctgggattacaggcgtgagccaccgcgcccggcccacctccagaactttttcacggggcagatatggtggctcatgcctgtagtcccagcactttgggag

SEQ ID NO: 405662 - DNA, 201 bp, Homo sapiens
tcagacccaggtggcacctacaggggattcctggggcccagagggtcctgcagtgggtgggctgtcccctgagtgccaggtcctggtgagtaaagggaggytggggaggtgtgagggccccgggttgactccaacccccaactctgagaagccactttgctttctctgtggggccacctggagaactgggggcctttccag

SEQ ID NO: 405663 - DNA, 201 bp, Homo sapiens
cacctccagaactttcattttttttaagatggagtctcgctctgtcgcccaggctggagtgcagtggcgtgatctcggctcactgcaagctccgccgcccrggttcacgccattctcctgcctcagcctcccgagtagctgggactacaggtgcccgccaccacgcccggctaatttttttttgtatctttagttgagacg

SEQ ID NO: 405664 - DNA, 201 bp, Homo sapiens
cacatgcctgtctttgtcggggccatcaggcttggctgtctgggttgtacactgcacaccattagagctgtggtgtcctgggggacaccattcacttccgrttcacttcacttaggttgtccctgcaggaatcatcttaaagatcacttgccctggaggcatgcactggtccctgggacgtgaggccttgcctgtgtgccg

SEQ ID NO: 405665 - DNA, 201 bp, Homo sapiens
tgggggtggacagaggtttcttattggtgagttttccggaagcgatggattcggaatctcgcccgcagtcgcgcaagcgcgagcggctgtgcgcggtgcgyggtgcgtggtgcgtgatacgagcggcggcacgtggcgcgggtgcggggcgtggagtggcgtggcgtggagtggcgtggcgtggcggggtctcgcggcgcg

SEQ ID NO: 405666 - DNA, 201 bp, Homo sapiens
cctggtgttttccttgcagtcaggtgagtggggaccacctgcagcatggcctgagaacccacagaggcatttttgctgggctgctggcctgcgcctcacamcaccagggcatttttagcctcctctccaggtcagagctgtgcctggggccgactttgctgctcagcaggaggtgggagtttccaaaccctgcgttcttta

SEQ ID NO: 405667 - DNA, 201 bp, Homo sapiens
tgcgcggggccattccacagcgtttttatcaccctacaaagaaaccccgcccagtagcagtcactgctaatcctgtccttcacccagcctctggcagccayttaactgctttctgtctctatggatgtggttctggacactgtacatgaatggagtcgcacactgtgtggcttttgtgtctggctgctttcacttggcccc

SEQ ID NO: 405668 - DNA, 201 bp, Homo sapiens
gagcgcaggcgccaagcctgccatcccttgggcactcagagcgcaattctcagcctgccccaggcctccctccgcctgagtcagaatcttgggggatgggyccaaatacttttttttttttttaagacagagtcttgctctgttgcccaggttggagtgcagaagtgtgatcttggctcactgcaacctccacctcccagc

SEQ ID NO: 405669 - DNA, 201 bp, Homo sapiens
gagtcatgtgatgcccacatgcctgtctttgtcggggccatcaggcttggctgtctgggttgtacactgcacaccattagagctgtggtgtcctgggggayaccattcacttccggttcacttcacttaggttgtccctgcaggaatcatcttaaagatcacttgccctggaggcatgcactggtccctgggacgtgaggc

SEQ ID NO: 405670 - DNA, 201 bp, Homo sapiens
  misc_feature (1)...(201): n = A,T,C or G
actaggggtgcccctagcaagtgtgcgctggtgctgaggtctgcgaggccttcctgctgcacattcatgatcagaaagaaccccctggcacatgtcctagntctcagcggctcagatctacaagcctggaagcagggcctgcgggaagccgggaagctgagcgtcggatgtgcactgtgtgagcctaagaaggggcaagag

SEQ ID NO: 405671 - DNA, 201 bp, Homo sapiens
agacggaggaaggagcacacgacctctacatggacaccggcgaggagatccgcttccgggtggtggacgagagctttgttgacacgtcccccacagggccyagctcagcagatgccaccacttccagtgaggagctgccaaagaaggaggctccgtacacgcttgtggtgagtggctctgatggtgctgaagcccccatga

SEQ ID NO: 405672 - DNA, 201 bp, Homo sapiens
cttcacttaggttgtccctgcaggaatcatcttaaagatcacttgccctggaggcatgcactggtccctgggacgtgaggccttgcctgtgtgccgggtcrtgggctaagatgtgttcctcctgggcctccgttgtccctgtcccacccctcaccttgctgtactggggttgtctgtttctgtggggctatccacaaatct

SEQ ID NO: 405673 - DNA, 201 bp, Homo sapiens
gtgatgatggcccggcccccaaggtggcgaggctccagagctgcatgctcccggctcgagccctcgccgtagttctcgtctccgatcaccacccacctgawgccatgtttctgtcaggcaagcgggggtaaggttataaggcagaggagggcaccgtcctcacctgtctggccctacctgcctggcctcacccacctggcg

SEQ ID NO: 405674 - DNA, 201 bp, Homo sapiens
cattagccaggtgtggcggcaggcacctgtagtcccagctactcaggaggctgaggcaggagaatggagtgaacccaggaggcggagcttgcagtgaaccragatcgcaccactgcactccagcctgggcaacagagtgaaactccgtctcaaaaaaaaaaaaaaaaaaattatttgggtgtggtggcacatgtctgtaat

SEQ ID NO: 405675 - DNA, 201 bp, Homo sapiens
agcctcccgagtagctgggattataggcacgtgccaccacgcctggctaatttttgtatttttagtagagggggtttcaccatgttggtcagaatggtctygaacgcctgacctcgtgatccgcccacctcggcctcccaaagtgctgggattacaggcgtgagccactgcccccagccccaaagactgttttaacaaggt

SEQ ID NO: 405676 - DNA, 201 bp, Homo sapiens
cattccaccccctgaagacctctggactctgaccagcgttactctccatggctaccagccttgctctgaccatctcttgctgcggccacacaataacctcyttcctggtcctgcctccgctccagccccttcccatttgctgtctacccaggtgatatgtccctgtgttattttcctatcctagccttctttttttttttt

SEQ ID NO: 405677 - DNA, 201 bp, Homo sapiens
ctaaccttgccaggggtgaagtccttcaggccctgaatggtcagcttgtccacagggtgaatcttgttgtagtcagccgggtcagcgaaggtcagaggcarcaggccctgtttcttcaggttggtctctggaaagcaggcggcattcggtcatcgggggcctgactagcctggagagcttcattttctgaacccatctggg

SEQ ID NO: 405678 - DNA, 201 bp, Homo sapiens
cggctcagatctacaagcctggaagcagggcctgcgggaagccgggaagctgagcgtcggatgtgcactgtgtgagcctaagaaggggcaagaggctgacrggcctgtgggctgcagtggacacagcctagaaccaggcccaactcagccacgggcagggagagtgaccttgatcactagggatgggatgaggatggcctg

SEQ ID NO: 405679 - DNA, 201 bp, Homo sapiens
ttcctgttgtaggaggtgacgattgtgttcttctcccccttcttgatgtccttcctgccaggtcagagggatcagggttagggatatctggccttgtcacmtggcctgtcccgaggacagataagctgggttcctgtggcgcagcccagcctagctcctaccgagggaaaatgaagaggccctgccagggttgcctcctcc

SEQ ID NO: 405680 - DNA, 201 bp, Homo sapiens
attcttcattctcatgtctggaccaaaccagtgtataggagatggtgagaggcccattgagacggttcaggctcccagagcgcaggcgccaagcctgccaycccttgggcactcagagcgcaattctcagcctgccccaggcctccctccgcctgagtcagaatcttgggggatgggtccaaatactttttttttttttta

SEQ ID NO: 405681 - DNA, 201 bp, Homo sapiens
tctcctgggtcccgttggggtgcttgatgatgcacttcaggggctgcaaggagaaggtgggtgtgggtggaagtggtgggtactgtgtgcccttggccccrcaggggggtcagggagacagggcactgcctggggacctaagaggtcagcaggcaaaccaaatcctaggccagtctgtgcctgatggcccaggtcagaccc

SEQ ID NO: 405682 - DNA, 201 bp, Homo sapiens
cacccacctcggcctcccaaagtgatgggattacaggtgtgaaccaccacgcctggccccgccacatacttttaaatgaccagatattggctagtcacggkggctcatgcctgtaatctcagcactttgagaggccaagatgggggggatcacctgaggtcaggagttcgaaaccagcctggccaacatggtgaaatctta

SEQ ID NO: 405683 - DNA, 201 bp, Homo sapiens
gcttgttcctctctgtttggcccaggccttgtgcatggggctgggacctgcttttcctgtgacttcccagccacagtgatctcaccctgagattggttttycctgcggggtcggggagtgggtgctgagggaagcccctcccactatctggttgctgccttgaccctggaccccctcagcgacgaagcggagcaggtgtgg

SEQ ID NO: 405684 - DNA, 201 bp, Homo sapiens
tagctaggactacaggcaagtgccatcacacccagctaattattttatttttttagtagagacagtatctcactttgttacccaggctggtctcaaactgwccttaagcaatcctcctgcctcggcctcccaaaatgttgggattataggcatgagccactgtgcctggctccaaatacttttaattacctgagagtacaa

SEQ ID NO: 405685 - DNA, 201 bp, Homo sapiens
gttgacacgtcccccacagggcccagctcagcagatgccaccacttccagtgaggagctgccaaagaaggaggctccgtacacgcttgtggtgagtggctytgatggtgctgaagcccccatgaggcgggagagccggagtgcagggctggaagctgtgtcctggggcttctgctctgggatctcccccagcaggtcaggg

SEQ ID NO: 405686 - DNA, 201 bp, Homo sapiens
ctcacctctggggacgtgacaaaggcatgggtctcggggtttgcgtcgttgcggcccgtgaagttcctgttgtaggaggtgacgattgtgttcttctcccmcttcttgatgtccttcctgccaggtcagagggatcagggttagggatatctggccttgtcacctggcctgtcccgaggacagataagctgggttcctgtg

SEQ ID NO: 405687 - DNA, 201 bp, Homo sapiens
tcagccttcctgccacgattagaacctaggtggccctggagggcaggcctaagggtgaggaagggtccctgaccctatcagggcctggagtccctggagargggtctgcgccctgcgtgctgcgtgcccgttgggagcactgctgtggctcccacatctctccagagcctcttggctgccgtgtgccccgcctcttctttg

SEQ ID NO: 405688 - DNA, 201 bp, Homo sapiens
actgatggcacacgtggagctgaacttgacgccagcggcggggcggggaggcactgccctcactgttgcagttccttcattctgttgagggcactgccagmgcggaaccactcaatctgcgtctcgttgaaggtgtggttcaggaggatggtctcctgggtcccgttggggtgcttgatgatgcacttcaggggctgcaag

SEQ ID NO: 405689 - DNA, 201 bp, Homo sapiens
gaccctggacttgacaacaaacggcacagacaccaatcactcacagaacagtcactggttttggattcttgttttccttgcaagaacaaaaggttctctaraatccttcagccaccaatgaaatgatcaggcaggagaaaaactttagatgggagtcttgtcatcaaaaataaatacagttgcatggagctgcttaagatc

SEQ ID NO: 405690 - DNA, 201 bp, Homo sapiens
agattaagggtagggctgctggggcacagtggctcacgcctgtaatcccagcactttgggaggccaaggtgggcggatcacgaggtcaggagattgagacyatcctggctaacacggtgaaaccccatctctactaaaaatacaaaaaattagccgggtgtggtggcgggcgcctgtagtcccagctacttgggaggctga

SEQ ID NO: 405691 - DNA, 201 bp, Homo sapiens
ctctgcttcttactagctgtgtgtcctggctgaatatgtcattgctctgtgcctctgcttccttatctgtcagttgcagttcaggatgtcaactgcagttyaggatagattttatattctaagaccattgtgaggattaaggagttaatacatgaaagctcttaggacagagccttggcacctaacgagcactcagtgact

SEQ ID NO: 405692 - DNA, 201 bp, Homo sapiens
ttttttaacagagaccagttgcaagcaaccgaaatatccaacaataaaggacaggctaactcatgacgtggcgtcatttgaagaaagatgctgtagccatyggccatgatgctgaacacattaggactatgaccccttttacagcaatatcatgtacacgtgtaggcacgtcagagggctcatacgaacagccatccttga

SEQ ID NO: 405693 - DNA, 201 bp, Homo sapiens
atgtgcgtgttctttatccctggcagggatccatcagtgagccaggcctgggccttctctcctggtggaccagcaactagccctggggctggacagtggaycctaccagcctgcgggaaggtggtatggccggctgtgaagacaacagcagctgaggccgatgctaaggagatagtgtctcgagctggacagtgaggcaag

SEQ ID NO: 405694 - DNA, 201 bp, Homo sapiens
ctgcttttcctgtgacttcccagccacagtgatctcaccctgagattggtttttcctgcggggtcggggagtgggtgctgagggaagcccctcccactatstggttgctgccttgaccctggaccccctcagcgacgaagcggagcaggtgtgggtgtgggagtacgagacggaggaaggagcacacgacctctacatgga

SEQ ID NO: 405695 - DNA, 201 bp, Homo sapiens
cccccccaccacaaccacagtcactccgtgggctaagcggggagcaggaagcatgtctggtcacaccatcttggaataggaagccatggctggacggatcrgatccactgatggcacacgtggagctgaacttgacgccagcggcggggcggggaggcactgccctcactgttgcagttccttcattctgttgagggcact

SEQ ID NO: 405696 - DNA, 201 bp, Homo sapiens
tgctgatcacaaaggcctgacccctgtctccccttaagactagctgacccaggggtaggagcttcaggtggatgccagcccagccccccatcaccagctcrgtgtacacaggcagccccttcaccactctgatcctgcttttgggtttgtgacatgagagaatcagcaatgttcttccttacctctgagagctggtggaag

SEQ ID NO: 405697 - DNA, 201 bp, Homo sapiens
tccagctcctgttgcaaaatggaaggtgctgtagaagaatccttagctcctgggagtggttcccattcactgggtccagtccctcgaagtgatgtgtgtcrccgcctcctcttcctgcccctaattgcagccctcttcttctcaccctgtgtcctctaggacccacctccaggacctcaaggaagtgacacacaacatcca

SEQ ID NO: 405698 - DNA, 201 bp, Homo sapiens; identical to SEQ ID NO: 90793

SEQ ID NO: 405699 - DNA, 201 bp, Homo sapiens
ctcgaactcctggcctcaagtgatctgcccgccttggccttccaaagtgctgggattacaggcatgagccactgcacctggcctgaccagtggttttcccttttttttttttttttttttttttttgagacggagtctcgctctgtcgcccaggctggagcgcagtggcgcgatctcagctcactgcaagctctgcctccc

SEQ ID NO: 405700 - DNA, 201 bp, Homo sapiens
gcatggcacaactgtatcagcaaagaggacttggtgaatgtgagcagagggcacttcatttattcaccaaatacctgctttggaaaataattggagtcggrgggagcagcaagaagggtgaaatagggcagtgcagggctcctggattggggctggtgtttggagggtagggacccagttgtaggcatttagaaggtacca

SEQ ID NO: 405701 - DNA, 201 bp, Homo sapiens
tgtctcccctccagctgtccagacagcaggttgaattatttggggtcagggtctatctgttcagattcacctcctgcatctccaggtctctctgacagagytttctgccccagttccagctcctgttgcaaaatggaaggtgctgtagaagaatccttagctcctgggagtggttcccattcactgggtccagtccctcga

SEQ ID NO: 405702 - DNA, 201 bp, Homo sapiens
agtgttgtttttttttggttgttgttgtttgttttttgtttttgagacagacaaaaaaggaaaaaagacacacacgcacaaggacatatgagtagagacartagtccacagatgctcccaggagaaagaaatccctgagtcagaaaagatgtcctgaagtggtggtttgaggggggcttaaagagaggcagaatctgcaag

SEQ ID NO: 405703 - DNA, 201 bp, Homo sapiens
tcaaatccagtacacccaagtgagcaaatctctggaagggttacaaaaaatgacctgtcccatagctttctcctaaatgcctccgtgacccaaacagaagstcacctcctgggtgttgctgtattaatgaactgactacctgttttgctttgttttgttttgttcatagtggaaaacctcaaccactgtgagtttgccctg

SEQ ID NO: 405704 - DNA, 201 bp, Homo sapiens; identical to SEQ ID NO: 90789

SEQ ID NO: 405705 - DNA, 201 bp, Homo sapiens; identical to SEQ ID NO: 90790

SEQ ID NO: 405706 - DNA, 201 bp, Homo sapiens
  misc_feature (1)...(201): n = A,T,C or G
gaaaaactccatgggggatcatcgaaggtaattcactgcatcttctggaagaactggttgctgatcagttatccagtcaccatttattaagcatctatagntcaaggcactgtctcaggacatatgaaatgaatgccagccagattctgcccataaggagcttacagtctcattgagaagacgatgctcacaggcaggagt

SEQ ID NO: 405707 - DNA, 201 bp, Homo sapiens
tgagggggaatctggcagcaggtatcctaggcccaccaaccagggaatgacatgaatgtaaggagattgctaccagatcatgcctaagctgagccctaggycttgttcttctgatgcatctatctactttccctccccatcagctgggagcccattgagaagtacatcaatgagcagtacgagaagttcctgaaggaggag

SEQ ID NO: 405708 - DNA, 201 bp, Homo sapiens
gatccatttgccttggcctcccaaagtgctgggattacagatgtgaaccaccatgcctggtgattttatttttatttttaatagaggtgggggtctcactrtgttacccaggctgatctcaaactcctgggctccagtaatcctcctaccttggcctcccaaagtgctgggattacaggcatgagccacagcgcctggccc

SEQ ID NO: 405709 - DNA, 201 bp, Homo sapiens
tccccactggttccacagattcagaacaatggctgggagggtgtctgggctccttcaggtacagacacccctactctgcagtggtgctcatggtacagagrggacatcgaggctgggagacgagagtgatagccactctccagagaagggtagccctgtttgcttctaaaagatgaagcagccgaggtcagtgacagttaa

SEQ ID NO: 405710 - DNA, 201 bp, Homo sapiens
attctatttttccttttagtatcattaaaaagtgaaaacctaagcaaaaaatggaatcacgagaaaacagaaaaccacgacactagacatatgcagaggtygtcccttttcccagtggtcctgtggctctgggaaggagagaatatggaatccaagtgatgtttccccaaggccctctgcagtaagcaggaagccattccc

SEQ ID NO: 405711 - DNA, 201 bp, Homo sapiens
cctcctaccttggcctcccaaagtgctgggattacaggcatgagccacagcgcctggccccatgtcttaatcctcattctgttccaacagtgcttggccartgatttgcaaatactaggtattcaatatatgttgaattggatttgtcatgtagtgcatgacctttttaaaatggctcaattattattttctctgtgttac

SEQ ID NO: 405712 - DNA, 201 bp, Homo sapiens
tgggggatcatcgaaggtaattcactgcatcttctggaagaactggttgctgatcagttatccagtcaccatttattaagcatctatagatcaaggcactrtctcaggacatatgaaatgaatgccagccagattctgcccataaggagcttacagtctcattgagaagacgatgctcacaggcaggagtaacaagagact

SEQ ID NO: 405713 - DNA, 201 bp, Homo sapiens
gagggcacttcatttattcaccaaatacctgctttggaaaataattggagtcggggggagcagcaagaagggtgaaatagggcagtgcagggctcctggaytggggctggtgtttggagggtagggacccagttgtaggcatttagaaggtaccagcctggagtgaggcattgtgtgttcagagatgaaggccaaccattg

SEQ ID NO: 405714 - DNA, 201 bp, Homo sapiens
aaatactaggtattcaatatatgttgaattggatttgtcatgtagtgcatgacctttttaaaatggctcaattattattttctctgtgttacttccaaccrgattataagcttctgaagaatgggaagtgtatcttaggccttggccagtttctcagacttggtattagttttctcttctataaaatggtaaaaattatag

SEQ ID NO: 405715 - DNA, 201 bp, Homo sapiens
actatgatgaagaaaagatggcacagctctgggctgccttcttcccaccctccaaacctacctgtgaagaccactgaatacatgtatcactgtgtacatargaaatcactcctccaacgttagcctaattgaagggctagactaattagtgagtcaactggccactagtcctcactggcatcttctctttttttttttttt

SEQ ID NO: 405716 - DNA, 201 bp, Homo sapiens
ccagtttctcagacttggtattagttttctcttctataaaatggtaaaaattatagtccctcttggctattatgccacagcgtctagaaggatgtcgtgcycattgtagctgcttaatatttgttcaatgaatcaaatccagtacacccaagtgagcaaatctctggaagggttacaaaaaatgacctgtcccatagcttt

SEQ ID NO: 405717 - DNA, 201 bp, Homo sapiens
ctaggcctccctagctgagtcctagcccttccagccagatgggttggtacatagtcatggcccatgaccttgggattccctagactttccacgaggaagtytgactttcttgctaggaggttaaagctgtccaacatcagccaccaatatctgcccactggtgtcccagcagcatggcacaactgtatcagcaaagaggac

SEQ ID NO: 405718 - DNA, 201 bp, Homo sapiens
ccaaggccctctgcagtaagcaggaagccattcccacctgcctgcaatccccactcagcctggccatcccccagtgagtggtcagacaaggtgtggcctgratcatggctctagaattctgtaagcttatggagaaatattaggctcaggaggtggatgcagagtctccctacctcctcctcctgctttgctgtaggccag

SEQ ID NO: 405719 - DNA, 201 bp, Homo sapiens
  misc_feature (1)...(201): n = A,T,C or G
tcatcgagcagatgcgcaagaagaccatgaagaccggtttcgacttcaacatcatggtcgttggtacggaaggctgtggggctgctgcaggcctggtggcnggcagcaccaaggatcccatttctttcccccaaatggctgtgaccctggctcttctaagatgagctgtttgtagaagggagaatttcaccatgctgatca

SEQ ID NO: 405720 - DNA, 201 bp, Homo sapiens
gctggtgggtggcttgttagcatgtgactggcatgtcactggcatgtggtggggaggctgacttgccagcaggcgctgtgtacagtgcacacagtgggtgytcatatgtgcttgttggaggaatgaaagtgagatctaccaggtcctggtcctgtagtgggcctgtggtagcccctagatgctgcttggggatctggtagg

SEQ ID NO: 405721 - DNA, 201 bp, Homo sapiens
ctcactgcaacctctgcctcccaggttcaagtaattcttctgccttagtctcccaagtatctgggactacaggtgcggaccccgatttttgtattttttayttatccccaaaaattagcccagctaatttttgtatttttcgtagagatggagttttgtcatgttggtcaggctggtcttgaactcctgacctcaggtgat

SEQ ID NO: 405722 - DNA, 201 bp, Homo sapiens
gattttttttttttttgagacggagtctcactctgtcatccaggctggagtgcagtggcgcaatctcagctcactgcaacctctgcctcccaggttcaagyaattcttctgccttagtctcccaagtatctgggactacaggtgcggaccccgatttttgtattttttatttatccccaaaaattagcccagctaattttt

SEQ ID NO: 405723 - DNA, 201 bp, Homo sapiens
agagggtcctcggccgaaaaactccatgggggatcatcgaaggtaattcactgcatcttctggaagaactggttgctgatcagttatccagtcaccatttrttaagcatctatagatcaaggcactgtctcaggacatatgaaatgaatgccagccagattctgcccataaggagcttacagtctcattgagaagacgatg

SEQ ID NO: 405724 - DNA, 201 bp, Homo sapiens
tatctctgaatgagcatcagaagtgtgtggttcaaggctagaggaccatatgccatcctgctcctgaaagtccaggttgttggaggatgacggtgcacatrtgtctggtttgtgtttctgccccgtgcagcaggagagcatgccttttgctgtggtgggaagtgacaaggagtaccaagtgaatggcaagagggtcctcgg

SEQ ID NO: 405725 - DNA, 201 bp, Homo sapiens; identical to SEQ ID NO: 90792

SEQ ID NO: 405726 - DNA, 201 bp, Homo sapiens
tgctcctgcgaatgggaaaggaccgagagagctttcgtgattccttttcccagagcctagggctggaactggggtgggctggaattgcctttgtggggggyggtggggtcctgaaggctgcggggggctgaggaagatccatcttcagggtggaaggaagagggggggcctgcactaagcaggtgctattttggaaaagta

SEQ ID NO: 405727 - DNA, 201 bp, Homo sapiens
tgttggaggaatgaaagtgagatctaccaggtcctggtcctgtagtgggcctgtggtagcccctagatgctgcttggggatctggtaggaccctctctccrtcagggtctatcttttgggcgtgctcttttaggatgctgcagttgacaggccagggcggagcaggccatggtgagagcacacactttataggaatcttta

SEQ ID NO: 405728 - DNA, 201 bp, Homo sapiens
ttgtttcttctcctcgcctctaggttcgcaaggagcttgaagtaaatggcattgaattctacccccagaaggaatttgatgaggatttggaggataagacrgagaatgacaaaatcagggtgggtgcctggggcactgctcctccactgatgcccccttgcgacctctgggatgtgtattgtgcacgtcctctgtctgtct

SEQ ID NO: 405729 - DNA, 201 bp, Homo sapiens
cagtctcgcggaccctgagatgagcaagctggttgcgaggcgcctgggacctgaagttgcacctcctggcctcttcctcctctcaggctaggttgtaattrtatagctggggcttgcatttattcaccatcttcctgctgctcagggtctcagagttcagagatgactgtggattatccaaggctggatttggctctctga

SEQ ID NO: 405730 - DNA, 201 bp, Homo sapiens
agccagtcagccgcagcagcagaactgcttgcacgggggcttcagaaacctgggtggttagtggcccttaacactgaagagtgtaggggcggttcaggtgyaccttgcccacctctcagacagtgtcaccaggaccctgtttctctgtgcatctcccagctctccttccctgcactgggtttattggcaaggtggtggttg

SEQ ID NO: 405731 - DNA, 201 bp, Homo sapiens
gctcccttctcggccgccggcggaatctgggaacccgaggccatcacgtctccatgtctgcgggtttctgtgagggcgtgtggttctccctgtgggtcccyggcgctctgttccggtttctgtctgtccctgtgggtctctgcctcccccgccccctctccctttccgcggcactcgtccttcccccagcaccttcccccc

SEQ ID NO: 405732 - DNA, 201 bp, Homo sapiens
agcaacagcacggactacattgccatgcacgacgttgacctgctccctctcaacgaggagctggactatggctttcctgaggctgggcccttccacgtggmctccccggagctccaccctctctaccactacaagacctatgtcggcggcatcctgctgctctccaagcagcactaccggctggtgaggcccggacagcct

SEQ ID NO: 405733 - DNA, 201 bp, Homo sapiens
ccgtttggtagtaatcacccaggggctggtaaagcccctcctcttggcacctcagaatcacagtgttactgatcagggatgtgaggctgctgttgggggtrgggggaggggaatgggcaggcaagccagtcttctgtcttcctttgctaacttagggttttgagcaggttggggtatggtgcctgtcatacccacctgcca

SEQ ID NO: 405734 - DNA, 201 bp, Homo sapiens
ccaagtagaggccttggtgctggttggggtggggcctgcagagtcttagttactgatttcattttcaataaatgtaggtttgttacatgagtttcccaatwaaaaaaaaaatgacttcttgtccagtgcaagtgactcagtcatcagtgggcacacactgcagggtgcctcagggaatgccagttcttccaaagagcaaag

SEQ ID NO: 405735 - DNA, 201 bp, Homo sapiens
gccggaatgtgggcctagtgttgccagatcttctgatttttcgaaagaaactagaatgctggattcttaagtgatatcttctgattttttaaatgatagcmcctaaatgaaactttcaaaaagtatggcaggccagacaaaatgtgtcgtggaccgctcacatgtcacttttggctgaggggcaaggggaggggtgagtta

SEQ ID NO: 405736 - DNA, 201 bp, Homo sapiens
tgggcaccgtgccctgctctggtggctgctgtgggcaccctgggcactgtgggtcagcccagacctcagggtccacgcaggctggcagggtggggtggcgraggcgtagctgaaggtgccagaatcccagccacacccgggatgcagggatcccaccctcaaacagccccttctctaggaggcttatgcatccaactggag

SEQ ID NO: 405737 - DNA, 201 bp, Homo sapiens
caggtcagtcgacgggcattctgcttgggcaccgtgccctgctctggtggctgctgtgggcaccctgggcactgtgggtcagcccagacctcagggtccaygcaggctggcagggtggggtggcggaggcgtagctgaaggtgccagaatcccagccacacccgggatgcagggatcccaccctcaaacagccccttctct

SEQ ID NO: 405738 - DNA, 201 bp, Homo sapiens
actgcagaagtgcaggagcctgcaagcacccggggcttattcagaggcgctgggggagaggggcactcccgagcggtaggagaccaaaggcccccccccccgggaagatgggccgagtgacgctgcttgtctctgtgtcagtgcaatgggatgtccaaccgcttctggggctggggccgcgaggacgacgagttctaccgg

SEQ ID NO: 405739 - DNA, 201 bp, Homo sapiens
ggctccaggaagggcagcctgaccccgacttccttggacctccctagcttttccgcccctcgggaatcacaactgggtacaagacatttcgccacctgcaygacccagcctggcggaagagggaccagaagcgcatcgcagctcaaaaacaggtgctggcagggctcctcattggggacggataggtggtcatgtggggag

SEQ ID NO: 405740 - DNA, 201 bp, Homo sapiens; identical to SEQ ID NO: 90807

SEQ ID NO: 405741 - DNA, 201 bp, Homo sapiens
cctggactaatgccagcacacacccgtgtctgggtggcctttctggtcattcttggaagcaggatggagccacggtttctgctggggtggatctgtagggsagcgggtttggaaagcagtgggttgcatctctaaggtggggactcctgtcattggctcaggacattgagccactatcgtggggaggagcacctgcaagtg

SEQ ID NO: 405742 - DNA, 201 bp, Homo sapiens
ggagctggcgcttctgcccatcgacagttccccacagagatcccctctgggcagccagccgtttttgagaaggtgagcctctcacacaggttcaaggcccygtgagaacgggagagggcccgggacgcgctgcttcctgccgcccgcactgcagaagtgcaggagcctgcaagcacccggggcttattcagaggcgctggg

SEQ ID NO: 405743 - DNA, 201 bp, Homo sapiens
ccaccaggagaaaggggaatgggggaagcagaaatcaagtaggagctggcgcttctgcccatcgacagttccccacagagatcccctctgggcagccagcygtttttgagaaggtgagcctctcacacaggttcaaggccccgtgagaacgggagagggcccgggacgcgctgcttcctgccgcccgcactgcagaagtgc

SEQ ID NO: 405744 - DNA, 201 bp, Homo sapiens
ccccacctctgccctcgccctgcccagctgcccgttggtctgctcctgcctcctgccgtggcagtgccatctctcctatgcagagccctaggcacccactrccctgtgggtcatctcttcaggccttcaggtttctgtcactcagttcccctggccctccctgacggccccaccgaggacaagagccacctccacccccag

SEQ ID NO: 405745 - DNA, 201 bp, Homo sapiens
cccgagtcaaagccccgtccttcagtggcccttgggccttgtgcagtcactgtgtcacccccaacatccccacctctgccctcgccctgcccagctgcccrttggtctgctcctgcctcctgccgtggcagtgccatctctcctatgcagagccctaggcacccactgccctgtgggtcatctcttcaggccttcaggttt

SEQ ID NO: 405746 - DNA, 201 bp, Homo sapiens
gctgctccttctctgtcatacactgcgtcctattcgtcagcaaaatccatctagaatctgcccgcttctcgctgttgccactgccacctcctgagctaggscaccttcatcttttggtctctcacctaaatcattgccatagtctcccagctggtctccctgctttcacccctgctctgacagtctcttccagcacaacag

SEQ ID NO: 405747 - DNA, 201 bp, Homo sapiens
gagtcccgcagtgagctgcactggctcttgattggccggcttgagtgctgagcccacccctcagccagtcactggctggtggacgggcaggcaggaagaascacttgtggctcaggcctgggtgtcctcctctccaggccatggcaggggccagctttatgtaaatgaagcccctgagccaggtgcaagaatgggtgtctg

SEQ ID NO: 405748 - DNA, 201 bp, Homo sapiens
actccagctctctgctccacacctgtgcctgggcactggagggtatggagaggaaagacaacacgtgaggcggccatgctgctgtccccatgccgatgatscccctgccaggaaggccctctgccctgctgggagcctcactttcctctggtctgtccactgcagcctttaaaactatctgttctcctcattcatccctcg

SEQ ID NO: 405749 - DNA, 201 bp, Homo sapiens
gggaggagttggtctggctttagcatgtgacttaaggcatgccctgactgccttacccctttctgtaactcacttggcaagctctctgctgtctggcctgygcttgctgtgctggggccacagataagaatctgacacggcctgagaagcaaggacacaaggcattacaaaaaagtgggaagatgccgtgggaatacaaaa

SEQ ID NO: 405750 - DNA, 201 bp, Homo sapiens
cgttgtcctaaaatccccgcccttaccaaaaagtgctcccttccatgaccacagcctgagatctcacccaccagcccccacctcctttccctctaggtaastcccactggaagatggattctcagccccaccagcctgatcttcccaccttttcaagtccccttgatccagatccccagaccccccccttttccctgccac

SEQ ID NO: 405751 - DNA, 201 bp, Homo sapiens
ctgtacccagccctcatctttctttccctctccatctcccatcttttatcatgagctgcctcttggactaaaggtttgaggctcgttcagtgaaccgccaytgacagtttgggccttgcattgcttcggggggcacgtctgatcttcccagagtaaacattggtcattttacctggactaatgccagcacacacccgtgtc

SEQ ID NO: 405752 - DNA, 201 bp, Homo sapiens
gacctgagctgcttcacatggttgtccattctggggcttaaagaactgggaccagaccaagtagaggccttggtgctggttggggtggggcctgcagagtyttagttactgatttcattttcaataaatgtaggtttgttacatgagtttcccaattaaaaaaaaaatgacttcttgtccagtgcaagtgactcagtcatc

SEQ ID NO: 405753 - DNA, 201 bp, Homo sapiens
tgttaccatatttgccaggctggtcttgagctcctgacctcgtgatgcacctgcctcggcctcccaaagtgctgggattacaggcgtgagccaccacgccyggccaggagatagaatttataagacctgatagctaatcgctgactcttaagattgtgaagtggattcctttgcagattactttggggagaaggtaggggg

SEQ ID NO: 405754 - DNA, 201 bp, Homo sapiens
attcagaagactgaaggggtctgagcagggcaaggaacagatgagtgaggaaggatcagagggggacttaggagatagaatttatttatttatttatttawgagatggagtctcgctctgttgcccaggctggagtgcagtggcgtgatctcagctcactgcaacctccgcctcccagattcaagctatgcttctgcctca

SEQ ID NO: 405755 - DNA, 201 bp, Homo sapiens
tggagggctttgactgtcaggccaaagggcttggcctttgtctggcaaacagaggagggtcattcagaagactgaaggggtctgagcagggcaaggaacasatgagtgaggaaggatcagagggggacttaggagatagaatttatttatttatttatttatgagatggagtctcgctctgttgcccaggctggagtgcag

SEQ ID NO: 405756 - DNA, 201 bp, Homo sapiens
gcctctgggccgtttggtagtaatcacccaggggctggtaaagcccctcctcttggcacctcagaatcacagtgttactgatcagggatgtgaggctgctsttgggggtggggggaggggaatgggcaggcaagccagtcttctgtcttcctttgctaacttagggttttgagcaggttggggtatggtgcctgtcatacc

SEQ ID NO: 405757 - DNA, 201 bp, Homo sapiens
actgggtacaagacatttcgccacctgcacgacccagcctggcggaagagggaccagaagcgcatcgcagctcaaaaacaggtgctggcagggctcctcaytggggacggataggtggtcatgtggggagccagcaggcccgggctttcaccaagttctccttggcccaaatggtcccatcctcccctgcttggcccaggt

SEQ ID NO: 405758 - DNA, 201 bp, Homo sapiens
caggttgaggatcatggctgtggggctgggcttggaggcaaagaagctgagatggctgtggaggggaggggggccgtcagcagcctggcctggccccagcygacacctcctgccccccctggcccaccccagggcagggcctccccgaagccaaacacaatgactgccccggccactagtagatgcggcacaggccccaca

SEQ ID NO: 405759 - DNA, 201 bp, Homo sapiens
ggtccagggccaagccgtgcacacctgtgtgtgtctgggggtccagggccaagccgggtgcacctgtatgtatctgtaggttctgcagcgtcctgcagggkacagtgatgctcctggccccggaatgcgatgtctccttaatcccctctgtggatggtggtggccggggagtggcgatggtgactgccgtggctgcccgtc

SEQ ID NO: 405760 - DNA, 201 bp, Homo sapiens
gcagatccagcgccttcagaccagggacatcttcaagaccaagttcctctctgagatcgaaaggtgcctgaggcctacattgcctcccccacttcaggggktctttctgtccactgtgggggattgctggccatgggtggtgacgaggtctgctctggaggatgaagtgggagaagtcacgacccacctccctgtgctctc

SEQ ID NO: 405761 - DNA, 201 bp, Homo sapiens
tctccagtttgggagccccaaagaaaagaatccttctttgggaactcttggaggtagggccaggtggactgagggcttagaaaaggcttcctccagccacycttcccccctgcaggtttgagaagatgatcggaggcctgtacctgggtgagctggtgcggctggtgctggctcacttggcccggtgtggggtcctctttg

SEQ ID NO: 405762 - DNA, 201 bp, Homo sapiens; identical to SEQ ID NO: 90820

SEQ ID NO: 405763 - DNA, 201 bp, Homo sapiens
gccatgatcactccgtggcactctagcttgggtgagagagcaagactcgatatctacaaaaataaaaaaaaaaaagtgatggggccttgggcttcaggagrccctaggggtctggggccaagctgggcacacctgtatgtatctgggggtccagggccaagccgtgcacacctgtgtgtgtctgggggtccagggccaagc

SEQ ID NO: 405764 - DNA, 201 bp, Homo sapiens
cgttgtctggcctctctgcaggaaccggcaccaatgcctgctacatggaggagctccggaatgtggcgggcgtgcctggggactcaggccgcatgtgcatyaacatggagtggggcgcctttggggacgatggctctctggccatgctcagcacccgctttgatgcaagtgtggaccaggcgtccatcaaccccggcaagc

SEQ ID NO: 405765 - DNA, 201 bp, Homo sapiens
gactggacagaggaataggaagacacataaaacaagaggcaatttctgccttctcagaaccgaccactcagcaagggttaagcccagaacaacacgtagcrgtcagagagtgacttgattctacacgtgggcagcagcgaggccaagatcaggaaggagtgggtcccaggatgagtggaacttgaaagccctgaaagaaag

SEQ ID NO: 405766 - DNA, 201 bp, Homo sapiens
gattccatccttattaagcacctaccctgtgtccacaggggactggacagaggaataggaagacacataaaacaagaggcaatttctgccttctcagaacygaccactcagcaagggttaagcccagaacaacacgtagcggtcagagagtgacttgattctacacgtgggcagcagcgaggccaagatcaggaaggagtg

SEQ ID NO: 405767 - DNA, 201 bp, Homo sapiens
ctcaggcccttaggcccctccctgtcactctgagggtctccagggagcaacctgggggccctggccaggttcaaagaaggaagggcccaaagttctagaayccagaattgtcaacccttgatcttccctgttcctgactctggcctgccctgacagtttgggggttgagggctggaagtggttgagcaaactgctctctgc

SEQ ID NO: 405768 - DNA, 201 bp, Homo sapiens
gaatctccctttcaacatacccaacttctgcttgaaagcctcttgccaaggagctcactgcccctgaaggcaacagttgcattcttagacacctgtgatcmatgaaaagcttcatctcacctactccaaccagcctccatgtgattttcaccccctgctcctgctctgacctctctctgatatgcaactcatttttttttt

SEQ ID NO: 405769 - DNA, 201 bp, Homo sapiens
accagtgctgaccaccttcgaccataccctggaccatgagtccctgaatcctggtgctcagaggtgacctggcagggggccctgacctttggttccaggcyctgtctatgactgctctgctcccaaccccttctgtccctgttctcaggcccttaggcccctccctgtcactctgagggtctccagggagcaacctggggg

SEQ ID NO: 405770 - DNA, 201 bp, Homo sapiens
  misc_feature (1)...(201): n = A,T,C or G
caccagacgggcttggacagggtgaggtggagtggacatgggacgctgggtagagggtggctgcagccccatgaaggccgtcagaggagtaacccagcttntctacctccagagcaccctcatttcctggaccaaaggttttaggtgcagtggtgtggaaggccaggatgtggtccagctgctgagagatgccattcggag

SEQ ID NO: 405771 - DNA, 201 bp, Homo sapiens
tcacagctgcttggccctgcagatgacttgccctctcggagtctccgtttccatatttctaacacttgggcagctggggctcagaggggcaaggctgagascccgcctgtcctgcagctctttgactttgctgcccactgcctgagttcctggatgtgcagcctgtgagcaaacagggtctgcagcttggcttcagcttct

SEQ ID NO: 405772 - DNA, 201 bp, Homo sapiens
gacagcctggggtgtcctggcttctgccttccctgccttctcacctgccccttcagactccgatccactcccggatcagtcttctccaaatccatcccctygctcttcccctggatcttcgaatggcttgttcccttccttcatttagatcacctcctcagggaaaccctcttgaactcatatctaaaaatacctctttct

SEQ ID NO: 405773 - DNA, 201 bp, Homo sapiens
agcctgagatccaattgcatagaggaggtgagggtgagggatgcgcgcaggcagcccgaacggccgtgtgagtgagcacacttcgatgtctccagtcaagrtggagaacagaagagctttgtgggggtaaggtgatggaaaaatgagtatggctttgttgaatttgaggagcttctccaccatccagatagtgatgtctaa

SEQ ID NO: 405774 - DNA, 201 bp, Homo sapiens; identical to SEQ ID NO: 90815

SEQ ID NO: 405775 - DNA, 201 bp, Homo sapiens
gcacattagcacatacctataccagaccctgtgccggccatgagtgcagaggtgatcaagttgggtggggtaaggaggtgaagaaactagaagcagagctrtcagtttaggaggctgttgtaataatcaggccggaggatggtctggtgcagtgtgtgggaatggggaggaggggatgcagaggagagctcttagagagcc

SEQ ID NO: 405776 - DNA, 201 bp, Homo sapiens
ccagattgtggaggcattacccctcgctgcatttcatgctcccacttcccccttgtccaacctgtaccccagaccctgctgcagacagttcttctgtgccygacccacagccgtgcctcaggagtgacagcggtggctgggccacagtgcctgcccagccaggactggctctagggcctgctgtcatctcctccctcgctt

SEQ ID NO: 405777 - DNA, 201 bp, Homo sapiens
ttcacagattctgtcatgtaaaaatgctgaataaatattgaatggatgagggaatgaatgagtgagtgaatgaataaatgaactagctgggccttgagaargacacgtgtgtagcccttagtccttttcgaaggtaattgccccagttacctcattttatccttgaaatagacctgcagcatagaacaagaattccacacc

SEQ ID NO: 405778 - DNA, 201 bp, Homo sapiens
ctcaaaaaaaaaaaaaaaaaaagtccgggcgcagtggctcaggcctgtaatcccagcactttgggaggccgaggtgagcggaccacaaggtcaggagatcragaccatcctggctaacacggtgaaaccctgtctgtactaaaaaatacaaaaaattagctgggcatggtggcaggcgcctgtagtcccagccactcggga

SEQ ID NO: 405779 - DNA, 201 bp, Homo sapiens
ccaccacacccagctaatttttgttatttttttctagcgatggcgttttgccatgttgcccaggctagtctcacattcctgggctcaagcagtctgtctgmctcagcctcccaaagtgctgggattacaggtgcaagccaccacacccagcctgccagctggttctcgatggcagctcccaacatcagtagaggtccctgg

SEQ ID NO: 405780 - DNA, 201 bp, Homo sapiens
ccatcctggctaacacggtgaaaccctgtctgtactaaaaaatacaaaaaattagctgggcatggtggcaggcgcctgtagtcccagccactcgggaggcygaggcaggagaatggtgtgaacccgggaggcagagcttgcagtgagccaagatcgtaccactgcactccagcctgggtgacagagcgagactctgtcaaa

SEQ ID NO: 405781 - DNA, 201 bp, Homo sapiens
tttgtgatcccccaagaggtgatgctgggtgctggccagcaggtaagcactcactgcccagcctctggggtctgggggcctggctgggtggctagggctcwgatgggcaaggctgagcccccccacttctcctgcagctctttgactttgctgcccactgcctgtctgagttcctggatgcgcagcctgtgaacaaacagg

SEQ ID NO: 405782 - DNA, 201 bp, Homo sapiens
ctgtgaagaggccagcgtctggctggcccagtccagccactgctgcagccagctggctgaggttgccgttggggaagtgccgcgcctcccacaggttgagratcatggctgtggggctgggcttggaggcaaagaagctgagatggctgtggaggggaggggggccgtcagcagcctggcctggccccagctgacacctcc

SEQ ID NO: 405783 - DNA, 201 bp, Homo sapiens; identical to SEQ ID NO: 90822

SEQ ID NO: 405784 - DNA, 201 bp, Homo sapiens
ggccatggccaaggggctccgaggggaggcctcctcccttcgcatgctgcccactttcgtccgggccacccctgacggcagcggtaaggacctggcctgartgtgggaccgaaacatgggctcctgggggtcccagtgtgtgctggggctggagccacaagccctatcccggcactgagggtctctgcccccacagagcga

SEQ ID NO: 405785 - DNA, 201 bp, Homo sapiens
ctgcggttcaggcacagatgcggaaggccatggccaaggggctccgaggggaggcctcctcccttcgcatgctgcccactttcgtccgggccacccctgayggcagcggtaaggacctggcctgagtgtgggaccgaaacatgggctcctgggggtcccagtgtgtgctggggctggagccacaagccctatcccggcact

SEQ ID NO: 405786 - DNA, 201 bp, Homo sapiens
  misc_feature (1)...(201): n = A,T,C or G
cagcctttccagtgctctctcattagacatgcttgtgaaaaacaagggccttctggttgactgctacaggatctttgatggttggaggttctgaattctgntcccagcttccttcctggtccccttcagaaggaaggaagttggtctgggttacagactcctagggcctatagagtaaatggttgacccaggttgtccctt

SEQ ID NO: 405787 - DNA, 201 bp, Homo sapiens
ccctgacacagctattaatgaaaccttgggaatgggcgagataaagggagtgtagagggagggcatgaccgaaacttgggaaccccattgtctgaaggaasagaaattactgatgaagactacgagagactcaggaaggagacctaggagagactggccgtgaaagccaaggacagggggaattctgtagcaaagagaatg

SEQ ID NO: 405788 - DNA, 201 bp, Homo sapiens
atgagcctaggacaataaaaaacgggataaaaggacatattattggaggaaaacgttgcttactatttctaaaatcttctgccccaaagatttcctgaccyaccctccatgctcctcctctgagcaaagcagtaattttctcccaacagctgtagactaattcctgctccccctgccccctccctcagaggacgcacacta

SEQ ID NO: 405789 - DNA, 201 bp, Homo sapiens
agggtccttgtctacatcagtaagtagcttccacgttgtctggcctctctgcaggaaccggcaccaatgcctgctacatggaggagctccggaatgtggcrggcgtgcctggggactcaggccgcatgtgcatcaacatggagtggggcgcctttggggacgatggctctctggccatgctcagcacccgctttgatgcaa

SEQ ID NO: 405790 - DNA, 201 bp, Homo sapiens
taggatttggctgaggccaaaggtagatttgggagccctgacacagctattaatgaaaccttgggaatgggcgagataaagggagtgtagagggagggcawgaccgaaacttgggaaccccattgtctgaaggaagagaaattactgatgaagactacgagagactcaggaaggagacctaggagagactggccgtgaaag

SEQ ID NO: 405791 - DNA, 201 bp, Homo sapiens
ccaatgagcaatgagggtccttcagacagtccaagattccatccttattaagcacctaccctgtgtccacaggggactggacagaggaataggaagacacrtaaaacaagaggcaatttctgccttctcagaaccgaccactcagcaagggttaagcccagaacaacacgtagcggtcagagagtgacttgattctacacg

SEQ ID NO: 405792 - DNA, 201 bp, Homo sapiens; identical to SEQ ID NO: 90814

SEQ ID NO: 405793 - DNA, 201 bp, Homo sapiens
gtgcctcatattgccagacaagagctcagacctgaggagagtgactagcttctctgtgtcccaggtaagcacttcggtctaattactgcctgctccttccrcagctgtcttgtcctcatccctcctgtttggctcacaccaggggaagtggacactggaaagattaagccagctggttctctttctttgtttttgagatgg

SEQ ID NO: 405794 - DNA, 201 bp, Homo sapiens
gaggcaatttctgccttctcagaaccgaccactcagcaagggttaagcccagaacaacacgtagcggtcagagagtgacttgattctacacgtgggcagcrgcgaggccaagatcaggaaggagtgggtcccaggatgagtggaacttgaaagccctgaaagaaaggatttggctctgttggggaggagggatcccacagc

SEQ ID NO: 405795 - DNA, 201 bp, Homo sapiens
tgctcagcacccgctttgatgcaagtgtggaccaggcgtccatcaaccccggcaagcagaggtgtgggctgggcccaggcagtggtggctggctgtgaccrgtgctggggatggtggctggtggggccttctgccgagtgcacacatgttcatgcaggtttgaaaagatgatcagcggcatgtacctgggggagatcgtcc

SEQ ID NO: 405796 - DNA, 201 bp, Homo sapiens
caggccaccggcgcaaacagaagcagcttgaggcgcttggcggcagccacgctgagggcctctcccaccagggcaaagcggcccagctgctcggtgaagaygtagcaggcactggcctccagctggcagtagtagaggtgggagggcgcctcctcgcccaggtgcagcacatcctgtgggcaggggtcagtgggtcaattc

SEQ ID NO: 405797 - DNA, 201 bp, Homo sapiens
tgtggcagtgctggacgaagaccggggccgcgtctgcgtcagcgtcgagtggggctccttcagcgatgatggggcgctgggaccagtgctgaccaccttckaccataccctggaccatgagtccctgaatcctggtgctcagaggtgacctggcagggggccctgacctttggttccaggccctgtctatgactgctctgc

SEQ ID NO: 405798 - DNA, 201 bp, Homo sapiens; identical to SEQ ID NO: 90810

SEQ ID NO: 405799 - DNA, 201 bp, Homo sapiens
ttcaaggtgacaagggcacagctacagcagatccaagccagcctcttgggttccatggagcaggcgctgaggggacaggccagccctgcccctgcggtccrgatgctgcctacatacgtggggtccaccccacatggcactggtgggtatcatagattgagatgcgtggccaggcctggaagagggtactgatctagggga

SEQ ID NO: 405800 - DNA, 201 bp, Homo sapiens
gcccgtcgccctccacctgccacacccacagcttgcaggccaggtcactagtgctggggctgacacgctccagggtgaaggtgcagtgcaagtaccgctgygtgccattccagatgtgataaaaggggatctcctgatggggttgcagagaggaggtgtcaggtgagcccaagctccaggcctcttgtgcgctggccacgg

SEQ ID NO: 405801 - DNA, 201 bp, Homo sapiens
tccggaatgtggcgggcgtgcctggggactcaggccgcatgtgcatcaacatggagtggggcgcctttggggacgatggctctctggccatgctcagcacycgctttgatgcaagtgtggaccaggcgtccatcaaccccggcaagcagaggtgtgggctgggcccaggcagtggtggctggctgtgaccggtgctgggga

SEQ ID NO: 405802 - DNA, 201 bp, Homo sapiens
ttctaggaggaggtgggcctggggacaggcgggagggagagtgggtggcagggcaggcagggcaggagcgttttgggggctggtggggagttggtagtggragcacgtcacggcggtgcggcagcccctcccgtccaccttggtgatgttgaagttgatgctgaagctctgcccgtcgccctccacctgccacacccacag

SEQ ID NO: 405803 - DNA, 201 bp, Homo sapiens
agccgtggactattgagattgtgggagggctcttcaatttaacaaaaattaattgatacttgttccttgccagataaagaactgaggtctgaggctgcacrggtgaataagaaacattctctgggagcccatagtacaatggggaagaagaacacataaacagatgcctttaataaacagatataaatgcagtgatacaag

SEQ ID NO: 405804 - DNA, 201 bp, Homo sapiens
acggttaggcacttgggagaggcatgcccaggttgctgtgtgcataaacagctggacagaggagctccaggtggggccagcaaggagcccaccttcctggrgctgaagctgtgtcagagaaaggaaggagacgccctcatccagggtgcgtcctctgcctggaatgcctttttctttctgtgcttcttggattcagtcact

SEQ ID NO: 405805 - DNA, 201 bp, Homo sapiens; identical to SEQ ID NO: 90816

SEQ ID NO: 405806 - DNA, 201 bp, Homo sapiens
cctgacctctggccagactgtggggctcctcgtctctgatttctctgtgtcccctgctcttggcccagcacctcttagttggattaagggcctggcaggcsggtccagggagcttcggcctctcaaccgcagagagctaggggcgagggcgggggatgtcacatgtctcccaggggaatgacaggacagctgggcattgta

SEQ ID NO: 405807 - DNA, 201 bp, Homo sapiens
ggcagagactcgccccgtggtctgggctcccacgatgctctccttggtgcttccacgggggcacagaggctctgtcagagctggctattcattgcctgacstctggccagactgtggggctcctcgtctctgatttctctgtgtcccctgctcttggcccagcacctcttagttggattaagggcctggcaggccggtcca

SEQ ID NO: 405808 - DNA, 201 bp, Homo sapiens; identical to SEQ ID NO: 90818

SEQ ID NO: 405809 - DNA, 201 bp, Homo sapiens
gcatcgtgggtgtcatgcaggcagtagacccggatgttgtactcgagggaggtgcaggccaccggcgcaaacagaagcagcttgaggcgcttggcggcagycacgctgagggcctctcccaccagggcaaagcggcccagctgctcggtgaagacgtagcaggcactggcctccagctggcagtagtagaggtgggagggc

SEQ ID NO: 405810 - DNA, 201 bp, Homo sapiens
caacgcgtgttacatggaggaggcacggcatgtggcagtgctggacgaagaccggggccgcgtctgcgtcagcgtcgagtggggctccttcagcgatgatrgggcgctgggaccagtgctgaccaccttcgaccataccctggaccatgagtccctgaatcctggtgctcagaggtgacctggcagggggccctgaccttt

SEQ ID NO: 405811 - DNA, 201 bp, Homo sapiens
agaagcagggcctgagcgggcagagcctcccactgggttttaccttctccttcccatgtaggcagcttggcctagaccaggtgagggagggccaagagaartgattcccaagggcctcctgcccccacatacccttcatggagtgggcaggaggcaggggaaaaggctgggcggtggcgggtctggggttggtggtggtgg

SEQ ID NO: 405812 - DNA, 201 bp, Homo sapiens
  misc_feature (1)...(201): n = A,T,C or G
gccgggagcaacaaacactccaggttgctgtggccaccggaggccgagtgtgtgagcggcaccccaggtattgtggaaacgtgatccgcatgattagttgncatgaacacgtgtgtgtgatacacacccagagggccctctgggatcacatgtgcaagccagtggacacgaagggcacttaggcagagggagggccagact

SEQ ID NO: 405813 - DNA, 201 bp, Homo sapiens
gtagatcattagaaatacgttaagcattgtatctgagaggtctcaagaaacagaggatggtaaaagagatgagtgctattcttcaggcttacctgtatcgkccaacttttacccagacaatctccctgtagtgtggctttttgcctgctttacagtcattgcaataccagtttccttcagggatatcaatgttcaggcatt

SEQ ID NO: 405814 - DNA, 201 bp, Homo sapiens; identical to SEQ ID NO: 90852

SEQ ID NO: 405815 - DNA, 201 bp, Homo sapiens
taacattaacatgctcatgatttcggcagccccgcctaggggtaaagtgattagggcagatgatactattagatgcaaggatctttgacccagcagccagscaaaagtcattggcgtggtatgccacaggacagcggacacagcgcatcaaccgacctaaagcaggaaaatcagggacaagcaaaagaaaaacaaaaatat

SEQ ID NO: 405816 - DNA, 201 bp, Homo sapiens
cttatccttgctgctcacgtcaccctccatgtaagggaagactcgggcctggtgagtccacaaatagtcattagatccaaaaaagaggactgggaactctmccacatcatgtctcatcttatcaatgttggaaggaacagctcgaggatggcagatctcagctggccaccacctgggaaaggtgaaaaggagaaggaaaac

SEQ ID NO: 405817 - DNA, 201 bp, Homo sapiens
ttaactacgtatagaggtgtcagttagctttctctcattatcctttgttttattggctgaacctcattctatgggctcccttgactccctggccactgtcktggcacttgaagccttttaggttgcttagtgtagagctgaagtgcatattgtgtgaaaatctttttgctctttggagtggtagaggtctaggctcaacca

SEQ ID NO: 405818 - DNA, 201 bp, Homo sapiens
gtcttggctaggcacagtggctcattctgggaggcagacacgggaggatcacttgaggccaggagttcgagaccagcctgggcaacatagagacaacatckctacaaaaaatacaaaaactagccaggcatagtggtatgaacctgtagttccagctactcaggaggctgaagtggaaggatcactggagcctgggaggtc

SEQ ID NO: 405819 - DNA, 201 bp, Homo sapiens
ttatcttaaaaataatgtctcctagaagttggtagtctttcacttgatcttagccaaaaggccgagaagcgatagaagttggtagtctttcagtataagcmaagagtagtatggtccttttgttttttttttgtttgtttttgagatggagtctcgctctgtttgttgcccaggcttcccgggttcaaatgatcttcccgc

SEQ ID NO: 405820 - DNA, 201 bp, Homo sapiens
aaagtactgggatttgattattaaatcccaggttttagaatctaagttaaagattatcaataaatagatagcagtgaataattttttttttccttttaggsgcttaaagtacttaaatctctgttgaacagtggataccaccagttataattactttgggagatggtgatttgagtctcttaatctgtgaaatattagaaa

SEQ ID NO: 405821 - DNA, 201 bp, Homo sapiens
accttgatagggattttacacattgatataatcttaaaaatgatgttatcttaaaaataatgtctcctagaagttggtagtctttcacttgatcttagccmaaaggccgagaagcgatagaagttggtagtctttcagtataagcaaagagtagtatggtccttttgttttttttttgtttgtttttgagatggagtctcg

SEQ ID NO: 405822 - DNA, 201 bp, Homo sapiens
ataggcgtgcgccaccacgcccagctaatttttgtatttttagtagagacagggtttcgctatgttgcccaggctggtcccgaacccctgagctcaggcgytgagttgctggcctcagcctcccaaagtactgggatttgattattaaatcccaggttttagaatctaagttaaagattatcaataaatagatagcagtga

SEQ ID NO: 405823 - DNA, 201 bp, Homo sapiens
ggggaggagagagttgagagtgtggtaaagagcgggtgagtgtggggggagaacatggtgtgtgtcggtgagaaggtgcgtggcagaggcaggagtgtggyagggtgtgccggcgtgtgtccagtgtgtgagcaggcatcctagaggcccttccccttggtctttgtgtgtggcgatagtgaaccctggtgtgttgggttg

SEQ ID NO: 405824 - DNA, 201 bp, Homo sapiens
gccagtgagaccctctctcaaaaaaaataagaagaaagaaatagtaaatagtattgttactattcagtgagggaaggaattgattagtattaatttcctcytgtgctacaggtgctttttatattcatttaattctcacaactacaagaaaggtggtatcttcatttgcatccatttagcttattttgaatcacttctatt

SEQ ID NO: 405825 - DNA, 201 bp, Homo sapiens
tcattacctcctaatccctttgtgtaggaaaccttgatgcttcatttccaacagctctagcttcagttattaataaatccttttctattttccaactgccmaatggggaaactgagtcacagggtatcagagaatgctgtgaagggaacacagaaggcagggcagcgccagaggttcaagtgcagtaggcccttcatattc

SEQ ID NO: 405826 - DNA, 201 bp, Homo sapiens
gtcagaaacgaatatcatgattatttgggcttcagaggcagacaaacctggggtgaatcctgtttctgtcatttcttctctctgagcctctggttccttctttttttttttttttttttgagacggagtcttaccctgtcgcccaggctggagtgcagtggcatgatctcagctcggctcactgcaatctccgcctcccag

SEQ ID NO: 405827 - DNA, 201 bp, Homo sapiens
tcagctgatctttgtatttttaatagagacggggtttcactatgttggtcaggctggtctcgaactccttaccttgtgatatgcccgcctcaggcctcccmaagtgctgggattataggcgtgaaccaccccgcccggcctataatagtacatttctacatttttggctgtaggtttcaaaaacaagttccattataattt

SEQ ID NO: 405828 - DNA, 201 bp, Homo sapiens
tgaggtgagggaatcacttgagcccaggtggttgagactgcagtgagctgtggccacaccaccacattccagcctgggtgacagagggaaaccccgtctcaaaaaaaaaaaaaaaaaaaaattaaaaacttggtattaggtgggcacggtggcacacatttgtagtcccagctacttgggaggctgaagtgagaggatcgc

SEQ ID NO: 405829 - DNA, 201 bp, Homo sapiens; identical to SEQ ID NO: 90858

SEQ ID NO: 405830 - DNA, 201 bp, Homo sapiens; identical to SEQ ID NO: 90859

SEQ ID NO: 405831 - DNA, 201 bp, Homo sapiens
gatccttatttgtgtagaattgaattgatacctctttatcaccttcctaggactgtagttattgtgggtaaggagggatattaatattaatattatattgkatataattatattatgctatatattatattattatatttatatattataatatataaatatatgttataatatatatttgttatatataatataatatta

SEQ ID NO: 405832 - DNA, 201 bp, Homo sapiens
agcgagtaactcattctgctgtagtattattgaagttcttagaatgccattttgaatttcatttgtgtcttttatattattttagttttatgtttgtgtcmgtggttatataatcacaagtatgcaatttacacaataaaatgccataagagtatcataaaaaaagcttgaggatagatgaatagtgttgaagctttgtag

SEQ ID NO: 405833 - DNA, 201 bp, Homo sapiens
cttcctaggactgtagttattgtgggtaaggagggatattaatattaatattatattgtatataattatattatgctatatattatattattatatttatrtattataatatataaatatatgttataatatatatttgttatatataatataatattaatttaaatctaagtttcaaggactagattattttagtttgat

SEQ ID NO: 405834 - DNA, 201 bp, Homo sapiens
gtaagaaaagtagcagtaaatatatgcatactcgttttttttagacctttgcttttagactgtatttccttaaatctagaattcttttattgtacctttayattttaatgtgctgttttaatttggtgaatactggcgtagctcaccaaattagagggtttattgtatcatttaatttggaaatgtaaagggatgatttct

SEQ ID NO: 405835 - DNA, 201 bp, Homo sapiens; identical to SEQ ID NO: 90854

SEQ ID NO: 405836 - DNA, 201 bp, Homo sapiens; identical to SEQ ID NO: 90855

SEQ ID NO: 405837 - DNA, 201 bp, Homo sapiens
aaatttgcattacttcctgtaaaatttctggtaagaaaagtagcagtaaatatatgcatactcgttttttttagacctttgcttttagactgtatttcctwaaatctagaattcttttattgtacctttatattttaatgtgctgttttaatttggtgaatactggcgtagctcaccaaattagagggtttattgtatcat

SEQ ID NO: 405838 - DNA, 201 bp, Homo sapiens
tcagtttataagacagtgagtatgaagtttttgtgttcagaaacacagaaagcaagatcatgcatgaggaaggaattatggaagggatattcatttatagyatgggataatttgctttttttggcttgaagtattatttgaagatgtaaaaaatttagagcaagtgatagagactcagtacagctggtttccagattcaaa

SEQ ID NO: 405839 - DNA, 201 bp, Homo sapiens
agaacatgcgttttctgataactcacaaccctaccaatgctactctcaacaagttcacagaggtaagattgtggcatggtctactttttggattgatttckaggtaaaatcccattaaaaaattctcttagcacaaagccatttattctgtatttggagtcatcctgccaatcctggtttgaattgggttgggttagttac

SEQ ID NO: 405840 - DNA, 201 bp, Homo sapiens
ttgagacggagtcttaccctgtcgcccaggctggagtgcagtggcatgatctcagctcggctcactgcaatctccgcctcccagattcaagcaattctctkgcctcagccttctaagtagctgggattacaggcgcacgccaccacgcctggctaatttttgtatttttagtggaaacaaggtttcaccatgttggtcagg

SEQ ID NO: 405841 - DNA, 201 bp, Homo sapiens
aggagatcgagaccatcctggctaacacagtgaaaccccacctctactaaaaatacaaaaaattagctgggcgtggcggtgggcgcctgtagtcacagctrctcaggaggctgaggcaggagaatggtgtaaacccaggaggtggagcttgcagtgagctgagatcccgccactgcactccagcctgggtgacagagtgag

SEQ ID NO: 405842 - DNA, 201 bp, Homo sapiens
ttagaattaactttttattcattttgtcctataaaggtagtatttccttatgcagtaattaaggaacactttacaattttcagacacaaagttgaaatttmgtagggatttattttacaggatttgactatactttttcctttttgttgtaatgtgggggttggtaaccactgaagcctagaaaacgaatgtatttacaaa

SEQ ID NO: 405843 - DNA, 201 bp, Homo sapiens
tgccaggcactagggatacagcgatgagctcccatggatttacagtggtgagaagaagagatacagaaactcaaaaggttaagtaacttgtcccaggtcayacagataataattagtgctggattaaaaatccaggtctttgactctaaagcccttgatttttccaatacgtcatactactctctcagtagctcctcttat

SEQ ID NO: 405844 - DNA, 201 bp, Homo sapiens; identical to SEQ ID NO: 90862

SEQ ID NO: 405845 - DNA, 201 bp, Homo sapiens; identical to SEQ ID NO: 90863

SEQ ID NO: 405846 - DNA, 201 bp, Homo sapiens; identical to SEQ ID NO: 90856

SEQ ID NO: 405847 - DNA, 201 bp, Homo sapiens
agtttgacatagagagatgtcagattgatttgaaaggtgtgcagcctgatttaaaaccaaaccctgaacccttttaaagaacaataaaacatattttacaygctctttgtgcatttttttcctccatcctcaagagtttatgtctgtgcttataaagcggagtttaagctgggtgcagtggctcatgcctataatcccagc

SEQ ID NO: 405848 - DNA, 201 bp, Homo sapiens
actgcagcctgcgcctcctgggttcaagcgattctcctgcctcagcctcctgagtagctggattaccggcacacgccaccacgcccagctaattttttgtrtttttagtggagatgaggtttcataatgttggccaggctggtcttgaactcctgacttcaggtgatctacctgcctcggcctcccaaagtgcagggatta

SEQ ID NO: 405849 - DNA, 201 bp, Homo sapiens
tgtattcttttgttaaaaatggaaatgttgcctaggaaatggaaatatcccaaattcaacattttaaaagttaggttttatgataaaattaaatggagagrgagtatttgggtgtatatttgaatttaccactgttatatgtcaagtaaactagcctttttcatcacttggtaagttaaaacaataatttatttaagtaga

SEQ ID NO: 405850 - DNA, 201 bp, Homo sapiens
aaaaaaaatcatagaattaatgatgatgagatatatttactgtattaggcagataccagctactttagtatacaggaaaaagaaagctcatgcgttgcatkggtaatatgcagttacaggtttttaaaaatcctttcactccaagacttatggatacttacatacaggtttctttctgcagggcacctgtgctggttgcac

SEQ ID NO: 405851 - DNA, 201 bp, Homo sapiens
aaaatcaacttgttttgacagatggcagagtgagaaaatgactggattgaccatagtctgtttgagtcagtaatgttggtaaacatctttgtgaaatagawatgaactaaagaacttgaactagtttgaggaagataatggtaggcctaagatttattccaggcctttaaatttaggtttttgttttgttttaaatagctg

SEQ ID NO: 405852 - DNA, 201 bp, Homo sapiens
ccaaaaaaaaaaatcatagaattaatgatgatgagatatatttactgtattaggcagataccagctactttagtatacaggaaaaagaaagctcatgcgtkgcattggtaatatgcagttacaggtttttaaaaatcctttcactccaagacttatggatacttacatacaggtttctttctgcagggcacctgtgctggt

SEQ ID NO: 405853 - DNA, 201 bp, Homo sapiens
ccctgtaatgggctttataaaaacatcatttcctttgttaaatttttttaaaaagatagaacttcttctagtcatcaattcttgggcattttcctagctcwtcaaaaggattttcttgaaaacgtctagcacctttttagcatttgataaggaaatattaaaatcaattggtaatgaaaattctgacacattggagataag

SEQ ID NO: 405854 - DNA, 201 bp, Homo sapiens; identical to SEQ ID NO: 90853

SEQ ID NO: 405855 - DNA, 201 bp, Homo sapiens
tttgaattggtctgaaattctcagcccggtcaaggcttctccagagttatctaaccaaagactaagcacctttctcaagtcacactaccatggttccttcrctgtttctaccagttttctattataaaagttttacctttcttcagaagtcttaatcctactccattcttctcacgcttactttgtatctttaaaatttgt

SEQ ID NO: 405856 - DNA, 201 bp, Homo sapiens
taagattaggcttttttgtgaccctttctttgctagttgagcctggtttgaaaaaatattttgaacatttagaacagtctttacctttagagaagtggtgyatttaattcctctcatagtattttttatttgaacttttagtcttctcaagacattaattcttttggcataaaatgtacacatgatatatttgttttagca

SEQ ID NO: 405857 - DNA, 201 bp, Homo sapiens
ctctcacataccaccccagcccttttcccagcactgcaccccagtttcccagggggctgcctccgcccaccaggttctggctgtagcaggctgggaaaccrgtccaacctgttctcaacagggctcactgggaggaccagggatgggcttttctctctttatgtccagtgagctgtagtgttggggaaggggtctcagggt

SEQ ID NO: 405858 - DNA, 201 bp, Homo sapiens
cctcacaaggacagcacagtttttgcagcttagagatcacccacctgcccctacctagctactcattctgctcagcgctggctggtgtagggccactctcyggccccgagggagtggatggctctgtagcctggggccctgcctcttcttctgaggctgcactagcctctgcccccttggcctggggttcctggctctcag

SEQ ID NO: 405859 - DNA, 201 bp, Homo sapiens
aaggctccacttccaaacactgttggcattggggaatatgtttccaacacatgaattttgggggacacattcagaccataacaatcagcatatggatagtkattttatttgtttgtttgtttgtttgtttgttgtagagatgttgtcttgccatgttgtccaggctggccttgaagtcctgggctcagcctcccaaagtgt

SEQ ID NO: 405860 - DNA, 201 bp, Homo sapiens
tcactttgagagccttgaccagaagttctgacctaatatttagcaagtgaaaatgggaacacaaataaatgcatttagggggcttttggtgaaaacatgayaaaagggattggtaaaaaattgggagacattctcatccattttacagacatgtaaactttcccagtcacacagcaaggtgatggtagaatgcagaatgga

SEQ ID NO: 405861 - DNA, 201 bp, Homo sapiens
atatgactaaccagaacacgaatgagtacctggagaagatcaagtgagtatatcctccagccaccccttggttgaacattcctgactttggtttgtccctsaccagagccctgctactctctcccattggccacagacagcgactgtttgagaaccttagaatgctgccgcacgcacctggggtccaaatgcaggcgattc

SEQ ID NO: 405862 - DNA, 201 bp, Homo sapiens
ggcggggatgagaggcaaatcttcccaaggatcccaggaggggcatcgaagagcatcagggtaaaagaccccaagtccccagagccccagagggagcctgrtccccaggggatgccctgtatccccaccagacatcccaggaggctggggagggggcgcctgggagcctgatccctcagcaaatccaggtcccagcagaat

SEQ ID NO: 405863 - DNA, 201 bp, Homo sapiens
taccgtgacttctccacagcttgccactaagggaaggatgtcatgacctgctctctgtctcagccacaatagggaacccacaatgctgccaggcgctgccygcaccagctggctgggctcagagggacggagggtgtgtgagtcttgcacgggttggggtcagaggttaagagcagaacctaaggcttctgatccccaggc

SEQ ID NO: 405864 - DNA, 201 bp, Homo sapiens
gaccttcctccccattataaaagggcaacagcattttttactgattcaagggctatatttgacctcagattttgtttttttaaggctagtcaaatgaagcrgcgggaatggaggaggaacaaataaatctgtaactatcctcagatttttttttttttttgagactgggtctcactttttcatccaggctggagtgcagtc

SEQ ID NO: 405865 - DNA, 201 bp, Homo sapiens
agtttcgctcttgttgcccaggctggagtgcaatggggcgatctctactcaccacaacctccgtctcccggcttcaagcgattatcctgcctcagcctccygagtagctgggattacagggatgtgccaccacgcccggctaattttgtatttttaggtttctccatgttagtcaggctggtctcaaactcccgacctcag

SEQ ID NO: 405866 - DNA, 201 bp, Homo sapiens
actttggtttgtccctgaccagagccctgctactctctcccattggccacagacagcgactgtttgagaaccttagaatgctgccgcacgcacctggggtycaaatgcaggcgattcctgaggacgccatccctgaggagagtggcgatgaggacgaagacgaccctgacaagcgcatctcgagtgagacccagacctaga

SEQ ID NO: 405867 - DNA, 201 bp, Homo sapiens
ggcgggtggatcacgaggtcaggagatcgagaccatcctggctaacatggtgaaaccccatctctactaaatgtacaaaaaattagccaggtgtgatggcrggcgcctgtagtcccagctacttgggaggctgaggcaggagaatggtgtgaacctgggagacagagcttgcagtgagccgagatcgcgccactgcactcc

SEQ ID NO: 405868 - DNA, 201 bp, Homo sapiens
ggtccagcttacaaaggcctctttcagggaccagtctgtccagctctgcagttctaggcagagctaggagccccagcccccagtagtcacctaggatcctrtggaagtcactgtctgcacttttgccctgaggctctgggctgggtcatctcatgccagtctctgctctctccacagggtcaaggaggaggtcaagttggc

SEQ ID NO: 405869 - DNA, 201 bp, Homo sapiens
ccttggcacgtcccatccccaaagagcccccagacccctgacccccttctgatcctaggtatcaccagagggtgctgtacattgacattgatattcaccatggtgacggcgtggaagaggccttctacaccacggaccgggtcatgactgtgtcctttcataagtatggagagtacttcccaggaactggggacctacggg

SEQ ID NO: 405870 - DNA, 201 bp, Homo sapiens
ggctgggtgtggtggcttacgcctgtaatcccagcagtttgggaggctgaggcaagcagatcacctggggtcgggagtttgagaccagcctggccaacatrgtgaaaccccatctctactaaaaatacaaaaattagcttggtttggtggtacatgcctgtaattccagctactcaggaggctgaggcaggagaattgctt

SEQ ID NO: 405871 - DNA, 201 bp, Homo sapiens
tttcagagatggggtcttaggaatctgaacacattctggcctggagagattgcccaataacttattttattttatttatttatttatttatttatttattwgagatggagtctcgctttgttgcccaggctggaacgcagtggcatgatctcagctcaatgcagcctctgcctccgagttcaagcaattctcctgcctcag

SEQ ID NO: 405872 - DNA, 201 bp, Homo sapiens
cctaggtttaaaatgttatcccaagaaaccttgtctgtacaaaaaatatgaaaaaaattagctggtatcctggcctgcacctgtagtcccagctatctggraggctgaggtgggaggaccacttgagcctgggaggtcaaggctgcggtgagctgtgattgcaccactgcactccagcctagatgacagaatgagattttg

SEQ ID NO: 405873 - DNA, 201 bp, Homo sapiens
tacattaaaaaattcagtctggctgggtgtggtggcttacgcctgtaatcccagcagtttgggaggctgaggcaagcagatcacctggggtcgggagtttragaccagcctggccaacatagtgaaaccccatctctactaaaaatacaaaaattagcttggtttggtggtacatgcctgtaattccagctactcaggagg

SEQ ID NO: 405874 - DNA, 201 bp, Homo sapiens
ttagtagagatggggtttcaccgtgttagccaggatggtctggatctcctgaccttgtgatccgcctgcctcggcctcccaaagtgctgggattacaggtrtgagccaccacacccggcctcttttttttatttttaattgagatggggtctcactctgtcacccaggctggagaacaaaggtgaaatctcggctccctgc

SEQ ID NO: 405875 - DNA, 201 bp, Homo sapiens
ttctttttattctttatagcacctagctccatgctgcgcaggaaatataaatattcaaactagattgactggactggccgtggtcaaaaataacttgcccyttctcccttctgccctctagcgccctcacaaagccaatgctgaggagatgaccaagtaccacagcgatgactacattaaattcttgcgctccatccgtcc

SEQ ID NO: 405876 - DNA, 201 bp, Homo sapiens
gtacattaaaaaattcagtctggctgggtgtggtggcttacgcctgtaatcccagcagtttgggaggctgaggcaagcagatcacctggggtcgggagttygagaccagcctggccaacatagtgaaaccccatctctactaaaaatacaaaaattagcttggtttggtggtacatgcctgtaattccagctactcaggag

SEQ ID NO: 405877 - DNA, 201 bp, Homo sapiens
tttagtagagatggggtttcaccgtgttagccaggatggtctggatctcctgaccttgtgatccgcctgcctcggcctcccaaagtgctgggattacaggygtgagccaccacacccggcctcttttttttatttttaattgagatggggtctcactctgtcacccaggctggagaacaaaggtgaaatctcggctccctg

SEQ ID NO: 405878 - DNA, 201 bp, Homo sapiens
gtcaaaacagaggatgaaaaagagaaagacccagaggagaagaaaggtgggtttgggttcagctgggacttgggtctcgagcctgagaggatgaatctatstagggcagtgggaggagggagtgactcaggccctgccagctcctgtggggctcttcctcagttccttgagcctttcagtggctcccagaagtggcagagc

SEQ ID NO: 405879 - DNA, 201 bp, Homo sapiens
tgctctggtgcgccaatttttccgaatccagcattctaaagttgtacattaaaaaattcagtctggctgggtgtggtggcttacgcctgtaatcccagcastttgggaggctgaggcaagcagatcacctggggtcgggagtttgagaccagcctggccaacatagtgaaaccccatctctactaaaaatacaaaaattag

SEQ ID NO: 405880 - DNA, 201 bp, Homo sapiens
ggagggaggatcttttgagcctggaaggtcgaggctgcagtgagccatgattgtactactgcactccagcctgggcaacagagcgagaccaaaaaaaaaaagacattagtgcctatttcatagtcaaggatgggggaataagtgaagataatatatttaaatatatataatatgtctaccctcaatgaattgcttttgcta

SEQ ID NO: 405881 - DNA, 201 bp, Homo sapiens
agggagtgtgtggtggtcaatgttcaaggtgggttaggggggctgaatgtgccagggtgagtgagcagatgggtgtgtgaggccaagtatgcaagggctgkaattttcctggactgctaacttgggagccacgtgatgcccatctgggtgggggccggaggaaccctgctcctctggccctttggatgaattttattgtct

SEQ ID NO: 405882 - DNA, 201 bp, Homo sapiens
ggaaactcgttgcccctctcctgggaaaggaacgtccctccccagggttgcgagtgactcgggcaccatcaccctgtgctgtaaagacctgcgagtgctgmagctggaaatagagggcgcggaagcgacgctgggcatcgcccgctccatcgaggtgtgccgagggagctcccgagccctttaagctctccctgtctcgcg

SEQ ID NO: 405883 - DNA, 201 bp, Homo sapiens
acacccccagactggtccgaagcctcgtgagttcgccctggtcgttgcactccagcctgtcgctgtgcagacctggcttagaggacccctaaggctgaggsgtcacttccagaactgagtccggtccgcaggttctgctacgctccagccagcccctaactggtccccagaagcggcgctgctacagggaccaggagctgc

SEQ ID NO: 405884 - DNA, 201 bp, Homo sapiens
ctggcgggggctcgtccttgggcgcggggcttcatcatggacacgctctcggcccaggccgcgaaacaagcccgcgtgactggcggaggcacagagaccarggccgcttaacctggctggttgcactggtccctggagaggtaaggggcctcccaccctctcccaggccctctcctgcagggctctgtgaatgtacatgtg

SEQ ID NO: 405885 - DNA, 201 bp, Homo sapiens
tcggagcaaagcatggacaactggctgagtcggctggacggctgccgctgactgtaacatgtaaagcaggcactgagcaccacctgcctggcagtccaggrcatggagaggtaaggccccattgacatagagaatagggtgagatgggcagggctctcaacccctggatgcaaaactgtgattcagtaagcaaatatagcc

SEQ ID NO: 405886 - DNA, 201 bp, Homo sapiens
aacagaggttgaaagcagagtggaatcatttgggctcaaattccagtttcaccactcacctgctgggtgttcatagcaaacccgtctgagtctcaatctcrtcggtagcatgaaggggataagagcagccataatctggccgggcgcggtggctcacgcctgtaatcccagcactttgggagctgaggcaggcaggtcacc

SEQ ID NO: 405887 - DNA, 201 bp, Homo sapiens
gcacggtgtgagtcaccgtccaccacctgctcctgtcgccagggcccgcgtcctctccggacctgtggctgctgctgttgcgtagcgtcgactccttcgaraagcagtgagacgtggcggggtgggggagggtccccggggttggggagcgcgcggcttggcggagtagggggcacggccagcgcagtcagagctggcgcc

SEQ ID NO: 405888 - DNA, 201 bp, Homo sapiens
ggacccctaaggctgaggggtcacttccagaactgagtccggtccgcaggttctgctacgctccagccagcccctaactggtccccagaagcggcgctgckacagggaccaggagctgctgcgaactgcgctggcgggggctcgtccttgggcgcggggcttcatcatggacacgctctcggcccaggccgcgaaacaagc

SEQ ID NO: 405889 - DNA, 201 bp, Homo sapiens
gtccccaaacagcactggtgattttagagtcattgcaagggatcttcatgtagggctcattgttgtctgtgtggggcagtagatgttaggccctgggctcyagaactgtaccctttacctcaaccccagccctattcccagccctcaccaatctggctcggatcccgcaggtcaaaaaagctcacaaagcactggtagccc

SEQ ID NO: 405890 - DNA, 201 bp, Homo sapiens
agcttgtgccccagatacccccgtgcggtgatcgtgccatacttggtggacgatgatgccctggcgcgcagcgcccgcttccgtcagggaggtcgcttccyggtgctcagctaccacccggctcccagcggcagagggagcgcgccctccccacgctccgcccctgggtggctgcgtcctttctgggccttttctttttgg

SEQ ID NO: 405891 - DNA, 201 bp, Homo sapiens
acccaggaaccgctgttagcctcccatgtgctcctggcctgtcactaatctaagggtaacaccaccctcattctaacagcatagttttctctgtttatatrccttctagtggttcacaaactttagcatgcatcagaatcacctagaaagcttgctaagatggctaggccccaccacccagagtttcagattcagtatgta

SEQ ID NO: 405892 - DNA, 201 bp, Homo sapiens
cagggctctcaacccctggatgcaaaactgtgattcagtaagcaaatatagcctagaactgggtccattctattcctggcctggtacatggggctgaaggmacagacagcaccctgcttgtgacttcactggcccaactcatcctggaccccttgagcaagaccatggctggattccaggaactggtggagtggaagtgga

SEQ ID NO: 405893 - DNA, 201 bp, Homo sapiens
gatcccttgagcccaagagtttgagaccagcctgggcaacatagggagaccctgtctctgtacaaaatacaaaaattggctgggtgtggtggctcatgctrgtaatcccagcattttgggaggctgaggcgggaagatcacctgaggtcaggagtttgagaccagcctgaccaacatggagaaacgccgtctctactaaaa

SEQ ID NO: 405894 - DNA, 201 bp, Homo sapiens
cattgaggcaaaactaaattggtttctccctttaaatagaactccttaagaagtaggactttgtcttgttccccttttattctagtgcctagtacaagatytgactagcaataatgtttgcaagaaaaaggagaaaagtaaaggttatcactgctccaaagtggctgtcaccctactaaccagggctgcccacccagactc

SEQ ID NO: 405895 - DNA, 201 bp, Homo sapiens
  misc_feature (1)...(201): n = A,T,C or G
cctgacggttccgggccccgcgaagcttagtcccttctttgtcaagccaggacccgcccacggtctattcatagggtcccaaaccactttggccacaacanccccagactggtccgaagcctcgtgagttcgccctggtcgttgcactccagcctgtcgctgtgcagacctggcttagaggacccctaaggctgaggggtc

SEQ ID NO: 405896 - DNA, 201 bp, Homo sapiens
gcaacagcgaaaaggagaggtgagctgagggggtgttgaggtagcttaggggcaggcacaggaaagggttggatacctgtgccatcagtgccttacttccttttttttttttttttttgagatgaagtctcgctctgtcacctgtcgcctggtctggagcgcagtggcacgatctgggctcactgcaacctttgcctccct

SEQ ID NO: 405897 - DNA, 201 bp, Homo sapiens
ttctgtgagaatcttctctggcctggttggagatccaccttcttcttttttttttttgagacggagttttgctcttgtggctcaggatggagtgcaatgaygtgatctcagctcactgcaacctctgcctcctgggttcaagtgattctcctgcctcagcctcctgagtagctgggactataggcgtgtgccaccatgcct

SEQ ID NO: 405898 - DNA, 201 bp, Homo sapiens
catattggccacgctggtcttgaactcctgacctcaagtgatccgcctgccttggactcccaaagtgctgggattacaggagtgagccaactcgcttggcttttttttttttttttttttttgaggcagagtcttgctctgttgcccaggctagagtgcagtggtgcgatctcagctcactgcagcctccgtttctcgggt

SEQ ID NO: 405899 - DNA, 201 bp, Homo sapiens
cccaataataatagtgtgcaggtttgttacatgggtatattgcatgaggtttggggtacaattgatcacatcacccaggtggtaagcatagcacccactayatagttataagttttttgagacagggtaggtctctgtccctcaggctggagtgcaatgttgcgatcactggtcacggcagttttgaccgctcgggctcag

SEQ ID NO: 405900 - DNA, 201 bp, Homo sapiens
attagttcatcccattcttcatattgatcattgtttttggatattaaataatagtactgtaataattaagaaagatggaaagcctcaccaatttgcatgtyattcttgtgcagggaccacgctaatcttctctgtattgttccaattttagtatatgtgctgctgaagcgagcactccatttctgtaaagcttaaaaaatg

SEQ ID NO: 405901 - DNA, 201 bp, Homo sapiens
atggaaatcagaataatggttatctttggtggtgaggacaggggagattgtaggtatgctgctaatgttctgtgtcttgatctggatcttgatttcatggwtgtgttcagtttatgagaatcatcgagtagtagacttaggaaaggtgcacttctttgtatgtatattatacctcagttaaaaacttttgcctcgcaaaat

SEQ ID NO: 405902 - DNA, 201 bp, Homo sapiens
aatggatttaagtgtaacgtactatattatatatatatataacatacatgtagtagaaatgcaagctggaaaacatctcattttagcaagacttatttccygagaatccactgtttaagatgatcttctctgtatcattcctttagtagttcagaatttgaataactagatatatttgaattaggtgggtataaacccatc

SEQ ID NO: 405903 - DNA, 201 bp, Homo sapiens
gccataagcccactctgtcatttggggcaaacaatagtctcccactggcattctgatctgtagttcttttctataagcaagaaaagattactgttctggcwcccttcagcttctatgtcattgcatcattgcaaatcatagtcagttatagcatctaaaagtagtactctgatcttgtgaattcggtgcctgagagatata

SEQ ID NO: 405904 - DNA, 201 bp, Homo sapiens
gagttaatggatttaagtgtaacgtactatattatatatatatataacatacatgtagtagaaatgcaagctggaaaacatctcattttagcaagacttayttcctgagaatccactgtttaagatgatcttctctgtatcattcctttagtagttcagaatttgaataactagatatatttgaattaggtgggtataaac

SEQ ID NO: 405905 - DNA, 201 bp, Homo sapiens
ttatatatatatataacatacatgtagtagaaatgcaagctggaaaacatctcattttagcaagacttatttcctgagaatccactgtttaagatgatctyctctgtatcattcctttagtagttcagaatttgaataactagatatatttgaattaggtgggtataaacccatcctctttagcttccttatctacttatg

SEQ ID NO: 405906 - DNA, 201 bp, Homo sapiens; identical to SEQ ID NO: 90906

SEQ ID NO: 405907 - DNA, 201 bp, Homo sapiens; identical to SEQ ID NO: 90907

SEQ ID NO: 405908 - DNA, 201 bp, Homo sapiens; identical to SEQ ID NO: 90902

SEQ ID NO: 405909 - DNA, 201 bp, Homo sapiens
tcacgccactgcactccagcctgggtgaccagagcaagactccatctcaaaaacaaacaaacaacaacaacaaaacacactagatcagcaagcagctcttrtgcttgatttaaaatgatgtgtgtagttgtcagctgaggtgtccattgtttagtttaacagtgaatgatttgcattaggtaatgctgtatcattaagctt

SEQ ID NO: 405910 - DNA, 201 bp, Homo sapiens
ctgggcctcgctccagagatgctacagctccatgagtagccataatggacccagttatgaaacaactgcttgttaaaacctattgtctcctacttcctccraacagtttccaagattttcatttcccccaaattcctttcctttaggctaccaaagactagatcatacgacaatctgaccacagcctgtgacaacacagtg

SEQ ID NO: 405911 - DNA, 201 bp, Homo sapiens
acccctgtggacgacagctgtgcaccatacccagccccaggcaccagccctgatgatccccccctgagccggtgagcccagggtgatgccacaggcctgayagcctgtgtgggtgtattcctgtgttgggacgtgtgcagggatggtcagagatcatgatggtatctggctccacagtatctttcttaggtctctgcagtt

SEQ ID NO: 405912 - DNA, 201 bp, Homo sapiens
ccacttggatttgagtagtcgtgatggggaggggaaaggggggaaacacctataaaatcccagcaactgagaattccccaccagctactgtggaagtaatratagtagtgtttagtagaactgcccaatttaactttgtgttctttcagtgtttgaattgctggaattaaattataattaaattgcatgtgagaatgatag

SEQ ID NO: 405913 - DNA, 201 bp, Homo sapiens
cattggtgctgcttctttgtggagatcctgtcagccctgttgggtattccagctgggtgcttgctcttgatcctcatttccagacatcctagaagacttaytggggcatatttaaacctgtgtcctcccccctcctcaggtgctgtaccctgtgtgccatgtgcgtaacctgatgctgtggagtgcagtgtacctgccctg

SEQ ID NO: 405914 - DNA, 201 bp, Homo sapiens
ggtctacagacacatgccaccgcgttcagttaatttaattttattttttgtagagatgatgtctgtgttgcccaggttggtctcaaaactcctgggctcamgcagtgcacccactttggcctcccaaagtgctgggattacagatgtgagccactgcactcaattttttattttattttatttttattttattatatttat

SEQ ID NO: 405915 - DNA, 201 bp, Homo sapiens
tttttcttacagtgctcatagcagttgtatttgaattgtattttcagtgaaatttgttttacattgccatttaaaattggcctttaacagcttcccaactrgcttatatttttttttaatgaaaacataacccatgaggctcagatgctgttgaagaaataaatggtatgttgctgctgacagtagtgcttgcctattgta

SEQ ID NO: 405916 - DNA, 201 bp, Homo sapiens
cacagctggtgattattgatatcattcatttatattaggttagtattgaggcttagttaactatgccaggcactaccctgtgatttattataatacatgtrttaactcatttaatagtctaggattattcccagaggtaggtaaaattatcccaattttactgatgagacaattgaggcaaaattaagttaaataatttgc

SEQ ID NO: 405917 - DNA, 201 bp, Homo sapiens
attataatacatgtattaactcatttaatagtctaggattattcccagaggtaggtaaaattatcccaattttactgatgagacaattgaggcaaaattakgttaaataatttgcctaggtgggttgagttcttgagcctgtgctttaaaaaaaattttttttgagaaagggtctcactctgtcacccagggtggagtgag

SEQ ID NO: 405918 - DNA, 201 bp, Homo sapiens
aggtatgtttgagtatggttctgtgaggttgggaaacacatgtagttttgcaagcaccatgatcaagatacagagtagttcctcaaaaaatttcctcatgmccctttctatagtcagcccatttcctcacctctagtctctggcaaccactgatctgttttttctctgttgtattgtctttttttcagaatttccatgtaa

SEQ ID NO: 405919 - DNA, 201 bp, Homo sapiens
tactttctgttgtttaggagcattccattgtatggatgtacaacaacttgtgtgttcattccccagttcatttgggttgtttccagtttttggtaattacraataaaagtgccataaaagcattgatgcatgcatacatacacatgtgcccatgtattttttttatggtttaaaaaaatatggtgcctagaacttttataa

SEQ ID NO: 405920 - DNA, 201 bp, Homo sapiens
aacaacttgtgtgttcattccccagttcatttgggttgtttccagtttttggtaattacaaataaaagtgccataaaagcattgatgcatgcatacatacrcatgtgcccatgtattttttttatggtttaaaaaaatatggtgcctagaacttttataactttattagagaacctgaaaaagctggtgattttcacagaa

SEQ ID NO: 405921 - DNA, 201 bp, Homo sapiens
aataaatgtaagaagcaaaaatattcaaagatgatagaataagtagcaaggggagttgattttagcaggaagatggacaatgttcagaggggtatgtgtgtgtgttgtgtgtgtgtgtcttggttttaaacatggtagcagttagacaatgaagttacaagtgtgttagacagttggagctttaggacagggttgagtagg

SEQ ID NO: 405922 - DNA, 201 bp, Homo sapiens
acgttgttctaggtggcaaattaatcttttatcagtaccacaaattgattgttggccctttgcggaaatagcaggaatatgtctttttcattttgttgaakggtagctcagagataaaacatttacataatctgaaaatatttttcagagataagactaagtgactgtgtataccacagtgatagattgatccactttgat

SEQ ID NO: 405923 - DNA, 201 bp, Homo sapiens
atttatttaatacatgttttctccagaatgtgcttcccaaaagttaagagtgcttttatttatttaagaaatatgttaatttttcttttcttttcttttctttttttttttttttgagacaaattctcactctgttgcccaggctggagtgcagtggcacagtctactgcagcctcgaccttccaggctcccacgaccttc

SEQ ID NO: 405924 - DNA, 201 bp, Homo sapiens
ggacttttttctagaaacctgaaattttaatcctgaatcttcaatcttataagtctgccctgggtcattttaaacatttgaggctaatcttgctatgcttktgttactttgttctctggccccatgactaattgaagcttttggttcacattcttgttctattaaaatgcttgtagcattagcattatcttatgtttaaca

SEQ ID NO: 405925 - DNA, 201 bp, Homo sapiens
acgattgcttgagcccaggagttggagaccagcctgggcaacgtagggagacttgtctctacaaaaaataaaaaaattagccaggtgtggtagcacacgcytgtggtcccagctacttgggatgctgacatgggagggtcccttgagtctggaaggtcaaggttgcagtgagccatgatcacgatactgcagtccagcctg

SEQ ID NO: 405926 - DNA, 201 bp, Homo sapiens
gaaggtcaaggttgcagtgagccatgatcacgatactgcagtccagcctgggtgacagagtgagactgtgtctcaaaaaatttttttttaattttgtgtawattagcttgatttgggtttttttttttttacttacaactgagaattttgaccagtatatttaatgttagtctgaccatttctccagtgggctttctacgt

SEQ ID NO: 405927 - DNA, 201 bp, Homo sapiens
gcaatccacagtcagcttagaactctagtctttttcaggagcctcattggctgacactaagccataagcccactctgtcatttggggcaaacaatagtctyccactggcattctgatctgtagttcttttctataagcaagaaaagattactgttctggctcccttcagcttctatgtcattgcatcattgcaaatcatag

SEQ ID NO: 405928 - DNA, 201 bp, Homo sapiens
ccattacagcttatagaaagtgttgaatgccgagatatatttcagcttcatttgacttgcaaagactgcaaagttatcaggtatgtggtatggtatgtttrtgttgctgtttagtgtggaaaatattttttaaagaatgggtccattatttggtaacttagtaaaataccttttgatgattagcctcattaggaatatttt

SEQ ID NO: 405929 - DNA, 201 bp, Homo sapiens
tgggattacaggcatgcgccaccatgcccggctaattttttatttttagtagagacggggtttctccatgttggtcaggctggtctcaggtgatacgcccrccttggccacccggagtgcttggatttataggcgtgagccacagctcctggcctagattataggttttaacatgtgaccccctcccccccaaaaaaacca

SEQ ID NO: 405930 - DNA, 201 bp, Homo sapiens
atttctgtgcagtgaaaagttgtaagcctccttcaagtaaagtttactcttgggacttttttctagaaacctgaaattttaatcctgaatcttcaatcttrtaagtctgccctgggtcattttaaacatttgaggctaatcttgctatgcttgtgttactttgttctctggccccatgactaattgaagcttttggttcac

SEQ ID NO: 405931 - DNA, 201 bp, Homo sapiens
tatggctcttttcaaatttgggggtttttcttaaagagaaagtttacaaacagtgatgtgtacaaatcttacatgtacagtttctgagtttttaaccattkcatcttctttattaaatttttagtttctaccatctcctaggataatgaacttaatgagtgcatcctactgcattatgttatataagaactttaatttgtt

SEQ ID NO: 405932 - DNA, 201 bp, Homo sapiens
tgccctgaggtgggatgactttggtccccagacccttccccttcctgatgatatctggtattctttggccatcaggacataaagatatctacagtgttctytgtcttttcgtaggtttgtgatgcaagggcatgtgaggggtaaagtactgacttaggaattaggaaacctgaatttaaatgcgtattctacgatttagtt

SEQ ID NO: 405933 - DNA, 201 bp, Homo sapiens
ctagcctgctagaagtagaatgtatcagagaggagagaaatgagaaaattacataattgtcttagtattcatataaatcttagtttctggctgttgaaccrgtcatagttaagccggctgtactgtggtcacagctctaaggcttaatcagctttggaagaagtttcaacattgctgttggagtttacctgtgaaacctgc

SEQ ID NO: 405934 - DNA, 201 bp, Homo sapiens
gaattaaagactccttgtctgttttttttgttcgttttgttttgtttttttcccctttttttgagacagggtctcactctgttgcccaggctggagtgcartggtgtgatgatggctcactgcagcctcaacttccctaggttcaggtgatcctcccacctcagcctctcaagtagctgggactataggcatggaccacca

SEQ ID NO: 405935 - DNA, 201 bp, Homo sapiens
ctaaaaataatgctgtttttttttaaacttgatctaatatgttactacaaaacaaagatttttctaaacatattttttatgagggacaaccataaaacttygatggaagaagtagaatgaaactccactcatgaaagagaatagctgccatttttctgtaataattgtcattaatcttagaagagatttcattagtctaaa

SEQ ID NO: 405936 - DNA, 201 bp, Homo sapiens
agatcgagaccatcctggctaacacggtgaaaccccgtctctactaaaaatacaaaaaattacccgggcatggttgcaggtggctgtagtcccagctactkgggaggctgaggcgggagaatggcatgaacctgggaagcggagcttgcagtgagctgagattgtgccactgcactccagcctgggcaaccgagcgagact

SEQ ID NO: 405937 - DNA, 201 bp, Homo sapiens
atttagttttcagaattattcatagatttataatctggcaaaatataaggaaattataagtatattgataaatcatgacataactggcaagaattggtatraagacaagatggttataacttgaaatagggttgttatttattctatgcctatcatttttccatgagataaaccaaatatttaattgtttagactgattcc

SEQ ID NO: 405938 - DNA, 201 bp, Homo sapiens
tgagccatgatcacgatactgcagtccagcctgggtgacagagtgagactgtgtctcaaaaaatttttttttaattttgtgtaaattagcttgatttgggtttttttttttttacttacaactgagaattttgaccagtatatttaatgttagtctgaccatttctccagtgggctttctacgtatttaaaaaatagtttg

SEQ ID NO: 405939 - DNA, 201 bp, Homo sapiens
cttttaaaatacctttttctttttttaaaatttttaccacaatcatgactacatatccttgtaaaatattaaaatgtaatgctaaaatctctagcctttgtttttttttttttttttttgagacgacgtcttgctttgtcgcccccacagaagtacagtggcatgatctcaggtcactgcaaactccacctcctgggttca

SEQ ID NO: 405940 - DNA, 201 bp, Homo sapiens
cattgatttaagttataagatgatatcagattcatactggattgaactagaactcccagtaactttagaggctaccaaattattaacatgtcattgctatwtttaatcttaattttgtgatatcaatactgatatgctttcatctttgcttttgtatctagaaacaatataccttttaagttcatatttgtatcagatatt

SEQ ID NO: 405941 - DNA, 201 bp, Homo sapiens
accaccacgcctgtctagccatcatttttaatcccgttcttttctcatcgtctgtacgggtaatcactacattttttttttcttttttttttttttttttwagacaaagtcttgctcttgtcccccaggctggagtacgatggcatgatctctctggtcactgccgcctccgcctcctgggtagtgattctcctgcttcag

SEQ ID NO: 405942 - DNA, 201 bp, Homo sapiens
agtatattgtcaaggtactcttcaaagtagctttagcagttttaccattatcaaaagtgtgtacaattgctcacttttggctgggcatggtggctcatgcstgtaatcccagcactttgggaggccaaggtaggtggatcacctgaggtcaggagttcaagaccagtctgggcaacatggtgaaacgctgtctctactaaa

SEQ ID NO: 405943 - DNA, 201 bp, Homo sapiens
gctttagcagttttaccattatcaaaagtgtgtacaattgctcacttttggctgggcatggtggctcatgcctgtaatcccagcactttgggaggccaagrtaggtggatcacctgaggtcaggagttcaagaccagtctgggcaacatggtgaaacgctgtctctactaaaaaatacaaaaattagctgggcggggtggc

SEQ ID NO: 405944 - DNA, 201 bp, Homo sapiens
ggccaaggtaggtggatcacctgaggtcaggagttcaagaccagtctgggcaacatggtgaaacgctgtctctactaaaaaatacaaaaattagctgggcsgggtggcgtgtgcctgtaatcccagctactcgggaggctaaggcaggagaatcgcttgagcctgggaggcagaggttgcagtgagctgagattgtgccat

SEQ ID NO: 405945 - DNA, 201 bp, Homo sapiens
tttagcagagacagggtttcaccgtgttagtcaggatggtcttgatctcctgacctcttgatccgcccatcttggcctccaaaagtgctggaattacaggygtgagccaccgcgcccggcctcatagaaggtttttaaaatggaaatgctcaactctttttagattattattctaacacttactgggaaggtctgaatttt

SEQ ID NO: 405946 - DNA, 201 bp, Homo sapiens
gggattacaggcatgagccaccacacctggctgccaaagctatgttttaaaaaaataattttctatttccgtagtcctcctagaaggggagagagaatcctttttttttttttttttaaagcagattaagaccattggagggaaggagtatgtctaacctgatttttagcccttttttgtaagacagcaatgtcacggatt

SEQ ID NO: 405947 - DNA, 201 bp, Homo sapiens
tttgcttatgaaaattaaactctagctgggcacggtggctcacgcctgtaattccagcactttgggaggtagaggtgagtggatcacgaggtcaagagatygagaccatcctggctaacacggtgaaaccccatctctactaaaaatacaaaaaattagtcgggcattgtggcgggcacctgtagactcagctactccgga

SEQ ID NO: 405948 - DNA, 201 bp, Homo sapiens
aagcaggagatctattcctcagttatgacttttacaaaataatttccatatctgatgcggtttactgtctgattgaatgatctcttctctccatgcccacttttttttttttttttttgagacggagtcatgctgtgtctcactctgtcgcccaggctggagtgcagtggtgcaatctcggctcactgcaggctctgcctc

SEQ ID NO: 405949 - DNA, 201 bp, Homo sapiens
aaaaaaaataaaaaaaaaaaatatatatatccttctcctacgtttccctgcatcattaatcattctgcggtcctcttagctgtctcaaattatgacgggcwttttcctggtctgtttgtggctagccgtcagagttttcactggaaaagctatagctaattgctatacacagttcttaatgtggaccttctccagggagtt

SEQ ID NO: 405950 - DNA, 201 bp, Homo sapiens
aagcagccagttgctgctctggccaacaactgtgttaggtcagcagccctggcatctgtggggcttgctgactttgaccaaaagggggaaggtactcttayttgcaaaataagaggctttaggtgaattctccctttgggaagagaagcttaagagggctggttgaagaaaaacttcctttttttctaaattttattctag

SEQ ID NO: 405951 - DNA, 201 bp, Homo sapiens
gaacagattgagagtaagttacgtaatcatggctcttaaccccaaaatactttagtgtgctttcctaagaatagggatattttcttacataaccataacaytatcaattttcaattttacattgataatacttacatccagtctactatacatgttccaattttgtcagttcacctaatgacctattgatacttttttata

SEQ ID NO: 405952 - DNA, 201 bp, Homo sapiens
gaggttttatttctattttggccccattcagcacgtgagccagttgagcatgttggcaatacacaagtacttacagctacttgtctcccagggagggaggmtttaaaaactacaagcaaactggtgatttcagtggaatttgattagtgccaaatttaacttatttgtgagttttaggagtaaaaacaaattacagtacat

SEQ ID NO: 405953 - DNA, 201 bp, Homo sapiens
aactacaagcaaactggtgatttcagtggaatttgattagtgccaaatttaacttatttgtgagttttaggagtaaaaacaaattacagtacattttcatygtcccaaaaaacccattcacagggcacccagccaccctagccctgaataattaagatgtccaatggatgaagcccctgctagtaaaacatagagtgcttc

SEQ ID NO: 405954 - DNA, 201 bp, Homo sapiens
aaaattgaagcagtaaatacagaaccctagtaaggtatctctgtcctgagctgtaacaccattactgttggaatgctagctttccccaaggagggaccccsctcagtgcctatggcacaggcagaggcaccaggctctttgttcagatgtggtctaagctggaaattgaaagcagctgtaccaaggtgaaatttgaatgtg

SEQ ID NO: 405955 - DNA, 201 bp, Homo sapiens
agtaaatacagaaccctagtaaggtatctctgtcctgagctgtaacaccattactgttggaatgctagctttccccaaggagggacccccctcagtgcctmtggcacaggcagaggcaccaggctctttgttcagatgtggtctaagctggaaattgaaagcagctgtaccaaggtgaaatttgaatgtgtgaacgcattg

SEQ ID NO: 405956 - DNA, 201 bp, Homo sapiens
tggggaagttctttaacttctctgagtctcaggtttaaaatggggctaacaataatacctcttagggctcttgtgagatttcagcaagtgcttataatatyagataaccaatagtaagcactcagtatttgctaattgtggttgtttctactgttattaaagtgataacaacactacagttacacatcctctttcccctaa

SEQ ID NO: 405957 - DNA, 201 bp, Homo sapiens
cttgtgatccaccctcctcggcctctcaaagtgctgggattacaggtgtgagccactgtgcccagcttgtattttttttatgtagacatagggttttgccrtgtttcccaggctggtcccaaactcctgggcttaagtgatctgccaccttggcctcccaaagtgctgggactgcaggggtgagccattgcacttggccaa

SEQ ID NO: 405958 - DNA, 201 bp, Homo sapiens
ggggtgtggtgaaggttcttacaagtttggaagaggtggaagaaaatgttgttacaattgtgtagagtagtgaagggctttggtaaatatcctgtcaaatsatagagtagtatttttagagttgcacccagctgtccattagaagagccagaggccttgtctgttttgttccctggtgtccccagtatccagcgcagttat

SEQ ID NO: 405959 - DNA, 201 bp, Homo sapiens
actcctgacctcaggtgatccgcctgccttcgcctcccaaagtggtgggattacaggcgtgagccactgcacctggcccagaacagttttagtgttttttwaaaaaaaaagtagagatgacctgtaatcccatctggatgtaatgtttggtatttttgttttttttcttatacatatctattgaaataattttaaaaagaa

SEQ ID NO: 405960 - DNA, 201 bp, Homo sapiens
ctgtctacctttggtcacagcagttttgaggcttgggagctatttgttctattcctttttttgtgcttgttcacttttttctttcaaaaaactttgcagattttttttttttttgagtcagggtcttgctctgttgcccaggatgaagtgcaagcagcacaatcatagcttactgcaggcttgagctcctggggttaagtg

SEQ ID NO: 405961 - DNA, 201 bp, Homo sapiens
tgatgattcttagattaaaagataatttttttcttgagttagaataagttgcttttgatctgtggctgcctgccccccaacccctataaattatgacatcrggaaacaaggctttttgtattagaaaaaaatggggaaattaatttcagttatttcatgtgggtcattggcagagaaagataatactaaaatcttagagac

SEQ ID NO: 405962 - DNA, 201 bp, Homo sapiens
atcgagaccatcctggctaacacagtgaaaccccgtctctgctaaaaatacaaaaaaattagccgggcgtggtggcgggcgactgtagtcccagctactcyggaggctgaggaaggagaatggcgtgaacccgggaggcggaacttgcagtgagccgagattgtgccactgcacgccagcctgggggacagagcgagactc

SEQ ID NO: 405963 - DNA, 201 bp, Homo sapiens
tcttttttttttgagacagagtctcactctgtcacccaggctggagtgcagtggcgccatctcggctcactgcaagctctgcctcccaggttcatgccatwctcctgcctcagcctcctgagtagctgggactacaggcacctgccaccacgcccggctaatttttttgtatttttagtagagatagggtttcaccatgtt

SEQ ID NO: 405964 - DNA, 201 bp, Homo sapiens
ttttttgtatttttagtagagatagggtttcaccatgttagccaggatggtctcgatctgacctcgtgatccgcccgtctcggcctcccaaagtgctgggmttacaggcgtgagccaccgcgcctggccttgatgtgtgtatttttcttgtctacgtttgccactcttttagtatataagtttataagttcatagaaattt

SEQ ID NO: 405965 - DNA, 201 bp, Homo sapiens
tctcattaatgtactacctgcatattttttttgcagtatctgtataccaaatgggagtgcatcttaaagacaatggcatgttatggttgaattggaaaagttttttttttttctagtggtatgtaaattaatagtgtgtcttgaatttgatggcatctcagactgaataaaaggtaaaattttaaaaatgctcagtagcgc

SEQ ID NO: 405966 - DNA, 201 bp, Homo sapiens
aatatactccataatgtatgaggataggtttctattaggctgtatgtttgagaaagttttcctcttatgacaaaagttaatttagccagtatgctaaattaaaaaaaaaaaacaaaaaaccctgcctcccagttttctgagttaagtaaaatgatggtgtaagaattttttaaattcaaggtttggtctgtctgaattttt

SEQ ID NO: 405967 - DNA, 201 bp, Homo sapiens
tgaacaactcagatttaagtatgtcttttgttttctgtgaaattataagggttttttccttaggagatagggaacatttctgttttttatttttttatttwtttttttattttttgagatggaatttcactctgtcgcccaggctggagtgcagtggcgtgatctcagctcactgcaacctccgcctcctgggttcaagca

SEQ ID NO: 405968 - DNA, 201 bp, Homo sapiens
cgggatagatacttgattctttccccttacttgctagttttcaaaaataaaaggttagttccttaacatcttccactggtgacctgtaggggtgtgcgtgygtgtgtgtgtgtgtgtgtgtgtgtgtgtgtgtctgtctctgtgtgtgtgtgagagagagaatgtttctttatgaactcatatttaaacatcctgaaaccc

SEQ ID NO: 405969 - DNA, 201 bp, Homo sapiens
gtgccccaggttctctcatttagcataatgttttcatctatgtgtgtcatgtatcagtattttattccattttattgctggataactccattatatatactgtgtgtgtgtgtgtgtgtgtgtgtgtgtgtgtattttttgtttgtttatccattcacattttgtttgtccattcattgattgatgcatatttgggttgtt

SEQ ID NO: 405970 - DNA, 201 bp, Homo sapiens
tgccccaggttctctcatttagcataatgttttcatctatgtgtgtcatgtatcagtattttattccattttattgctggataactccattatatatactgtgtgtgtgtgtgtgtgtgtgtgtgtgtgtgtattttttgtttgtttatccattcacattttgtttgtccattcattgattgatgcatatttgggttgttt

SEQ ID NO: 405971 - DNA, 201 bp, Homo sapiens
cacacgcccgccaccatgcccagctaatttttgtatttttagtagagatggggcttcactatattggctaggctggtctcaaactcctgacctcaagtgayctgcctgcctcggcctcccaaagtgctgggattacaggtgtgagccaccactcctggcctatgaaaatagttttgacccaactagaaccctgaaaaagtc

SEQ ID NO: 405972 - DNA, 201 bp, Homo sapiens
aggtcaaggttgcagtgagccatgatcacgatactgcagtccagcctgggtgacagagtgagactgtgtctcaaaaaatttttttttaattttgtgtaaawtagcttgatttgggtttttttttttttacttacaactgagaattttgaccagtatatttaatgttagtctgaccatttctccagtgggctttctacgtat

SEQ ID NO: 405973 - DNA, 201 bp, Homo sapiens
caacttcagtggcagaggatttaccatccattcagccaactgatgtttgaagcttttttttttttaactgcttcagaactctgaagggtttctttcatttygaaggttcctttccttgaacttcatggagagagcacagagtttgtgggccgtgccgaggatgccatcattgccctttccaattacagacttcacatcaag

SEQ ID NO: 405974 - DNA, 201 bp, Homo sapiens
agcccaggagttggagaccagcctgggcaacgtagggagacttgtctctacaaaaaataaaaaaattagccaggtgtggtagcacacgcctgtggtcccarctacttgggatgctgacatgggagggtcccttgagtctggaaggtcaaggttgcagtgagccatgatcacgatactgcagtccagcctgggtgacagagt

SEQ ID NO: 405975 - DNA, 201 bp, Homo sapiens
ctccccttcttccaaaggtggtgccacctctttgttgccttcatgctatgacatgacttgagaccactgatttagagataaagggaagtcctaattcactwtgtagtaaatcacttgagtactgttgatccagataagtttgcagttctatttttgttgctttcccttatagatctttttaattagtcttgttggacacat

SEQ ID NO: 405976 - DNA, 201 bp, Homo sapiens
atgagatagagatggatcccatggcactgtgcctttgaggccctggtcctgaagtttttttccttgtttctacgcagcatctcattatcctgtgagccatyaaattctgatttttgggctgggtgtggtggctcgcacctgtaatcacagcactttgggaggctgaggcaagacgattgcttgagcccaggagttggagac

SEQ ID NO: 405977 - DNA, 201 bp, Homo sapiens
taatttttgtatatggtgtgaggtagagttcttatttaattctttggtagatggatattcagttgtcccaccaccgtttgttgaaaactgttctttcctcrttgagttgttctagcatctttgttaaataacatagatgttaaataaatgttaaataaattaaccatctatgtaagagtttatttcttgactttaaattct

SEQ ID NO: 405978 - DNA, 201 bp, Homo sapiens
aataagagctcaggcttgggtttgaattgtggttctaccacttacctgtctgtgatcttggggaagttctttaacttctctgagtctcaggtttaaaatgrggctaacaataatacctcttagggctcttgtgagatttcagcaagtgcttataatattagataaccaatagtaagcactcagtatttgctaattgtggtt

SEQ ID NO: 405979 - DNA, 201 bp, Homo sapiens
ctggaatggtttattcttttgaaaaaattcccatctcagagatacactaatgttgatcaggattataaggacaggttataaatctgaatgctattgtaatytgtttcagtctattacattgtagatttttgacttgaaccagtgagttctctaagtgcttctcttttgttctcttaattataaaaattgagatgtaataca

SEQ ID NO: 405980 - DNA, 201 bp, Homo sapiens
atgaactgatgtgatgaatgttcatgtacctacgacctaatttaacaaatatttatccctgtcatagttcagattttaaaaactaactttgctatgttatrtgaaaataataatagttatagaaataatataaggaactctcaatgttcttcaccaattgtttacattttgtttcatgtgctttattatttctccctttct

SEQ ID NO: 405981 - DNA, 201 bp, Homo sapiens
atagttcagtaaataatagctttaaagtatgaaaataatggtatttattcagagtttggtttcgcttaacaaagtaatttatccatttagactacttttawtaagcatatatttttctattatagtatttaagcagagctttgtgtgtaatatattttaactataggtgtcttgtgaattaagaaatggatacttctgtaa

SEQ ID NO: 405982 - DNA, 201 bp, Homo sapiens; identical to SEQ ID NO: 90908

SEQ ID NO: 405983 - DNA, 201 bp, Homo sapiens
ggtacaaccttctcttgagtatacccacacccccctttcttgagtttataattttcgctttgtcataaatctccgtactttcactgtttctgactcattcytgaatttctccttgtgatagtgtcaagagcctggacaccagctgagggagaggtctcactgctctttggggacttcccccagcccgctggtattcagacc

SEQ ID NO: 405984 - DNA, 201 bp, Homo sapiens
ttgcttcaaaggtgtatttaagtatgtttttatttatttatttatttatttatttttgagacgggctctcactctgttgcccatactgatgtgcagtggcrcaatctctgctcactgcaccctccatctcccaggttcaagtgattcttgtgcctcggccttttgagtagctgggattacaggagctcgtcaccatgcccg

SEQ ID NO: 405985 - DNA, 201 bp, Homo sapiens
atgaaaatatgtccacgctggaatttaaaataaactgttttacaatggtatttttgtgtcctaacttaaggtctggttaaggagtgtcatggttcaaactrtttttattataggtttaaataaaataaaaacaaaacaccgtggggccaaaagatgggaaagggactttgttggagctgatagttttattattttcaaaca

SEQ ID NO: 405986 - DNA, 201 bp, Homo sapiens
tgagacgggctctcactctgttgcccatactgatgtgcagtggcgcaatctctgctcactgcaccctccatctcccaggttcaagtgattcttgtgcctcrgccttttgagtagctgggattacaggagctcgtcaccatgcccggctaattttcttatttttagtagagacagggtttcactatgttggccaggctggtt

SEQ ID NO: 405987 - DNA, 201 bp, Homo sapiens
cgcaatctctgctcactgcaccctccatctcccaggttcaagtgattcttgtgcctcggccttttgagtagctgggattacaggagctcgtcaccatgccmggctaattttcttatttttagtagagacagggtttcactatgttggccaggctggttttgaactggcctcaagtgatctgcccatcttggccccccaaag

SEQ ID NO: 405988 - DNA, 201 bp, Homo sapiens
tcgagcctcagcctctcgagtagctgggattacaagtgtgagccactgcacttgccttacttcattaattttaatagctgtatagtattcagtcatatgartgaatagtacacaattttagtcctttattgatagttgttttcaacaaatatacaaaggtaaactttttcctcaaattgggtcaagctatatatattgttc

SEQ ID NO: 405989 - DNA, 201 bp, Homo sapiens
ttttgtttttgttttacttgagttaatttggatgagactttcttgaattacttacatttatagcatttacctccagtggggttgagatgaggagccttcartccaacaaagttgtatacatgcattcatggagatgacacttaggctatttaatcaggaaacactcatacttgtccacatgtagatagtcctattctttgg

SEQ ID NO: 405990 - DNA, 201 bp, Homo sapiens
tttagtttcccaggcaaataatgctgttgtcttcaatcacagtattgattagttcatcccattcttcatattgatcattgtttttggatattaaataatastactgtaataattaagaaagatggaaagcctcaccaatttgcatgtcattcttgtgcagggaccacgctaatcttctctgtattgttccaattttagtat

SEQ ID NO: 405991 - DNA, 201 bp, Homo sapiens
ttgactagtgggaattggctgggtgataatcaactttttcttggctgactctgatcagcttcttaggcctgtgtatatacaatacctttgtgaggatatgrccgattaggggaaaaactattgccaattttgcctcccctcctcttttttttttcttcttccccctcttcccccccacccccagacttcaccataagggaa

SEQ ID NO: 405992 - DNA, 201 bp, Homo sapiens
tagagaacctgaaaaagctggtgattttcacagaacattataaattgcttggtaaactaccctaaaaaagcccactctggaatgagaagaatctgtttgtrtaaataatcttataatataaactgtaagtcattagaatttttttaaattaaagaagtacacacacatacttgttaaatgggtaaatttatatataaaact

SEQ ID NO: 405993 - DNA, 201 bp, Homo sapiens
gccccaggttctctcatttagcataatgttttcatctatgtgtgtcatgtatcagtattttattccattttattgctggataactccattatatatactgtgtgtgtgtgtgtgtgtgtgtgtgtgtgtgtattttttgtttgtttatccattcacattttgtttgtccattcattgattgatgcatatttgggttgtttg

SEQ ID NO: 405994 - DNA, 201 bp, Homo sapiens
ttgttcctctaagtagtagaatggttatataattggttatgaaagtttttttttttttttttttgagacggagtctcgctctgtcgcccaggctggagtgyagtggcgcgatctcctgtctcagcctcctgagtacctgggactacaggcgcccaccaccacgcctggctaatttttttgtatttttagtagagatggggt

SEQ ID NO: 405995 - DNA, 201 bp, Homo sapiens
ccccaggttctctcatttagcataatgttttcatctatgtgtgtcatgtatcagtattttattccattttattgctggataactccattatatatactgtgtgtgtgtgtgtgtgtgtgtgtgtgtgtgtattttttgtttgtttatccattcacattttgtttgtccattcattgattgatgcatatttgggttgtttgc

SEQ ID NO: 405996 - DNA, 201 bp, Homo sapiens
ctgctaattttttgtatttttagtagagatggggtttcactatgttggccaggctggtctcgaactcctgacctcgtgatctgcctgccttggcctcccaraatgctgggattacaggcgtgagccaccacacccggccaaaatgattctttagagtaagtcatctcctaccattcctctgctcaaaatgcctcaacacaa

SEQ ID NO: 405997 - DNA, 201 bp, Homo sapiens
ctgactctgatcagcttcttaggcctgtgtatatacaatacctttgtgaggatatggccgattaggggaaaaactattgccaattttgcctcccctcctcttttttttttcttcttccccctcttcccccccacccccagacttcaccataagggaaagaagagagccttgttggacactgaagaagggacggggatttct

SEQ ID NO: 405998 - DNA, 201 bp, Homo sapiens
accctgtgtcctgacaattaagtgaacactaataaattcatacttacccatttttgtttttgtaagaaattatttctttttctttcccagatctcttgtgtcttttcttttcttgtttacttagtagtaatagagtactccaatatacagagcagtttcatttctgttaactttaatcctgtgagctagatgttgtctctt

SEQ ID NO: 405999 - DNA, 201 bp, Homo sapiens
ccctgtgtcctgacaattaagtgaacactaataaattcatacttacccatttttgtttttgtaagaaattatttctttttctttcccagatctcttgtgtcttttcttttcttgtttacttagtagtaatagagtactccaatatacagagcagtttcatttctgttaactttaatcctgtgagctagatgttgtctctta

SEQ ID NO: 406000 - DNA, 201 bp, Homo sapiens
cctgtgtcctgacaattaagtgaacactaataaattcatacttacccatttttgtttttgtaagaaattatttctttttctttcccagatctcttgtgtcttttcttttcttgtttacttagtagtaatagagtactccaatatacagagcagtttcatttctgttaactttaatcctgtgagctagatgttgtctcttat

SEQ ID NO: 406001 - DNA, 201 bp, Homo sapiens
ctgtgtcctgacaattaagtgaacactaataaattcatacttacccatttttgtttttgtaagaaattatttctttttctttcccagatctcttgtgtcttttcttttcttgtttacttagtagtaatagagtactccaatatacagagcagtttcatttctgttaactttaatcctgtgagctagatgttgtctcttatt

SEQ ID NO: 406002 - DNA, 201 bp, Homo sapiens
tgtgtcctgacaattaagtgaacactaataaattcatacttacccatttttgtttttgtaagaaattatttctttttctttcccagatctcttgtgtcttttcttttcttgtttacttagtagtaatagagtactccaatatacagagcagtttcatttctgttaactttaatcctgtgagctagatgttgtctcttattt

SEQ ID NO: 406003 - DNA, 201 bp, Homo sapiens
atccacatatgattttgtaacatgcattggtcattaggaaaataatgggttcgttgattgaggcagatcttcaaaagttgacattttattatagtgtgtgttttttttttttttttaaatcacacttggtaataccttcactttaaagataaaagttgtaagtactaggaagctataaagttcatggtgggagatgagagg

SEQ ID NO: 406004 - DNA, 201 bp, Homo sapiens
catggatttctcacgtatctggtgaagtggtttaaactgtccaattttatgtgcattgaaagcaaaagctagctgagaaaggaaagcttttctcatcaaakaggttgaaattactgtcgtaaaacagtgataaataccagataagatatgtgatccttgaagtttaataaatatttttggactgttaatttatattcactt

SEQ ID NO: 406005 - DNA, 201 bp, Homo sapiens
atagctgtcaggacttacctgaggttgcactgctagtgagtagctgaaatagtacttgagtccagacatcaggttggatgctgtttccacttttgcagttyactgtcgtgaataagagctcaggcttgggtttgaattgtggttctaccacttacctgtctgtgatcttggggaagttctttaacttctctgagtctcagg

SEQ ID NO: 406006 - DNA, 201 bp, Homo sapiens
tcagtagctaagactacaggcatgtgccaccatgcctagctaataaaaaaaaaaaaagttttgtagagatggagtctcactgtattgctcaggctagtctygaactcctgagctcaagcagtcctcctgcctcaccttcccatagtgttgggattagaggcatgagccactgcacccagcctggttttaatctttaggaaa

SEQ ID NO: 406007 - DNA, 201 bp, Homo sapiens
tactccatcgtgtgtagactctacattttgtttatccatttatctgttgatggacagttgagttgcttctgctttttggctgttgtgaataattctcctaygaatgttggtgtacaaatatctgtttaagtacctgcttttacttcttgtgggtatatacctagaattggaattatttttgtttacccatttatccattga

SEQ ID NO: 406008 - DNA, 201 bp, Homo sapiens
tctgtgacttgtaatacacatggttgattttggtgacttgctggtgtctgcaatctgatttcaatgcatagaaccaacattctaattcttttttcttcaakttaagatgttaaaatatagaaaaaaatatgtatatattgcctgaattttaggtagcaaatgttttgcatggtctgagataattttatgatattaaatttg

SEQ ID NO: 406009 - DNA, 201 bp, Homo sapiens
ttaatttctgtcttggtgggataatgtggcttttttgcttcttattcttttagagtttcccatttttctacaacgagcatgtattacttttatacgtaggmaaaactgctattttattttattttttattttttaagacggagtctcactctgtcacccaggctggagtgcagtggcgtgatctcagctcactgcaacctc

SEQ ID NO: 406010 - DNA, 201 bp, Homo sapiens
gctgtacatttactctatatatttttccccaattgatggatggttaggctgtttctagttttttgtttttacaacctgttggtgtgaagtttaaaaaaaawttttttttaagtttttttaaaatagagacgaagtctcggcatgttgcctaggctgatcctgaactcctgggctcaagtgatccaccctccttggccaccc

SEQ ID NO: 406011 - DNA, 201 bp, Homo sapiens
gtttttttaaaatagagacgaagtctcggcatgttgcctaggctgatcctgaactcctgggctcaagtgatccaccctccttggccacccaaagtgctagrattacaggtgtgagccaccactcctggctcaaagtttttaaaacatgcctcagggaatatgtgcgccgactttgttgaaatatatcaagggaagtagagt

SEQ ID NO: 406012 - DNA, 201 bp, Homo sapiens
ctcaagtgatccaccctccttggccacccaaagtgctaggattacaggtgtgagccaccactcctggctcaaagtttttaaaacatgcctcagggaatatktgcgccgactttgttgaaatatatcaagggaagtagagttacttggctatatggaatacgtagtagtagtcgtagtatattgtcaaggtactcttcaaag

SEQ ID NO: 406013 - DNA, 201 bp, Homo sapiens
acatcacatgagaaagttcctttatgcaccgcttctagttagtctttctctgccctaatccaaactactattctctttcctatcactaaaaattagtttcrtccttgaacttcatgtaaatggaatcatacaatattcttttctaacttgttgctttgagtcaacatcatgcttttgagacttatccaggttgtatcagta

SEQ ID NO: 406014 - DNA, 201 bp, Homo sapiens
ttgctgtgaacatttgtgtccagacctttttgtgataatgtgctttcatttctcttgggtaatacccaggagtagaattgttggatcataggataaatgtrtgcttaacctcataagcagttgccaaactgtcctccaaagtggtaatgccattttacactttacgagccgtgtatgaattccagttactcgatgtcctca

SEQ ID NO: 406015 - DNA, 201 bp, Homo sapiens
cttgtgcaattaatgcaatcatcacagggtcctgaggtgacatacatcctcctcagcttacgaagatgacaggattaaaagattaaagtaaagacaggcayaggaaatcacaagggtattggttggggaagtaataagtgtctgtgaaatcttcataatttatgttcagagattgcagtaaagacaggtgtaagaaattat

SEQ ID NO: 406016 - DNA, 201 bp, Homo sapiens
aactgtaattacttttgcaccaatctaatacttatctccactgcttttatctaccccaagaacttgtcattgtcctaggggagaattaacttttacttctwtctgacttacgtgttagttttgtgatgttttattctagattaagtatcctcacataaagtcatgtttttgataataggggaaaaagtcagacttttactt

SEQ ID NO: 406017 - DNA, 201 bp, Homo sapiens
cccaagaacttgtcattgtcctaggggagaattaacttttacttctatctgacttacgtgttagttttgtgatgttttattctagattaagtatcctcacwtaaagtcatgtttttgataataggggaaaaagtcagacttttacttttgtcttttcttcctacccccacaagaagacaggaagtagatagagatcaaatt

SEQ ID NO: 406018 - DNA, 201 bp, Homo sapiens
cctggcgaatttttcatagaggtgggattttgccgtgttgcccaggctggtctcgaactcctaggctccagcagttctcctgcctcgccctcttaaagtgktggaattacagttgtgagccactgcacccagcctggaaatgtaaataattataatgacatgtagtaagcattataaataagaataactatattgaaatgg

SEQ ID NO: 406019 - DNA, 201 bp, Homo sapiens
tgaactctgcagggaagcttttgcagtaaaaatgttttcaagctggccaggtgcggtggcttacatctgtaatctcaacactttgagaggccaaggtgggaggatagcttgaagctagtttgacaccagcctgggtaaagcgagatccctgtctctataaaaaattaaaaaaaaaaaatgtagccaggcatggtggtatat

SEQ ID NO: 406020 - DNA, 201 bp, Homo sapiens
tgggaattgcaggttaaccgttggtcttctatatgtggctctatgatgtggacaagacttatagctctttactttaactgagacaacaatgttggtgatcsaagtctagaattccaggatagggttgccaaaattaacaccgtgggagtatggaggtagcaactgtgggattagtaatacaaatacaattttaattagctt

SEQ ID NO: 406021 - DNA, 201 bp, Homo sapiens
acaataacattaacattcattaacattcaaaataaaacattcttatactgataagcagtatgcaggttagctaggtttgggatactgatagatattttttkagtgtagtttacttccaaatgtcttctagaatttatgtttaatatctcaaatacctacacagaataggaatggcatgcttatttatacatgggcgtactc

SEQ ID NO: 406022 - DNA, 201 bp, Homo sapiens
tcatcacaagattataattaggaaaatttaagtttccatacttccaaggaagtatgaatttctagaatatcttttatttccatttgatttaggcattgctrttgaagacactgatttggggcaaggtgtcggggagaacaggaggaattgtagttaacttctttcctcttcaccagaggttaactgagagcaagaagcagg

SEQ ID NO: 406023 - DNA, 201 bp, Homo sapiens
acaagttgaggattcagaatgggagtaaccgtggtggaagctttccttctacggacctggatgagaacagccttatagtgactgagggtaactcaagaagytcaatgccatattagttttctagagctaagggaatatacatagtttagtagtaagcacaagtatcgtgttcatgtcagacactgtagctactgcttccta

SEQ ID NO: 406024 - DNA, 201 bp, Homo sapiens
acctaaaagattcagaattggaaggccttaataggatcaatgtgtaggagctgcagagaatatgaaggacttttaaatattccagtcccaaaataaacttsaccattggccaagattgtggtaagctaagtatttgagatgtctgtgctacatcatccaactcttggcctgaactgttttagctggcttgcctatgtaaat

SEQ ID NO: 406025 - DNA, 201 bp, Homo sapiens
aagaccccctctacaaaataataataataattattatccagctgtggtggtgctcacctatagtcccagctactcaggaagctgaggtaggagagttgctygagcccaggacatcaagacagcagtgagccatgattgcaccactgcactctagcctgggtaacagcgagactcccgtctcaaaacaaaaacagaaacaaa

SEQ ID NO: 406026 - DNA, 201 bp, Homo sapiens
atattgttaaaagcagtagttgttccatttaattgctaagtagtagtccattgtatggatattccacaattcctttatttactagttaatggatattgggkttttttttttttccaggttttgggtttatttatttatttatttgagacggagtctcgctctgtcgcccaggctggagtgcggtggcgagatctcggctaa

SEQ ID NO: 406027 - DNA, 201 bp, Homo sapiens
tcaaaattatggggtagattttttggccacattaatagactcccctggaatttgataatctcacttgtgagttttggacatggactgctattacatattgrtgttcaaatgtcctttccagacccaggcctaaattcttactgttgtagtatcttgattctgacatctatttttccacaacccaaacaaacaaaacaaaac

SEQ ID NO: 406028 - DNA, 201 bp, Homo sapiens
ttccctcctttccccattatcacatttttacttgtaaaagcagcctctttgtactattcagccatacctcacacctctgtgttctcttttcggcccaggarcttctgttcatctgtcaaaattcagttcaggtgataacttctcctgtgaagcctttcttagtcccagttccctctgtgacagttaactacactctttctt

SEQ ID NO: 406029 - DNA, 201 bp, Homo sapiens
aatttttgactgggtacagtggcttacgcttgtaattccagcactttgggaagctggggcaagaggattgcttgagcccaggagtttgagaccagcatggrcaacatagtgagacctgtctctacaaaaatataaaaataaaaaaattagctggtcatgctgatgcgtgtgaatagtgccagctactcaggaggtagagtt

SEQ ID NO: 406030 - DNA, 201 bp, Homo sapiens
ttgtcttctggtcttgtaggggaaccagttgggttttcagagctatttattttgggtcagtgattcattgagatgccagaataatgctagtaatttccagstcaaacagcatcactgcttcttttttccctttttttttttttttaagagaccaggactgaacagaggtgatctttccagagaattgttttagcttggaag

SEQ ID NO: 406031 - DNA, 201 bp, Homo sapiens
ataaagatggaagtaccaacccgcttggtacaaccttctcttgagtatacccacacccccctttcttgagtttataattttcgctttgtcataaatctccstactttcactgtttctgactcattcctgaatttctccttgtgatagtgtcaagagcctggacaccagctgagggagaggtctcactgctctttggggact

SEQ ID NO: 406032 - DNA, 201 bp, Homo sapiens
acttcccccagcccgctggtattcagacctttccaaaatctgagtgtctgttgtggaatcatatagagagaaatttttcttggtcattagagtaaagtatrtgcaaattcttttcttcttttccatagctcactgctatttggggacttccctcagcccactggtattcagacctttccgaaatctgagtctctgatgtgg

SEQ ID NO: 406033 - DNA, 201 bp, Homo sapiens
tgaactctggggctcaagctgtcttcctgtcctggcctcccaaattgctaggattataagagtgagccactgcacatggcttctgtatttttttttttttkagctataagtcatatcacataaaatccacccttttaaagtatacaattcagtggtttttagtatagtcataaagctgtagaaccattaccattacctaat

SEQ ID NO: 406034 - DNA, 201 bp, Homo sapiens
tcccaagtggctaggactacaggtgtgcacaaccacctaattttttttttttttcagtagagacagtcttgctatgttgcccaggctggcgttgaactctkgggctcaagctgtcttcctgtcctggcctcccaaattgctaggattataagagtgagccactgcacatggcttctgtatttttttttttttgagctataa

SEQ ID NO: 406035 - DNA, 201 bp, Homo sapiens
ctttgtgagatccaccccctgcccacaaaaatttgttcctaattccactgcctatcccaaacctgtaagaactaatgataatcctaccaccctttgctgamtcttttcttggactcagcccgcctgcacccaggtgaaacaaacagccttgttgctcacacaaagcctgtttggtggactctcttcacacggatgcgtgtg

SEQ ID NO: 406036 - DNA, 201 bp, Homo sapiens
ctctgtcaaatgcttcaggagcagagagtttagccatccaaccgcagaagcttttgatcttggatgcacgctcctatgcagctgctgtggcaaaccgagcyaaaggaggaggctgcgaatgcccaggtgaggtgtatggtgctttgttccccatactttctccttgtgagtgtagcccttgcccaactgagacttagttcc

SEQ ID NO: 406037 - DNA, 201 bp, Homo sapiens
ttttgcattcccactggcaatgcatgagaattccagggctccaaatccttgttgatgcttggtattgtcattcttactaacttaagtcattctagtgggtstgtagcaatacatcatcatggttttagtttgtaatttccagatgactaatgatgattatcttttcatgtgcttatttgccatttatatgtctttggtgaa

SEQ ID NO: 406038 - DNA, 201 bp, Homo sapiens
tgggtctgtgaaacacttcaaattaatactgagagaagtaagtgtagggttgcctttttgtatatactgtgaatatctgagttttcctctgagcagtgctycagttgcagctcacaaaatgacatattgtgtactactattcagtttgaatattttctaatttctcttttaatgtcttttttggcctatgaattataaaag

SEQ ID NO: 406039 - DNA, 201 bp, Homo sapiens
taagaatcctatggcgttatgtctccattttcctatcttctgttctttttgctattgtcatacattttacttttggatatgttagaaaatccataattcarcgttaggcttgtttttatttaaagctttgttcatctgggcctgtagaggagcctttgccctcgggctagttgagctgtgtttataaaggtttcagctgaa

SEQ ID NO: 406040 - DNA, 201 bp, Homo sapiens
tacattttcccctctgaaatcacgaaatgcctcatattgctaatgcagtgagtttaagtgtttaatttagaaaaaattagtaactgctggttgcctcataktgctaatgcggtgagtttaagtgtttaatttagaaaaaattagtaactgctggtgttatttggcatgagatgaacctggaagggaagtgttgaggggcat

SEQ ID NO: 406041 - DNA, 201 bp, Homo sapiens
ggtaccttatggtaccagagagcttctttcagactcacctctacttggccctttttttttctttcaaatgagtctttttttttttttttttttttttttgkctcttaaatttaaaagagacgaggtctcactgtcatccaggctgagagtacagcattgtaatcatagctcgctgcaacctcggactcctgggctcaagca

SEQ ID NO: 406042 - DNA, 201 bp, Homo sapiens
ttatcataatctgtctcatatcatttcatatgttaaaagggaattttaatgaaatacgttactactggttgtggattctaaaaggtagaaggacaaaatawtatttgcctttaagaatacaaagaaaggattgtctgtttgtatggttagttgaattgtcttatttcctatttatttattttttattgctgagatctcact

SEQ ID NO: 406043 - DNA, 201 bp, Homo sapiens
cctcatcctgagacatgctttataaacacacagatttttttgttttggcagtgttatatttggagagagaaatctttggaaattgctttttcatttgacartcattgagcatgatgcagtaaatcataaaaaaatcagcattttctaatcctctcctgtttttatagttggctatcagctcttgaaagcacaaaatggctc

SEQ ID NO: 406044 - DNA, 201 bp, Homo sapiens
ttgattttatgatcttttctagagacactgcaccactgcagccactgcctcaatcatgatacagaacttttacatcacatgagaaagttcctttatgcacygcttctagttagtctttctctgccctaatccaaactactattctctttcctatcactaaaaattagtttcgtccttgaacttcatgtaaatggaatcata

SEQ ID NO: 406045 - DNA, 201 bp, Homo sapiens
tggtaatgccattttacactttacgagccgtgtatgaattccagttactcgatgtcctcaccaacatttgctcttgccagtttctttaattttagttagtycagtggatgtaaaagggtatctcattgtggttttcattttttgtctccctgatgactgatttgagaatacttctcctacatgactttccttttcattttc

SEQ ID NO: 406046 - DNA, 201 bp, Homo sapiens
accacaggaccggggcaaaattaaaattgctaatgaagtttcgggcacgcattgtcattgataacatcttatcaggagacagggtttgagagcagacaacyggtctgaccaaaatttattaggcgggaatttcctcttcctaataagcctgggagcactacgggagactagggcttatttcatccctccgctacgaccgta

SEQ ID NO: 406047 - DNA, 201 bp, Homo sapiens
gaccaaaatttattaggcgggaatttcctcttcctaataagcctgggagcactacgggagactagggcttatttcatccctccgctacgaccgtaaaagayagccgtccccaaagcggccatttcagaggcttcccctcagggacgcattctctttctcagggatgttccttgctgagaaaaagaattcagcgatatttct

SEQ ID NO: 406048 - DNA, 201 bp, Homo sapiens
gctcaggtgatcctcccgccttggcatcccaaagtggtgggattacaggtgtgagccactgcatccggcctccgtgtggacaacttaaggcaagagctagmggggtcttaaagcccagaagagtgagaacagtgtttcgtggttccttttgagacattaatatcttttagattggtgcaaaagtaattgtggtttttgcca

SEQ ID NO: 406049 - DNA, 201 bp, Homo sapiens
gcagtgatactgataacatgcaatggaaagatgagaattaggcatttcaaagaaagcagtgaaaattggtgtcagattttgtcattggaaatagagtcaartggtttctagactggaatacctagaacaactgtgattcccaaaggagtattaaggagctgtggtggggagaagagagaggagagggaggcagatgatgga

SEQ ID NO: 406050 - DNA, 201 bp, Homo sapiens
tttgtccttcattgtataccacacggctagtaacagtgtggtcctcttcctggtgctgctgggttctccatggtgcctagcagaaagtcttcctggtgttktccctggcctgatgctttagacaacgcttgggagttgattctgtgtgtactagttggggagtagcatggccatgtatgtatcttttgtttttgtttagtt

SEQ ID NO: 406051 - DNA, 201 bp, Homo sapiens
tgttctgactgaacagtagtagtgcagaatctgttatccaatcacaggtttgattttaccagagagcttggataaacatattatttctttctcctctttcygacatagctcctttgacaaatgatttttatgttggaaaatgcaagaaaaataagtagctcagattgactttggaaatgtaatattattcttaattcacag

SEQ ID NO: 406052 - DNA, 201 bp, Homo sapiens
tttcttcctgtatgtatttggatggcagtcacatgtattcctctagtttacatgagataaatattactaattttaaaaaggtgggtcttttctgggggtawgttgaattgaagatggtgttcaggtcaagacagtttctggtcttttggccatttaataatctgagaattgctttgaaagggtaggtatttgagctcatca

SEQ ID NO: 406053 - DNA, 201 bp, Homo sapiens
ataaacaatatacttaatatactccataatgtatgaggataggtttctattaggctgtatgtttgagaaagttttcctcttatgacaaaagttaatttagycagtatgctaaattaaaaaaaaaaaacaaaaaaccctgcctcccagttttctgagttaagtaaaatgatggtgtaagaattttttaaattcaaggtttgg

SEQ ID NO: 406054 - DNA, 201 bp, Homo sapiens
cctgaccctggaatggcagttgtgtaagggtaggaactttgttttgttcattgctgtatttctagttcctagaatagtgcccatcactcagaaaaacacgwtgaatgaacatccaccacttaccacagtagctgaatgtagccatgcttttaactctctgctcgtctgttttcatttatagttgacttcaacaacagaggt

SEQ ID NO: 406055 - DNA, 201 bp, Homo sapiens
atgctgaattgtatagtacttaagtttttgatgtataaacaatatacttaatatactccataatgtatgaggataggtttctattaggctgtatgtttgaraaagttttcctcttatgacaaaagttaatttagccagtatgctaaattaaaaaaaaaaaacaaaaaaccctgcctcccagttttctgagttaagtaaaat

SEQ ID NO: 406056 - DNA, 201 bp, Homo sapiens
actgtgtgtgtgtgtttgtgtgtagacaaattgtaagatggtaatctgcatatttacttaaaaatttttttaaattgacaaattacatatatattgtgtayagcataatgttttgaaatacatatataccttgtggaatggctaaatcaagctgattaacatatgtattacttcacatagtatatatgctttatgaattta

SEQ ID NO: 406057 - DNA, 201 bp, Homo sapiens
aagatggagcaacaagccagccacattttcatcaatcctgaggaaatgtaaacagtgcttcaaggcttaaaaaagaaatggtcctctgtaatattgtcctycttctaccttgtgatgtttcctagatccaaactgttttatgctgatgcacagagaaggaattgaaaaggctacattaatttcaagcttcattagggacgt

SEQ ID NO: 406058 - DNA, 201 bp, Homo sapiens
tatggaatcttagtttaagccctcagtttaaatgtattatataattgaggtgctaggtgtacagaggtactagaactacagagcttttctcattaatgtaygttccttctgatgttgaatatttagaaaactgaatattgtgtttggagccaagggatattacacttgaaatatggtcatttggtgaacaggtatctcatt

SEQ ID NO: 406059 - DNA, 201 bp, Homo sapiens
atgttatttctctgcatgtagtttcttgtaaactttatgtggtcataaaactttgctggtccaacactgacttttagtgtgtcaggtttcaaagtgaagtyttaaatttctgtgcagtgaaaagttgtaagcctccttcaagtaaagtttactcttgggacttttttctagaaacctgaaattttaatcctgaatcttcaa

SEQ ID NO: 406060 - DNA, 201 bp, Homo sapiens
gtaacacatcagtactgactgcattcagaacactagctggttgttcatttgaaacagataagaaagttttagttgtaaagtggctggacttgctatttcartatccttcttacattctgtgagaagataatgtgcttactaagcatttagcttcagctgttagcagggcttttggattgagagatgagtcttagaaagtga

SEQ ID NO: 406061 - DNA, 201 bp, Homo sapiens
gagagatgagtcttagaaagtgatctttgggaatatagggtcgagttggctctgattgtctttgtggttgaaactttgacatgtggaagaactctgtttcragaggaagcatttagagaagaagactgaggcatgactagatagaagatttcagtgatcagaggcatgagagccatgggatgcaagttctagatggggatg

SEQ ID NO: 406062 - DNA, 201 bp, Homo sapiens
caggcagaggcaccaggctctttgttcagatgtggtctaagctggaaattgaaagcagctgtaccaaggtgaaatttgaatgtgtgaacgcattgttctgyggagttcttttcaaagagatttcaaagccacaagttagataaggcccaagaagtaaagccagagtgagatcgaagtaggcctttcttttaaaaaataata

SEQ ID NO: 406063 - DNA, 201 bp, Homo sapiens
agtaatgtcctaggccttcacacattcactcactactcactgacatacccagagcaacttccagtcctacaagcaccattcatggtaagtgttgtcctatrcaagtgtaccattttaatcttttgtatcatttttactgtatcttctctgtttatgtatgtttagatatacaaatagggagcactgtgttacagttaccta

SEQ ID NO: 406064 - DNA, 201 bp, Homo sapiens
ttgttcctgggctagagagatgaaagggtttgatctcaaggagctccagcacatgcaaattacacacggcaaagtttgtcttttgaagttggtttccctcygcatacctgctggccaaaactaacattgttctgtttcttctcatctcaaggaattgtgggaacgtattctgctccagttgttgtaaccagaaggttccag

SEQ ID NO: 406065 - DNA, 201 bp, Homo sapiens
aaattcttgacccttctcttagcccctcaaactctaaaaaagtggactgaaagctaaaagcttctctcccatgtccttaacttcctgctcctcattgcaaytgacttgttggtgatggctctgtactagagtgttaatctggaggcctgacagatgactgggcagcttagctgccagtttagtagcatcaggcctacctct

SEQ ID NO: 406066 - DNA, 201 bp, Homo sapiens
ctgtggtagggtgggctgtgtgtggaggttgagggtcggcccacagagcctgcagagtagagggttgtgggtatctcagtgttctgtctgaggcagagccwtggtctcatcttcctgtgcctctgaaattggtgtttgcaaaactgcatttggcatctttgttcaaattcagagtaatcactgttaaattctgaaatgtgc

SEQ ID NO: 406067 - DNA, 201 bp, Homo sapiens
gaatgactcactttcttaggcagtaaaagcaacaaatcaagctgatgaaagtcagacattgaaggtgacctaagaaataactataatgagaaagggatctwaaaaatattttatattttcatgctctcaagtggctcttaggtgaaaaatgttggctatataaaatgtctagtcctgtattggtcctcttgggatagacct

SEQ ID NO: 406068 - DNA, 201 bp, Homo sapiens; identical to SEQ ID NO: 90910

SEQ ID NO: 406069 - DNA, 201 bp, Homo sapiens
cagcgccggccctggcagggagcctggtggggtggcggagggggagactgtgccgtggagggcctcgccatgtcctgctgcccggtaagaaccccatcccygtcctccgtctcctcggcgggtgaggaagagctggaggaggggccggcctcggccccggccctggccaggcggctgtcaccctctgaggaggcagcgccc

SEQ ID NO: 406070 - DNA, 201 bp, Homo sapiens
tggaccgtcagagaatccttgagtatctcaagcttttacttaacttcagagttcttacctgagacagaaaagttgagttttctttcctcaagggcataaaraattttaaatgtacccatttgcataaaatctactcaaagaaaattatcaagtgattttacaggatatttttggatgcttgcacataagagaatcttttaa

SEQ ID NO: 406071 - DNA, 201 bp, Homo sapiens
cctctccatttatacttgctcctgcatttggctttaatgccattcacacactgatgtctcccacatttatgtttatatctctaggctccatcttcttgatmtctagtctggtttaactagcactttacttggcatctttgtttggatatgtgataggttttcaaacataatgtgtctaaaatggaaactttaatttcttgt

SEQ ID NO: 406072 - DNA, 201 bp, Homo sapiens
agtctttcaaaagatcacaaagttcttggtgtagtcatccatgcaaaatcaggcaggtttcctggaactgggctctgtctcagaacatgtgtcttgtatcrctgagatgcagactgggttgctgtagtatttgggagctttgtaaggggcgtgtggaagaatcggatcctccaccatgctctgctttgccagcctaggtgg

SEQ ID NO: 406073 - DNA, 201 bp, Homo sapiens
ttcactacttctatgatgaagatcagattgtttagcatgacatgaagctgtctgacaacgtggcagggaccaaggatcacagcttccctcctttccccatkatcacatttttacttgtaaaagcagcctctttgtactattcagccatacctcacacctctgtgttctcttttcggcccaggaacttctgttcatctgtca

SEQ ID NO: 406074 - DNA, 201 bp, Homo sapiens
ataagtatttcaataaaatatgtgtatttcaataaaatgttagatcaggaggctctctttaaatgttattttatctatatcaaacacatttaaaccatcaragcccagacataccagcatatgttgtggcatgccccagttcatcattttgtatgcttaaatcaaaatacttagcacttcagaaaatgatttaccatcaag

SEQ ID NO: 406075 - DNA, 201 bp, Homo sapiens
aaattaatttacaggttgatttttggggatctgtttgtcaatgtccatgattatttagatgagtttttctatgttcactttaatgtccttacatgtgattwtttttttttttcactaggactcataccaggtcactttttctatatataattgcactgtaatagtgtactggaaaacttgtatttaagttgagattttgag

SEQ ID NO: 406076 - DNA, 201 bp, Homo sapiens
aggcacatagacctatgtgtcagtttcatagtaatactagctttgtcagaatgcatcttagaccctaaagaagtcaaaaggaggctaatcagagttcataytgatttcctggactattaatatggttctcattacatttaagtaatcacagaaaagatttaagctgactgcttgtctctccccttcagtgtgccttctggg

SEQ ID NO: 406077 - DNA, 201 bp, Homo sapiens; identical to SEQ ID NO: 90912

SEQ ID NO: 406078 - DNA, 201 bp, Homo sapiens
atcacaggtgtgagccaccttgcccagccatttcttttgtgtagtatggaatcttagtttaagccctcagtttaaatgtattatataattgaggtgctagrtgtacagaggtactagaactacagagcttttctcattaatgtatgttccttctgatgttgaatatttagaaaactgaatattgtgtttggagccaaggga

SEQ ID NO: 406079 - DNA, 201 bp, Homo sapiens; identical to SEQ ID NO: 90939

SEQ ID NO: 406080 - DNA, 201 bp, Homo sapiens
tcttaagtactcttttcccttaacatggagtatggagtactttaaccacagaggtattgtcttgatgctgataactacggatattcagaatgattctgttrtgacagatgatagcaagcttttctgatttcacttacctggggtcgaaatctaatttctttattagttaatacttttttttttttttttttttttttgaga

SEQ ID NO: 406081 - DNA, 201 bp, Homo sapiens
aaaggttgtttttttcttttgggttgtgataaaactttgtcgtcgttgtttggggacatagtacttgggcaatgtggatagaatgactgtctataaaatartaaggcatgaaactaacgaaaacaaaaagaaaattgtgaaggtgggttaccttaaagctattctgttagtggtgaaatacctcatagctatgttctgaac

SEQ ID NO: 406082 - DNA, 201 bp, Homo sapiens
aacatgcttatgctgttgtaattggcttagtgttgaaatcaaattgggttttacattgggaacttcataatttagtgtgaagtcatgagacttgagaatgrtttggggggagtttgtgcaatttatatagctagctgtttcttaccacctaattctgtaattttctatgatgaatatatagataaatttataatcagtgta

SEQ ID NO: 406083 - DNA, 201 bp, Homo sapiens
atggattttagacattgtccaaaagtgcttccgatgttgaatgtatgttgcaagtgttatgtagaaagaacatgcttatgctgttgtaattggcttagtgwtgaaatcaaattgggttttacattgggaacttcataatttagtgtgaagtcatgagacttgagaatggtttggggggagtttgtgcaatttatatagcta

SEQ ID NO: 406084 - DNA, 201 bp, Homo sapiens
aattgctttaggttccatggattgcccacttgtggattaaatgttagacttctgcaaaatgagttgatggtagagatgaagaaaagtcttaatttgttttytttatgctaaggttaaagttgatgtggctaattaggtattaagatcagttttcctgtctttttattatttatttatgtttatgaatgaatgaatgaagaa

SEQ ID NO: 406085 - DNA, 201 bp, Homo sapiens
tgaacttgtagtaattgctttaggttccatggattgcccacttgtggattaaatgttagacttctgcaaaatgagttgatggtagagatgaagaaaagtcktaatttgttttctttatgctaaggttaaagttgatgtggctaattaggtattaagatcagttttcctgtctttttattatttatttatgtttatgaatga

SEQ ID NO: 406086 - DNA, 201 bp, Homo sapiens
gagaggggagaaaaactcggtgaaaagtcagacaagaggaaatgaagaggtgaggtatgtatagtaagcattagtgaacttgtagtaattgctttaggttycatggattgcccacttgtggattaaatgttagacttctgcaaaatgagttgatggtagagatgaagaaaagtcttaatttgttttctttatgctaaggtt

SEQ ID NO: 406087 - DNA, 201 bp, Homo sapiens
acaggcacctgccaccacgcccggctaatttttttgtatttttagtagagatagggtttcaccatgttagccaggatggtctcgatctgacctcgtgatcygcccgtctcggcctcccaaagtgctgggattacaggcgtgagccaccgcgcctggccttgatgtgtgtatttttcttgtctacgtttgccactcttttag

SEQ ID NO: 406088 - DNA, 201 bp, Homo sapiens
agtttttcttacagtgctcatagcagttgtatttgaattgtattttcagtgaaatttgttttacattgccatttaaaattggcctttaacagcttcccaamtggcttatatttttttttaatgaaaacataacccatgaggctcagatgctgttgaagaaataaatggtatgttgctgctgacagtagtgcttgcctattg

SEQ ID NO: 406089 - DNA, 201 bp, Homo sapiens; identical to SEQ ID NO: 90905

SEQ ID NO: 406090 - DNA, 201 bp, Homo sapiens
cccgcccccagtataatttgttctgaagtatgttttatggaaattatggttaatagcttagtcacattactaacctggttcaatgggactgaggctgtgtrtgcagatagactggcttgtgttggttttgcatacccatggctgcacctgttacctataaggatgacaccctgtttggttcaaatcaaagaatgagttaat

SEQ ID NO: 406091 - DNA, 201 bp, Homo sapiens
tgtttggttcaaatcaaagaatgagttaatcctgtgaagtctctggaaacttgcaattgtgggcttttttccttccctgagggtctggtagaactgacacrgactctcagttctgtaattggactgggcgctcatgtagttagaaataacctatgtacttgttacagcagaagagttgtaatggagtataaagagctgacc

SEQ ID NO: 406092 - DNA, 201 bp, Homo sapiens
attttgctttcttctcttctttaacccctgctccagtttctgtttctttgtccagcactgggcttctttttgatccctgcatcctcattctgagagttctstgctgactggcagctctgtggtggggcagagtttgcaggaagcttgttcctgaaactggctcagctaacacgagggccagcctgtgcagacagtactctt

SEQ ID NO: 406093 - DNA, 201 bp, Homo sapiens; identical to SEQ ID NO: 90913

SEQ ID NO: 406094 - DNA, 201 bp, Homo sapiens
gtgctgggactgtaggaacatgccaacatgcctggctaatttttgtggttttttttgcatgtacgtagagatggggttgcgtcatgttgcccatcttgaaytcctgggctcgagagatccgcctgcctcagcctcccaatgtgctgggatcacaggtgtgagccaccttgcccagccatttcttttgtgtagtatggaatc

SEQ ID NO: 406095 - DNA, 201 bp, Homo sapiens
tttctagttcagtgtcactacagatgagtacattttagttgggacatccgggatgcttgtgagagttttttcagatttctctgaaaaaaatctgaaagacrtaacagtgcatattgataggcttactgtataaacagtggtttcatgagagataaaactttgactctttaaattaattcttcaataactggaggttttgag

SEQ ID NO: 406096 - DNA, 201 bp, Homo sapiens
agtctttgaatttttgtctttcagttgaatcagttcagtgaattcctttcatactatttgatttccagataattttttaaagccttaggagtgtgtttgtrtaatatttttgcttttgaaagtcaattaaggtaaattgtctacaacaaaattcacttcgtatattttggaaaatatatacagttataaaatcaccacctg

SEQ ID NO: 406097 - DNA, 201 bp, Homo sapiens
gttctttaacttctctgagtctcaggtttaaaatggggctaacaataatacctcttagggctcttgtgagatttcagcaagtgcttataatattagataascaatagtaagcactcagtatttgctaattgtggttgtttctactgttattaaagtgataacaacactacagttacacatcctctttcccctaaggatctg

SEQ ID NO: 406098 - DNA, 201 bp, Homo sapiens
cctgttgtatttggactgtattttaaacttactactattcacatgatcttttcctttacatttctccaacttcaagttgtgccactcttctttctgattcrgtacagtttagctacaatggtttcctccttttagttcttcaaaattatcaaggtctttcctgtctgaggaacacatgcacttccgtatattagaaactgg

SEQ ID NO: 406099 - DNA, 201 bp, Homo sapiens
ctaatagtgtcttttggaaaaaagacctgccaaatgtccaagtctgcattaccatagtttttccatcagttgttcttccaattaagaatgatactcaatgaaaaaaaatggctagttcatctcttaattgaagcatttgcacaagtgctttactttgtgacaccgtaatattgcaccatacatcagaggtgttttacttgt

SEQ ID NO: 406100 - DNA, 201 bp, Homo sapiens
ttcctttccttgaacttcatggagagagcacagagtttgtgggccgtgccgaggatgccatcattgccctttccaattacagacttcacatcaagttcaaygagtctcttgttaatgtaagtgattaccagctgttctccctctaaggtaaatggagaaagtaagtcaaaaaacttaatgctctcaaagagaggagaggca

SEQ ID NO: 406101 - DNA, 201 bp, Homo sapiens
cttccagcacagagaagtgtattatgacacgttaaaacagctcaggactgtaattccatgcagactgtgttttggcttcattttgggattctttgaaatcktgttcattcgttttactcagcaattaaaaaaagactcagtggctgtcattttttttttggtagttgacattttttacttcttattatcattcttctttgt

SEQ ID NO: 406102 - DNA, 201 bp, Homo sapiens
gctgaggtaggagaatcacttgaacccaggaggcggaggttgcaatgagctgagatcacgccactgcactccagcctggatgacagagggagactctgtcaaaaaaaaaaaggaaaaaaaaaaaaacacccaaggtaatggctttgtacagaaaaatgatggtgtaaaagtattttggcattgcagtgactttaaaaattt

SEQ ID NO: 406103 - DNA, 201 bp, Homo sapiens
atgtaagggagggattaaattttcatatctattgtttaaagaaatctgtagccaaaggtgtctgtttttagttgggtcattgtttaggactatagacttcrgttttgtattcttagtaatattaaccccttcacctcccctgataacccaagaaaagatccttcgtataagattttaaaaattgcaccagaggagccaagt

SEQ ID NO: 406104 - DNA, 201 bp, Homo sapiens
aatacttagcacttcagaaaatgatttaccatcaagttttaaatagctacctgatatcatatattctcttttaatttcacagcacattgagtaaaatgtgtctgtaggttttgataccgtaaacatcattactttaattcacacattcactgaatatcaagttccagttcctgtggtaaagaatctctgtagtagagttta

SEQ ID NO: 406105 - DNA, 201 bp, Homo sapiens
atacttagcacttcagaaaatgatttaccatcaagttttaaatagctacctgatatcatatattctcttttaatttcacagcacattgagtaaaatgtgtctgtaggttttgataccgtaaacatcattactttaattcacacattcactgaatatcaagttccagttcctgtggtaaagaatctctgtagtagagtttat

SEQ ID NO: 406106 - DNA, 201 bp, Homo sapiens
tattatatatttacagacatagttctttgaagcttagataaattataaacaagtgttcaagtggaattcatgaacgtttaaaagtttgtttgtgtgtgtgtgtgtgtgtgtgtgtgtgtgtgtgtgtgtgtgtatgtgtttgtaatttaatagactgcttctcaatctgctgcttctaaaatccctgtaagtagtatgaaa

SEQ ID NO: 406107 - DNA, 201 bp, Homo sapiens
attatatatttacagacatagttctttgaagcttagataaattataaacaagtgttcaagtggaattcatgaacgtttaaaagtttgtttgtgtgtgtgtgtgtgtgtgtgtgtgtgtgtgtgtgtgtgtgtatgtgtttgtaatttaatagactgcttctcaatctgctgcttctaaaatccctgtaagtagtatgaaaa

SEQ ID NO: 406108 - DNA, 201 bp, Homo sapiens
ttatatatttacagacatagttctttgaagcttagataaattataaacaagtgttcaagtggaattcatgaacgtttaaaagtttgtttgtgtgtgtgtgtgtgtgtgtgtgtgtgtgtgtgtgtgtgtgtatgtgtttgtaatttaatagactgcttctcaatctgctgcttctaaaatccctgtaagtagtatgaaaat

SEQ ID NO: 406109 - DNA, 201 bp, Homo sapiens
tatatatttacagacatagttctttgaagcttagataaattataaacaagtgttcaagtggaattcatgaacgtttaaaagtttgtttgtgtgtgtgtgtgtgtgtgtgtgtgtgtgtgtgtgtgtgtgtatgtgtttgtaatttaatagactgcttctcaatctgctgcttctaaaatccctgtaagtagtatgaaaatc

SEQ ID NO: 406110 - DNA, 201 bp, Homo sapiens
gccctgctagcacttattttacaacctgtaccactatatattagaggttctgcttaatattttttaaaataacatgctgccctaggactgtgtatgttttsaaggaagaaagttattttagatttactgaatttatgttagcttcgtttctacctctgttttgcttttttaaggaagataaagccagattcattagggcaa

SEQ ID NO: 406111 - DNA, 201 bp, Homo sapiens
gaaaggaaacactaacaagctgaaaaaaatcacctaaaattgtggcggttgtaaatctacttcttaaaattttgcacctcttgaatttttaaaatactgcstctacactcaaatttttctctggatctgtttcttaatattaaatgcatgtgtaaaaaaatctattttaacagcgaaagtgaaaagattgttttaaaatta

SEQ ID NO: 406112 - DNA, 201 bp, Homo sapiens
tgtgtactgctatgcccagctttttaaatttttatagagatgaggtcttcccatgttgcctggactggtcttgagctcctggctccagtgatcctcctgcstcagcctcccaaagtgttgggattagaggtatgagtcattgcacccggccagacataatttttaaaaagcaatataatgtccttgctctaataaaaagga

SEQ ID NO: 406113 - DNA, 201 bp, Homo sapiens
gtagtgaaggaaatgtaatcctttttattttatttacgtatttatttttgagacagagtcttgttctgtcacccaggctggagtgtggtggcgcgacctcrgctcactgcagcctccacctgctgggttcaagcaattctcctgcctcagcttcctgagtagctgggattacaggcatgctccaccactcctggctaattt

SEQ ID NO: 406114 - DNA, 201 bp, Homo sapiens
ttaaaatcaaatcacgtcactctgctatttaaaacctgtcaatggctccctgttgtatttggactgtattttaaacttactactattcacatgatcttttsctttacatttctccaacttcaagttgtgccactcttctttctgattcggtacagtttagctacaatggtttcctccttttagttcttcaaaattatcaag

SEQ ID NO: 406115 - DNA, 201 bp, Homo sapiens
caggctggtctcgaactcctgatttccagtgatccatctgtctcagactcccaaagtgctgggattacagatgtgtgccactgtgctggccagaaacgtartaacatattacttggctctgtagcatttaatatttgtattgccataataatgtaaatttgtaaaagtgttaatttttttttttttttttttgacacaagg

SEQ ID NO: 406116 - DNA, 201 bp, Homo sapiens
ttttcctgttctggacatttcatataaatgatatcataacaatatgtggtcttttgtgactcgcttcatcatttagcataatgtttttaaggttcattcaygttgaagcatgtatcagtacttcattcctttctctcttttttcttttttttttttttttgagacagggtctcactctgttgcctaggcttctggtgtgcc

SEQ ID NO: 406117 - DNA, 201 bp, Homo sapiens
ctggttctcttctttattctttttctcttttaatccattcaccccacatcaaccagggtgatcttaaaatcaaatcacgtcactctgctatttaaaacctrtcaatggctccctgttgtatttggactgtattttaaacttactactattcacatgatcttttcctttacatttctccaacttcaagttgtgccactcttc

SEQ ID NO: 406118 - DNA, 201 bp, Homo sapiens
aagttgtgccactcttctttctgattcggtacagtttagctacaatggtttcctccttttagttcttcaaaattatcaaggtctttcctgtctgaggaacmcatgcacttccgtatattagaaactggccttgccccaccaagtagtcttttctgatcactttatctaaagtaggtcttcggtacccccaaaccccagtcc

SEQ ID NO: 406119 - DNA, 201 bp, Homo sapiens
ggtcctattcagtagatctgatgatcacatcaagttttactgcgttctttatttgatttattaaatcagatgctgcctaaaccacttatattgactgccartagcaaatgattaaattcaccgtagttgtcatcagccaagaggatgaagcagtgcctttggggaaagcctgaccggagaattgagcttgctgcctccttt

SEQ ID NO: 406120 - DNA, 201 bp, Homo sapiens
tgctcgcaatgtttcacaatgacacactgtttctaaccaagcagatgtttgactgtggttactgggaagaatagtctttgccagcattaagcccacctacycgaaccttttctgttgaatctctcgtttggtccatctcttggaagttaatcagcacctgtggaaactttacacaaacacttctgtattactgaagatacc

SEQ ID NO: 406121 - DNA, 201 bp, Homo sapiens
tttgggccatgtgaaatgctcaataatttgtagaatgaacaagtagttttacaaacatactgtcagctcagacttgagttgtacactgacgtgctcctgcrcccagttcatatgctgtggcgcttgtgagagtggctgttaattcacaatctcagactatttatcacggaagctaagaggaataggggcaccaacaacctg

SEQ ID NO: 406122 - DNA, 201 bp, Homo sapiens
attcattctattcggaggagttttcagtctctgcggttgctgtgcactcagatgccagatccgggaaagtaagtccttggccttggctttcattttgcatygctcttaaataataagtttgcttctttccttgaactaagggggaaaaaaagaaaaaaaaattaatttggagcagtctttccttctgtttcttggtaatct

SEQ ID NO: 406123 - DNA, 201 bp, Homo sapiens; identical to SEQ ID NO: 90930

SEQ ID NO: 406124 - DNA, 201 bp, Homo sapiens; identical to SEQ ID NO: 90904

SEQ ID NO: 406125 - DNA, 201 bp, Homo sapiens
atgttttaaatatcaaatggagttgtggcaactcagatgggatatggtttatattaatacatctaatatgaattggaagatgcttaggcaaacgatttttrttatgacagtataggcttattggagttttggtgttaatatacagctgggagttgagccgttctaagtttatatagccatctggtgatattttaggaagag

SEQ ID NO: 406126 - DNA, 201 bp, Homo sapiens
tgagggaaagcacaagaaacaaaatgcaacagagtttaaaaagcaagtgtgattagcttgtgattactcccaaggggcagctactgctatctgatactccraaagtgagatggagtctctctctctcatccatgctggagtgcggtggcctgatctcagctcactgcaacctccacctcccgggttcaagtgattctcctg

SEQ ID NO: 406127 - DNA, 201 bp, Homo sapiens
gaaagaaagaaaaggcagtctgtgcaggaagtgctgaagggaaacactgcagtagaaaggagaagaaaagggagatatttgttataaaaatcaggtgtttctcttttgtatgtccctattcttgctgcgtattaagctttcctgcatgtgacagtctgcatgaatattaaaatctgctgttctccgtatctgtgacttgta

SEQ ID NO: 406128 - DNA, 201 bp, Homo sapiens
cctcctgagtagttgggattacaggtacctgccaccacgcctggctaatttttgtatttttagtagagacagggtttcaccatgttggccaggctggtttygaactcctgacctcaggtgatccgcctgccttcgcctcccaaagtggtgggattacaggcgtgagccactgcacctggcccagaacagttttagtgtttt

SEQ ID NO: 406129 - DNA, 201 bp, Homo sapiens
agtgacttggttgaatgtatgtgtatgtatggcttttgccttttatgtatattcgctgtggagtacaaaggaaaaacttggttttaattaaaaacaaaccaaaaaaaaaaaaaaaaaacacctcgaggacatccagtcaacctgtttcttttgtcattacctcatgttgttgagcagtggcggtgtatatagcattactca

SEQ ID NO: 406130 - DNA, 201 bp, Homo sapiens
gcctatttatctgtcttccgggtttgaatgcagtccaggaagttgcatctagaggatttactgtgacctttgtacatagaaaagcataattcctttctccrtatttgaaaatctgctaagaggtagttcttaccttctctgactctggtattggtctgcttcctcacctgccaggtaaaggcctgtcccttctgtcccagg

SEQ ID NO: 406131 - DNA, 201 bp, Homo sapiens
gtggctcacacctgcaatcccagcactttgggaggccaaggcagatcagctgaggtcaggagttcgagaccagcccagccaacatggcgaaacactgtctytactaaaaatacaaaaattagctgggcgtggtggtgcacgcctgtagtcccagcaacttgggaggctgaggcaggagaattgcttgaacctgggaggtgg

SEQ ID NO: 406132 - DNA, 201 bp, Homo sapiens
ggcagatcagctgaggtcaggagttcgagaccagcccagccaacatggcgaaacactgtctttactaaaaatacaaaaattagctgggcgtggtggtgcaygcctgtagtcccagcaacttgggaggctgaggcaggagaattgcttgaacctgggaggtggaggttgtagtgagctgagattgcaccactatattccaac

SEQ ID NO: 406133 - DNA, 201 bp, Homo sapiens
aattacaggagattattattatttttttcaatgtgaaatgtttgtgatttgtccatggagaggtggtggggaccttcccctttcagattcagggctgttcrgtaggacaggagacattgatggcatgcagaaagtcttccctttatagggcctatgacttgggtaggctagaagagcttacagaatgacactttttttttt

SEQ ID NO: 406134 - DNA, 201 bp, Homo sapiens
tgggaagcggagcttgcagtgagctgagattgtgccactgcactccagcctgggcaaccgagcgagactttgtcttaaaaaataaaaaaaataaaaaaaawaaatatatatatccttctcctacgtttccctgcatcattaatcattctgcggtcctcttagctgtctcaaattatgacgggcattttcctggtctgtttg

SEQ ID NO: 406135 - DNA, 201 bp, Homo sapiens
ggggtccactgaagatgcttcccaccattatggttgctcctaaaccatctgactcagatttctagtggagggtaggatgggtgtgttagcaatcatttgakacccgggttgtgaaccaggaagggttactatgtattgtgaaaagttcttgagatttgccgcaggccatgaggagtggtaaagtcagtttaaaaatctgct

SEQ ID NO: 406136 - DNA, 201 bp, Homo sapiens
ggaagcggagcttgcagtgagctgagattgtgccactgcactccagcctgggcaaccgagcgagactttgtcttaaaaaataaaaaaaataaaaaaaaaawatatatatatccttctcctacgtttccctgcatcattaatcattctgcggtcctcttagctgtctcaaattatgacgggcattttcctggtctgtttgtg

SEQ ID NO: 406137 - DNA, 201 bp, Homo sapiens
gagggtaggatgggtgtgttagcaatcatttgagacccgggttgtgaaccaggaagggttactatgtattgtgaaaagttcttgagatttgccgcaggccrtgaggagtggtaaagtcagtttaaaaatctgctgtagttctagttaacacgttcacaccttcttcagtaaagtggaatgctgttaccaaaggaagtattc

SEQ ID NO: 406138 - DNA, 201 bp, Homo sapiens
cccgtctctactaaaaatacaaaaaaattagccagcgtggtggcgggcgcctgtagtcccagctactcaggagactgaggcaggagaatggcgtgaacccrggaggtggagcttgcaatgaaccgagatcatgccactgcattccagcctgggcgacagagcgagactccatctcaaagaaaaaaaaattagttgggcatg

SEQ ID NO: 406139 - DNA, 201 bp, Homo sapiens
actacggatattcagaatgattctgttatgacagatgatagcaagcttttctgatttcacttacctggggtcgaaatctaatttctttattagttaatacttttttttttttttttttttttttgagacagagtctcgctctgttgcccaggctggagtgcagtggcgcgatctcggctcactgtaacctccgcctcctgg

SEQ ID NO: 406140 - DNA, 201 bp, Homo sapiens
attctgttcctatataaaattgaagcattctgtgttttagtagggagggctttatctgttggacatcataatttttatactttgcctggttctgttagtgrtagaaatgcattcctttagtgatttttaactgtagtgtttgaattatctttcatgtagtctgaagcattttagaagactgcagaaaacataattgtttat

SEQ ID NO: 406141 - DNA, 201 bp, Homo sapiens
ctacggatattcagaatgattctgttatgacagatgatagcaagcttttctgatttcacttacctggggtcgaaatctaatttctttattagttaatacttttttttttttttttttttttttgagacagagtctcgctctgttgcccaggctggagtgcagtggcgcgatctcggctcactgtaacctccgcctcctggg

SEQ ID NO: 406142 - DNA, 201 bp, Homo sapiens
tacggatattcagaatgattctgttatgacagatgatagcaagcttttctgatttcacttacctggggtcgaaatctaatttctttattagttaatacttttttttttttttttttttttttgagacagagtctcgctctgttgcccaggctggagtgcagtggcgcgatctcggctcactgtaacctccgcctcctgggt

SEQ ID NO: 406143 - DNA, 201 bp, Homo sapiens
catctctttagaaaaaaaaaaaagatgagatgggaagaatgaagtcagaaaaaaaaaattgataggacttcgtgttgttgctttgagaaaagagaaaaagaaaaaaattgagcatcaattcttaatccttagatatttgatttacaaataatatatgtatagtaactgattattgtggactttataaaatacgaacaaaaa

SEQ ID NO: 406144 - DNA, 201 bp, Homo sapiens
tgactctaaacttttttgggaactgccacacttttcctcagaggttgtaccactttacattcctgccggcagtgtatgggggtttcaccttcacattccayctacatctgacattagtatcttcctcactggagttatattttgttatttaatagttttgcaaaatgcattaaattcacttccatttaaattgtttaagat

SEQ ID NO: 406145 - DNA, 201 bp, Homo sapiens
gtgtactctgggagtcagttttggagaataaatccttctcatctttcataagaaggccacatagaaaaaaagagaaaaatcctatgtatcaagggttttgrttaggggatttcattttattgagccttttttgtgccataagatgtgcttgtgggtctaattctgcacagttctgggagagacaggctcatttagtatgcc

SEQ ID NO: 406146 - DNA, 201 bp, Homo sapiens
tcagaggttgtaccactttacattcctgccggcagtgtatgggggtttcaccttcacattccatctacatctgacattagtatcttcctcactggagttayattttgttatttaatagttttgcaaaatgcattaaattcacttccatttaaattgtttaagatacagcagtttgaatgtgtcaatgatgctatctttaga

SEQ ID NO: 406147 - DNA, 201 bp, Homo sapiens
cagtgagatcatcatccttatgctggctcacctagtgtctctctctctctcccgttttctctctccctctcttatccccttgactctccccacttctcatsttctctttagattatgtggtagctatcctcaagagctcatagtgcctgcctggatcactgacaaagaactggaaagtgtatcaagtttcaggtcctggaa

SEQ ID NO: 406148 - DNA, 201 bp, Homo sapiens
aactcctgacctcgtgatctgcctgccttggcctcccagaatgctgggattacaggcgtgagccaccacacccggccaaaatgattctttagagtaagtcrtctcctaccattcctctgctcaaaatgcctcaacacaatctgggccttgctactgcttttatgttctcttgttcccttgcttacattgcccttaaaagag

SEQ ID NO: 406149 - DNA, 201 bp, Homo sapiens
gtgcctgcctggatcactgacaaagaactggaaagtgtatcaagtttcaggtcctggaagcgcatccctgccgtcatctacaggtaagttaaactggaccrgtcccagcttgggctggtgctgctgcctgctgcatatggtctgctgcctctgctgctgctaacctgggaagggtggggagagttcagagaactttctagg

SEQ ID NO: 406150 - DNA, 201 bp, Homo sapiens
cctcctgggtacaagcgattctcctgcctcagcctcctgagtagctgagattacaggcgcttgccaccacgcccagctaatttttgtattttagtagggaygggatttcaccatgttggtcaggctggtctcgaactcctgacctcaggtgatccatctgcctcagcctcccaaagtgctgagattacaggcatgagtcac

SEQ ID NO: 406151 - DNA, 201 bp, Homo sapiens
cctcctgagtagctgagattacaggcgcttgccaccacgcccagctaatttttgtattttagtagggacgggatttcaccatgttggtcaggctggtctcraactcctgacctcaggtgatccatctgcctcagcctcccaaagtgctgagattacaggcatgagtcaccgcacccggcccttcccatgtactttaaatat

SEQ ID NO: 406152 - DNA, 201 bp, Homo sapiens
aggagtgataccagttttgggagtggtgattcggttaaagaaagtgaaatttctgttttggtcattgttcctttatgccatgagctaaattgtggtggttyctcccacagttcttgcacctcttaaaatggggcagattatgggtaacaaggtattgagaatatagacatattttcctttacagtctatctacttgtaaaa

SEQ ID NO: 406153 - DNA, 201 bp, Homo sapiens
gtaattataggccacttttaaatgtaaaatatttatttagcattaactgtatagcagagttaatggatttaagtgtaacgtactatattatatatatatawaacatacatgtagtagaaatgcaagctggaaaacatctcattttagcaagacttatttcctgagaatccactgtttaagatgatcttctctgtatcattc

SEQ ID NO: 406154 - DNA, 201 bp, Homo sapiens
tgattcctgtgtttcctcactataaaacttgatcttccagaagtcttctctctcaccatatggcatttccatccctccttttgtttggggcaaaattcttygtcatcgtcaagtctcctccctccctccctccctccctccttccctccctccctcttccacattcagtcagattctgcagctctgctttcgcaatctatc

SEQ ID NO: 406155 - DNA, 201 bp, Homo sapiens
ggtcaggagatcgagaccatcctggctaacacggtgaaaccccatttctactaaaaatacaaaaaattagccgggcgtggtggcaggtgcctgtagtcccrgctactcaggaggctgagtcaggagaatggcatgaacccgggaggtggagctggcagtgagccaagatcacgccactgcactccagcctgggtgaccaga

SEQ ID NO: 406156 - DNA, 201 bp, Homo sapiens
aggaggctactgcatggcttactgggttccccgtcctgacagagtaaattgaagtgttctcagggatgttaggataaggtggctcagctgagctgacttaycagagtgtgcatgcctgattgcttaatttgtgcttcattggacttccataggtgaaactggtgcagcatacctattcctgcctgtttggaacattcctgt

SEQ ID NO: 406157 - DNA, 201 bp, Homo sapiens
aaatactgtaatatcaagaaacaccagtgctactttgccatccactgagaaacacagcagcatcatgaagaacgtcttttggaaatagcatttgcaggccrggcgcggtggctgacgcctgtaatcccagcactttgggaggccaaggtgggcggatcacctgaggtcaggagttcaagaccagcctgaacaaaatggtga

SEQ ID NO: 406158 - DNA, 201 bp, Homo sapiens
  misc_feature (1)...(201): n = A,T,C or G
tgtctcgctgcagcacagagattttctctgaagccagctgggagcaggtggataaacaggacacagaggtacaggctcagcccctgctctgagtgccatcnatttaactgttttgtggttcttctccacccccattcccaccccatacccctggccaaggaagcacctcccagcacagctagccctgagcctctggcacct

SEQ ID NO: 406159 - DNA, 201 bp, Homo sapiens
gacacctatctaataagggggtgtgtgtgcacgtgtgttcatcctgtgttcttgtcctcccacctctcctctttcaccctctgagcatgcatcacaggctrcttgtccctggctttgcatgctgccagcagagcagtccaaaatggcagcagtctatctgccatgttgctgcctttgatcctctggagaagtggccgttgg

SEQ ID NO: 406160 - DNA, 201 bp, Homo sapiens
ctttgtccagcactgggcttctttttgatccctgcatcctcattctgagagttctctgctgactggcagctctgtggtggggcagagtttgcaggaagctkgttcctgaaactggctcagctaacacgagggccagcctgtgcagacagtactcttgttcctgtctgcattggaggagactgtcctcctctttgcatacta

SEQ ID NO: 406161 - DNA, 201 bp, Homo sapiens
tgcaacagagtttaaaaagcaagtgtgattagcttgtgattactcccaaggggcagctactgctatctgatactccaaaagtgagatggagtctctctctstcatccatgctggagtgcggtggcctgatctcagctcactgcaacctccacctcccgggttcaagtgattctcctgcctcagcctcctgagtagctggga

SEQ ID NO: 406162 - DNA, 201 bp, Homo sapiens
atgttggccaggctggtctggaactcctgacctcaagtgatccacccacctcagcctccgaaagtgctgggattacaggcatgagccactgcgcccggccyctaaaagtctttcaaaaaaaggttcttcctagatcgctgctgaatccagtctgtgttgagcccagcaatactgtgtggccattggtatactaatttgtat

SEQ ID NO: 406163 - DNA, 201 bp, Homo sapiens
agaaatggagagaagggactggtttctagcactgttgaggagttagctctgatgggggtttgtggctggaaatgggggttccagagggggaggttctcaaggaggtgctttcctctctgggtggacttgactcaggcagctcaagtacaagtgtgagcctggctctcaagtggtcagcgtacattaaaggcgggcacatcc

SEQ ID NO: 406164 - DNA, 201 bp, Homo sapiens
aaaatgatttaccatcaagttttaaatagctacctgatatcatatattctcttttaatttcacagcacattgagtaaaatgtgtctgtaggttttgatacygtaaacatcattactttaattcacacattcactgaatatcaagttccagttcctgtggtaaagaatctctgtagtagagtttatgtgtagcatttaaggt

SEQ ID NO: 406165 - DNA, 201 bp, Homo sapiens
gggttttcagagctatttattttgggtcagtgattcattgagatgccagaataatgctagtaatttccaggtcaaacagcatcactgcttcttttttccctttttttttttttttaagagaccaggactgaacagaggtgatctttccagagaattgttttagcttggaagacttcaaggaaagattccacttagtgtctt

SEQ ID NO: 406166 - DNA, 201 bp, Homo sapiens
tgtgtatgtatgtatgtgtgtgtgtgtatatatttaatatatatgtgtatacattgtatatgtgtatacataatatataatatatatgtgtatatataacwtatatatatgtgtatgtataatatgtatatattttttagacaagagtctttttctgttaccgaggctggtgtgcagtggtgcgatcttggctcactgcaa

SEQ ID NO: 406167 - DNA, 201 bp, Homo sapiens
tgaaaagagattatattaagcaacttgagtgattacttttttgccagttaaaagaaatgagataatttatattgaagatgattgctatatacagtgctttrcacaaaaggccacatatctctttttaccttaggtaacatgatgtataagctactttcacatatatcttcttaggtcatcacaaggatttgagatcatcat

SEQ ID NO: 406168 - DNA, 201 bp, Homo sapiens
aataagctgattgagaattataaaagacaccttaagaaaaatcagtttctatgcactctgtaaacacagaactcagcccgaactcccaagttctgtatccgtgtgtgtgtgtgtgtgtgtgtgtgtgtgtgtgttgtggtatgttttaaatatcaaatggagttgtggcaactcagatgggatatggtttatattaataca

SEQ ID NO: 406169 - DNA, 201 bp, Homo sapiens
ctcctgccagtgctataatccagtgtcgtaggtgcagggtatgaatcagctcagcctcttaggagagaggggctctcagcgaggagggggcggggggggggtcactatttatcttccagaggcagggttcatggattcctgatgtttagaggcggaagggaccttaggtcacctacttccacggttttcatactgttctct

SEQ ID NO: 406170 - DNA, 201 bp, Homo sapiens
ataagctgattgagaattataaaagacaccttaagaaaaatcagtttctatgcactctgtaaacacagaactcagcccgaactcccaagttctgtatccgtgtgtgtgtgtgtgtgtgtgtgtgtgtgtgtgttgtggtatgttttaaatatcaaatggagttgtggcaactcagatgggatatggtttatattaatacat

SEQ ID NO: 406171 - DNA, 201 bp, Homo sapiens
tcctgccagtgctataatccagtgtcgtaggtgcagggtatgaatcagctcagcctcttaggagagaggggctctcagcgaggagggggcggggggggggkcactatttatcttccagaggcagggttcatggattcctgatgtttagaggcggaagggaccttaggtcacctacttccacggttttcatactgttctctg

SEQ ID NO: 406172 - DNA, 201 bp, Homo sapiens
gcacacttgtagtgttttaaatgcttctgtgaatggataacataattcaaaaaggttagatttctgggttaagacatttgttattatcggcccttactttrttcttttaaagagtaagattaggctggatgcagtggctcgtgcctataataccagcactttgggaggccaaggtgggcaggtgaggtcaggagtttgaga

SEQ ID NO: 406173 - DNA, 201 bp, Homo sapiens
attgtaactaggcccaaacagatcttcatttatcaaaataggaactgttacaatcaacacatttttaccgatgagaaataagtttgtttatacctgtagtrtaaaaatccatgctttgagattcgatgaactcttggaaagcattttctgcatactgctggttgtggaagcattttccctgcaaaaaattttctagatgtt

SEQ ID NO: 406174 - DNA, 201 bp, Homo sapiens
tcaacacatttttaccgatgagaaataagtttgtttatacctgtagtataaaaatccatgctttgagattcgatgaactcttggaaagcattttctgcatmctgctggttgtggaagcattttccctgcaaaaaattttctagatgtttggaaaagtggtagtcggttggcgagtggttagttgaatatggtggatgaggc

SEQ ID NO: 406175 - DNA, 201 bp, Homo sapiens
tgggcagcaggcccactctccattgtgccctccacctccaaccccccttcattacctctgggcacccatgctgtaatttgggcccttgcccggaaacaccyttgcctccccaccctcttcatcttcctggccaacaggaagttttcctggacccctccctacccctcctggatcagtgcccccagctcccaaactgccctg

SEQ ID NO: 406176 - DNA, 201 bp, Homo sapiens
actccacccaagccaggctcccagggggcctgatttctctctcactgtctctttttttaaaatggttgcacggctctgccccatggggggccttttttacmcactgcgaggcccagctttctaggggacttttgcacatgtcatgcagctcagctgggagctgcttaggtggaaaactccaaataaagtgcggctgtcgca

SEQ ID NO: 406177 - DNA, 201 bp, Homo sapiens
actggtctcctgcaagatgtgccgcattgagtcattcttccgcaagaacggggccttcgcactgcttgatccccgagacctggccctctgaccgtgggccmggtgtgggcttaggggagggaagaagaaataacaggcctcctggtggggcaaagctgctgtgtgtgtctgtgcccctctgctctccctgtccctgaggtt

SEQ ID NO: 406178 - DNA, 201 bp, Homo sapiens; identical to SEQ ID NO: 90950

SEQ ID NO: 406179 - DNA, 201 bp, Homo sapiens; identical to SEQ ID NO: 90942

SEQ ID NO: 406180 - DNA, 201 bp, Homo sapiens; identical to SEQ ID NO: 90952

SEQ ID NO: 406181 - DNA, 201 bp, Homo sapiens; identical to SEQ ID NO: 90944

SEQ ID NO: 406182 - DNA, 201 bp, Homo sapiens
caatgaccagagggtgctgggaagggcgagcactacttcgcaggcacgggatcctcagcaccaggggaacacagtagttccaggaagttctgggtgttccyggggagagagcggcttgtcatttcggaggccagggaaaggggcctcctgccaccgccacacccctccttgcccgcccctcacctggccccgagggcccgc

SEQ ID NO: 406183 - DNA, 201 bp, Homo sapiens
cttttctttgtttctgacagcaaaatcaaaggaaattcaagatgaaattttaggccagagcctggcctaaaaactgcaagtgttcataattaacaaaagamatctaaaaaaagagatgatgtgttgccgctcccctgcagctgtggaggaaggagagctgttctgcatccataaaaaccagttaaaagggatttcataagg

SEQ ID NO: 406184 - DNA, 201 bp, Homo sapiens
ccagggggcctgatttctctctcactgtctctttttttaaaatggttgcacggctctgccccatggggggccttttttacacactgcgaggcccagctttytaggggacttttgcacatgtcatgcagctcagctgggagctgcttaggtggaaaactccaaataaagtgcggctgtcgcagagggttggctgttccttgg

SEQ ID NO: 406185 - DNA, 201 bp, Homo sapiens
tgtcacctacactgtcaaggagaaaggggactacatcctcattgtcaagtggggtgacgaaagtgtccctggaagccccttcaaagtcaaggtcccttgartcccaaaagtgcctccccagcctcagcccccacctccagccacacacacattacacacacacacacacacacacaaatgtgccacacccagacacgcaca

SEQ ID NO: 406186 - DNA, 201 bp, Homo sapiens
ctctagggtgagctctgcccggctgcagggatggcggggaggggtaagctcatcgcagtgatcggagacgaggacacggtgactggtttcctgctgggcgkcataggggagcttaacaagaaccgccatcccaatttcctggtggtggagaaggatacaaccatcaatgagatcgaagacactttccggtacggtaccgcg

SEQ ID NO: 406187 - DNA, 201 bp, Homo sapiens
gtagttccaggaagttctgggtgttcctggggagagagcggcttgtcatttcggaggccagggaaaggggcctcctgccaccgccacacccctccttgccsgcccctcacctggccccgagggcccgcagccgctccgtcctctcccgatgcatttgctccagctgctcccgcagggcgcgccgccgcccagccgcgtcct

SEQ ID NO: 406188 - DNA, 201 bp, Homo sapiens; identical to SEQ ID NO: 90956

SEQ ID NO: 406189 - DNA, 201 bp, Homo sapiens; identical to SEQ ID NO: 90957

SEQ ID NO: 406190 - DNA, 201 bp, Homo sapiens; identical to SEQ ID NO: 90940

SEQ ID NO: 406191 - DNA, 201 bp, Homo sapiens
ggtgggtgaccacaggagagaaggagcacaaggccaggttctttttgtgcagaaagtgtgattccttcatcaaggtgtcctcttcctagcttgtgatcttrgttcatgccaaactttccctctgacccctccaccaccctcatcaggatagaccttgaggccttcagtggtctcatcagccctatttttaaataatttgtt

SEQ ID NO: 406192 - DNA, 201 bp, Homo sapiens
aatagagctgaaatcaattcaggatgttttgggggaagactcggtggaactcacccatggatagaatgtgagaataaggggaagagagatcaatcacccaggtgtttgtttagctaaagctgcagtgacagggaagactgggagaggtcagggctggagcgtgcatgaacaggtcctatttagccatgtgtgtttggctat

SEQ ID NO: 406193 - DNA, 201 bp, Homo sapiens
ctcgggagtttgagactagcctgaccaatatggtgaaaccccatttctactaaaaatacaaaaattagccaggcgtggtggcgggtgcctgtaatcccaasaaatcaggaggctgaggaaggagaattgtttgaacctgggaggtggagactgcagtgagccgagatccaccactgcactccagcctgggtgacagaggga

SEQ ID NO: 406194 - DNA, 201 bp, Homo sapiens
agcggcttgtcatttcggaggccagggaaaggggcctcctgccaccgccacacccctccttgcccgcccctcacctggccccgagggcccgcagccgctcsgtcctctcccgatgcatttgctccagctgctcccgcagggcgcgccgccgcccagccgcgtcctcctggcggtgcggagcgctgagcgtccgcggctcag

SEQ ID NO: 406195 - DNA, 201 bp, Homo sapiens
tgtttcccccaaacagtccagcccagggctgctggctgagactggttcctgctgcctggtgtattaggtagtccctgacctgggaggctgttatctgccawtctctaagctgtctggtaaagtgacccaagttatcatgggagaaggacaaattttacttcaagaattttttatgtttccaaccaaaagggacctcagaga

SEQ ID NO: 406196 - DNA, 201 bp, Homo sapiens
tttgtcctactcacaggtgagaaaactaaagctcggagagggtaaggcacacactaaagttacgagtcggcagaggcagagctagaatttgaacccaatcycaaccctttctgcctccggtaagccaggtacacactcttggcaggtctcctcaggcggcctcggaatttccttgtagtcttgagcacagtaggcagaaat

SEQ ID NO: 406197 - DNA, 201 bp, Homo sapiens
tgggtgttcctggggagagagcggcttgtcatttcggaggccagggaaaggggcctcctgccaccgccacacccctccttgcccgcccctcacctggcccygagggcccgcagccgctccgtcctctcccgatgcatttgctccagctgctcccgcagggcgcgccgccgcccagccgcgtcctcctggcggtgcggagcg

SEQ ID NO: 406198 - DNA, 201 bp, Homo sapiens; identical to SEQ ID NO: 90945

SEQ ID NO: 406199 - DNA, 201 bp, Homo sapiens
gacccgggcgcgctaagctcggcccctgccccgcgcaggctccttgtggccccaccgccttctaggggtcttgcctgtggcgggagttgagccggactggscgggagccccacggggtgaacccggcagtggcggttcctggcgatgtggaggcgttccaggacctgcagaggcggcagtcagcgtccggccgcccctcgg

SEQ ID NO: 406200 - DNA, 201 bp, Homo sapiens
ccctgaggttgcattcaggcctttctgaaactatcagacctgcaagttgccctcttgctttttccgtaaccctcatcactttaatcatccctttgaggacycagcaatgaccagagggtgctgggaagggcgagcactacttcgcaggcacgggatcctcagcaccaggggaacacagtagttccaggaagttctgggtgt

SEQ ID NO: 406201 - DNA, 201 bp, Homo sapiens
aaggatagatctaaattgtttctgaaatgtttaaatttcaaaccccgcatagtcaaggataataaaacagactcatctttttttgccctcttgttaaattmtaagcttcacaggcatttgaatacatctaaaaaatttggtttgtgagccttagaatttaaccacttacaaaactcttgagctccctccacttctgaggac

SEQ ID NO: 406202 - DNA, 201 bp, Homo sapiens
atatacctgggaaatagctggttaagcttcaccacaaaggatagatctaaattgtttctgaaatgtttaaatttcaaaccccgcatagtcaaggataataraacagactcatctttttttgccctcttgttaaattctaagcttcacaggcatttgaatacatctaaaaaatttggtttgtgagccttagaatttaaccac

SEQ ID NO: 406203 - DNA, 201 bp, Homo sapiens
aaattaaagttgatgaaagaaataacagattccccggctctatatacctgggaaatagctggttaagcttcaccacaaaggatagatctaaattgtttctraaatgtttaaatttcaaaccccgcatagtcaaggataataaaacagactcatctttttttgccctcttgttaaattctaagcttcacaggcatttgaata

SEQ ID NO: 406204 - DNA, 201 bp, Homo sapiens
tccatttttacactgcactcttattctctagaaaactgtattctctcttccttagcagccttttgtgacaaaaagatgagcaaaaatgtcacactaggtamaatttcttccaggcatattcatacctttcatcttactccatacagttgttttaggtggtttctctagtatagaaatgcccagtttctctatggcttgtaa

SEQ ID NO: 406205 - DNA, 201 bp, Homo sapiens
atccatgatgttagcttttcctctataaatcaacttaactctcttttataatggtgacacttacaaagctaaaaccccaggaaaattaaagttgatgaaakaaataacagattccccggctctatatacctgggaaatagctggttaagcttcaccacaaaggatagatctaaattgtttctgaaatgtttaaatttcaaa

SEQ ID NO: 406206 - DNA, 201 bp, Homo sapiens
tggcacagttttcacttttttcctgatccataaaaccagcaaagtggatacattcagtgttctataactacatttaagatccatgatgttagcttttcctytataaatcaacttaactctcttttataatggtgacacttacaaagctaaaaccccaggaaaattaaagttgatgaaagaaataacagattccccggctct

SEQ ID NO: 406207 - DNA, 201 bp, Homo sapiens
gcatcaaactacagtttgcttctacttggaccttaactttctcaaataatgcaagagcttttgttttatactatgaccctttgatatccttgtcttttctrgctttttctagtttttctcaggtgctcccccaacctgttccacacaggatttgtaacttcaggtcatttgcatggttatcagaatgccccttcgctaatg

SEQ ID NO: 406208 - DNA, 201 bp, Homo sapiens
gatcgtttcaatttcttcaaggattagagttcccgtttgaatagcagaatgcccattatctaatccaagttctactgaaatcactttctctccagaagttrtgctattgctcacatttgattcacagacctcatcaccatctttccgtgagatgccttcacttagatcctgggttgacttagcctttgttgcctgatcatt

SEQ ID NO: 406209 - DNA, 201 bp, Homo sapiens
cccgccgccgggtgcgccccctccccaccgcgcggggacagacagcaggcagcgccaatgcgagcggagcggagcgggcgggcaggggcggggcgaccgcsggaggcgcggggcggcgcgggcgccgggacccacctgcagcagcagcctgcctgcctgccgcggggaagcccatcgtgctccgcccgggcgccaatctcc

SEQ ID NO: 406210 - DNA, 201 bp, Homo sapiens
tgtggcttgacatctattttaagagttcctgagctactgtgatgataagtcccccaaacatttgatgagagttgggaagccagtatcccctgagcaccagwggatccctgaggaggagtgacatctctagctcagccaggataccgtgttatgttattaacatttatagctaacatcgaatagcagtttccattacaacat

SEQ ID NO: 406211 - DNA, 201 bp, Homo sapiens
aaattatctaatctgaagtagagaaataagttattgtatatgaaagttctctgtaaacttcagtgctctatgtaagtttcagagtttattactccaggttkctttcatatgtaaagggaagaggtatgtttgggtcttctgatctgcagcttccttaatgtcctgtcctgtcatgtctgtgtctaagctttataccctctg

SEQ ID NO: 406212 - DNA, 201 bp, Homo sapiens
gttttcttttttctcctcctctgtcttattttgtcttttctgttttccaaagattcattcttagcttttttccctcttatttcattctactttttagtctrctttattattttcatacttggttacttcagccttgtcgtttcagaggcctcttctccctctctggctctgctctctctagagccctgtcctgcttcttgt

SEQ ID NO: 406213 - DNA, 201 bp, Homo sapiens
gtgctgggattataggcatttatttaccgttctgctttccctttgctagcaggaattttctttctctctctctctctcttttttttttttttttttttttygctttattgggagaaaaagtgcttagagtgttcagttattttttatatttttctaattcatttcttctctggttacaaatcagtcatgcatggatgtttt

SEQ ID NO: 406214 - DNA, 201 bp, Homo sapiens
agtgctgggattataggcatttatttaccgttctgctttccctttgctagcaggaattttctttctctctctctctctctttttttttttttttttttttktgctttattgggagaaaaagtgcttagagtgttcagttattttttatatttttctaattcatttcttctctggttacaaatcagtcatgcatggatgttt

SEQ ID NO: 406215 - DNA, 201 bp, Homo sapiens
caacaagcaggcggcctggcagccgcccgtcaccgggtcctcgcagcgcgtccgccgcgctccggctccccgcacggatcggcgcccctccggccccgcastccgccaggcccgcggcccgtcgccctccggcctgggccaaagttgcgcaaatagccccacaactggcaaatacttaccggccgcaacaggaaccagagc

SEQ ID NO: 406216 - DNA, 201 bp, Homo sapiens
tgcaggcttttttttttttttttttttttttttttgagacagtcgtgctgtgtcgccaggctggagtgcagtggtgcaatctcagctcactgcaacctccrcctctcgaattcaagtgattctcctgcctcagcctcctgagcatgtgccaccatgcccagctaatttttgtatttttagtagagacagggtttcaccatg

SEQ ID NO: 406217 - DNA, 201 bp, Homo sapiens
tgtacatggttggttggataagacagcaagtgcctcagggcagagtttggataaatggtaagagtttgctagcagctgattggccgtgatagacaacactsatttaaagcagaaatatatctgttcgttgagagttaagaaaatagtggttaactgtatttctattcttatagttccttttaatattagaaattcaaagca

SEQ ID NO: 406218 - DNA, 201 bp, Homo sapiens
gtttctgaagtttcaagtgggcttgcttgctggggttgaacatcttgtttttccttgatcgtttcaatttcttcaaggattagagttcccgtttgaatagsagaatgcccattatctaatccaagttctactgaaatcactttctctccagaagttatgctattgctcacatttgattcacagacctcatcaccatctttc

SEQ ID NO: 406219 - DNA, 201 bp, Homo sapiens
gggtggaggtagagttgtacatggttggttggataagacagcaagtgcctcagggcagagtttggataaatggtaagagtttgctagcagctgattggccrtgatagacaacactcatttaaagcagaaatatatctgttcgttgagagttaagaaaatagtggttaactgtatttctattcttatagttccttttaatat

SEQ ID NO: 406220 - DNA, 201 bp, Homo sapiens
gtgccaggcccactcattattctttgacacaggaaatccttgtatatagctaaagggtggaggtagagttgtacatggttggttggataagacagcaagtrcctcagggcagagtttggataaatggtaagagtttgctagcagctgattggccgtgatagacaacactcatttaaagcagaaatatatctgttcgttgag

SEQ ID NO: 406221 - DNA, 201 bp, Homo sapiens
gcactttggttgaagggtgatttaagactagcagacgctgagtaagacaaaaagtggcagcctcctgtttgccagaatggataaaagttgcaagtagaaaygggttctaaagtccatatgtccctgctctttcaggtctcctgctggttttcaaggactgggcttccagccttgggtgctatgcattggagcctggagagg

SEQ ID NO: 406222 - DNA, 201 bp, Homo sapiens
gctgggattataggcatgcgcaaccaagcccggctaattctgtatttttagtagagacggagtttctccatgttggtcaggctggtcttgaactcccaacytcaggtgatctgccagccttggcctcccaaagtgctgggattacaggtgtgagccactgcacccagccaggaacactttcttttaatatcaagcctcaga

SEQ ID NO: 406223 - DNA, 201 bp, Homo sapiens
gcctatgggtaaataaagaaccagggactgtgccacctaatccaaactcagtatttcagaggagagaaggctgccacccagagaagtgaagcaacgggtayttggcagggctgggaggacccagagattgtgactccaagtcctgctttgcaaagagttgaaaggacaaactaaccaaacatctacctgcttcgtgtagac

SEQ ID NO: 406224 - DNA, 201 bp, Homo sapiens
gggtaacccataattttatgaactgtagaaggaactggaaccctgaaaatcagtttatgatctaagtaaatattatcttaggttgggtgtttcatactgtrtgcctctaacagaaagataaagtcattctagaacaatgacggaactaaaatatgaacatttgacagtgtttctcctcacaatgtttcagtgagcactaga

SEQ ID NO: 406225 - DNA, 201 bp, Homo sapiens
gtttcaccacattggccaggctggtctcgaactcctgaccttagctgatccacccgccttggcctcccaaagtgctgggattataggcgtgagccactgcscctggccaaatagcgcttataagagacttaagactaggaaaccactcacgtttaatatcaatatgcatattctgcacactatctgctgaaattgggaaaa

SEQ ID NO: 406226 - DNA, 201 bp, Homo sapiens
  misc_feature (1)...(201): n = A,T,C or G
gtccatgaatcaccacaggccatccccaggcagagtgaggcacacacagctgtgatcaaatgttgccttctctcgttttaaacaaggaattaactgtacanggtgattatctctggggagtgggagtcaaaatgactttcatttttgtattttatgtacttcaatacaggctgaatttttcaaagagcatggattttataa

SEQ ID NO: 406227 - DNA, 201 bp, Homo sapiens
ctggccaacatggcaaaaccccatctatactgaaaatacaaaaaattagccaggcatggtggtgcgaacctgtaatcccagctactcgggaggctgaggtsggagaatcgcttgaacccgggaggcagaggttgcagtgagctgagatcacgtcactacactgcagcctgggcaaaagagcacgactcttgtcccaacccc

SEQ ID NO: 406228 - DNA, 201 bp, Homo sapiens
gaaagtccccgggtcacgcggttgtttgtggggagcctgtgacgctcaggcttgtccctatgcttccgcctacagagtcacaactgcgaactgtggcggcrgcactcagagcgcgggccgacccccgcccggccactgaggcgggcgggcgggagggcgcgcacgtacgcacgcacgcacgcacgcacaccccggccctgg

SEQ ID NO: 406229 - DNA, 201 bp, Homo sapiens
cctttcttgccttttgttcattttttgtacatccacaatctatgaggtatgttacctactgaaatttactttcttttccaactgtggttcaacaactgacyttcttctctcatactttccaacccattccattctgaataagttaagagttttcttaccttcagctcttctcaccttccaatactaagtgaatacagcctg

SEQ ID NO: 406230 - DNA, 201 bp, Homo sapiens
gcctataatcccaggctgaggtggagaggatcacttgaggccaggagttctaaaccaccctgggcaacatagtgagacccccatctctacaggaaataaamaattagctggatatgatggcatgtgcctgtagttccagctacttgggatgctaaggcaggaggattgcttgaggctaggaggttgaggccacagtgagcc

SEQ ID NO: 406231 - DNA, 201 bp, Homo sapiens
ggtggggagtccaggcattgtgctcatctaggatgtaaaaaagcattacaaataaactaatgctgggcacagtggctcacgcctataatcccaggctgagrtggagaggatcacttgaggccaggagttctaaaccaccctgggcaacatagtgagacccccatctctacaggaaataaaaaattagctggatatgatggc

SEQ ID NO: 406232 - DNA, 201 bp, Homo sapiens
tcctttcttgccttttgttcattttttgtacatccacaatctatgaggtatgttacctactgaaatttactttcttttccaactgtggttcaacaactgaytttcttctctcatactttccaacccattccattctgaataagttaagagttttcttaccttcagctcttctcaccttccaatactaagtgaatacagcct

SEQ ID NO: 406233 - DNA, 201 bp, Homo sapiens
ctgtgtgtacatcttcagtgcacagaaacagcctctgaagtgagatcagagaatgtacaatttgtttatcagtaatattactaataaggggaaggaaggcwttagcagcccagagaagagaaagggcacgggaaagccactaatctggagggactcttagcaccaaggtaaaggcactagaccttctctgccagcacatgc

SEQ ID NO: 406234 - DNA, 201 bp, Homo sapiens
agcttatcatgttaatatcactagatacagtgtgccagtaaaatagcttacatatttatctgagcaatactctactgatcttaccatttatcccatcttgrtctctacccattgcctgggcctatagctaccaaaaatgacttataactccttgttaatagctcttacatttcagaggccttctgggaataagccctccaa

SEQ ID NO: 406235 - DNA, 201 bp, Homo sapiens
tgaataatttcatttaaatttagatctccttgttactctgtaggtttgtgtgaactgtagacaattttgtattaataaaaaataatgcgtatatacatacwcacctatctacatttatcttgtcctttttttcagaaccacaatggacactgccagccatagccttgttcttctccagcagctgaacatgcagcgagaatt

SEQ ID NO: 406236 - DNA, 201 bp, Homo sapiens
tgccacctaatccaaactcagtatttcagaggagagaaggctgccacccagagaagtgaagcaacgggtacttggcagggctgggaggacccagagattgygactccaagtcctgctttgcaaagagttgaaaggacaaactaaccaaacatctacctgcttcgtgtagacttcagctttgtgttgagcttcgggaagtaa

SEQ ID NO: 406237 - DNA, 201 bp, Homo sapiens
ttagagtcagagctcacacaagaaaatgtggatactatcctagttgagtagcagcttctctttcagaatttttataccaattctgaaaaagaaaatttgcrtggcatttttaattcataaattattttcctcctcaagtttcattgactttttttcttcacagcttatccatggttttaaggttgtatatattagatcttc

SEQ ID NO: 406238 - DNA, 201 bp, Homo sapiens
tttgcagacagcaaatcacccaccttgaggtcataaaggagctggaagctgctgggtgcttgtgctgctctctggacggcctgagccagggctaaggcacmcttgcccccttctgcccagtgagtgcacttcacggcatcaaaagccccatgttctctggaaaggcggctgatgaggtccagctcagactctgtatccgtc

SEQ ID NO: 406239 - DNA, 201 bp, Homo sapiens
cagtggctcacgcctgtaattccagcactttgggaggccaaggcaggtggatcacgaggtcaggagttcgagaccagcctggccaagatggtgaaaccccrtctctactaaaaaaataagaaaaattagctgggcacggtggcagacgcctgtaatcccagctacttgggaagctgaggcaggagaatcacttgaacccag

SEQ ID NO: 406240 - DNA, 201 bp, Homo sapiens
gccctataattcataaataagctacatgaggaaaaaagccaaattattacccagtaacaacttacctgtttagaataatccattcacctgttctgtttcarggtccaaatcaatatcataaaaacagggccgggtggggagtccaggcattgtgctcatctaggatgtaaaaaagcattacaaataaactaatgctgggca

SEQ ID NO: 406241 - DNA, 201 bp, Homo sapiens
taaattgtttctgaaatgtttaaatttcaaaccccgcatagtcaaggataataaaacagactcatctttttttgccctcttgttaaattctaagcttcacrggcatttgaatacatctaaaaaatttggtttgtgagccttagaatttaaccacttacaaaactcttgagctccctccacttctgaggacgtttcctgaca

SEQ ID NO: 406242 - DNA, 201 bp, Homo sapiens
ctactattagtttcagatcttctgggcaggggctgacttctcttggcttacttatacttcctaactcccagtgggcctgaatagacactggccagactttyaaagtagcttcttgaagatggatggtgatctggaaggaaaaacaagaaataaatgttttctctaagcactgaaatgtttcctgttccttccatactgcac

SEQ ID NO: 406243 - DNA, 201 bp, Homo sapiens
gcaaacacgtctatcgaaatggtctgcgtatctctctatgggttgctagcgctgcttgttgccagttttgaactttaagccaaaagaaatccattatgctyataagcaattgagaactattccttattgagatccaaggtttctcaaaactagcagacctgggagtttgcaagagtttcaggcaaaaaataagatgagctt

SEQ ID NO: 406244 - DNA, 201 bp, Homo sapiens
tagaattctaagtttttccagttatagaatcagtaaaatcaaattgaatataaagtaaatgaaatctgttttaaagcatattctaaactatcacttctgcytacatttcacatgaattcactcctaccaggattatttttaaatattttcttccatataggaaattaatagttactttaatgcataactgtatgttataca

SEQ ID NO: 406245 - DNA, 201 bp, Homo sapiens
ccaccttcaccttacaagaatgagtgctggggagtagaggagttgctcactcgcctcctcagctcacgctttgcaagaccaaaaggaggtacagggcttgyctgcttttaaattttgtttcgttcagtcttgctagctgagctgcccatgtgatttttgcttcagcaacacgatggtaggagttagtatcctttaacttgg

SEQ ID NO: 406246 - DNA, 201 bp, Homo sapiens
taaacagacatgcatgatttatgttaatttatacatgatgagaattaaggctgaaaatgacttctggggaaactcctactattagtttcagatcttctggrcaggggctgacttctcttggcttacttatacttcctaactcccagtgggcctgaatagacactggccagactttcaaagtagcttcttgaagatggatgg

SEQ ID NO: 406247 - DNA, 201 bp, Homo sapiens
cttttgtgtgtgtgtgtgtgtttttgagacagagtctcactgttgcccaggctggagtgcagtggtgtgatcacagctcactgcagccttgacctcccagkcttaagtgatcctcctgcctcagcccctcaagtagttgggagtacaggtgcatgccaccatacctagctaattgttttattttttgtggagatgacgttt

SEQ ID NO: 406248 - DNA, 201 bp, Homo sapiens
caaacttgtttccttttattctgtggaacgtcactaaagtaaacagacatgcatgatttatgttaatttatacatgatgagaattaaggctgaaaatgacktctggggaaactcctactattagtttcagatcttctgggcaggggctgacttctcttggcttacttatacttcctaactcccagtgggcctgaatagaca

SEQ ID NO: 406249 - DNA, 201 bp, Homo sapiens
gtctcatttccctatggttcagtagttcaatataatgggaagaactggtgaaaatgtttatgatccgagggtttggttttgttttttttttttgagacaayttatcaggctagtttaagatgcttcaatatgaaccatttcattgattctaagacacgtttttcacatgctgaaattgtcaatacagatttttagtttgtt

SEQ ID NO: 406250 - DNA, 201 bp, Homo sapiens
agactttgttatatcagaggtcattaaaaagcttatggcataccataagtgctcaataaatacaccttcctcccccaaagcactccaatctccatatgccrttttagcaactccctgtatgttatgtcattttacactgcaatctgtgctgacttcctccaatccagaagtgactgcatttcagtggtagagttttataaa

SEQ ID NO: 406251 - DNA, 201 bp, Homo sapiens
cacttgggcccagaaggtcaaggctgctgtgagccactactgcaccactgcacgccagcctgggcaacaaagtgagaccctgcctcaaaaaaaaaaaaaaattcagtcagccttgttcactcagcaaacacgtctatcgaaatggtctgcgtatctctctatgggttgctagcgctgcttgttgccagttttgaactttaa

SEQ ID NO: 406252 - DNA, 201 bp, Homo sapiens
gagtaagttaactgatcatgctgttcttactcaaacatcttacatagttcacttcaaacacgacactactttttagtcttatattctgtatgctttttgarctgaccacatttcattatttctgttactttttttttctatgccaagctgaatccttctgttatctaactattcatattcttcccagtaattttattcatt

SEQ ID NO: 406253 - DNA, 201 bp, Homo sapiens
atcttggctccctgcaacctccacctctcgggttcaagcaattctcctgcctcagcctcccaagtagctgggattacaggcgtgcaccaccacgcccagcyaatttttgtattttcagtagagatggggtttcaccacattggccaggctggtctcgaactcctgaccttagctgatccacccgccttggcctcccaaagt

SEQ ID NO: 406254 - DNA, 201 bp, Homo sapiens
cctcccacagagtaagttaactgatcatgctgttcttactcaaacatcttacatagttcacttcaaacacgacactactttttagtcttatattctgtatsctttttgaactgaccacatttcattatttctgttactttttttttctatgccaagctgaatccttctgttatctaactattcatattcttcccagtaatt

SEQ ID NO: 406255 - DNA, 201 bp, Homo sapiens
tcccccttattggcaattcttctgcctcagcctcccaagtagctgggattacagacgtctgccaccacgcccaactaatttttgtatttttagtagagacrgtttcaccatattggccaggctggtcttgaactctgacctcaggtgatccaccctcctcggcctcctaaagtgctgggattataggcatttatttaccgt

SEQ ID NO: 406256 - DNA, 201 bp, Homo sapiens
actggagtgcagtggtgcaatcttggctccctgcaacctccacctctcgggttcaagcaattctcctgcctcagcctcccaagtagctgggattacaggcrtgcaccaccacgcccagctaatttttgtattttcagtagagatggggtttcaccacattggccaggctggtctcgaactcctgaccttagctgatccacc

SEQ ID NO: 406257 - DNA, 201 bp, Homo sapiens
ggtttcgccatgttggccaggcgggtcttgaactcctgacctcaagtgatccgcccaccttggcctcccaaagtgctgggattataggtgtgagccactgygcctggtccatgttttctttatccatttgactatccatggacatttgagtttttcccccttattggcaattcttctgcctcagcctcccaagtagctggg

SEQ ID NO: 406258 - DNA, 201 bp, Homo sapiens
catggccactgtgtgggtttgatggtatttctaggtgaggtaggccgcctatggtgtatttttggaactaaaagcctacaccccccagccacccctgaaartttcattgctgttctctattatttgcagcattggttgcttccttatgttaaggcatcaaagtcttctttaacaatctggatatattttagttaagggtaa

SEQ ID NO: 406259 - DNA, 201 bp, Homo sapiens
gggtgatcttctttacgcagtctactgattcagattttgtctccctccagaacaccctcacggacacacccagaataatgtttgactaactattggggcascccatggcccagtcatttggacacataaaattaaacattacacagggctatccccccccatagagacatttgacgatgtggagatgtttttggttgtcac

SEQ ID NO: 406260 - DNA, 201 bp, Homo sapiens
tgcacaccctggggaaagtccccgggtcacgcggttgtttgtggggagcctgtgacgctcaggcttgtccctatgcttccgcctacagagtcacaactgckaactgtggcggcggcactcagagcgcgggccgacccccgcccggccactgaggcgggcgggcgggagggcgcgcacgtacgcacgcacgcacgcacgcac

SEQ ID NO: 406261 - DNA, 201 bp, Homo sapiens
tgcactctccaccatgccaggaccgcagtgccagtttaccccactcacctgtagagaatgtatccggcggaggtcattatatatacttggcttgattcagkttatggagaagtcaggcatggccactgtgtgggtttgatggtatttctaggtgaggtaggccgcctatggtgtatttttggaactaaaagcctacacccc

SEQ ID NO: 406262 - DNA, 201 bp, Homo sapiens
cgagattgcgccattgcactccagcctgggcgacagagtgagactccgtctcaaaaaaaaaaaggcagggtgtggtggctcacacctgtaatcccagcacyttgggaggccaaggcgggcggattatgaagttaggagatcgagaccatcctggacaacatggtgaaaccctgtctctagtaaaacacaaaaaattagctg

SEQ ID NO: 406263 - DNA, 201 bp, Homo sapiens
agaatgcccattatctaatccaagttctactgaaatcactttctctccagaagttatgctattgctcacatttgattcacagacctcatcaccatctttcygtgagatgccttcacttagatcctgggttgacttagcctttgttgcctgatcattcaatggggtctgtgtttgtatatccaaaatttcagcttcttcctg

SEQ ID NO: 406264 - DNA, 201 bp, Homo sapiens
ctcatgcctgtaatcccagcactttgggaggccaaggcccaggagtccgagaccagcctgggcaatatagtgagacctcatctctgccaaaaattttggcyaggggcagtggctcacgcctgtaatcccagcactttgggaggtcgaggtgggcggatcaccagaggtcaggagttcaagatcagcctggctaacatggcg

SEQ ID NO: 406265 - DNA, 201 bp, Homo sapiens
catatagatttgtggcacttaaattattaatttttgatttcttaagagtgaagtctgtaaatgatttctctctgctgtacttctgtgtttgtatggttggwcattttgaaaactggtgagattgcacagtcccaaacctggatgtcttaaatacaaggaattacaaactgtgatttttgtcttgaagacctggaagaattc

SEQ ID NO: 406266 - DNA, 201 bp, Homo sapiens
cgcaccaccacacccagctaatttttgtatttttagtagagatggggtttcatcatgttggcaaggctggtttcgaactcctgaccttgtgatctgcctayctcagcctcccaaagtgctgggattacaggtatgggccactgggcccagcctatttttatttctttgatgtaggtgatctaaatagtagatgaggacagg

SEQ ID NO: 406267 - DNA, 201 bp, Homo sapiens
cattattgggaataaaactttgtcaatttcagctttattgaaagttctcccaaatatattgtttttgtttacacaaaggaaaaggaacaaaaacaataaakaaatacctttgtttttttttcttttttgagacggagtctcgctctgttgcccaggctggagtgcagtggtgcgatctcggctcactgcaacctccgcctc

SEQ ID NO: 406268 - DNA, 201 bp, Homo sapiens
tactgtaatttaatcatcactgtttctttttagccttcagtaaggaggatactagttctttggcattattgggaataaaactttgtcaatttcagctttaytgaaagttctcccaaatatattgtttttgtttacacaaaggaaaaggaacaaaaacaataaataaatacctttgtttttttttcttttttgagacggagt

SEQ ID NO: 406269 - DNA, 201 bp, Homo sapiens
ttttcttagaaagatcagcatcctcagcatttattgcaggttgcatttcaccctccaatggcttttgctgctttgaagactctgaccttttcctgcgtgtkacaagacgtttgagtgaggcccaggccccccgtgtgggctctggctgatcagaagctcctgcttcttgtggacacttccttgccacatcagcagcttcag

SEQ ID NO: 406270 - DNA, 201 bp, Homo sapiens
tgggaattttatgcagggaatcttaagtctagattttgcctttttcttagaaagatcagcatcctcagcatttattgcaggttgcatttcaccctccaatrgcttttgctgctttgaagactctgaccttttcctgcgtgttacaagacgtttgagtgaggcccaggccccccgtgtgggctctggctgatcagaagctcc

SEQ ID NO: 406271 - DNA, 201 bp, Homo sapiens
ttccttgatcgtttcaatttcttcaaggattagagttcccgtttgaatagcagaatgcccattatctaatccaagttctactgaaatcactttctctccaraagttatgctattgctcacatttgattcacagacctcatcaccatctttccgtgagatgccttcacttagatcctgggttgacttagcctttgttgcctg

SEQ ID NO: 406272 - DNA, 201 bp, Homo sapiens
cagatctcaacaacccaaaaaacagttgtcaaacaaggactggaggtcaaagaagctccttccagtaacagtggaaacagagctgctgtccagggtgaccwcccccagttgcagttgtctcttgctattggtctggatgatggcactgcagaccagcagagggcctgtcctgccacccaggccctggaggagcaccagaag

SEQ ID NO: 406273 - DNA, 201 bp, Homo sapiens
aggccctggaggagcaccagaagcccccagtttccatcaagcaggagagatgtgacccagaatctgtgatctcccagagccacccctcaccctcatcagargtgacaggccccacttttactgaaaacagtgtcaaaatacacttatgccattactgtggggaacgttttgattcccgtagtaacctaaggcaacatctcc

SEQ ID NO: 406274 - DNA, 201 bp, Homo sapiens
ggcaggtgaatcacaaggtcaggtgtttgacaccagtctggccaacatggtgaaaccccgtctttcctaaaaagagaaaaaaattagccgggcatagtggygggcgcctgtaatctcagcggcaggctgaggcaagagaatagcttgaacctgggatgtggaggttgcagtgagccgagatcactccactgcactccggcc

SEQ ID NO: 406275 - DNA, 201 bp, Homo sapiens
agagatgcagtgaatagtggtgtgggactgacccccagtttttgttattgttgttttcatttattctgcaggcttttttttttttttttttttttttttttgagacagtcgtgctgtgtcgccaggctggagtgcagtggtgcaatctcagctcactgcaacctccgcctctcgaattcaagtgattctcctgcctcagcc

SEQ ID NO: 406276 - DNA, 201 bp, Homo sapiens
atttcagtgtctgtaataataatagcaattggctccattcttttgctttcttctgatttggatttctcttcagtgatcccattttctttaaaatctgattyttggctcaattcagtatcttttggcttagtttcttcagctacaatctctgtactttcatagtcttttccatttggtgcactttctagggtactgttactg

SEQ ID NO: 406277 - DNA, 201 bp, Homo sapiens
cagagatgcagtgaatagtggtgtgggactgacccccagtttttgttattgttgttttcatttattctgcaggcttttttttttttttttttttttttttttgagacagtcgtgctgtgtcgccaggctggagtgcagtggtgcaatctcagctcactgcaacctccgcctctcgaattcaagtgattctcctgcctcagc

SEQ ID NO: 406278 - DNA, 201 bp, Homo sapiens
ccagagatgcagtgaatagtggtgtgggactgacccccagtttttgttattgttgttttcatttattctgcaggcttttttttttttttttttttttttttttgagacagtcgtgctgtgtcgccaggctggagtgcagtggtgcaatctcagctcactgcaacctccgcctctcgaattcaagtgattctcctgcctcag

SEQ ID NO: 406279 - DNA, 201 bp, Homo sapiens
aagcgattctcctgccttagcctcccaagtagcttgggattacaggcatgcaccaccatacccagctaattttgtgtttttagcagagacagggtttcacyatcttggtcaggctggtctggaactcctgacctcaggtcatgcaccagcctcggcctcccatagtgctgggattacaggtgtgagccaccgtgccaggcc

SEQ ID NO: 406280 - DNA, 201 bp, Homo sapiens
ttttaaatcagcccaatgcaaaacactcccctttcctctacctggcaattcttaccaacctgagtaatgtgaacagagaacatgagtccatgaatcaccayaggccatccccaggcagagtgaggcacacacagctgtgatcaaatgttgccttctctcgttttaaacaaggaattaactgtacatggtgattatctctgg

SEQ ID NO: 406281 - DNA, 201 bp, Homo sapiens
ggaggcggaggttgcagtaagccgagatggagccgttgcactccagcctggtcaacaagagcaaaactccgtctcaaataataataataataataataatwtaacttggggattattccacatcagtacattaaatatgtagttttaatagagtctgccttttttttttttttttttttttgagatagggtcttgctctgt

SEQ ID NO: 406282 - DNA, 201 bp, Homo sapiens
cttggtgaagtgcatccccttaatgaaaacagcgaggcccttgaatgccgcaggctcagctccttcattgttaaggagaatgaacagcagccagaccacascaaccggggtaccacagagcctttgcagatcagtcaagtatctttgatctccaaagacacagagccagtagaattaaactgtaatttttctttttcaagg

SEQ ID NO: 406283 - DNA, 201 bp, Homo sapiens
atcactaaacatttctacttagatacctggtagacacttggagctcagagtgtctgaagtgaaacccctattcttcttcttcttttttttttttttgaggkggggtctcagaacctcttatcaagacggtttctgtacttcttctctaatgttctgggactctgcctttatatcaacacctagcacatggcagttactctg

SEQ ID NO: 406284 - DNA, 201 bp, Homo sapiens
ctctaatactttttttttgagatggagtctcgctctgtagcccaggctggaatgcagtggtgtgatctcggctcactgcaacctcttcctcccaggtcccrgttcaaacagttctcctgcctcagcctcccgagtagctgggattacaggcacacgccactgtgcccagcttttttttttgtatttttagtagagacgggg

SEQ ID NO: 406285 - DNA, 201 bp, Homo sapiens
tctgcctcctgggttcaagcgattctcccgcctcagcctcccgagtagccgggattataggtatgtgccaccacacctggctaattttgtatttttagtaragacggggtttcttcatgttggtcaggctggtctcgaactcccgacctcaggtaatccacctgcctcggcctcccaaagtgctgggagcgagccaccatg

SEQ ID NO: 406286 - DNA, 201 bp, Homo sapiens
attcttctgcctcagcctcccaagtagctgggattacagacgtctgccaccacgcccaactaatttttgtatttttagtagagacggtttcaccatattggccaggctggtcttgaactctgacctcaggtgatccaccctcctcggcctcctaaagtgctgggattataggcatttatttaccgttctgctttccctttg

SEQ ID NO: 406287 - DNA, 201 bp, Homo sapiens
gaaatggatatatacagatctgttgaggcagaaagaaaagcgggggaaaaacccactctccctgtttctacacttttgcacttagtaacaatttgcctgaytgaaggatttgtgaatggttctctttttttttttttttttttttgagaaggagtctcgctctgttgcccagactggagtgcagtggtgcaatcttggctc

SEQ ID NO: 406288 - DNA, 201 bp, Homo sapiens
tttaacagtgaatgcataaaaatacaaccaactgacatccaacctgacatattcagctatttgttgcacattatgtacacggggaaagggccaaaacagaytgtggatcatagtcgtttggaggaagggattcgatttcttcacgccgactacctttctcacattgcaactgaaatgaatcaagtgttctcaccagagact

SEQ ID NO: 406289 - DNA, 201 bp, Homo sapiens
cctcatcagaggtgacaggccccacttttactgaaaacagtgtcaaaatacacttatgccattactgtggggaacgttttgattcccgtagtaacctaagrcaacatctccatacacatgtgtctggatccctgccattcggtgtccctgcttccattctggaaagtaatgaccttggtgaagtgcatccccttaatgaaa

SEQ ID NO: 406290 - DNA, 201 bp, Homo sapiens
gtttgtgagccttagaatttaaccacttacaaaactcttgagctccctccacttctgaggacgtttcctgacacattcaacagcatcagcgtccaatcagsagggagctcaaagagtaatccagctaattctaaggacacaaaggttttctctaggtaaacagtttaggtaaattacaaagtggtaagtttttcttgagga

SEQ ID NO: 406291 - DNA, 201 bp, Homo sapiens
ttaaattctaagcttcacaggcatttgaatacatctaaaaaatttggtttgtgagccttagaatttaaccacttacaaaactcttgagctccctccacttstgaggacgtttcctgacacattcaacagcatcagcgtccaatcaggagggagctcaaagagtaatccagctaattctaaggacacaaaggttttctctag

SEQ ID NO: 406292 - DNA, 201 bp, Homo sapiens
gctcacacaagaaaatgtggatactatcctagttgagtagcagcttctctttcagaatttttataccaattctgaaaaagaaaatttgcgtggcatttttwattcataaattattttcctcctcaagtttcattgactttttttcttcacagcttatccatggttttaaggttgtatatattagatcttctcataagacat

SEQ ID NO: 406293 - DNA, 201 bp, Homo sapiens
actgagtatcctatgatttaactcaattctgacactaactgtctggagcagatcctacaggtaaagggctcagtcctaaaagactgccccacttcagacaygaatcgcaagtccaggttgtcacctgtgcttctgaccaactggttataaactggagggtccccacaaccccctgctcaggttcatttgctagaatggctc

SEQ ID NO: 406294 - DNA, 201 bp, Homo sapiens
agtaattagttaatgtatatatgaatgattcattatctttttttttttttacatggtagctgctgccttgagatctatttttttttttgagatgaagtctkgctgtgtccaatcttggctcactgcaacctctgcctcctgcatacaagcaattctctcatatcagcctcctgagtacctgggattacaggtgcccgccat

SEQ ID NO: 406295 - DNA, 201 bp, Homo sapiens
gatgatcatttataattcttcctggcacataataagtattcgatatatgttgtattaataatcagtaattagttaatgtatatatgaatgattcattatctttttttttttttacatggtagctgctgccttgagatctatttttttttttgagatgaagtcttgctgtgtccaatcttggctcactgcaacctctgcctc

SEQ ID NO: 406296 - DNA, 201 bp, Homo sapiens
gctcatagcttttcccactataccatagtcttatcatacgctaagtgaaatctaatacatttttcctttctcttcaatctcgtgcttctctctaacagccrtctctctgccctggtcctagagttacttgaaacgtaatttggctcctgagtcctgagaatattctgcattccacttgacctctgcctgttctacccttgc

SEQ ID NO: 406297 - DNA, 201 bp, Homo sapiens
ggctggagagcaatgatgcgatctcgactccctgcaacctccgcctcccaggttcaagcaattctcctgcctcagcctcccgagtagctgggattacaggygcccaccgcctcacctggctaatttttatatttttaatagagacgcggtttcaccacgttggccaggctggtcttgaactcctgacctgaggtgatttac

SEQ ID NO: 406298 - DNA, 201 bp, Homo sapiens
ggtcacacacggacggtaacaatttgtccctttccaaggaaattagttcagaggcactagatcttgctgcttctctcctcctccatcctctctcatacgaytgatactgccaggtgttgttctgccttctcccttttaaaatggaagtgagtaggtgtgtggcattgagcactcctgacagcttttgcaataaatcccatg

SEQ ID NO: 406299 - DNA, 201 bp, Homo sapiens
ctccttctttgctagtaaaatcttcccttccctcactaggcatatttgtggcatcccaggttataatcctcgttgctcattcctgaataaactcaacctayttggagataattttttgtaatgtctttctttaggctgacagtaggaaataacccccagctttcagtttttccttctgaatttaagatggtttgcatttcc

SEQ ID NO: 406300 - DNA, 201 bp, Homo sapiens
aattggttttggacagtcagagcagagtggttataaagcacacttgcaaggcgcggtggctcacacctgtaatcccagcactttgggaggccaaggtgggyagatcacaaggtcaggagatcgagaccatcctggctaacatggtgaaaccccgtctctactaaaaatacaaaaaattagccgggcatggtggcgggcgcc

SEQ ID NO: 406301 - DNA, 201 bp, Homo sapiens
gtgctgggattacaggctcagccacaggctgagcttcacgcctagctgaagctctccttctttgctagtaaaatcttcccttccctcactaggcatatttrtggcatcccaggttataatcctcgttgctcattcctgaataaactcaacctacttggagataattttttgtaatgtctttctttaggctgacagtaggaa

SEQ ID NO: 406302 - DNA, 201 bp, Homo sapiens
taggatgccaaagccccatgaaccccattgaacagttttgaaagtattgaaccatctgaattagtgttggtgtcttgggtgctgaggatgcaggtagcaargcagtggggctcctctcattttaaagcccctttcttttctttaaggctctctttaatcgtttggtgccatcagtaaatggagtgagaaggttctctgaca

SEQ ID NO: 406303 - DNA, 201 bp, Homo sapiens
attggttttggacagtcagagcagagtggttataaagcacacttgcaaggcgcggtggctcacacctgtaatcccagcactttgggaggccaaggtgggcrgatcacaaggtcaggagatcgagaccatcctggctaacatggtgaaaccccgtctctactaaaaatacaaaaaattagccgggcatggtggcgggcgcct

SEQ ID NO: 406304 - DNA, 201 bp, Homo sapiens
agatatttgacctgggtttttttctaggctgagaggataaatctagccttttaatcatgtccaaaactgtactcggcatcctcatccccaagttacccctwactcccgtcttttggttagtatcaccattcttccttcccgcaagtctgaagccttttagtttccctcccaagcattccctatattggaccagtctctaaa

SEQ ID NO: 406305 - DNA, 201 bp, Homo sapiens
atgccaaagccccatgaaccccattgaacagttttgaaagtattgaaccatctgaattagtgttggtgtcttgggtgctgaggatgcaggtagcaaagcartggggctcctctcattttaaagcccctttcttttctttaaggctctctttaatcgtttggtgccatcagtaaatggagtgagaaggttctctgacatcca

SEQ ID NO: 406306 - DNA, 201 bp, Homo sapiens
cattagcgaaggggcattctgataaccatgcaaatgacctgaagttacaaatcctgtgtggaacaggttgggggagcacctgagaaaaactagaaaaagcyagaaaagacaaggatatcaaagggtcatagtataaaacaaaagctcttgcattatttgagaaagttaaggtccaagtagaagcaaactgtagtttgatgc

SEQ ID NO: 406307 - DNA, 201 bp, Homo sapiens
caagctcatcagagaagttttcaagtattgagaagctgtcaagctcacaggggtggataaaaaattttaattttcacccaaaaactcacattttatcattrgcaacaaatacaattaattgtttcccttgaaataccagtttcactttattcatttttgagaaaatatttgtcaaatactcaagcctgaataatcattgct

SEQ ID NO: 406308 - DNA, 201 bp, Homo sapiens
ttttttcttccacattttttatattgtatggaatctggaatctgatcattgattaggacataaaagtcttcttggagtagcctattttagatgaagttacrtcagtaatcatagtcttaaagtcatgatatacatagcaaagatggatggtagaggttatttctcatttatctatagattagaagtggctagtgtggaata

SEQ ID NO: 406309 - DNA, 201 bp, Homo sapiens
cagctcacggtgtcctggtttccacagggcactccagtgtttgtccatgctggcccgtttgccaacatcgcacatggcaattcctccatcattgcagaccrgatcgcactcaagcttgttggcccagaagggtttgtaggttagtgttttttgcaaaaccagtgaatagactgtatgtttcttttaacatcaggggaattg

SEQ ID NO: 406310 - DNA, 201 bp, Homo sapiens
tgtttttgtgcacttattctaatttctccacgtggcatgcgaaggagggcagcttctatcctccaactctgatgcaggctggcttttctttcaggggtgcygattgccggaaggcatgctgtggtggttgggcgcagtaaaatagttggggccccgatgcatgacttgcttctgtggaacaatgccacagtgaccacctgc

SEQ ID NO: 406311 - DNA, 201 bp, Homo sapiens
  misc_feature (1)...(201): n = A,T,C or G
cctctgcccccacgtggtggtgcttgttgccactgtcagggctctcaagatgcacgggggcggccccacggtgagtggtgggttgaagtatctgattatcngcagtgtgctgacggccaaaaggaagttggatgacttctgcctgtttcttcattgagttgctcttatcctcgtgattaacaggcagcaaaagcaagggac

SEQ ID NO: 406312 - DNA, 201 bp, Homo sapiens
tcttccacattttttatattgtatggaatctggaatctgatcattgattaggacataaaagtcttcttggagtagcctattttagatgaagttacatcagyaatcatagtcttaaagtcatgatatacatagcaaagatggatggtagaggttatttctcatttatctatagattagaagtggctagtgtggaataaatag

SEQ ID NO: 406313 - DNA, 201 bp, Homo sapiens
tgcaatggaagagggcagagcttcttaatcactatccactgcccatggtggggcccatgaaatggacaccttcacccatttgctcatttctgtggatgcarcagggctgagccacggcatagatcaagactgggggctggggggcggggcggggaggcaccagacacctccatcctttagatatactctacaaaagagaaa

SEQ ID NO: 406314 - DNA, 201 bp, Homo sapiens
tgagtaggtatatatttgttcatggttttgtcatttaaactcagatttcaattgagagactagtattagaaaacacttgatcaaaactgtccaaatgattstaaaaaataaataaataaatgtgcttagtagttacaataatgcatttgcatttatttgatttctaagtcattggagaagcatgcttaactgagcttccac

SEQ ID NO: 406315 - DNA, 201 bp, Homo sapiens
tcgagtgatcctcctgcatcaaccttctgagtagctgggactacaggcatgtgccaccatgcctggctaatttttaagctttttgtagcgacaggggtctyactgtgttgcccaggctggactcaaactcctggactcaagcgatcctcctggttcaccttcctaaagtgctgagattacaggcgtgacccaacatgcctg

SEQ ID NO: 406316 - DNA, 201 bp, Homo sapiens
  misc_feature (1)...(201): n = A,T,C or G
tttggcatgtgtagaaatgagcacggcatgtgaagggctgtcagaaacagtgtgtggcttacatttgaggccttaacccaatatcttatgaaatagcttangacacttaagaatttaatacaaagctcagggatatccttttcatttctgggtttttttttggtgtgtatttcattatttcatttctgatgtccaaatccc

SEQ ID NO: 406317 - DNA, 201 bp, Homo sapiens
ggagattggcgcccgggcggagcacgatgggcttccccgcggcaggcaggcaggctgctgctgcaggtgggtcccggcgcccgcgccgccccgcgcctccsgcggtcgccccgcccctgcccgcccgctccgctccgctcgcattggcgctgcctgctgtctgtccccgcgcggtggggagggggcgcacccggcggcggg

SEQ ID NO: 406318 - DNA, 201 bp, Homo sapiens
gagactgggcggaaaccggagactcgcctcccgaacccgcgaaactatctcccgcgagactgccccgccccaaccccgccccgcaactctactccctgatkggctggaattacggccggattccggagtcctttccagctccctcttcggccgggtttcccgccgaatacaaaggcgcactgtgaactggctctttctttc

SEQ ID NO: 406319 - DNA, 201 bp, Homo sapiens
ctgtgcttctgaccaactggttataaactggagggtccccacaaccccctgctcaggttcatttgctagaatggctcacagaactcagagaagcatttcayttgtgtttatggtttattataaaggatacagctcagaaacaaccagatggaagagaagcgtagggggcatcactctcccagcacctggatgtgttcacca

SEQ ID NO: 406320 - DNA, 201 bp, Homo sapiens
ttcagatgtagacgctgagctgccaggaacattagtcactgtcaagccttcaccgtttttaacctccctcccactctccctaccgtgcttttaagacagtrgctcataattgatcactcattttcttgtagtgtaattatctaacaggcgataaagaaattgctctcctacaactcctcactttgaatacttgcgatatga

SEQ ID NO: 406321 - DNA, 201 bp, Homo sapiens
tcaatctcgtgcttctctctaacagccatctctctgccctggtcctagagttacttgaaacgtaatttggctcctgagtcctgagaatattctgcattccwcttgacctctgcctgttctacccttgcgggacatctgaatgcttaattagtgggtatcgttgccagctttactcccaggaagtaacactggctgcttttt

SEQ ID NO: 406322 - DNA, 201 bp, Homo sapiens
tgagccaccacacccagccctaattttttttttttttttttgaggtggagtttcactattgttgcccaggctggagtgcaatggcacaatctcaactcacygctggagtgcagtggcactatctcagcgcactgcaacctccacctcccaggttcaagcaattctcctgcctcagcctcccgagtagctaggattacaggc

SEQ ID NO: 406323 - DNA, 201 bp, Homo sapiens
agcatagttgttctataagtgggcctttcaaaggggggcttactacatttatatgatttgtttggtttttccttcccttagtttgctataattaagcctgytctctccattggtggcatttttcttgattaagtctcctttctaaagagactggttgtgaagaggcagatggtttgagtaggtgctgcgagtgtttgctgg

SEQ ID NO: 406324 - DNA, 201 bp, Homo sapiens
ctctccattggtggcatttttcttgattaagtctcctttctaaagagactggttgtgaagaggcagatggtttgagtaggtgctgcgagtgtttgctggcsaagtgcagggcaagttgggtatatttgtaagctcgctgtggatggtagctccagagcctaagcacggtgctgcctcctctgtgcatcactgggtcatgca

SEQ ID NO: 406325 - DNA, 201 bp, Homo sapiens
ttttttttttttgaggtggagtttcactattgttgcccaggctggagtgcaatggcacaatctcaactcaccgctggagtgcagtggcactatctcagcgsactgcaacctccacctcccaggttcaagcaattctcctgcctcagcctcccgagtagctaggattacaggcatgtgccaccacacctggctaattttgta

SEQ ID NO: 406326 - DNA, 201 bp, Homo sapiens
tatttacggcagccatataacgaatacctcttctgtgccagccactatgttgttaggctctgtcttctgatggaagggtctgtgctgtgcagagtagagtyaatttgtattatcataaccctatgaatacataaaatctataaacacaattggtaaatataatttgggtaagggtaactaattcctttcaaacagcaaata

SEQ ID NO: 406327 - DNA, 201 bp, Homo sapiens
ccagagcagtatacaagccccgtttgttttggctatattgcacaccctacaccctccagaagagttgttaaaatgtgaggctcagaagcttccatgttggyattttaccagctaaggcatgaccaagatggtgacattatttctttttcttgccacctctctcagtatctctccttattagctatcatcaaatctctttgt

SEQ ID NO: 406328 - DNA, 201 bp, Homo sapiens
tcctgtagattaaatacatgtaggcccttttgtgcttaaaaagatttgtctgggcagggcgtggtggctcatgcctgtaatcctaggactttgggaggccsaggcaggaggatcacctgagatcaggagttggagaccagcctgactaacatggtgaaaccccatctctactaaaaatacaaaattagctgggcatggtgg

SEQ ID NO: 406329 - DNA, 201 bp, Homo sapiens
ctacttactttgctggctaagctttttttttttctttgcccctcaccacaagcctggacgggagacgtactgcttggtatctggtgcttgagaggtcccaggagataagggagcatttctgtgaaaggttttgccagagcctgtcaggaacttaatcttgactgcaatgaatgacttaacattataagtgatctttgggtt

SEQ ID NO: 406330 - DNA, 201 bp, Homo sapiens
gtgtgtctgattgctatataagacactgcttttggtatgaaattatgacagtctttatggaaaataatttggcatattatcaagtgccttaaaaatgcttctcctccttgactcatttagagtatgaactgggtttttttgttcattttgtgtgtgtgtgtgtttttactttgaaattattttaattttgaaatagaaaac

SEQ ID NO: 406331 - DNA, 201 bp, Homo sapiens
tgtgtctgattgctatataagacactgcttttggtatgaaattatgacagtctttatggaaaataatttggcatattatcaagtgccttaaaaatgcttctcctccttgactcatttagagtatgaactgggtttttttgttcattttgtgtgtgtgtgtgtttttactttgaaattattttaattttgaaatagaaaaca

SEQ ID NO: 406332 - DNA, 201 bp, Homo sapiens
ttgtactttagcaccagagtcaacagctttctgtgatacaaggtttatataatatgttgtaatcacatctccctgcctcagacctctagtctttttcgctstggtgctggcaccaccatcttcccacattccctgagctagaagcctgaggccgtctccttaggagctctcttcctcactccctgcatccagttaggggct

SEQ ID NO: 406333 - DNA, 201 bp, Homo sapiens
gtgtctgattgctatataagacactgcttttggtatgaaattatgacagtctttatggaaaataatttggcatattatcaagtgccttaaaaatgcttctcctccttgactcatttagagtatgaactgggtttttttgttcattttgtgtgtgtgtgtgtttttactttgaaattattttaattttgaaatagaaaacat

SEQ ID NO: 406334 - DNA, 201 bp, Homo sapiens
ccagtgacttctaaatctagatttcttctgagctccaggctcttggtctgggacaccactggtttccttcccaccttcaagtctcctttgcttgttgttgytcatcaccctaatacctaaaccatttgaatgccttgggctcacccttgagatctcttccccatcttattctttccctaagtaacctcacccagtcccata

SEQ ID NO: 406335 - DNA, 201 bp, Homo sapiens
cgaggcgggcggatcacttgaggtcaggagttcgagatcagcccggccaaaccccatctctactaaaaaaatacaaaaactagctgggcatggtggcacgygcctgtaatcccagctacttgggaggctgaggcgcgaaaattgcctgaacccaggaggtggatgttgcattgagccaagattgtgccactgcactccagc

SEQ ID NO: 406336 - DNA, 201 bp, Homo sapiens
actgcactccagcctgggcaacagaccgagactctgtctccaaaaaaaaaaaaaaaaaaaaaaaatgacaactcagggtcttggaataattaattaatatatttttttgctattagaggattattttcattaagtattttgggtagtattctgttattctatccttttaagctatttgtttaagcctcagatgtaaaagag

SEQ ID NO: 406337 - DNA, 201 bp, Homo sapiens
ttgggaggctgaggcgggtggatcacaaggtcaggagattgagaccatcctggctaacacaatgaaaccctgtctctactaaaaatacaaaaaaattagcygggcatagtggcgggtgcctgtagtcccagctactcgggaggctgaggcaggagaatggcgtgaacctgggaggtggagcttgcagtgagccgagattgc

SEQ ID NO: 406338 - DNA, 201 bp, Homo sapiens
caaagaaagagaacccgggcacaacctgcgtttgcaagtggactgcctagtggctgtagccgctggctcctgtgcttcggggaaaagtcctgtgccgactrtgctcccaaacgcgcagctgctggtgactttctgccgggagagtgggtagttgcggcttcctggagcccccctagtcagaactcagaaatccaatctact

SEQ ID NO: 406339 - DNA, 201 bp, Homo sapiens
gttatttctcatcacgtgtcctagaaagcaccacaccttgaatcagcatttctccacctggcccatgtggaaatgaatgggttattgctgtgacccagggygcagggtgccaaaaggcctgcagtgtgctgaggagttatattaaatgagtagatagggaagatgcacctcacaaaatagaattgtcccacatagggtgtc

SEQ ID NO: 406340 - DNA, 201 bp, Homo sapiens
cggttagttaagggactcgggtccttccgaactgcgcatgcgccaccgcgtctgcagggggagaagcgggcaggggcgcaggcgcagtagtgtgatccccyggccagtccctaagcacgtgggttgggttgtcctgcttggctgcggagggagtggaacctcgatattggtggtgtccatcgtgggcagcggactaataaa

SEQ ID NO: 406341 - DNA, 201 bp, Homo sapiens
catgtgtagaaatgagcacggcatgtgaagggctgtcagaaacagtgtgtggcttacatttgaggccttaacccaatatcttatgaaatagcttatgacasttaagaatttaatacaaagctcagggatatccttttcatttctgggtttttttttggtgtgtatttcattatttcatttctgatgtccaaatcccctacc

SEQ ID NO: 406342 - DNA, 201 bp, Homo sapiens
tggttttgcacctttagtacatcttggacaggttccatgttaacacagatgggtctcactttcataacatctgcatgataaatatttattgagtgtatatrtcataattcattggcccagtcccccttggaggaggtttatgtttataattttccaatgctacaagcagggctgcagtaaacatacttaaagatacatttc

SEQ ID NO: 406343 - DNA, 201 bp, Homo sapiens
ctcactaggcatatttgtggcatcccaggttataatcctcgttgctcattcctgaataaactcaacctacttggagataattttttgtaatgtctttcttyaggctgacagtaggaaataacccccagctttcagtttttccttctgaatttaagatggtttgcatttcctagaggggatcccatttagaggtaggggtca

SEQ ID NO: 406344 - DNA, 201 bp, Homo sapiens
ggttttttttacagacagggtctcactctgtcacctaggctggactgcagaggcgtgatcatagctgcagcctctaactcttgggcttaagcagtctcccygcttcaacctcccaactagctggaagaacaggaacacgccaccacaccaggctaattttttaattttttgtagagacggggtctccctatgttgcccagg

SEQ ID NO: 406345 - DNA, 201 bp, Homo sapiens
tggaagccaggcgattcagaccccgccaccgcgtccccagagactgggcggaaaccggagactcgcctcccgaacccgcgaaactatctcccgcgagactkccccgccccaaccccgccccgcaactctactccctgattggctggaattacggccggattccggagtcctttccagctccctcttcggccgggtttcccg

SEQ ID NO: 406346 - DNA, 201 bp, Homo sapiens
cctctccaggctccaatgcatagcacccaaggctggaagcccagtccttgaaaaccagcaggagacctgaaagagcagggacatatggactttagaacccrtttctacttgcaacttttatccattctggcaaacaggaggctgccactttttgtcttactcagcgtctgctagtcttaaatcacccttcaaccaaagtgc

SEQ ID NO: 406347 - DNA, 201 bp, Homo sapiens
tctgaggcttgatattaaaagaaagtgttcctggctgggtgcagtggctcacacctgtaatcccagcactttgggaggccaaggctggcagatcacctgargttgggagttcaagaccagcctgaccaacatggagaaactccgtctctactaaaaatacagaattagccgggcttggttgcgcatgcctataatcccagc

SEQ ID NO: 406348 - DNA, 201 bp, Homo sapiens
gtctacacgaagcaggtagatgtttggttagtttgtcctttcaactctttgcaaagcaggacttggagtcacaatctctgggtcctcccagccctgccaartacccgttgcttcacttctctgggtggcagccttctctcctctgaaatactgagtttggattaggtggcacagtccctggttctttatttacccataggc

SEQ ID NO: 406349 - DNA, 201 bp, Homo sapiens
ttgtggcatcccaggttataatcctcgttgctcattcctgaataaactcaacctacttggagataattttttgtaatgtctttctttaggctgacagtagraaataacccccagctttcagtttttccttctgaatttaagatggtttgcatttcctagaggggatcccatttagaggtaggggtcaaaatttttgtctta

SEQ ID NO: 406350 - DNA, 201 bp, Homo sapiens
gctgcccaaagcagtcgattttgttctgtgctgtgtgattggtcacataccctaagtccttagggcaggaaataatcttatactactgtacagcctgcaarcattgcagcgtcttgcctttaacacatgaaaagcaccattttaagctaggagatttaaataggaaatgcctctgactctgtttcttttccttccaggtca

SEQ ID NO: 406351 - DNA, 201 bp, Homo sapiens
ggttgaggcagaatggcgtgaacctgggaggcagagcttgcagtgagccgagatcacgccactgcactccagactgggcgacagagcgagactccgtgtcaaaaaaaaaaaaaaaaaattaagcacacttaacctgggtagtcaagaccttctccacttgctcatctctttcttctcattcttcctcacacctgtgactgg

SEQ ID NO: 406352 - DNA, 201 bp, Homo sapiens
ggggtcatgcaagaacttgtgtgggttgtttaggtattgcattggtggtcagggttttgttataatggcctcaccgtagtagaatgggaagcaaaaaatcttttttttttttttgggggacgaagtctgtctctgttgcccaggctggagtgcagtggcacgatctccactcgctgcaagctctgcctcccgggttcatgc

SEQ ID NO: 406353 - DNA, 201 bp, Homo sapiens
agtgacctggagcttgaaactgaggtgaggattaaaataaccacctcttctaagtttcatttatttcattttgcttagagcacagtagagagtgccaagcrtttcctggagaaatttaagccaggaaagtggatgattcagtataacaaccttaacctcaagacacctgttccaaggtaaaaataaagttttactgattta

SEQ ID NO: 406354 - DNA, 201 bp, Homo sapiens
atttagccaagacctccaggtatttttttttttttttttttttgagacacagttttgctcatgtcacccaggctggagagcaatgatgcgatctcgactcyctgcaacctccgcctcccaggttcaagcaattctcctgcctcagcctcccgagtagctgggattacaggcgcccaccgcctcacctggctaatttttata

SEQ ID NO: 406355 - DNA, 201 bp, Homo sapiens
cctttctaacatgcaccagctgacaggggccaggcgagcagccccaaagcatgttaggtgcctcttgactcttagctaggattgaagcatggtaataagtrggtctgaagcagttcattttgtgattgaactggagtgacctggagcttgaaactgaggtgaggattaaaataaccacctcttctaagtttcatttatttc

SEQ ID NO: 406356 - DNA, 201 bp, Homo sapiens
ggctcactgtggcctcaacctcctagcctcaagcaatcctcctgccttagcatcccaagtagctggaactacaggcacatgccatcatatccagctaattktttatttcctgtagagatgggggtctcactatgttgcccagggtggtttagaactcctggcctcaagtgatcctctccacctcagcctgggattataggc

SEQ ID NO: 406357 - DNA, 201 bp, Homo sapiens
aacggagcaactactgtgtatccagcacaatgccaggccttgggctacacaactgaataaggttcaacttcaccttcaccttcagctgcttcctccccatstcctctctgtcatgtctgttattccttccaaaccttgtttgatttccccttatcaagggatgatctttccttctctccctccctcctctcccatagaaca

SEQ ID NO: 406358 - DNA, 201 bp, Homo sapiens
gccatcatatccagctaattttttatttcctgtagagatgggggtctcactatgttgcccagggtggtttagaactcctggcctcaagtgatcctctccayctcagcctgggattataggcgtgagccactgtgcccagcattagtttatttgtaatgcttttttacatcctagatgagcacaatgcctggactccccacc

SEQ ID NO: 406359 - DNA, 201 bp, Homo sapiens
aaaattaataatgtatatttcttcatcaagggtggtcctagtgaaactggcatttagttttactgggagtgtgtggtagtgaaggataccttgactactartccaaagccattgtcttgatttgtgctggttcactagtagtcttacacaccattgcttttgcaccatcggtacagacgttaacacaatgaaaaaggcaaa

SEQ ID NO: 406360 - DNA, 201 bp, Homo sapiens
tattgaggatggtatctaggtcatcaaaagaagcctgagagagaagcttgtctcattttatgcttgtagtactaaggtttaggagactgactagcccaagrgtgcacagagttagtagatagaagagttgccacttgcaggcaggtctgcctggtgccagagcctttgattttcatcatgtgctgtacagcttccaagatg

SEQ ID NO: 406361 - DNA, 201 bp, Homo sapiens
taacatcaccaacaagctcatcagagaagttttcaagtattgagaagctgtcaagctcacaggggtggataaaaaattttaattttcacccaaaaactcayattttatcattagcaacaaatacaattaattgtttcccttgaaataccagtttcactttattcatttttgagaaaatatttgtcaaatactcaagcctga

SEQ ID NO: 406362 - DNA, 201 bp, Homo sapiens
ttgccaggctggaatgtagtagtgcaatcatagctcactgtagcgttgaactcctggcttcaagcagtcctcctgcctctgcctgccaaagcatgggtatyacaggcgtgagccactgtacctggccccgtttacactcttaaagatgtaagacctcaagaagctattgtttatacagatttatccattaatgtttactat

SEQ ID NO: 406363 - DNA, 201 bp, Homo sapiens
aggactggtgccgagcatcctgcagtgcacaggatagtccccataacaaaggatgatctggtccaaatgtcagtggtgctgagatcgaaaaaccctgatcragaagcttaatgtgagttattgtgtcattgtgtgtgtggattaatgatggactttaccctcactaagaattataggattcattaaaattttacactattc

SEQ ID NO: 406364 - DNA, 201 bp, Homo sapiens
ttacttcccgaagctcaacacaaagctgaagtctacacgaagcaggtagatgtttggttagtttgtcctttcaactctttgcaaagcaggacttggagtcrcaatctctgggtcctcccagccctgccaagtacccgttgcttcacttctctgggtggcagccttctctcctctgaaatactgagtttggattaggtggca

SEQ ID NO: 406365 - DNA, 201 bp, Homo sapiens
acgatctccactcgctgcaagctctgcctcccgggttcatgccattctcctgcctcagcctccctagtagctgggactacaggtgcctgccaccatgcccrgctaattttttgtatttttagtagagacggggtttcaccgtgttagccaggatggtctcgatctcctgacctcgtgattctcccacctcggcctcccaaa

SEQ ID NO: 406366 - DNA, 201 bp, Homo sapiens
gacggatacagagtctgagctggacctcatcagccgcctttccagagaacatggggcttttgatgccgtgaagtgcactcactgggcagaagggggcaagkgtgccttagccctggctcaggccgtccagagagcagcacaagcacccagcagcttccagctcctttatgacctcaaggtgggtgatttgctgtctgcaaa

SEQ ID NO: 406367 - DNA, 201 bp, Homo sapiens
ctgggttcaagtgattctcctgcctcagcttcccaagtagctgggattacaggcgtctgccaccgtgcccagctaatttttcttatttttttagtagagayggggtttcaccatcttggccaggctggtctcgaactcctgacctcgtgatccacctgccttggcctcccaaagtgctggaattacaggcgtgagccactg

SEQ ID NO: 406368 - DNA, 201 bp, Homo sapiens
agcaccaacacacagcgatttcagaattcatttatgtaactgcagaaattggaacattacatagacatagagtcggtgctgctcccgtgcactcctcctcrctgttttgaggtgtgtcctcagtaacccagtgtggctgttgatcccagtggtgtggtatttgtggtctctggacatctcattttggaaaaactgcaagtt

SEQ ID NO: 406369 - DNA, 201 bp, Homo sapiens
tgcccagcattagtttatttgtaatgcttttttacatcctagatgagcacaatgcctggactccccacccggccctgtttttatgatattgatttggaccytgaaacagaacaggtgaatggattattctaaacaggtaagttgttactgggtaataatttggcttttttcctcatgtagcttatttatgaattatagggc

SEQ ID NO: 406370 - DNA, 201 bp, Homo sapiens
gtgcagtatggaaggaacaggaaacatttcagtgcttagagaaaacatttatttcttgtttttccttccagatcaccatccatcttcaagaagctactttraaagtctggccagtgtctattcaggcccactgggagttaggaagtataagtaagccaagagaagtcagcccctgcccagaagatctgaaactaatagtag

SEQ ID NO: 406371 - DNA, 201 bp, Homo sapiens; identical to SEQ ID NO: 90964

SEQ ID NO: 406372 - DNA, 201 bp, Homo sapiens
ccaagttaaaggatactaactcctaccatcgtgttgctgaagcaaaaatcacatgggcagctcagctagcaagactgaacgaaacaaaatttaaaagcagrcaagccctgtacctccttttggtcttgcaaagcgtgagctgaggaggcgagtgagcaactcctctactccccagcactcattcttgtaaggtgaaggtgg

SEQ ID NO: 406373 - DNA, 201 bp, Homo sapiens
aacctatgatacttatggggtcttcaactcatttcaacaccaggaatgtcattctcacaaacctctgtagtcatgcttttgatgaaggctgtcattggatytccccagctcctgctgtcactgttggccactgcacagggattctctgggatgggtgatatgtagctggaggtgcttttatttgaccctcatagtccactg

SEQ ID NO: 406374 - DNA, 201 bp, Homo sapiens; identical to SEQ ID NO: 90966

SEQ ID NO: 406375 - DNA, 201 bp, Homo sapiens
gaggcaggaggattgattgaacccaggaggcagaggttgcagtgagctgagatcgcaccactgcactccagtctgggcaacagagcaagactccatctcaaaacaaacaaacaaacaaacaaacaaaaaaagcttaaaaattaaattctggtgtaaaagacaggtagcaaacaaaaatataaagaaataaagtcattttag

SEQ ID NO: 406376 - DNA, 201 bp, Homo sapiens
aggcaggaggattgattgaacccaggaggcagaggttgcagtgagctgagatcgcaccactgcactccagtctgggcaacagagcaagactccatctcaaaacaaacaaacaaacaaacaaacaaaaaaagcttaaaaattaaattctggtgtaaaagacaggtagcaaacaaaaatataaagaaataaagtcattttaga

SEQ ID NO: 406377 - DNA, 201 bp, Homo sapiens
ggcaggaggattgattgaacccaggaggcagaggttgcagtgagctgagatcgcaccactgcactccagtctgggcaacagagcaagactccatctcaaaacaaacaaacaaacaaacaaacaaaaaaagcttaaaaattaaattctggtgtaaaagacaggtagcaaacaaaaatataaagaaataaagtcattttagat

SEQ ID NO: 406378 - DNA, 201 bp, Homo sapiens
caaacatctgtcattccatagcttttaagttaagtaggcactggagcctgatgggactaacacaccctacaattctgctgagtttttgtcgtaactgatcwccaggactgtgattctgagacttagttttgatttctcccccacttgaccagatgataaaaaaccaaatgggagaaaagttgtgggtgatgtggcatacga

SEQ ID NO: 406379 - DNA, 201 bp, Homo sapiens
gtagagttaatttgtattatcataaccctatgaatacataaaatctataaacacaattggtaaatataatttgggtaagggtaactaattcctttcaaacrgcaaataagctataatgatgtggcataatgacaggaaacataccagctctttttttcttgaaggctgggaaacaagcagagctctactctagtgtcatag

SEQ ID NO: 406380 - DNA, 201 bp, Homo sapiens
attgtgaataaaagtttctataagagttctgaaaagctgatcgagttttggctgcttttctccccaagtagaaatgtcaaaaacctactcagaagtaaagrtgtgaatttattgagaaaaagggaagggaagaatagagaaataagatcaggcacattaatagaggaaagtagggatggcataattccagtctgttttgga

SEQ ID NO: 406381 - DNA, 201 bp, Homo sapiens
  misc_feature (1)...(201): n = A,T,C or G
ggagctgattgtacagcactgcttttagctttattttgtttttcagttactgctattggttatagcctgtggttttagcctgcactgtgacaggcattgcntacgtcactgcgggctcaccacctcacccactgagggtcccaaagtcagattcagctcctatgggcccttttcctttccactgggggaagtaacacacaa

SEQ ID NO: 406382 - DNA, 201 bp, Homo sapiens
gaaatgcctctgactctgtttcttttccttccaggtcactgctggactgcctcttcccaaggcttacatacaggaggtaacctgagttatttctcatcacrtgtcctagaaagcaccacaccttgaatcagcatttctccacctggcccatgtggaaatgaatgggttattgctgtgacccagggtgcagggtgccaaaag

SEQ ID NO: 406383 - DNA, 201 bp, Homo sapiens
tgctgtgtgattggtcacataccctaagtccttagggcaggaaataatcttatactactgtacagcctgcaagcattgcagcgtcttgcctttaacacatraaaagcaccattttaagctaggagatttaaataggaaatgcctctgactctgtttcttttccttccaggtcactgctggactgcctcttcccaaggctta

SEQ ID NO: 406384 - DNA, 201 bp, Homo sapiens
accagatcgcactcaagcttgttggcccagaagggtttgtaggttagtgttttttgcaaaaccagtgaatagactgtatgtttcttttaacatcaggggarttgggatggcatttttactgttgctttcctctttacagtgacggaagcaggatttggagcagacattggaatggaaaagttttttaacatcaaatgccgg

SEQ ID NO: 406385 - DNA, 201 bp, Homo sapiens
agggggtgagtggtgcactgacagtgcttatgaaggacgcaatcaagcccaatctcatgcagacactggaggtgagcagagtgactcctgccttcttgaaytggttttggacagtcagagcagagtggttataaagcacacttgcaaggcgcggtggctcacacctgtaatcccagcactttgggaggccaaggtgggcag

SEQ ID NO: 406386 - DNA, 201 bp, Homo sapiens
cacaagcctggacgggagacgtactgcttggtatctggtgcttgagaggtcccaggagataagggagcatttctgtgaaaggttttgccagagcctgtcargaacttaatcttgactgcaatgaatgacttaacattataagtgatctttgggtttaggtgcccaaataccagtccctccttagtaagcagccttttagac

SEQ ID NO: 406387 - DNA, 201 bp, Homo sapiens
tgcttatgaaggacgcaatcaagcccaatctcatgcagacactggaggtgagcagagtgactcctgccttcttgaattggttttggacagtcagagcagastggttataaagcacacttgcaaggcgcggtggctcacacctgtaatcccagcactttgggaggccaaggtgggcagatcacaaggtcaggagatcgagac

SEQ ID NO: 406388 - DNA, 201 bp, Homo sapiens
agccagactccgtctcaaaaaataaataatttaataattggcaacttcatagcatatccagaaaaaaaccatgaatggtccaattcaggtgaaagtatcarttggtccaagatggctaacatgggtaagcctagaatgtcaaatattggtttcagaaggttgggtttttttgctggtgggagttgatgctgcacacatttg

SEQ ID NO: 406389 - DNA, 201 bp, Homo sapiens
ctcctgagtacctgggattacaggtgcccgccatcacgcctagctaatttttttttttgagatggagtttcactcgtcgcccagactggagtacaatggcrtgatctcggctcactgcaacctctgcctcctgggttcaagcgattctcctgcctcagcctcccaagtagctgggattacaggcgtccgccaccatgtcca

SEQ ID NO: 406390 - DNA, 201 bp, Homo sapiens
tttgccagagcctgtcaggaacttaatcttgactgcaatgaatgacttaacattataagtgatctttgggtttaggtgcccaaataccagtccctccttartaagcagccttttagacctaaccttttctacctaaggttttgttcagtctttttgaaaagcaggaaggccaggtccttgtgaggcttttctcattacaag

SEQ ID NO: 406391 - DNA, 201 bp, Homo sapiens
acccatttgttcttcccctttgttttcctaattccttagcaatgcattcaagaacattcatgatctggcccaagtatatatttaaaagttgagttttcatytttttttaataaagtggatgagtaacttcccaaataactgaatatttataggaaattaagacttgacttttcattataagagatactaatgggctaggca

SEQ ID NO: 406392 - DNA, 201 bp, Homo sapiens
atacagcataaatgtttctaaagagtaaagacatctaattgcctttatttccttcttatttccatcacttttttaagattgactagcatcaatgctgggaracttgctagaggtgacctcaatgactgtttcattccttgtacgcctaagggatgcttggaactcatcaaagagacaggtaaaaacaacaaaccaaacaac

SEQ ID NO: 406393 - DNA, 201 bp, Homo sapiens
gacaggtctatacctttctccgaagatgatttcgagttctccaaatttaaagaggaaagggtgggttattgaaaagtacacgttttcatgtaagaggtggrtagggaaaaatagtcattcatgaccttctctggctcagtgaatctgcattttttacataagatgacagatggccggacgcggtggctcacgccagtaatc

SEQ ID NO: 406394 - DNA, 201 bp, Homo sapiens
ttatcttcatgtagagatcaccctttattttagcaaagttgatggatggatttaaaatacagtataattattgcaaagtgctatgagagtccagaagaggractcattctgccaagaggagggctttacaaagaagatatttgacctgggtttttttctaggctgagaggataaatctagccttttaatcatgtccaaaac

SEQ ID NO: 406395 - DNA, 201 bp, Homo sapiens
atgcaggcaatctgcattttacataagataacatagacagaattgggcaggggaaaaatcagatatacatttgtgtctggtgggctggggggatttacatygccatggtgaaattttaacagaaacatcataaagatgttgcagctcactacgaatttctttgtgggcaaaatatgggggaggcatgtagcttttcatctt

SEQ ID NO: 406396 - DNA, 201 bp, Homo sapiens
ctaacttttttttttgagacggagtttcgctcttgttgcccaggctggagtggaatgctcactgcagcctccgcctcccgggttcaagtgagtctcctgcytcagcctctgagcagctgggattacaggtgcccgctaccaagcccagctgattttttaatatttttagtagagacggggtttcaccatgctggccaggct

SEQ ID NO: 406397 - DNA, 201 bp, Homo sapiens
tgctctcctgcctagatagctcctcaagggcagtggtcactgtggcgccacatccagcttcctgccatctgaccactggcactcatatctattgaattgtygaagggagttatagctggaagtcttttttctcccttcccatctcaagtttcagatgtagacgctgagctgccaggaacattagtcactgtcaagccttca

SEQ ID NO: 406398 - DNA, 201 bp, Homo sapiens
ctcccgcctccgcctcccgagtagctgggactacaggcgcccgccaccacgcccggctaattttttttgtatttttagtagagatggggtttcaccatgtyagccaggatggtctcgatctcctgacctcgtgatccgcccacctttgcctcccaaagtgctgggattacaggcgtgagccaccgcacccagcaagctcag

SEQ ID NO: 406399 - DNA, 201 bp, Homo sapiens
tcttagagttagctttctctgcttggtgagggtatcacattttgcttgttctagcaattactacaaatgttgacaccgggaacaccttcacccttccacctttttttttttttttggagacacagtctcgctctgttgcctgggctggagtacagtggcacgatcttggctcactgcaacctccgcctcctggtttcaagc

SEQ ID NO: 406400 - DNA, 201 bp, Homo sapiens
gcaggaggattgattgaacccaggaggcagaggttgcagtgagctgagatcgcaccactgcactccagtctgggcaacagagcaagactccatctcaaaacaaacaaacaaacaaacaaacaaaaaaagcttaaaaattaaattctggtgtaaaagacaggtagcaaacaaaaatataaagaaataaagtcattttagatg

SEQ ID NO: 406401 - DNA, 201 bp, Homo sapiens
tctgtatatacatagggatgagatccaattctaaagcaaaatttatttgtgtttcattatataccttatacttgtagactgaaggtaattttatatatatrtgtgtgtgtgtatatatatatataataataattattattattattattttttttgagactgagttttgctcttgtcacccaggctggagtgcaatggcac

SEQ ID NO: 406402 - DNA, 201 bp, Homo sapiens
ttgtgtttcattatataccttatacttgtagactgaaggtaattttatatatatgtgtgtgtgtgtatatatatatataataataattattattattattwttttttttgagactgagttttgctcttgtcacccaggctggagtgcaatggcacgatctcggcgcactgcaacctccacctcctgggttcaagtgattct

SEQ ID NO: 406403 - DNA, 201 bp, Homo sapiens
caaaggactcttctggctcttgcaattcaaattagcaccacaaaactgagaactgtctgtataagggacaactgaagctaagattcaggccatgtcctgakatctgaggagagcgtccagtaatagcaccaatatgacaagctcagaaaatcctgtgttacaaaagccggcttctttctctgccatggtcctgttaaaagg

SEQ ID NO: 406404 - DNA, 201 bp, Homo sapiens
tataggcatgagccaccatgcccagctaattttattttatttttgaggcagagttttactcttgtcgcccaggctagagtgcagtggtgcaatattggctyactgcaacctccacctcccaggttcaagcgattctcatgcctcagcctcctgagtagctgtgactacaggcatgcgccaccacgcccagctaatttttgt

SEQ ID NO: 406405 - DNA, 201 bp, Homo sapiens
cctccacctcccaggttcaagcgattctcatgcctcagcctcctgagtagctgtgactacaggcatgcgccaccacgcccagctaatttttgtatttttarttgcccatattgcccaggctggtctcaaactactgacctcaagtgatctgcccactcaagcctcccaaagtgctgggattacaggcgtgagccaccgcac

SEQ ID NO: 406406 - DNA, 201 bp, Homo sapiens
cgcacctgtccccgctttttttttttttttttttgagacagagtcttgctctgttgcccaggctggatgcagtggcatgatctcagctcactgcagcctcygcttcctgggttcaagcgattctcatgcctcagcctcctgagaggctgagattacaggcatgcgccactatgcccggcttattttttatatttttgtaga

SEQ ID NO: 406407 - DNA, 201 bp, Homo sapiens
tgtggaaatgaatgggttattgctgtgacccagggtgcagggtgccaaaaggcctgcagtgtgctgaggagttatattaaatgagtagatagggaagatgyacctcacaaaatagaattgtcccacatagggtgtcaataagccactgccctagaccagtggttgattctcaacagctgattttgaccccggggacatttg

SEQ ID NO: 406408 - DNA, 201 bp, Homo sapiens
  misc_feature (1)...(201): n = A,T,C or G
gacaagagcttcttttctctggtttagttgctctttggaaccagagaagttgctggttatccagtcagtgattgcagggggacgtcctgaagctgagtgtntacccgtgtgtgtgtacgtgcacatacgtgtgtatggtggaagcataagctattagaatgggcttataaactgtttgtctttccaggcttgttttgcaga

SEQ ID NO: 406409 - DNA, 201 bp, Homo sapiens
  misc_feature (1)...(201): n = A,T,C or G
cctttcttctttcctccttgagcgaatctaaccacggggagcatctgctgcaagaatggtgtttcttgtccttgtggttacctggatatgctaagaccccnactcctccctctggtagaatactgtttagagcgattctccactcgagctgagctgccaggtgttacatggggattcccctcaatgcctcaattctgaggt

SEQ ID NO: 406410 - DNA, 201 bp, Homo sapiens
gcactgcacgcccaaggtgagcctggggagctgttcacttggggctggatgatttccctccactactcacaaagtctggaagcccagcgtgcttttttagrggggttgaaatgagctctgtctatcctggattttgagtgcccagtgtggaacctcatgccgtggggcatgcgaatgcagagtaagatttagtttcattgg

SEQ ID NO: 406411 - DNA, 201 bp, Homo sapiens
taataatataaaaacatgtatacgaaagataaacaccaaatttagcatagtgattcccgctgaggggagagcaaaggaaatgagataagtctgcataggaracttcagctgtaatagttaacaacaacaaagacctgaagtgtatatggctaattctaagctaggtcttagatacgtgtatgttctatattttgtttgctg

SEQ ID NO: 406412 - DNA, 201 bp, Homo sapiens
ttattcattccagcactttttttttccctatgctctttatttatatgttctagataaatgctaggaaacttctccagtaaggcagcttggttcccctgccragcactgtagccatattcttccctgacctttgctctttgggtgatgctctgccattcgtgcccgtgctttctatttacataaaggattaaagatatgaat

SEQ ID NO: 406413 - DNA, 201 bp, Homo sapiens
cccaggatcttttccacctcagcaggactgggtctctgtattcttttattagctttctacagattctgatgcacacattttgggtttgaagatccatgatrtagaagatagtttcccactttgctggtaattggcacgtaagctagaatgaaatgccttgctgacgttaaagaaaattgatgtattgcagctttcagtcat

SEQ ID NO: 406414 - DNA, 201 bp, Homo sapiens
tctgatttttcttctttaatatgatatgtttcattaatattctgatgttaagccttatattcccaggataagcccttcttggtcatagtagaggcagtgtktctgtgtctgtgtgttttgttcagtatactgctggattcagtttgccagtatgtttgcctagtacttttatttaggatttttttgcatgtacattcataa

SEQ ID NO: 406415 - DNA, 201 bp, Homo sapiens
tgccttagtcagcatcccagatccttgtttttttgtttgtttgtttgtttttaaactggggcagtactcctgctttcctcccattcctctttcatccctgyattgaggtcagattctcccacctgtcactcctcttgtacacttgatacctgtgcagcatagtagagtagccattagccacctgcagctatttaaacttga

SEQ ID NO: 406416 - DNA, 201 bp, Homo sapiens
ctacttccaccagtgtaaacatggcctgctgctaccatctaggtcactgccttattttctcatctgtgtcattgtaaccttccttttttgtttaaaaaaawtttttttttaatttttaatttttttttgtgagacaaagtctcactctgtcacccaggctggagtacagtggcatgatattggctcactgcaacctccacc

SEQ ID NO: 406417 - DNA, 201 bp, Homo sapiens
tcttggcttcccaaagtgttgggattacagatgtgagccaccgcacccggcctagcttccctcttttaagaggttatatgcacacatttatatgtgtttayctaaaatgaattaatattttggaactagactaagtacatttgctttgcttaatggttttggcactgaaggaagcatcctctaatgagaatcccattcttt

SEQ ID NO: 406418 - DNA, 201 bp, Homo sapiens
gagaaccaacttttttttttttcttcctgtcttcccaggagtacaaagagaactgacttcttttcaatatttaggcttccatttatgaacataatttttcttttctttaatgtctttcagtgttttttttataattttttccataaaggactagcattttttttttttcggttagagttatgtctaatttacagttttcat

SEQ ID NO: 406419 - DNA, 201 bp, Homo sapiens
tcaggaggctgtttgtttgttttttgagacaagagtctccttctgttactgcactcccggctcctactcaggaggctgaggcaggagactcgcttgaaccygggaggcggaggttgcggtgagccaagattgcaccactgcactccagcctgggcaacaagagtgaaactccatctcaaaaaaagaaaaagaaaaagaaga

SEQ ID NO: 406420 - DNA, 201 bp, Homo sapiens
agaaccaacttttttttttttcttcctgtcttcccaggagtacaaagagaactgacttcttttcaatatttaggcttccatttatgaacataatttttcttttctttaatgtctttcagtgttttttttataattttttccataaaggactagcattttttttttttcggttagagttatgtctaatttacagttttcatg

SEQ ID NO: 406421 - DNA, 201 bp, Homo sapiens
gtagagaatgtttaaaaaaaattttttttaaatgtaaagctgggtgtggtggctcacgcctgtaatcccaagcactttgggaggttgaggtgggtggatcrcttgaggtcaggagtttgagaccagcctggccaacatggtgaaaccccatctctactaaaatacaaaaattagctgggcatggtggtgcatgcctgtcat

SEQ ID NO: 406422 - DNA, 201 bp, Homo sapiens
gaaccaacttttttttttttcttcctgtcttcccaggagtacaaagagaactgacttcttttcaatatttaggcttccatttatgaacataatttttcttttctttaatgtctttcagtgttttttttataattttttccataaaggactagcattttttttttttcggttagagttatgtctaatttacagttttcatgt

SEQ ID NO: 406423 - DNA, 201 bp, Homo sapiens
cccaccaccgtgcccggctaatttttgtatttttagtagaggtaggctttcaccatattgaccaggctggtcttgaactcctgacctcagctgatctaccygcctcggcctcccaaagtgctgggataacaggtgtgagccaccacatccagcctcgtgtgtttttgaaataccagctcgggggcctggggattgtttggg

SEQ ID NO: 406424 - DNA, 201 bp, Homo sapiens
ttggtttagtgtcattctttgcttcttcaaattggctgcgacagaatgagcttccttgaaattgctacggggagcggggaggaagtgggcgctgcttctgygttatctggaaggagcagcccactcctgtcctgggctctgtggtgattgccacctcctctgggtgcagggcagagctgaaaaccctcagtgttgcaacag

SEQ ID NO: 406425 - DNA, 201 bp, Homo sapiens
accaacttttttttttttcttcctgtcttcccaggagtacaaagagaactgacttcttttcaatatttaggcttccatttatgaacataatttttcttttctttaatgtctttcagtgttttttttataattttttccataaaggactagcattttttttttttcggttagagttatgtctaatttacagttttcatgtct

SEQ ID NO: 406426 - DNA, 201 bp, Homo sapiens
aagatttagtttcattggtttagtgtcattctttgcttcttcaaattggctgcgacagaatgagcttccttgaaattgctacggggagcggggaggaagtrggcgctgcttctgcgttatctggaaggagcagcccactcctgtcctgggctctgtggtgattgccacctcctctgggtgcagggcagagctgaaaaccct

SEQ ID NO: 406427 - DNA, 201 bp, Homo sapiens
tgagaccaggtgtggtggctcacacctgtaaccccagcactttgggaggccgaggcgggtggatcacctgaggtcaggagttcgagaccagccggaccaayatggtgaaaccctgtctctactaaaaatacaaaaataatcccagcactttgggaggccgaggcgggcggatcacgaggtcaggagatcgagaccatcccg

SEQ ID NO: 406428 - DNA, 201 bp, Homo sapiens
gaatgcagagtaagatttagtttcattggtttagtgtcattctttgcttcttcaaattggctgcgacagaatgagcttccttgaaattgctacggggagcrgggaggaagtgggcgctgcttctgcgttatctggaaggagcagcccactcctgtcctgggctctgtggtgattgccacctcctctgggtgcagggcagag

SEQ ID NO: 406429 - DNA, 201 bp, Homo sapiens
agaatggcgtgaacccgggaggcggagcttgcagtgagccgagatcccgccactgcactccagcctgggcgacagagcgagagactccgtctcaaaaaaaaaaaaaaaaaaaaaaaaatacaaaaattacccaggcgtggtggctcacacctgtaatcccagctactcaggaggctgaggcaggagaattgcttgaacaca

SEQ ID NO: 406430 - DNA, 201 bp, Homo sapiens
gtagcctcgctgaccaacatcatcactccagacctctttgagggcactgctgaatggatagcaaggtgagagaagccagggtttctcctggcctcttggaragcaggcggtcacgacactacttcagaaaaataaagaaaatgcagagggacttggaaggaaatacaaaaatcacaggagatccattagggttatctaatg

SEQ ID NO: 406431 - DNA, 201 bp, Homo sapiens; identical to SEQ ID NO: 90981

SEQ ID NO: 406432 - DNA, 201 bp, Homo sapiens; identical to SEQ ID NO: 90982

SEQ ID NO: 406433 - DNA, 201 bp, Homo sapiens
gcccatggtggctataccttctgtggcctggccgcgctggtaatcctcaagagggaacgttccttgaacttgaagagcttattagtaagtatcttttgagycatccccctctcaggccccaggtcatggtgatgtgattgtactcagacatgcaggcttcaggagagtttggctatgggaagggctaagagagttagctct

SEQ ID NO: 406434 - DNA, 201 bp, Homo sapiens
tctggtcttgaactcttggcctcaagctatcctacctcagccacccaaagtgctgggattataggtgtgagccattgtacctggcccccgcactagccccyttttttttttcagtccttaaaaggtttgtatagatcagagattatctgtttctttgtaggtttgatactacttgcctgagaaaccatctaggtctagtat

SEQ ID NO: 406435 - DNA, 201 bp, Homo sapiens
ttagttgctctttggaaccagagaagttgctggttatccagtcagtgattgcagggggacgtcctgaagctgagtgtttacccgtgtgtgtgtacgtgcayatacgtgtgtatggtggaagcataagctattagaatgggcttataaactgtttgtctttccaggcttgttttgcagagggagaagcacttccattatctg

SEQ ID NO: 406436 - DNA, 201 bp, Homo sapiens
gtagagacagggttttgctatgttgcctagtctggtcttgaactcttggcctcaagctatcctacctcagccacccaaagtgctgggattataggtgtgarccattgtacctggcccccgcactagcccctttttttttttcagtccttaaaaggtttgtatagatcagagattatctgtttctttgtaggtttgatacta

SEQ ID NO: 406437 - DNA, 201 bp, Homo sapiens
tcagacagcctgggtttgaatcccagttttgccctttctttcctcttctcttccttctttcttcctctatctttcaattctctctttctttttttgagacmgagtcttgctctgttgcacgagctggagtgtagtggtgtgatcacagctcgctgcagccaccacctcctgggctcaagcaatcctcccatctcaacctcc

SEQ ID NO: 406438 - DNA, 201 bp, Homo sapiens
ctcgcggacagaaggctttccaagtaagcagaactggctctgcatttcctgtgtggacaggcggaagcttgtggtccctctgcccttcgagctgtgcagcygttagtgaggatgtgaccacagaggagacgcacctctgggcaagctcagggttccagatgggcggtctgatctgtcaaagagctgttgtgcctttatccc

SEQ ID NO: 406439 - DNA, 201 bp, Homo sapiens
tttaagctgaatctgtaggtggaataggggtggctaacttaaaggatggggagagtgttccaggcagagggaacagcatgtgctaaagccaggagactgaraggagcggagctcaaagaaggcagcatgaccagagctcaggggcggagatgaggttggagagtagtgtgggtggaggcacattgtgaagagtctggaagc

SEQ ID NO: 406440 - DNA, 201 bp, Homo sapiens
atcaaatatttgttgaatcagtgattgagttaagctaggaaatctcttcagagaatgtatatctccttggttctataccgagaaaatagcagcccctaacstcctggcctgtaggaagtcctctgctcagccttccttagatgcctgccagggagggatccactgggttcagggtcatcttttttttaatcctgttgtctt

SEQ ID NO: 406441 - DNA, 201 bp, Homo sapiens
acctcaagtgatccacctgcctcagcctcctgaggctctggggttacaggcgtgagctactgcgcccagttgcattctcttatttaaatcttgtaactacrtgaggtagatcaatctcttgttttttgcagataatgaaatgggcatagtaaaattaagtcatttgctcaaaggcacatagcgagtaagatgaggagctgg

SEQ ID NO: 406442 - DNA, 201 bp, Homo sapiens
gttccatcagcaggccctgcaggagtacatcctgatgtgctgccagtgccctgcgggggggcttctggataaacctggcaagtgagtgttttctctctggrgagggaagggagaggggaggagagagcagaggggcgtgcacctcaggcctactcagagccagatctcaagagcagaggtgtcaccttcagcacctgcata

SEQ ID NO: 406443 - DNA, 201 bp, Homo sapiens
gtttcaccatattggccaggctggtctcgagctcctgacctcaagtgatccacctgcctcagcctcctgaggctctggggttacaggcgtgagctactgcrcccagttgcattctcttatttaaatcttgtaactacgtgaggtagatcaatctcttgttttttgcagataatgaaatgggcatagtaaaattaagtcatt

SEQ ID NO: 406444 - DNA, 201 bp, Homo sapiens
aggtgggtgccaacgtgcctggttaatttttataattcttgtagagatggggttttgccatgttgcccaggctggccttgaactcctgagctcaagtgatscccctcacctcagccaaagtgctgggattacaggcatgagccaccacgcctggccagaatcaatcactttagatcagtcctcagccatcacctaagagtc

SEQ ID NO: 406445 - DNA, 201 bp, Homo sapiens
tgttgcagctactaccagttaaacaatacacatccatgggctagatttggcctgtgggctatgaattttcaatccttgactcaagtcctcaatagttatgytacagttggtaccatatcagctaacaatttattgaacagtgtgctgaaagcttaccatgcattctctcataatttatgagatggagtctcgctgtatttc

SEQ ID NO: 406446 - DNA, 201 bp, Homo sapiens
ctgccttcttttcccctgcatgtaacacacacgccccctacacttacacaaaggtttctctttcctattttgttcactgctgtgcttctatttgtttaggraacaatatgataagctgggttccctctagtggacaaaatacttttgtcagctgctatgaccgctgaccaaagccagcaaggcgaggttgttactgctggt

SEQ ID NO: 406447 - DNA, 201 bp, Homo sapiens
aaattgagtgttttaaaggatgctaattaatattggagatactatacattttggctgaatggctgagtatataattcaacatatcaatataaggctgaagscaaacatcaccatcatagaataagcgaggatataagaataaattagaaaatttatcagaattttaaatcattatcacagtctcaatatttaacatattaa

SEQ ID NO: 406448 - DNA, 201 bp, Homo sapiens
atctataggtctatactgagaatacctgagaatttacatttcaaacaagtttagcttagtttctggagaacctgtttcttgagtaagaggaatggtttctatgactcatagcagcattattcataatagccaaaaaatggaaacagccaaattgtccaccagctgataaactgctaaacgaaatgtgatagatctacacag

SEQ ID NO: 406449 - DNA, 201 bp, Homo sapiens
ttgaaaccattatttgttatatttccagccatcagaattgatcagtagcctaaaactgtgtggtcaccattttatcttaatgatggaacactttctcttcctttcttttctttctttctttctttctttctttctttctttctttctttctttctttctttctttctttctttctctctctctctctctttctctttcttt

SEQ ID NO: 406450 - DNA, 201 bp, Homo sapiens
aaaggacaagaatagttacccagggccaggtgaggtggctcacgcccgtaatcccagcactttgggaggctgagaccggcagatcacgaggtcaggagatygagaccatcctggctaacatggtgaaaccccttctctactaaaaatagaaaaaattagctgggagtggtggcacactcctgtagtcccagctactcggga

SEQ ID NO: 406451 - DNA, 201 bp, Homo sapiens
tgaaaccattatttgttatatttccagccatcagaattgatcagtagcctaaaactgtgtggtcaccattttatcttaatgatggaacactttctcttcctttcttttctttctttctttctttctttctttctttctttctttctttctttctttctttctttctttctttctctctctctctctctttctctttctttc

SEQ ID NO: 406452 - DNA, 201 bp, Homo sapiens
gccactactaaaaatcttgttttatcaaaccttcaacctaaattaacagacagaggctctctaaaagaacatgacacttatttgggaatagtgtattgcartgggaatctttgtgccacagtaaactatgtgcatattcaaggaggtaaaggaagacaaaggtttttcaaggaataatgaggattatataattcttttaag

SEQ ID NO: 406453 - DNA, 201 bp, Homo sapiens
ctctgtctccagtgtggtgttgccagctgcatgtcagttaaagtcattctttattgcaaggctgtggtcttagtgaattgattgtgtctgtgcagcaagcyggaagaacccgttgggcggttacaaaatgagtaaatctcaaagaggtggcatagacttcaggtttaactacagtgttcaactgaaacaaagaaggatgtt

SEQ ID NO: 406454 - DNA, 201 bp, Homo sapiens
gtgtggggagggaaggaaagaaaaccagagcaccaaaactagagtgccaagaagccacaagatgggaaaccctccatcccacagattgactcctggagatyctgtcgggctggattttgtctcttttagcctacaactgcctttcccatctgtgtctcctcagcaatgggtgacaagccggcagatgcgatttgaaggagg

SEQ ID NO: 406455 - DNA, 201 bp, Homo sapiens
tggaattaggtcattgatacttggctggatctgccgggcccttactgaccctttgcccttcaacaggtgaccctgcccttagcatgagccactggatgttycatcagcaggccctgcaggagtacatcctgatgtgctgccagtgccctgcgggggggcttctggataaacctggcaagtgagtgttttctctctggggag

SEQ ID NO: 406456 - DNA, 201 bp, Homo sapiens
ttgtagagacagggttttgctatgttgcctagtctggtcttgaactcttggcctcaagctatcctacctcagccacccaaagtgctgggattataggtgtragccattgtacctggcccccgcactagcccctttttttttttcagtccttaaaaggtttgtatagatcagagattatctgtttctttgtaggtttgatac

SEQ ID NO: 406457 - DNA, 201 bp, Homo sapiens
cctcataaaattaaatgggtagcttcctgcacctcttaccttttttctttttcttttctttttcagagacatgatctcactctgtcactcatgctggagtrcagtgctgtgatcatagctcactgcagcctggaactcctgggctcaagctatcctcctgccttagcctcccaagtagcagggactacaggtgcacaccac

SEQ ID NO: 406458 - DNA, 201 bp, Homo sapiens
gacccatctagttctactgaattagagctgcagtttagcaagatccacaggtaatttctatgcaactcaagtttgagaagcactgatacctggctgaacaytggaatcacgtggggagtttaaaaaaaatactgccacctgggtcccacccatagtgattccggtttaattggaattaggtgtggcttgggtgttgggatt

SEQ ID NO: 406459 - DNA, 201 bp, Homo sapiens
ccttaaaagctttacctgtggttcttctacgcattgatttagtgaacttttaaacatttcttagacttcccaataatgtattttgctttgtgcctaggagrtggttacttctaggtgcagaaaacacttgttatgaacaaagcctactggctctgacccataaggaaatagattatttttagtaagatacagataaatctt

SEQ ID NO: 406460 - DNA, 201 bp, Homo sapiens
ggggatcagatttcaacattaatttttgtggggacaaataaaccacatccaaaccatagcattttgtttttggtgtttttttgttaaatagaagattttargccagatatggtggttcgcacctgtaaacctagcactttgggaggctgaggtgggagaatcgcttgagcccaggtagtcaaggctgcagtgagctctgtt

SEQ ID NO: 406461 - DNA, 201 bp, Homo sapiens
tagtgagtttagaaagtccccaggaaccagcaatggactgaatcccctgtcctctcatctgtcacaatcaaatgcatgttttccaggatggcccaggtttsgggggaggaagtggctttgctctcattccattctgctgcctttgtgtgatcctctctttcagcagcagtatctagagagtctccaaaggacaggacactc

SEQ ID NO: 406462 - DNA, 201 bp, Homo sapiens
ccattgtatttttgaggtttatctgtgttcacatgtgttgctccagtttattcattttaactattatatgatactcccttatataaatgtaccccagtgtrtttctctgttctcctgctagttatcaattttttgctattacagtgttgcagtgaacgttgtggtatctgtctcattgggttcacatgttagaatgtctcc

SEQ ID NO: 406463 - DNA, 201 bp, Homo sapiens
tcaagtgatatgcctgcctcagcctcccaaggtgccaggattacatgtgtgagccaccacgcctggccccatctttgtttcttttaattgggaaacatttcaaatggaagaaacacaaatggccaatagatagttgaaaagatgctcaacctcattcttaatcagaaaaaccaccacccagcttttccaggccctaattat

SEQ ID NO: 406464 - DNA, 201 bp, Homo sapiens
gaaaccattatttgttatatttccagccatcagaattgatcagtagcctaaaactgtgtggtcaccattttatcttaatgatggaacactttctcttcctttcttttctttctttctttctttctttctttctttctttctttctttctttctttctttctttctttctttctctctctctctctctttctctttctttct

SEQ ID NO: 406465 - DNA, 201 bp, Homo sapiens
gtggcccatttctagatatttaggtatttttctagagaagtgtatcaatttatcattagtactgcccctggagagccctttccagaagacagctggagagrctgactttaaaattacagtttcctttaatagtttaaggtaaaaaaagaaagaaaagaaaaaaaatacagttcccactgctgggcagggctggaggatggg

SEQ ID NO: 406466 - DNA, 201 bp, Homo sapiens
aaaccattatttgttatatttccagccatcagaattgatcagtagcctaaaactgtgtggtcaccattttatcttaatgatggaacactttctcttcctttcttttctttctttctttctttctttctttctttctttctttctttctttctttctttctttctttctttctctctctctctctctttctctttctttctc

SEQ ID NO: 406467 - DNA, 201 bp, Homo sapiens
gtgccatttaccaattgttgggcatcttttttttaaaaatgatttattgtcaggcatcttttagcccaggtatcaaaatataaaattgaccaaggacttartgtacatcctatatgtatatatatttttaatcgatttctatgcagatgtttctgcacacctgtccgtgatttgtccctccttcccacttgataactgtgt

SEQ ID NO: 406468 - DNA, 201 bp, Homo sapiens
accattatttgttatatttccagccatcagaattgatcagtagcctaaaactgtgtggtcaccattttatcttaatgatggaacactttctcttcctttcttttctttctttctttctttctttctttctttctttctttctttctttctttctttctttctttctttctctctctctctctctttctctttctttctctc

SEQ ID NO: 406469 - DNA, 201 bp, Homo sapiens
ataacttttaaaaagtaactaaagctggccgggcgtggtggctcacgcctgtaatcctagcactttgggaagccgagttgggcagatcattttaggagttygagactggcttgatcaacatagtgaaaccctgtctctactaaaaatgcaaaaattagccaggcgtgggggcttgtacctgtaatccaaggtactcaggag

SEQ ID NO: 406470 - DNA, 201 bp, Homo sapiens
tatttgttatatttccagccatcagaattgatcagtagcctaaaactgtgtggtcaccattttatcttaatgatggaacactttctcttcctttcttttctttctttctttctttctttctttctttctttctttctttctttctttctttctttctttctttctctctctctctctctttctctttctttctctcctctc

SEQ ID NO: 406471 - DNA, 201 bp, Homo sapiens
atttgttatatttccagccatcagaattgatcagtagcctaaaactgtgtggtcaccattttatcttaatgatggaacactttctcttcctttcttttctttctttctttctttctttctttctttctttctttctttctttctttctttctttctttctttctctctctctctctctttctctttctttctctcctctct

SEQ ID NO: 406472 - DNA, 201 bp, Homo sapiens
ttgttatatttccagccatcagaattgatcagtagcctaaaactgtgtggtcaccattttatcttaatgatggaacactttctcttcctttcttttctttctttctttctttctttctttctttctttctttctttctttctttctttctttctttctttctctctctctctctctttctctttctttctctcctctctct

SEQ ID NO: 406473 - DNA, 201 bp, Homo sapiens
ctttcactgaagccatgccgtgagcaactctatccaaatagaatgtcacacctctcagttggagacccaggaggactgaccgtgtgccaagagtgaggacrggaggtgattacagcttactaggcaaggcgagcagtccgcccgcggagttcactgagcctcattagctcttccgtagagcttaatgtgtttcccgtttct

SEQ ID NO: 406474 - DNA, 201 bp, Homo sapiens
tttatcttaatgatggaacactttctcttcctttcttttctttctttctttctttctttctttctttctttctttctttctttctttctttctttctttctttctctctctctctctctttctctttctttctctcctctctctttctctctccctctctctttctgtctctgtctttctcactttctttcctttctgtct

SEQ ID NO: 406475 - DNA, 201 bp, Homo sapiens
tgatagaagggactggagctctgcttggttaggtggtcagtaggctagctttctgaatccattttattttattgaaattcagcatataccatattgcccawgtgtaaagtaatcctgcatatcaaaatttccccattaaaaagtccaaaaggttgtttttggtcaagttgaaaatacatgtacttttaggtatataagtga

SEQ ID NO: 406476 - DNA, 201 bp, Homo sapiens
ttatcttaatgatggaacactttctcttcctttcttttctttctttctttctttctttctttctttctttctttctttctttctttctttctttctttctttctctctctctctctctttctctttctttctctcctctctctttctctctccctctctctttctgtctctgtctttctcactttctttcctttctgtctg

SEQ ID NO: 406477 - DNA, 201 bp, Homo sapiens
gggaagggtcgtttcaaggttgggcttggaggagagggcagtagccgagtcccctctgccctaaagaacgagaagaatcgtgttctatgcctggaggacaraggcagcccgtgcgggtcggacagcccactctgttctgccagtacttcgggaggttctggggtgcatagtgcacttttcccaacctgccctcagcttctg

SEQ ID NO: 406478 - DNA, 201 bp, Homo sapiens
tcttaatgatggaacactttctcttcctttcttttctttctttctttctttctttctttctttctttctttctttctttctttctttctttctttctttctctctctctctctctttctctttctttctctcctctctctttctctctccctctctctttctgtctctgtctttctcactttctttcctttctgtctgtct

SEQ ID NO: 406479 - DNA, 201 bp, Homo sapiens
cacttttgtattcctagaacctagcacaatgcctgacacatagcaggtgttccataaatatctgcggactgactgtctatttcacttatccttgttccttstactgcatttcagttctcgctactgcagtgtaacctccaagagacaggagaaaatcataatacccccctccctccatcactgagtgatactgagacggcg

SEQ ID NO: 406480 - DNA, 201 bp, Homo sapiens
gatggaacactttctcttcctttcttttctttctttctttctttctttctttctttctttctttctttctttctttctttctttctttctttctctctctctctctctttctctttctttctctcctctctctttctctctccctctctctttctgtctctgtctttctcactttctttcctttctgtctgtcttgtcttg

SEQ ID NO: 406481 - DNA, 201 bp, Homo sapiens
aggacaggaggtgattacagcttactaggcaaggcgagcagtccgcccgcggagttcactgagcctcattagctcttccgtagagcttaatgtgtttcccrtttctgtctttccagaagcgcatactgtgctgcctccgtagcctcgctgaccaacatcatcactccagacctctttgagggcactgctgaatggatagca

SEQ ID NO: 406482 - DNA, 201 bp, Homo sapiens
tctacagtaaaattgtaggtgcaaaaagaagtatgtgttgttttaacctgtgacgtttcagaactcacagagcaaggcagcagcgtttgcttttgctttcyctgcccggataatgggaactctgaaatcgaaagcaattaaatgtgatgttggcaaacagttataaacttgtgtcttcttggagagtaggctatgtagtct

SEQ ID NO: 406483 - DNA, 201 bp, Homo sapiens
tcttggcacctccagctgcccgtcttgtcccccagcctgcatgcaaccccctcccccagacagggaaacagattgctgggtagataactcttctttttttwaaaaaaaaaaaaaaaaaactgatctaaatagaataggatacaggattttaaaacccctcagtgttgtaaacagagactgtaatcatgacaactattatag

SEQ ID NO: 406484 - DNA, 201 bp, Homo sapiens
tacagcatttctccaggtatatgtacacgtgttggttccagaaagacatgaggtaacttatatgtctgtccagtgctctcttcccctacaggtaaccacayacattctatatcccaagcatctcaagaacagaaaccagttcaggcatggtggctaatgcctgtaatctcagcactttgggaggctcaggcaggtgaattg

SEQ ID NO: 406485 - DNA, 201 bp, Homo sapiens
aacgttccttgaacttgaagagcttattagtaagtatcttttgagccatccccctctcaggccccaggtcatggtgatgtgattgtactcagacatgcagscttcaggagagtttggctatgggaagggctaagagagttagctctgttccaacacagaggaaggagtgagcagctgctctgtcttggctcccccttctgc

SEQ ID NO: 406486 - DNA, 201 bp, Homo sapiens
cctttcaggacctttacctagtaagactctagaaacaggaagtaccctcccctgtaccctttcagttgagtgaggcagctctgtaagtccgtggctggaayggcctaggtggtctagggagggaaatggaaatgtcatatctgctcagccagttggttctgctcattctgagggaccaaacccatgactatcttgatcttt

SEQ ID NO: 406487 - DNA, 201 bp, Homo sapiens
tttgctccctgtcttatttcctccaatttatttttgtttgttttggtctcctctttcatagtagagactgtggtcaaatgtctggtactctacagctgtctgttcatatttaaggatccagcactgaaaagctgctggggagctctgcgagagtgggcaggatcaagccattcattggggaattctcaaagcagtgtctgt

SEQ ID NO: 406488 - DNA, 201 bp, Homo sapiens
ttttctatccccatcctgtccttctttagcggcttggaatctttattctttttgtgtgtgatggagtcttgctctgtcacccaggttggagtgcagtggcrtaatctcagctcactgcaacctcaggtgcctgccaccatgcctgactaatttttgtatttttagtagagacagggtctcgtcatactggccaggctggtc

SEQ ID NO: 406489 - DNA, 201 bp, Homo sapiens
tggaacactttctcttcctttcttttctttctttctttctttctttctttctttctttctttctttctttctttctttctttctttctttctctctctctctctctttctctttctttctctcctctctctttctctctccctctctctttctgtctctgtctttctcactttctttcctttctgtctgtcttgtcttgtc

SEQ ID NO: 406490 - DNA, 201 bp, Homo sapiens
tgcccgccctgacccctgacccctggcctgctgctgccgccctgggctatggctgccatcctgagggcaaaccagagagaaaaagttgtgggggaagggasggactaactgcatgctgttctctgttccaagtttcaaactccaccaaaatctgcctgccctttttcagtcagctgaaccctcaggaagctgtttttttgt

SEQ ID NO: 406491 - DNA, 201 bp, Homo sapiens
ggaacactttctcttcctttcttttctttctttctttctttctttctttctttctttctttctttctttctttctttctttctttctttctctctctctctctctttctctttctttctctcctctctctttctctctccctctctctttctgtctctgtctttctcactttctttcctttctgtctgtcttgtcttgtcc

SEQ ID NO: 406492 - DNA, 201 bp, Homo sapiens
tgagatactgttttagttaaaaaaattttatttttatcaaagtagtatgtattaccatataaatataatttacagtgataccagatgatatgctgagatcrtgtttacttttttgtatgagtttcattttcctggagttaatggatatatcatgaatgtacttatgaattccttcccaaattgtctgtcagagctataaaa

SEQ ID NO: 406493 - DNA, 201 bp, Homo sapiens
accagagctcaggggcggagatgaggttggagagtagtgtgggtggaggcacattgtgaagagtctggaagcccagtgggctcacccctcataagaaattmtatttaaatcattacccagtacacatagatgtgtaagttccttctcagacagtggaaacctgacttcccatagccttaatagatttacccacttgctctc

SEQ ID NO: 406494 - DNA, 201 bp, Homo sapiens
ccagatctcaagagcagaggtgtcaccttcagcacctgcatagcgctaggttgtatgggaaaaagcacccagttgggagcaccccttgaggccattgatcytggcacctccagctgcccgtcttgtcccccagcctgcatgcaaccccctcccccagacagggaaacagattgctgggtagataactcttcttttttttaa

SEQ ID NO: 406495 - DNA, 201 bp, Homo sapiens
caggtgcggtggctcacgcctgtaattccagcactttgggaggccagggcaagcggatcatgaggtcaggaaatcgagaccatcctggctaacatggtgamaccccgtctctactaaaaatacaaaaaattagctgggcatggtggcgggcgcctgtagtcccagctactcgggaagctgaggcaggagaatggagtgaac

SEQ ID NO: 406496 - DNA, 201 bp, Homo sapiens
gactgaggctaactggagaccctgtgcccttaacttctttcctgcccattactgccatctgggaatgcagacccagggttgccaaatcatctttgtttccttttttttttttcttcctccaaatgaagccggaaatcacgttttcatgtgactctcctgacaaatgttgcagctactaccagttaaacaatacacatccat

SEQ ID NO: 406497 - DNA, 201 bp, Homo sapiens
agcaggccctgcaggagtacatcctgatgtgctgccagtgccctgcgggggggcttctggataaacctggcaagtgagtgttttctctctggggagggaasggagaggggaggagagagcagaggggcgtgcacctcaggcctactcagagccagatctcaagagcagaggtgtcaccttcagcacctgcatagcgctagg

SEQ ID NO: 406498 - DNA, 201 bp, Homo sapiens
atgtgatgccagctcatgcatcttgcatttacatcccctcctaagccgttctgcccatggatgactgttcctatttccaaagctgtaatctttttttctgtttttttttttttaaacctgcccaattgtgcagaacatagctataatttttataacttatcctaggccttaagtctgtctatgatagcctagtctagtgct

SEQ ID NO: 406499 - DNA, 201 bp, Homo sapiens
attggaatcacgtggggagtttaaaaaaaatactgccacctgggtcccacccatagtgattccggtttaattggaattaggtgtggcttgggtgttgggatttttttaaaacaccccccaagtaattttagttgtgcagcaaggactagtgatggctcaagctttgcatgtatctgaatcacctgagaatttggtaaaaat

SEQ ID NO: 406500 - DNA, 201 bp, Homo sapiens
cttttgcagctgtgattatttgctatcttattcattccagcactttttttttccctatgctctttatttatatgttctagataaatgctaggaaacttctccagtaaggcagcttggttcccctgccaagcactgtagccatattcttccctgacctttgctctttgggtgatgctctgccattcgtgcccgtgctttcta

SEQ ID NO: 406501 - DNA, 201 bp, Homo sapiens
ccaacatcatcactccagacctctttgagggcactgctgaatggatagcaaggtgagagaagccagggtttctcctggcctcttggagagcaggcggtcaygacactacttcagaaaaataaagaaaatgcagagggacttggaaggaaatacaaaaatcacaggagatccattagggttatctaatgatttttttaaata

SEQ ID NO: 406502 - DNA, 201 bp, Homo sapiens
ttgactggttaggcacagactagatacggaactcagacagcctgggtttgaatcccagttttgccctttctttcctcttctcttccttctttcttcctctrtctttcaattctctctttctttttttgagacagagtcttgctctgttgcacgagctggagtgtagtggtgtgatcacagctcgctgcagccaccacctcc

SEQ ID NO: 406503 - DNA, 201 bp, Homo sapiens
tgatttagtgaacttttaaacatttcttagacttcccaataatgtattttgctttgtgcctaggaggtggttacttctaggtgcagaaaacacttgttatraacaaagcctactggctctgacccataaggaaatagattatttttagtaagatacagataaatcttaaggacttctatataaatagaagattttttttag

SEQ ID NO: 406504 - DNA, 201 bp, Homo sapiens
atgccatctcttcagagaatgagatccccagaatgctctgcctcagtgccttgttcatattctttgtagtactttactcagttggtggtgtgttgtttaatgtgtgtttgtctgctttcctgaaaaaacaatagccctatgagggcaggatgctcactgctgcagccagctgaggacaacctggaggtgctctgagcctag

SEQ ID NO: 406505 - DNA, 201 bp, Homo sapiens
gatattatggatttggtttctggaaaagtccattgtgatgccagcatggtacaggggattccctctcgccttgtcctaagcctgtcatcctgcagaacccrtcttacagtactgtgaagttccagaccataccaaccaaccctcgccaataggcatttgtggcaataggaagaaaaagctgatggaggtctcatctgtatt

SEQ ID NO: 406506 - DNA, 201 bp, Homo sapiens
tgccatctcttcagagaatgagatccccagaatgctctgcctcagtgccttgttcatattctttgtagtactttactcagttggtggtgtgttgtttaatgtgtgtttgtctgctttcctgaaaaaacaatagccctatgagggcaggatgctcactgctgcagccagctgaggacaacctggaggtgctctgagcctaga

SEQ ID NO: 406507 - DNA, 201 bp, Homo sapiens
gggagggaaggaaagaaaaccagagcaccaaaactagagtgccaagaagccacaagatgggaaaccctccatcccacagattgactcctggagattctgtygggctggattttgtctcttttagcctacaactgcctttcccatctgtgtctcctcagcaatgggtgacaagccggcagatgcgatttgaaggaggatttc

SEQ ID NO: 406508 - DNA, 201 bp, Homo sapiens
ctgtaatacacagatagtcatcagaattcataacttgacttttcagatatgagttagttactaactgcattggaaaatcacttgttcattctgaagaaatrattaggaactccaaagagaaggacactatgttgggaaaattttaagcattttccacccttgtggtatgacatatttccatgtttttgtcaggtgtcttag

SEQ ID NO: 406509 - DNA, 201 bp, Homo sapiens
tttaggcttccatttatgaacataatttttcttttctttaatgtctttcagtgttttttttataattttttccataaaggactagcattttttttttttcrgttagagttatgtctaatttacagttttcatgtctcttgtgactggaatcttttcttattttcagttttgtaactgtttgttactagtgtatagaaatgc

SEQ ID NO: 406510 - DNA, 201 bp, Homo sapiens
gaataatacacctacttgcctatcaatgataaagtggaactttatataagatgaagttacaagtgggttagagtgggaaaagggaactaaattcagtacartattttacaaggagtaaagaaactgagaaaatgctatacagtttgtatgccaaacaaagacctgtactttacaagatcgaaatagggaaaattaaggcca

SEQ ID NO: 406511 - DNA, 201 bp, Homo sapiens
tttatgctagttattgcattcatggttgaaactcaacttagggaaagggttccaatgtattaagcaatgggctgcttctccccaatcctccctaacaattygttgtgtggacttctcatctaaaaggttagtggcttttgcttgggatcagtgctctctattgatgttcttgctggtctccagacacattcctgttgcatt

SEQ ID NO: 406512 - DNA, 201 bp, Homo sapiens
tctctcgcagctcttgaaagcatctgtttgagggaaaggtctctgggcaagcaagtggttatttggattgcttgcttccctttttccacctgggacattgyaatcataaaataacagtaaattccaaacctcaaaaactattatggcctgagcacagctgaaatctagcagagtttaactcttctgcctccatgtctgtca

SEQ ID NO: 406513 - DNA, 201 bp, Homo sapiens
catggagacaagagtcaaccagaaagagattgggtacttaatggtaagtttaaaactaagcattttctgttgattccccaccccctgcccataagtgaatrttcatgctctatttcagggataggcaaactttctgtaaagggccacatagtaagtatgcttggctttgtaaaccaaatggtggtctctgttatagccact

SEQ ID NO: 406514 - DNA, 201 bp, Homo sapiens
ttgcaacctccacctcctggcttcaagcgattctcctgtctcagcttcccaagcagctgggattacaggcatgcgccgccacacccagctaatttttgtakttttagtagagacggggtttcaccatgttggccagactggtctcgaactcctgacctcaggtgatctgcctcggcctcccaaaataatgggattacaggt

SEQ ID NO: 406515 - DNA, 201 bp, Homo sapiens
agatggagtttcgctcttggttgcccacgctggagtacattggcacaatctcggctcattgcaacctccacctcctggcttcaagcgattctcctgtctcrgcttcccaagcagctgggattacaggcatgcgccgccacacccagctaatttttgtagttttagtagagacggggtttcaccatgttggccagactggtc

SEQ ID NO: 406516 - DNA, 201 bp, Homo sapiens
tggtctggaactcctgacctcaggtgatctgcctgcctcggcctccccaaggtgctgggattacaggtgtgagccaccgcgcctggcattgaatgtgtactttttttttttttttttttttttttgagatggagtttcgctcttggttgcccacgctggagtacattggcacaatctcggctcattgcaacctccacctcc

SEQ ID NO: 406517 - DNA, 201 bp, Homo sapiens
ctattgtagcagcttttgtttgtttgtttttggaaacggagtctcaacgttgtcacccaggctgaagtgcagtggcgcgatctcagctcactacctcctcygcctcctgggttcatgcgattctgcttcaccctcccgagtagctggaattacaagggcccaccaccactctggctaatttttgtatttttagtagagaca

SEQ ID NO: 406518 - DNA, 201 bp, Homo sapiens; identical to SEQ ID NO: 90989

SEQ ID NO: 406519 - DNA, 201 bp, Homo sapiens; identical to SEQ ID NO: 90990

SEQ ID NO: 406520 - DNA, 201 bp, Homo sapiens
ttttgctcttgttgcccaggctagagtgcaatggtgtgatcttggctcactgcaacctccgcctcctgggttcaagcgattctactgcctcagcctcccargtagctgggatcacaggcacccgccaccatgcccggctaattttttgtatttttagcagagatggagtttcactatgttgggcaggctggtctcaaactc

SEQ ID NO: 406521 - DNA, 201 bp, Homo sapiens
aagcacaggacaaaggacaaaactaaaaagtcatccctctgctcgcctgaaacaaacacatagctgactgctgcctctgctctatgattattttatcttaygtgaaaatgcagattatctgagcgtgagcagaaagcatcagtgaagactatcaaagacccagaagaggacacggacacatggagcgggggaacaacacat

SEQ ID NO: 406522 - DNA, 201 bp, Homo sapiens
ctccctagctcaagcaaactacctgcctcagcttttcaaagtgctaggattacaggcgtgagccactgcacccagctgatttttttttttttttttttttttttttttgagacggagttttgctcttgttgcccaggctagagtgcaatggtgtgatcttggctcactgcaacctccgcctcctgggttcaagcgattcta

SEQ ID NO: 406523 - DNA, 201 bp, Homo sapiens
ttgtagagaccgggtttcgtcatgttccccaggctggtcttgaactccctagctcaagcaaactacctgcctcagcttttcaaagtgctaggattacaggsgtgagccactgcacccagctgatttttttttttttttttttttttttttttgagacggagttttgctcttgttgcccaggctagagtgcaatggtgtgat

SEQ ID NO: 406524 - DNA, 201 bp, Homo sapiens
gtccaacccgcggctcaggatggctttgtggcccaacacgaatttgtaaactttcttaaaacatatgaagtgtctttttgtttgtttttgctcataagctrtcagtgtattttatgtgtggcccacgacaattcttcagtgtgggccagggcagccaaaaggttggacacccctgccctatgtgaactggtcttggttgac

SEQ ID NO: 406525 - DNA, 201 bp, Homo sapiens
ttcatacgctactgttgccgttttacattttattctagtgtggtgatatttttcttaaaaaattttttggttaattttttttttttttttcctttttgtaragaccgggtttcgtcatgttccccaggctggtcttgaactccctagctcaagcaaactacctgcctcagcttttcaaagtgctaggattacaggcgtgag

SEQ ID NO: 406526 - DNA, 201 bp, Homo sapiens
agagtttattcatacgctactgttgccgttttacattttattctagtgtggtgatatttttcttaaaaaattttttggttaattttttttttttttttccyttttgtagagaccgggtttcgtcatgttccccaggctggtcttgaactccctagctcaagcaaactacctgcctcagcttttcaaagtgctaggattaca

SEQ ID NO: 406527 - DNA, 201 bp, Homo sapiens; identical to SEQ ID NO: 90994

SEQ ID NO: 406528 - DNA, 201 bp, Homo sapiens
acttctcatctaaaaggttagtggcttttgcttgggatcagtgctctctattgatgttcttgctggtctccagacacattcctgttgcattaagacttgaragacttgtagatgtgtgatgttcaggcacaggatgctgaaagctatgttactattcttagtttgtaaattgtccttttgataccatcatcttgttttctt

SEQ ID NO: 406529 - DNA, 201 bp, Homo sapiens; identical to SEQ ID NO: 91007

SEQ ID NO: 406530 - DNA, 201 bp, Homo sapiens; identical to SEQ ID NO: 91008

SEQ ID NO: 406531 - DNA, 201 bp, Homo sapiens; identical to SEQ ID NO: 90996

SEQ ID NO: 406532 - DNA, 201 bp, Homo sapiens; identical to SEQ ID NO: 90997

SEQ ID NO: 406533 - DNA, 201 bp, Homo sapiens; identical to SEQ ID NO: 90998

SEQ ID NO: 406534 - DNA, 201 bp, Homo sapiens; identical to SEQ ID NO: 90999

SEQ ID NO: 406535 - DNA, 201 bp, Homo sapiens; identical to SEQ ID NO: 91000

SEQ ID NO: 406536 - DNA, 201 bp, Homo sapiens; identical to SEQ ID NO: 91002

SEQ ID NO: 406537 - DNA, 201 bp, Homo sapiens
gagccactgcccccggcaggctcagctcttttattagcgtaagctaaaaatgaagaccagtctaccagtcctttccaagacccagttttgctttgcagatragcagacaggtggagtgcttatcacagtttaataggggagcaggcccaagaagctattctaagattgagggacttgcttggagtgtatcttccttcttgt

SEQ ID NO: 406538 - DNA, 201 bp, Homo sapiens
ggcctgtaatcccagcgatttgggaggccgaggcgggcggatcaccggaggtcaggagttcgagaccagcctgatcaacatggagaaatcccgtttctacyaaaaataacaaaattagcctggcttggtggcgcatgcctgtaatcccagctactcgggaggccaaggcaggagaatcgcttgaacccggggggaggaggt

SEQ ID NO: 406539 - DNA, 201 bp, Homo sapiens
cggctctcgagccgggccgcttcgggcgggctgttcgatgtctccaggcctcggcgttcatctgaaaaacgcggatcttcctgagagaacacttcagcccrggaaagccttacacgaaatggcacccttgacgttctctccccagagttcactgtttaaggcacgggagacgaaaagaccaacttctcatttttagaaata

SEQ ID NO: 406540 - DNA, 201 bp, Homo sapiens; identical to SEQ ID NO: 90986

SEQ ID NO: 406541 - DNA, 201 bp, Homo sapiens; identical to SEQ ID NO: 90987

SEQ ID NO: 406542 - DNA, 201 bp, Homo sapiens; identical to SEQ ID NO: 90988

SEQ ID NO: 406543 - DNA, 201 bp, Homo sapiens
ggttagagtttattcatacgctactgttgccgttttacattttattctagtgtggtgatatttttcttaaaaaattttttggttaattttttttttttttttcctttttgtagagaccgggtttcgtcatgttccccaggctggtcttgaactccctagctcaagcaaactacctgcctcagcttttcaaagtgctaggat

SEQ ID NO: 406544 - DNA, 201 bp, Homo sapiens
tatttgaaagaaaaaaatacaaagcgtgattctccccattccctgccccccccacaattttttttaactttggtttcccccaccccccttttattttcaargtctcttcctgctcctaacaaacaggctttggtctgcagcaaggcctaggcatgactattcaaacagagggagaggagacagacagctgaatggctcagc

SEQ ID NO: 406545 - DNA, 201 bp, Homo sapiens
ttaatgtacagattattgaaccaagtagatatattggttagagtttattcatacgctactgttgccgttttacattttattctagtgtggtgatatttttyttaaaaaattttttggttaattttttttttttttttcctttttgtagagaccgggtttcgtcatgttccccaggctggtcttgaactccctagctcaagc

SEQ ID NO: 406546 - DNA, 201 bp, Homo sapiens
ggaattagccaagttctgcctgttgagtgtaggtatccagtgatcccaataaaatctcctgccatcaatttttgttacgtatgtatttagaggaatgtctrgctggttaagccagagttctaatggctttgaattgcaggaaattgaggccctgtagaataatacacctacttgcctatcaatgataaagtggaactttat

SEQ ID NO: 406547 - DNA, 201 bp, Homo sapiens
gctcacgcctgtaatcccagcactttgggaggccgaggtgggcggatcacgaggtccagagattgggaccatcctggctaacatggtgaaaccccgtctcyactaaaaatacgaaaaattagccaggcgtggtggcaggtgcctgcagtcccagctactggggaggctgaggcaggagaatggcgtgaacctgggagtcgg

SEQ ID NO: 406548 - DNA, 201 bp, Homo sapiens
catgtatttcacatgtgtgatgcaaaaatgataggcattgtacatttgaagtagtatggtttttaatgttaatatatgacttcaaaggtgaatttttttgyaaagccaaattaaactaattactgaccggataaaaacatttgagcagcatagtataccagagagtacagtgtgcgtatttaaagatggcatggatatgct

SEQ ID NO: 406549 - DNA, 201 bp, Homo sapiens
tggaaactttgtgaggatttggtgattgtacataagtcctgacatggttttgcggttactttgttaaaatttagcttctctgggccagtgcggtggctcaygcctgtaatcccagcactttgggaggccgaggtgggcggatcacgaggtccagagattgggaccatcctggctaacatggtgaaaccccgtctctactaa

SEQ ID NO: 406550 - DNA, 201 bp, Homo sapiens
ttttaaaaatttcaaacgaactagccttctttcataagatctgtgccccaactctccctttcccaagaaatgttcttgattatttgaattgctgttgtttyaactgagtgttacacagttgaagtggtggttattttgaaaaaggaataggtgaggtcagttcatgtatttcacatgtgtgatgcaaaaatgataggcatt

SEQ ID NO: 406551 - DNA, 201 bp, Homo sapiens
tatctacctggtgatgtgcttaaattagaggtcaggaatgtgtcattctgccagtttaagtcaggatgaccatccaaaattccaaattttaggccaggcayggtggctcacacctgtaatcccagcactttgggaggccaaagtgggcagatcacatgaagtcaggagttcgagactagcctggccaacatggggaaaccc

SEQ ID NO: 406552 - DNA, 201 bp, Homo sapiens; identical to SEQ ID NO: 90991

SEQ ID NO: 406553 - DNA, 201 bp, Homo sapiens
ccagccccgcgggggatcgggaggggcggcctggccgcatcagcccaggcccgggctttggcgcctcgcctggtttcccggctctcgagccgggccgcttygggcgggctgttcgatgtctccaggcctcggcgttcatctgaaaaacgcggatcttcctgagagaacacttcagcccaggaaagccttacacgaaatggc

SEQ ID NO: 406554 - DNA, 201 bp, Homo sapiens
taaaaggttagtggcttttgcttgggatcagtgctctctattgatgttcttgctggtctccagacacattcctgttgcattaagacttgaaagacttgtaratgtgtgatgttcaggcacaggatgctgaaagctatgttactattcttagtttgtaaattgtccttttgataccatcatcttgttttctttttgtaggta

SEQ ID NO: 406555 - DNA, 201 bp, Homo sapiens; identical to SEQ ID NO: 90992

SEQ ID NO: 406556 - DNA, 201 bp, Homo sapiens; identical to SEQ ID NO: 90993

SEQ ID NO: 406557 - DNA, 201 bp, Homo sapiens
gtccaaattctgcctttggagcacaagcaggccaatacacctatggtcaaggcacctatggggcagctgcttatggcaccagtagctatacagctcaagaatatggtgctggcacttatggagctagtagcaccacctcaactgggagaagttcacagagctctagccagcagtttagtgggataggccggtctgggcagc

SEQ ID NO: 406558 - DNA, 201 bp, Homo sapiens; identical to SEQ ID NO: 91001

SEQ ID NO: 406559 - DNA, 201 bp, Homo sapiens
gactgttcacatctgtatctgctggaatacttattaaatggatgagtaactccttaggccagtgtcagcattgctgtcatcccaggacctacctttggtcmcatacaagtagaagaagtcacagtagaagatggtttgtactactccagacacgactgcaatttggtcatagaaattctcagtctggtaccgcctgatcca

SEQ ID NO: 406560 - DNA, 201 bp, Homo sapiens
tctcaaagagataaacgtggctatgttcagacaatatttatttgcaaaaataggcgttgtgccagatttggcccaaaggccagtttgtcttacccctgttstatagttgattgaattactgagggtacttttagcgtgtgctcatggttctttaagggccacgatgctggctctttaaactttttcacaactttcaccacc

SEQ ID NO: 406561 - DNA, 201 bp, Homo sapiens; identical to SEQ ID NO: 276321

SEQ ID NO: 406562 - DNA, 201 bp, Homo sapiens; identical to SEQ ID NO: 276353

SEQ ID NO: 406563 - DNA, 201 bp, Homo sapiens; identical to SEQ ID NO: 276325

SEQ ID NO: 406564 - DNA, 201 bp, Homo sapiens; identical to SEQ ID NO: 276326

SEQ ID NO: 406565 - DNA, 201 bp, Homo sapiens; identical to SEQ ID NO: 276327

SEQ ID NO: 406566 - DNA, 201 bp, Homo sapiens; identical to SEQ ID NO: 29683

SEQ ID NO: 406567 - DNA, 201 bp, Homo sapiens; identical to SEQ ID NO: 29685

SEQ ID NO: 406568 - DNA, 201 bp, Homo sapiens; identical to SEQ ID NO: 158543

SEQ ID NO: 406569 - DNA, 201 bp, Homo sapiens; identical to SEQ ID NO: 276364

SEQ ID NO: 406570 - DNA, 201 bp, Homo sapiens; identical to SEQ ID NO: 276366

SEQ ID NO: 406571 - DNA, 201 bp, Homo sapiens; identical to SEQ ID NO: 276331

SEQ ID NO: 406572 - DNA, 201 bp, Homo sapiens; identical to SEQ ID NO: 276367

SEQ ID NO: 406573 - DNA, 201 bp, Homo sapiens; identical to SEQ ID NO: 276335

SEQ ID NO: 406574 - DNA, 201 bp, Homo sapiens; identical to SEQ ID NO: 91024

SEQ ID NO: 406575 - DNA, 201 bp, Homo sapiens; identical to SEQ ID NO: 276337

SEQ ID NO: 406576 - DNA, 201 bp, Homo sapiens; identical to SEQ ID NO: 91026

SEQ ID NO: 406577 - DNA, 201 bp, Homo sapiens; identical to SEQ ID NO: 276370

SEQ ID NO: 406578 - DNA, 201 bp, Homo sapiens; identical to SEQ ID NO: 276372

SEQ ID NO: 406579 - DNA, 201 bp, Homo sapiens; identical to SEQ ID NO: 276377

SEQ ID NO: 406580 - DNA, 201 bp, Homo sapiens; identical to SEQ ID NO: 276378

SEQ ID NO: 406581 - DNA, 201 bp, Homo sapiens; identical to SEQ ID NO: 276379

SEQ ID NO: 406582 - DNA, 201 bp, Homo sapiens; identical to SEQ ID NO: 276349

SEQ ID NO: 406583 - DNA, 201 bp, Homo sapiens; identical to SEQ ID NO: 276385

SEQ ID NO: 406584 - DNA, 201 bp, Homo sapiens; identical to SEQ ID NO: 276386

SEQ ID NO: 406585 - DNA, 201 bp, Homo sapiens
ctgaggagagtgggtgcaggagggacagcatgaggggcagatggttctccaatgctgtggggcgggtcagtgtcccctgggtgtctgtggggaccgggccrgcgcccactgcaactggcagcctggatacctgggctgggaggggagggcccagggccaggagagaggcctgctgggccctcactgttttctccttgtttt

SEQ ID NO: 406586 - DNA, 201 bp, Homo sapiens; identical to SEQ ID NO: 276387

SEQ ID NO: 406587 - DNA, 201 bp, Homo sapiens; identical to SEQ ID NO: 276388

SEQ ID NO: 406588 - DNA, 201 bp, Homo sapiens; identical to SEQ ID NO: 276390

SEQ ID NO: 406589 - DNA, 201 bp, Homo sapiens; identical to SEQ ID NO: 276389

SEQ ID NO: 406590 - DNA, 201 bp, Homo sapiens; identical to SEQ ID NO: 276391

SEQ ID NO: 406591 - DNA, 201 bp, Homo sapiens; identical to SEQ ID NO: 276392

SEQ ID NO: 406592 - DNA, 201 bp, Homo sapiens; identical to SEQ ID NO: 276350

SEQ ID NO: 406593 - DNA, 201 bp, Homo sapiens; identical to SEQ ID NO: 276393

SEQ ID NO: 406594 - DNA, 201 bp, Homo sapiens; identical to SEQ ID NO: 91027

SEQ ID NO: 406595 - DNA, 201 bp, Homo sapiens; identical to SEQ ID NO: 276351

SEQ ID NO: 406596 - DNA, 201 bp, Homo sapiens; identical to SEQ ID NO: 276397

SEQ ID NO: 406597 - DNA, 201 bp, Homo sapiens; identical to SEQ ID NO: 276398

SEQ ID NO: 406598 - DNA, 201 bp, Homo sapiens
tgcaacttcattcttgaagtcagtgaggccaagaacccatcaattccgtacacattttggtgactttgaagagactgtcacctatcaccaagtggtgagaytattgccaagcagtgagactattgccaagtggtgagaccatcaccaagcggtgagactatcacctatcgccaagtggtgagtaccatcagatccctttca

SEQ ID NO: 406599 - DNA, 201 bp, Homo sapiens
ttggctgatccaattaacatgtggggttcttggtgtgggtctggggagctgaaggattttatggagctggtgctttggaggaatcttaagggaaaggagtrgaagctcaggcctttgaaggatttcagctcctcctctctgtaatttgtgctttaagcattttttttcctaaaataaactcaaatttatcctcaagtctgg

SEQ ID NO: 406600 - DNA, 201 bp, Homo sapiens
ggggatttgcacttgatttatggctcttgcctcttcctttgttgaaatactcatcctgggtccaagctgagccaagccttgcggagtgaggagtgggggamagacagaagggaaggcctttgtgctctgactcagctcctccaccctgccatgctccttgggctgtccagtgcctcacagccccctaagtggacagagtgc

SEQ ID NO: 406601 - DNA, 201 bp, Homo sapiens
tccacaaattgaagagtggaattgctttctactcttcccctgctagcatggataataaagacatcttgctccctcttatcataactattattattttgacktctttccacaagcagcaagcagctggactcttttgctggttatgcttgttaagtggtatgtgcagcattctgcagaatattattcagacaacaagtcctg

SEQ ID NO: 406602 - DNA, 201 bp, Homo sapiens
tgccatcgcccgacgtctggcccgggacggggcccacgtggtcatcagcagccggaagcagcagaacgtggaccgggccatggccaagctgcagggggagrggctgagtgtggcgggcattgtgtgccacgtggggaaggctgaggaccgggagcagctggtggccaaggtgagggggcaggcggtggaaggacacagaga

SEQ ID NO: 406603 - DNA, 201 bp, Homo sapiens; identical to SEQ ID NO: 91035

SEQ ID NO: 406604 - DNA, 201 bp, Homo sapiens
ataggtgatataatatatcttcatggacatcatgtaggcatcacttgcttatcaaatacaacattgccagcacgctagaagctctttagtttgccccttcyttttttttttttttttttttttttttgagacggagtctccctctgtcacccaggatggagtgcagtggtgcaatcttggctcactgcaacctccaactcc

SEQ ID NO: 406605 - DNA, 201 bp, Homo sapiens
  misc_feature (1)...(201): n = A,T,C or G
ggccccaggagcctgcccttgggacacctaggtcattttcctttaggagctctgcaagctttgcctgaaggccttatgacctgggctgccctgggaggganagtcctcctcaggccatctccacactcatccaatctcctctccgcaggccctggagcactgtgggggcgtcgacttcctggtgtgcagcgcaggggtcaa

SEQ ID NO: 406606 - DNA, 201 bp, Homo sapiens
caaaacaaaattagccgggtgtggtggcaggtccctgtagtcccagctactcaggaggctgaggaaggagaatggcatgaacccaggaggcggagcttgcrgtgagccaaggtcacaccattgcactccagcctgggcgacagagtgcgactccgtctcaaaaaaaaaaaaaaaaaaagagaaaaaaaatatatatgcgct

SEQ ID NO: 406607 - DNA, 201 bp, Homo sapiens
atgctctgctctgatttcagatcctaagtgtgaacgtgaagtccccagccctgctgctgagccagttgctgccctacatggagaacaggtatggcagggcrggggtggggaccagtcggagttggggacctgaggtgggcacagaaatacagtcggtagcacagccagtagtgggtagaggacagaagaggtctgggatct

SEQ ID NO: 406608 - DNA, 201 bp, Homo sapiens
cacttcccctaggtttcctcccaagttgtgggtgaggccttttctgaaaccctcctccaacctttctgaattctggggctataaattccaggaatctttgwgttgttcagatagaatctgcagtgcctgaaatccagcctgctgcttactcacatcctcatactcagctgcagactgcctgacagaagggctgccaaactg

SEQ ID NO: 406609 - DNA, 201 bp, Homo sapiens
  misc_feature (1)...(201): n = A,T,C or G
catgactgcacccaggctgcccaagctaacctcgctacccagaaggtccctcaggaaagtgacctgttcgtgagaggaccctcaccccacccccaggcccngggagaatcactgtggaggaggagtctgaaggggtgagggaggtccccagagggactcctggagcagaccttcctctctcagtgcctggccccaggagcc

SEQ ID NO: 406610 - DNA, 201 bp, Homo sapiens
acctttctgaattctggggctataaattccaggaatctttgagttgttcagatagaatctgcagtgcctgaaatccagcctgctgcttactcacatcctcrtactcagctgcagactgcctgacagaagggctgccaaactgcactccagacagacaggtgcacagccaggtaagcctgggccagcatcacactgcccagg

SEQ ID NO: 406611 - DNA, 201 bp, Homo sapiens
atacagtcggtagcacagccagtagtgggtagaggacagaagaggtctgggatctccacatccctcatcttcttgtcctgcctccccatctgtgtggctgycattcccaattccagtggctgcaggatgagagtagtattccaggggcccaggcatagcctccttggccttgacatcagcaggtttgggacaaggctatgc

SEQ ID NO: 406612 - DNA, 201 bp, Homo sapiens
agtgaaattgattctttcccccaggcctgattcagcaggaagcatctcagacaccaaccactatgctgtcagcagttgcccggggctaccagggctggttkcatccctgtgctaggctttctgtgaggatgagcagcaccgggatagacaggaagggcgtcctggctaaccgggtagccgtggtcacggggtccaccagtg

SEQ ID NO: 406613 - DNA, 201 bp, Homo sapiens
tgcccagggcaggcatgatgtggctcaggctggggctgccttgcctcactgccttgggttgggtctataatgactggaactgcccatcttcactcctgttyactttttatgttgatgctctttcttcctgcctctatgtctgcagctcagtctatttcttctttgattatcaatacaaagctcttggggctatcaaagtcc

SEQ ID NO: 406614 - DNA, 201 bp, Homo sapiens
acggggcccacgtggtcatcagcagccggaagcagcagaacgtggaccgggccatggccaagctgcagggggaggggctgagtgtggcgggcattgtgtgycacgtggggaaggctgaggaccgggagcagctggtggccaaggtgagggggcaggcggtggaaggacacagagaggggaacatgcagaacctttccttca

SEQ ID NO: 406615 - DNA, 201 bp, Homo sapiens
taccagggctggtttcatccctgtgctaggctttctgtgaggatgagcagcaccgggatagacaggaagggcgtcctggctaaccgggtagccgtggtcayggggtccaccagtgggtgagtgctggattgcccatgggtcctggcccctcacagggtccttgtggcttccacaaggactcagggttttaaagcaagaccc

SEQ ID NO: 406616 - DNA, 201 bp, Homo sapiens
agtcctcctcaggccatctccacactcatccaatctcctctccgcaggccctggagcactgtgggggcgtcgacttcctggtgtgcagcgcaggggtcaamcctctggtagggagcactctggggaccagtgagcagatctgggacaaggtgagaggcctcccctggggaggcggctgagggcccgattccagctctgcac

SEQ ID NO: 406617 - DNA, 201 bp, Homo sapiens
taagggatcaaggggtgactgaatccttaggtcagcatgcctatgactgaggtcctcattgttctctgaactcagccatggtgcagtccatccatcctgaraagatgctccttcttttgagaagggcaaagctgccctaggtgttctgcctggtggccttcccggggccctgcccatcttgttttagtagcactgactcct

SEQ ID NO: 406618 - DNA, 201 bp, Homo sapiens
aaggagcggtgcaggccatgactattttgtgtgccctggatggctggactcaagtttagagtttctgtccctttagcccttgaaggctaaaagatgctgtmccctatgcaggcagcattcttatgaatcctagtgagtaaaatgactccccttgctgatcattttatctgtgacttttgatgttttctaattgctacccac

SEQ ID NO: 406619 - DNA, 201 bp, Homo sapiens
aggtcagcatgcctatgactgaggtcctcattgttctctgaactcagccatggtgcagtccatccatcctgaaaagatgctccttcttttgagaagggcawagctgccctaggtgttctgcctggtggccttcccggggccctgcccatcttgttttagtagcactgactccttcatttcttccctttgcccagtttcatg

SEQ ID NO: 406620 - DNA, 201 bp, Homo sapiens
atggcagggcgggggtggggaccagtcggagttggggacctgaggtgggcacagaaatacagtcggtagcacagccagtagtgggtagaggacagaagagktctgggatctccacatccctcatcttcttgtcctgcctccccatctgtgtggctgccattcccaattccagtggctgcaggatgagagtagtattccagg

SEQ ID NO: 406621 - DNA, 201 bp, Homo sapiens
taatttgtgaataatttccccagttttatagcttaggagttttcatggattgctttcctgacctgaggttcacatgtttgaaatttaccctaaccagcctsactctctgccactttctgttgctggccttgtctgtctggaggaaggaggagggtagattaccttcatgctcactgaggcatcagtgataagtgaaattga

SEQ ID NO: 406622 - DNA, 201 bp, Homo sapiens; identical to SEQ ID NO: 91036

SEQ ID NO: 406623 - DNA, 201 bp, Homo sapiens; identical to SEQ ID NO: 91037

SEQ ID NO: 406624 - DNA, 201 bp, Homo sapiens
gttgacatctcttcacaccaccaaaaatattcatggagaattattttatctaaagctgtctttttaataataaaatagccacctctaccttcttcataaayttttaagatgaattggtaattcatcatagcaaggttgattttagaaactaaagttgcattaattcattaaatacactgaaagtaattttgtatgcttggt

SEQ ID NO: 406625 - DNA, 201 bp, Homo sapiens; identical to SEQ ID NO: 91054

SEQ ID NO: 406626 - DNA, 201 bp, Homo sapiens; identical to SEQ ID NO: 91055

SEQ ID NO: 406627 - DNA, 201 bp, Homo sapiens; identical to SEQ ID NO: 91056

SEQ ID NO: 406628 - DNA, 201 bp, Homo sapiens
cacaaagaaaatataaaaacaattttataaatagatttgcagttattttctttcaatattttcttagtgcctatgattacacaataccacctatggagaargctgttgtgaaaacggacattcagatagcgctcccttctgggtgttatggaagagtgggtaagtcatttaagaaacaggtaactatttgtcaagttctcc

SEQ ID NO: 406629 - DNA, 201 bp, Homo sapiens
ctctaccttcttcataaacttttaagatgaattggtaattcatcatagcaaggttgattttagaaactaaagttgcattaattcattaaatacactgaaastaattttgtatgcttggtcacaaagaaaatataaaaacaattttataaatagatttgcagttattttctttcaatattttcttagtgcctatgattacac

SEQ ID NO: 406630 - DNA, 201 bp, Homo sapiens; identical to SEQ ID NO: 91052

SEQ ID NO: 406631 - DNA, 201 bp, Homo sapiens
ctgccctttcacgctgataagtacctcagtttccaataaacttttgttcaggggcaaacatttacaatgttgacatctcttcacaccaccaaaaatattcrtggagaattattttatctaaagctgtctttttaataataaaatagccacctctaccttcttcataaacttttaagatgaattggtaattcatcatagcaa

SEQ ID NO: 406632 - DNA, 201 bp, Homo sapiens
gcgcgccgcgggctacgacctgtacaggtgagcggggacctgccggcgaggaggctgggaagggccggccgtccgctgccacagctagaaacagtcaccgragagatcacaggaacacactagctataaataggatttctgcctttttcgtgtttaaaattttagctttcatctttggcataaattaaatagagatttggg

SEQ ID NO: 406633 - DNA, 201 bp, Homo sapiens
caggagagggccacagtaatatcaagagtagcagcatttgctatgtggactttagaggaattctgttcctaagcaaggtccatctccaggggccgttcacrgtgatcagctgtctccctcagccaggaaattcatagcctaagcttggtaaactaccaagccctgcctgacagatacaacacagttctttatctcttattt

SEQ ID NO: 406634 - DNA, 201 bp, Homo sapiens
ctagcagtccttctcccctgtctgcagcaccacaaattctgactgaagtcacatgggagtggtttaagttagttttgaattaaaaccttgtggaatttttmtaaactagtctttccaactttggtaatgcagtatgatgaatatatattctttaattcaaaaccatgtgctaaagttaagatgaagatatagatattatag

SEQ ID NO: 406635 - DNA, 201 bp, Homo sapiens
aatattctaatatttgcaagactgctgcttaacaatgtcagcgttgatttactccactgcagagctttaggctttttgacatttttatttatgactcaatygtatttcaatctgggtattagcgggaagctgataccaggaaaaacctttaaaacccaaatcgtaattttctcctagtctttttggcaagtgtgccgtggg

SEQ ID NO: 406636 - DNA, 201 bp, Homo sapiens
ttcatgatggtgtcaagaaacacaaatttttaaaattctgattaggtccaagttatctttttaatgttgtttgtgcttctgatgtcatatattacataatkcaaggtcataaagattttacacctaattttcttccaagagttttatagttttagcttttacatttggggctttgatccattttgacttgacttgggtatg

SEQ ID NO: 406637 - DNA, 201 bp, Homo sapiens
aaaactgaaagaggctcttaaaaaaaactgtgaagcttactacctttctatctttcaggccttggatgacaccgaaaggggttcaggaggttttggttccmctggaaagaattaaaatttatgccaagaacagaaaacaagaagtcatacctttttcttaaaaaaaaaaaaaaagtttttgcttcaagtgttttggtgttt

SEQ ID NO: 406638 - DNA, 201 bp, Homo sapiens
tatcccatcagtagtgaatctttcacttaacaagataccttggcccccacataagtaggtgtgctagatctcctcctccacccgtttttacagagctgctytatggaggcttgttaacagatcaggaaaactggcttagaaatgagcccacatggatatgtggtaaaaactggagtctctgtgtgattccagcctccttgt

SEQ ID NO: 406639 - DNA, 201 bp, Homo sapiens
cttgtgcttatggaaatattttaaattattggctcaaagataaatgctagcaagtctggtaagtataactctctgggctatgtcagggacctggctcaagyctcccctgcaaagatcttctccccctgtgttcataatcttaaacaagtattaattacacaaaaaaagttgtactcatgaagcctatgtgctacagtcttc

SEQ ID NO: 406640 - DNA, 201 bp, Homo sapiens
ataccttggcccccacataagtaggtgtgctagatctcctcctccacccgtttttacagagctgctttatggaggcttgttaacagatcaggaaaactggyttagaaatgagcccacatggatatgtggtaaaaactggagtctctgtgtgattccagcctccttgttctttccactgcaattaattgtggagattaccct

SEQ ID NO: 406641 - DNA, 201 bp, Homo sapiens
cccccattatatgagaaaattgaaaggatatgcttaggaattacccttgttcttaaaaaatggggggtgggtatgctttggggtttttttgtctgttttcycagctttcaaataatgaggagtatgggcaaatagcattactgcccattgagctgaacacaggattatttttatttccatattttttccttcatcagggct

SEQ ID NO: 406642 - DNA, 201 bp, Homo sapiens
  misc_feature (1)...(201): n = A,T,C or G
aaacccaaatcgtaattttctcctagtctttttggcaagtgtgccgtgggtagacagtaggttggagatggccattgctactgccagcttaaaataggaantggtcgccatttgataaagagtgacaggttggaaaattaggacctgttttctaaatttttatttgtattttagtaatgtcatttcttggttttgaggctt

SEQ ID NO: 406643 - DNA, 201 bp, Homo sapiens
tgcctggggtttccattgcagacgagggggagactggcatgttctccttgagcaccatccggggtcaccaggtgaggcggcattgggggtgcaggtttagragacagaaggatctgtttgggtgtttggaggtggggggtgttgaatgtctttttaggttgccgaacgataggctgtggttgctgtcttcaccacagggtg

SEQ ID NO: 406644 - DNA, 201 bp, Homo sapiens
atgtggaggccagggtaaggtgaatggggaggctgggaggactggtgttgccctttggagcttggtgaggagggtgggcctagggcttggcgagtgccacwtctggcaggtttggaaatttccaaataaatccttttgtctattggtggtgcctggacctggtccttgaacagcacagccctcattaacagactggagtcc

SEQ ID NO: 406645 - DNA, 201 bp, Homo sapiens; identical to SEQ ID NO: 91073

SEQ ID NO: 406646 - DNA, 201 bp, Homo sapiens
ggaagaaaaggatggcatctcagacagtgatagcagtactagcagtgaggaagaagagaggtgagtagttgcagctgagagaagggatggaaaggaagcgrtggcttgaaccatttctctaaattgggggttcttaatcttggctgcacatggggagggttaaaaatactgtactgacgatcctgatttaactggtctggg

SEQ ID NO: 406647 - DNA, 201 bp, Homo sapiens
ggccggccattcccgcgcccatcgcttccctcactcactccgcttctaccgcgtcttcctctcccagccttgccctgactcaccgagggcggcgctgacamagcagatccggtcgcaggcagcgtccagcatggactggtccaggcacctccgacccacccgacgctcctgccccggcccgctctccactcagatcacgct

SEQ ID NO: 406648 - DNA, 201 bp, Homo sapiens
agcctggagggagaccaccctctgggtccttgctggggccgcagacacgtaggctggggtgaggagtgtctgctgtcaccctctactctccagctttagtyttataaatgtagtgataggattccttgttgcttggtccccaaagccttatactttttgcattggctttaattgggttcagcagatgcctcctctgccccc

SEQ ID NO: 406649 - DNA, 201 bp, Homo sapiens
ggtcgctactaaactggagaacaaaacttcggcgatatgtggccaagaagctgaaagaacaagcaaaggcactggacatcaggtgaggagagaacgcagcraggcaggtgtggaccgggtgtccaggggaagagtctgggaaaataacccaactcttgggactgttttgccagcctcagctctggagaggaagatgaaggt

SEQ ID NO: 406650 - DNA, 201 bp, Homo sapiens
aaacctcttcctcagcctgcgtggcacccaggccttccctgggcccatcccaaggatgctaccaccttaccttgatgttcttggtggcctcaaagccgtcragctggttgagcaactccagcatcgtgcgctgcacttcactgtcccctccagaacccccctccagccgcgaggagccgatggagtcgatttcgtccatga

SEQ ID NO: 406651 - DNA, 201 bp, Homo sapiens
atcctcccaaacagatcatggtagatgatgaagagttggcacagcatccagctaccactgaggacatacgggtgtgctgtcaggacatcagagtgttgggrcgcaaggagctcaggtatggagtggggtaggcacgggggccaggagccctggaggcagggaaaggccatgatgttggacctctgggaagaggatattgct

SEQ ID NO: 406652 - DNA, 201 bp, Homo sapiens
ctaagggaacagaggcttcttcggggacagaagctgccactggccttgaaggggaagaaaaggatggcatctcagacagtgatagcagtactagcagtgargaagaagagaggtgagtagttgcagctgagagaagggatggaaaggaagcggtggcttgaaccatttctctaaattgggggttcttaatcttggctgcac

SEQ ID NO: 406653 - DNA, 201 bp, Homo sapiens
cctggttccaatcaagcctctccccaatgtggtgactctccagcaggacatcacaacagaacgttgtaggcaggtaataggagtctctctcttccttcccyctttatacggaaacatctacatccctgaaatcctctaaaggcaagtttttcctttttaccgtgctttgagcacgttcttgcctgacatctgtacgacaag

SEQ ID NO: 406654 - DNA, 201 bp, Homo sapiens
agtcactgacttcctccgagctgccaaccctgttgacttcctctccaaggccagcgaagtgagtctccagccttgagggacatgaggtagccccagaaacrtggcctgaggatctcccctgacacctttccatcctcccaaacagatcatggtagatgatgaagagttggcacagcatccagctaccactgaggacatacg

SEQ ID NO: 406655 - DNA, 201 bp, Homo sapiens
acctttgtttctgttacacttcagttattagaggaagtaacacaaggggatatgagtgcagcagacacatttctgtccgatctgccaagggatgatatctrtgtgtcagatgttgaggacgacggtgatgacacatctctggatagtgacctggatccagaggagctggcaggagtcaggggacatcagggtctaagggac

SEQ ID NO: 406656 - DNA, 201 bp, Homo sapiens
tgaatcgcttgagtcagccttctgagtagctgggattacaggtgccaaccaccacgcccagctaatttttgtatttttagtagagatggggtttcaccatrttggccaggctggtcaaactcctgacctcaggtgatctgcccacctcagcctcccaaagtgcagggattacaggcgtgagccaccgtgcccagtctggta

SEQ ID NO: 406657 - DNA, 201 bp, Homo sapiens
cagcagaagcagcagctgccacagacacccccttcctgtttgaagactgagataatgtctcccctgtaccaagatgaagcccctaagggaacagaggcttyttcggggacagaagctgccactggccttgaaggggaagaaaaggatggcatctcagacagtgatagcagtactagcagtgaggaagaagagaggtgagta

SEQ ID NO: 406658 - DNA, 201 bp, Homo sapiens
ggattacaggtgccaaccaccacgcccagctaatttttgtatttttagtagagatggggtttcaccatgttggccaggctggtcaaactcctgacctcagrtgatctgcccacctcagcctcccaaagtgcagggattacaggcgtgagccaccgtgcccagtctggtaatttctttagaaagcctggaatgttggatatt

SEQ ID NO: 406659 - DNA, 201 bp, Homo sapiens
tctgggtctaggtagtgtgcggagaggggcgcggggtggaattgctgcgggaagtgggaaactggaagtgggaaactggaagtggaatctggtgctccggwaagagacgttcccaacttctactttctccccagattgagggatactccccctttccaccatgggcaagaagggcaaagttggcaagagccgacgagacaa

SEQ ID NO: 406660 - DNA, 201 bp, Homo sapiens
gcagccctctaaggaggaggaggaagaggaggaggaggaacaactgaaccagaccttggcagaaatgaaggcccaggaggtggcggaattgaagaggtgaraggagctggggtagagcttggagttccccaacgcagggactgtgtgaagatgggagaagaaaatgcaaggcatggatagaaactttggagctgggccggt

SEQ ID NO: 406661 - DNA, 201 bp, Homo sapiens
aacagaggcttcttcggggacagaagctgccactggccttgaaggggaagaaaaggatggcatctcagacagtgatagcagtactagcagtgaggaagaaragaggtgagtagttgcagctgagagaagggatggaaaggaagcggtggcttgaaccatttctctaaattgggggttcttaatcttggctgcacatgggga

SEQ ID NO: 406662 - DNA, 201 bp, Homo sapiens
gttgcgtgagcagagaaagcagcgggagcgtgtggagctgaagatggatctgcctggggtttccattgcagacgagggggagactggcatgttctccttgwgcaccatccggggtcaccaggtgaggcggcattgggggtgcaggtttaggagacagaaggatctgtttgggtgtttggaggtggggggtgttgaatgtct

SEQ ID NO: 406663 - DNA, 201 bp, Homo sapiens
cccagggtctggtgggtaaatgggtaattttttgtttttgagatggagtctcgctctgttgcccaggctggagtgcaatggcacgatcttggctcactgcrgcctgattctccttgaatcgcttgagtcagccttctgagtagctgggattacaggtgccaaccaccacgcccagctaatttttgtatttttagtagagat

SEQ ID NO: 406664 - DNA, 201 bp, Homo sapiens
gttaccgttcccgatctgctttcaagctgatccagctcaatcgccgctttcagttcctgcagaaagcccgagccttgctggacctgtgtgctgcgccaggrggatggttcgtaacactcgccacaggttgctcctggtggccgctttctgggttctgagctgggatggcttccagtttcactgcgggaggggaacccgaat

SEQ ID NO: 406665 - DNA, 201 bp, Homo sapiens
aggccaagagagacctcatagataactccttcaaccggtaaaggggccataaactcatcaagagtgacccagggtctggtgggtaaatgggtaattttttktttttgagatggagtctcgctctgttgcccaggctggagtgcaatggcacgatcttggctcactgcagcctgattctccttgaatcgcttgagtcagcct

SEQ ID NO: 406666 - DNA, 201 bp, Homo sapiens
caaaggcctgagccacttggtttctcccttctccaggtgcagcagcgaaggcaggaactggaacaggtgctgggaattcgcctgacctaactgctcagggrtctttcttcccagccctggagcctggagggagaccaccctctgggtccttgctggggccgcagacacgtaggctggggtgaggagtgtctgctgtcaccc

SEQ ID NO: 406667 - DNA, 201 bp, Homo sapiens; identical to SEQ ID NO: 91070

SEQ ID NO: 406668 - DNA, 201 bp, Homo sapiens
gtttatgcctgtatccagccttattgtgggtgagtaacggacagctctccttggtgttttaaggggtgggtgtataaggtattttgtcctgtatttctctyctccctgcttgaagcaaccttttagaatactctgacctgatttcttccaggagtggacctggttccaatcaagcctctccccaatgtggtgactctccag

SEQ ID NO: 406669 - DNA, 201 bp, Homo sapiens
gcacgggggccaggagccctggaggcagggaaaggccatgatgttggacctctgggaagaggatattgctgtgctaaaggtttgggatgggggcctgagcsttttgatttatgtagccgaagcccgaaaggtgggtagtgagcctaaaacagaagggggcggggacaaagagggagatggcaagatcagtaatagtatctc

SEQ ID NO: 406670 - DNA, 201 bp, Homo sapiens
ccatcccaaggatgctaccaccttaccttgatgttcttggtggcctcaaagccgtcgagctggttgagcaactccagcatcgtgcgctgcacttcactgtyccctccagaacccccctccagccgcgaggagccgatggagtcgatttcgtccatgaagatgatagatggagcatgttcccgtgccatgacaaacagctcc

SEQ ID NO: 406671 - DNA, 201 bp, Homo sapiens
gccgtcgagctggttgagcaactccagcatcgtgcgctgcacttcactgtcccctccagaacccccctccagccgcgaggagccgatggagtcgatttcgwccatgaagatgatagatggagcatgttcccgtgccatgacaaacagctccctcaccattcttgcccctgtgtggaggccgagctggtgttagggagctta

SEQ ID NO: 406672 - DNA, 201 bp, Homo sapiens
atcccacaataccttgacagaacacagaaccctgtctcccgaggctacacacaaaggggtgggaatgcagtggagaccgagctggtccctggggtcatgcygcttttaccttgaccaacactttcttcttatccatggcccggactacttcccccacataggagccctgctcctgcagcagctgtagctcctcccgcaata

SEQ ID NO: 406673 - DNA, 201 bp, Homo sapiens
agggagcttattagcttattagctctctaaccccctacccctacctcttgcttctcacattgctagccatggttaccttcccctatgaatttctgtaccarttcagagccagagacacgaataaaggtacagtccgtatgatgagccacagcccgggccaacagtgtcttcccagtgcctggaggtccatacagcagcact

SEQ ID NO: 406674 - DNA, 201 bp, Homo sapiens
cattcgtagtgtccactccaggctttatttagagtcagggataaaggtgtttggaattgggagaagggcagagatctttagtgaagtcttctcctgtgaaytcagtgtcagactgtaatctccatgaaggtagagacatactgtttttgtttactattgtatctcctgtgcctggtactgcatttggcccatgatgggcac

SEQ ID NO: 406675 - DNA, 201 bp, Homo sapiens
ctccctgcttgaagcaaccttttagaatactctgacctgatttcttccaggagtggacctggttccaatcaagcctctccccaatgtggtgactctccagsaggacatcacaacagaacgttgtaggcaggtaataggagtctctctcttccttccccctttatacggaaacatctacatccctgaaatcctctaaaggca

SEQ ID NO: 406676 - DNA, 201 bp, Homo sapiens
atgcttaacaggcagctcgatcacttctttgatctccttgatctgtttgtccagtccaccaatcatctcataagttgaatctggtactttctccaccatcwtcagtgacactaatgggtctaccttgttgggcaggatcttgtgcagagtgtagctgtcattccttagagccacccggcaattgggtgtcacctgggtgaa

SEQ ID NO: 406677 - DNA, 201 bp, Homo sapiens
  misc_feature (1)...(201): n = A,T,C or G
ggagaacaaaacttcggcgatatgtggccaagaagctgaaagaacaagcaaaggcactggacatcaggtgaggagagaacgcagcgaggcaggtgtggacngggtgtccaggggaagagtctgggaaaataacccaactcttgggactgttttgccagcctcagctctggagaggaagatgaaggtgatgaggaggactca

SEQ ID NO: 406678 - DNA, 201 bp, Homo sapiens
accttagaagggcctgaccaagcttctctcttttccttcctaaggctgaaggctatgctgagggtgacctcactctctatcaccgtacctcagtcactgayttcctccgagctgccaaccctgttgacttcctctccaaggccagcgaagtgagtctccagccttgagggacatgaggtagccccagaaacatggcctgag

SEQ ID NO: 406679 - DNA, 201 bp, Homo sapiens
cagtgtcagactgtaatctccatgaaggtagagacatactgtttttgtttactattgtatctcctgtgcctggtactgcatttggcccatgatgggcactyagcaaatgactagatggacaaatggctgaaccagggccattccagtgtttctgtttccatagttccttttcttctctttaggccctgaggaaggagctga

SEQ ID NO: 406680 - DNA, 201 bp, Homo sapiens
ccggcatccgagccgtcttggcgcgcaagcgcggaagcggaggattgggacctgaagaccaggcagagaagaattccgggtcaatgggcggggtgtgcggygagaccacactaagggaaccatgatgggaggggcggctactcgagttcaggggctttggaaggggatgaggaaggagtagaactcctcctcagtgttgcc

SEQ ID NO: 406681 - DNA, 201 bp, Homo sapiens
cctggatccagaggagctggcaggagtcaggggacatcagggtctaagggaccaaaagcggtaaggggcacgtgtgcaccaaagggaatgctgccactctraggaagtgttagggtgggtactaccagagcctgagtagggcagcaagggctccaggcaatctgggtctctgagccccctactttcctttgggtctacagt

SEQ ID NO: 406682 - DNA, 201 bp, Homo sapiens
gctgggtccatgatgcttactcacaaggtacagggagtgtggtgcttggagatcaggtgatggtggaggtgggcgcatgccctcctgggctgcagagtgcstcaactaattgtctctatcctacagcccatttgacactgatggctctacgtttggcttgtgactttttggcccgtggtggcagcttcatcacaaaggttt

SEQ ID NO: 406683 - DNA, 201 bp, Homo sapiens
  misc_feature (1)...(201): n = A,T,C or G
gcgatatgtggccaagaagctgaaagaacaagcaaaggcactggacatcaggtgaggagagaacgcagcgaggcaggtgtggaccgggtgtccaggggaanagtctgggaaaataacccaactcttgggactgttttgccagcctcagctctggagaggaagatgaaggtgatgaggaggactcaacagctggaaccacaa

SEQ ID NO: 406684 - DNA, 201 bp, Homo sapiens; identical to SEQ ID NO: 91065

SEQ ID NO: 406685 - DNA, 201 bp, Homo sapiens; identical to SEQ ID NO: 91078

SEQ ID NO: 406686 - DNA, 201 bp, Homo sapiens
atggggtttcaccatgttggccaggctggtcaaactcctgacctcaggtgatctgcccacctcagcctcccaaagtgcagggattacaggcgtgagccacygtgcccagtctggtaatttctttagaaagcctggaatgttggatattagacagatgtcctttccactcaggtacacatttaatgaggatgagggggagct

SEQ ID NO: 406687 - DNA, 201 bp, Homo sapiens
atcctctaaaggcaagtttttcctttttaccgtgctttgagcacgttcttgcctgacatctgtacgacaagacctatggcattcgtagtgtccactccagrctttatttagagtcagggataaaggtgtttggaattgggagaagggcagagatctttagtgaagtcttctcctgtgaattcagtgtcagactgtaatctc

SEQ ID NO: 406688 - DNA, 201 bp, Homo sapiens
gtgacaccttagtaaaaaatataagctacatacaatataaacctagagtgagttttgtgccctagaagaccctttatcccaagataacctcaacttacccrcatgacaactcacctagagccaaaagaagcttcccagctctcactgcttccaaggaccaaaacagcttcccaagaaaacatccgaaaattccttctgatg

SEQ ID NO: 406689 - DNA, 201 bp, Homo sapiens
catccgagccgtcttggcgcgcaagcgcggaagcggaggattgggacctgaagaccaggcagagaagaattccgggtcaatgggcggggtgtgcggcgagrccacactaagggaaccatgatgggaggggcggctactcgagttcaggggctttggaaggggatgaggaaggagtagaactcctcctcagtgttgcctcat

SEQ ID NO: 406690 - DNA, 201 bp, Homo sapiens
gcttcccatctttctccactcacctttagcatttagttcgttcctctgtgcctgcagcctccggaggttttggctcttatcattcacaatcagctgtggcrgacaagagacaaattccattattcaagggcaggagacaggaggaggtaggatcttggccaagacctcacaggtctgaatgagctgagggaagggcacagg

SEQ ID NO: 406691 - DNA, 201 bp, Homo sapiens
gcctcccaaagtgcagggattacaggcgtgagccaccgtgcccagtctggtaatttctttagaaagcctggaatgttggatattagacagatgtcctttcyactcaggtacacatttaatgaggatgagggggagcttccggagtggtttgtgcaagaggaaaagcagcaccggatacgacagttgcctgttggtaagaag

SEQ ID NO: 406692 - DNA, 201 bp, Homo sapiens
gtcttgaactcctgacctcaagtgatccatcggcctcagcctcccaaagtgctgggattacgggtatgagccactgctccaggcctggaggcaagaatttyttataggcttaaataaaaccaacctattgcaataatttgaatatagtaggagctatttaagtcgacattaataaagagatttgtgaaaatacaatagtgt

SEQ ID NO: 406693 - DNA, 201 bp, Homo sapiens
ctcttgagataggtgatagtctcatcttttttttttttttttgagatggtgtctggctgtgttgcccaggctggtcttgaactcctgagctcaagtaatcygcctgcctcagcctcccagagtgctgggattacaggcgtgagccaccacacacagcctcttaccattttttatagatgaggaaactgaacccagagaagc

SEQ ID NO: 406694 - DNA, 201 bp, Homo sapiens
aatactgtcctctctttttcaactacgtatttttcctttgcttttttttctttttttgagatggagtcctgctctgtcgcccaggctggagtgcagtgacscaaccttggctcactgcaacctcctcctcctcccgggttcaagagattctcctgcctcagcctcccgagtagctgggactacaggtgtgtgccactacgc

SEQ ID NO: 406695 - DNA, 201 bp, Homo sapiens
cactattacttcatcattttatgctttactaaacagaatcacttctcatagactatggaagatttgctggttttagatgaagcatctggatgtacatccacattacttttccaataaaacagacattcttgggacagtagtcaggggaggattacctgtcaaatgtcattcatctcagagaggccttgcctgacttaagtc

SEQ ID NO: 406696 - DNA, 201 bp, Homo sapiens
aaatggattataatgtaacagagtgtgaaaacttcagtaatatggtttcagattacacaatgaaaataacttttaggaaatgaccacttgtcaagttttartgtaaaataaaaagtatctgaaaagggctgggtgcggtggctcatgcctgtaattccagcactttgggaggccaaggtgggcagatcacttgagggcagg

SEQ ID NO: 406697 - DNA, 201 bp, Homo sapiens
aaacataaatatggctgaagagttttatataattcatgtggtttttttttttttttttggaggcagagttttgctcgtcacccaggctggagtataatggygcaatctcggttcaccgcaacttcaacctctcgagttcaagtgattctccagcctcaccctcctgtgtaggtgggattacaggcatgcaccaccatgctg

SEQ ID NO: 406698 - DNA, 201 bp, Homo sapiens
tttcctttgttactgcatcaacatttacattgttggtgtaaaagcagtgataagtaaaactgctgatgccttagcatgaatcaagccagtggcaccaaacygttctagtaggcgtattctctgttctcagaccattgcagttaaaaagaaaaaaaaaggccagtttcactcaagaatgccctgaacagtaaaaattattaa

SEQ ID NO: 406699 - DNA, 201 bp, Homo sapiens
tctgcaacgctgactcctgggttcaagcaattctgcctgcctcagcctcctgggtaactgggattacaggtgcccactaccatgcctggctaatttttttwaaatatttttggtagagatggggttttgccatgttggccaggctggtcttgagctcctgacctcaggtgatccccctgcctcggcctcccaaagcgctgg

SEQ ID NO: 406700 - DNA, 201 bp, Homo sapiens
atcaaatctatagctcactccggacccctctctgcagttactgcccctgcttggcatctctactcagctctctcatagatactgaactcaccttttgcctrattttgcaaacctggctcttttaggtttccatctccattagtggctccacagttcacccagtctttaaagccagaaacttctgaagttattctagactct

SEQ ID NO: 406701 - DNA, 201 bp, Homo sapiens
tctgtctctctgtcacccaggctggagtgcagtggcacagtcttggctctctgcaacgctgactcctgggttcaagcaattctgcctgcctcagcctcctrggtaactgggattacaggtgcccactaccatgcctggctaattttttttaaatatttttggtagagatggggttttgccatgttggccaggctggtcttg

SEQ ID NO: 406702 - DNA, 201 bp, Homo sapiens
ctttcttttctttccttccttcctttctttcttttctttccttccttcctttctttctttttcttttcttctttctttctccctttctctttcctttttttcctctctttcttctttctttcttctcttctctttcttctcttttattttctttcttctttttctctctctctctgtctctctgtcacccaggctggagtg

SEQ ID NO: 406703 - DNA, 201 bp, Homo sapiens
cagcccctggcaaccactcttctactctgtgtctctgagtttgactattctaggtatctcttttttttttctttttgttttctttgtagagatggggtctygctgtgttgcccaggctggtctcaaactcctggcctcaagccatcctcctgcttcccagagtactgggaatataggcgtaagccactgcatctgcctctt

SEQ ID NO: 406704 - DNA, 201 bp, Homo sapiens
tttctttgtagagatggggtctcgctgtgttgcccaggctggtctcaaactcctggcctcaagccatcctcctgcttcccagagtactgggaatataggcrtaagccactgcatctgcctcttttatttttttagtaaccaaatagaaatttgggtggctatcttttgcttcttctgtcagctatactcccacaaatctct

SEQ ID NO: 406705 - DNA, 201 bp, Homo sapiens
cagcgcttgggagatgcaggcctccgaatttggggtcctgagaggcaaaagctgccaaatgagaggagtgaaaagatataggcgatgatctttgtgcagcsttgagtaggtcgattattagcatcactgtagtcacacaaacttttttgcggcctacttgagagcgtatctgatgtgaataaataatttacatggaattgc

SEQ ID NO: 406706 - DNA, 201 bp, Homo sapiens
aaggcccttcaggagggggcagagattgttgtgtgtaccccagtaagtatgccttgtgtttaaatggcttctcagcctccctcggtatggaaaacatgatkagttttgcagagaatttcccctaaagtgtggtaaaagcagggttgaaaatatactgatgaacggcaggctgtggttttaattttgattggtggctaaatt

SEQ ID NO: 406707 - DNA, 201 bp, Homo sapiens
agcaatatcctcttcccagaggtccaacatcatggcctttccctgcctccagggctcctggcccccgtgcctaccccactccatacctgagctccttgcgycccaacactctgatgtcctgacagcacacccgtatgtcctcagtggtagctggatgctgtgccaactcttcatcatctaccatgatctgtttgggaggat

SEQ ID NO: 406708 - DNA, 201 bp, Homo sapiens
gtactcttgactcctcttgacctagtcttcatcttctactacttacttgccaggtactcctcaaccctgtccctactgctccattgaaactgctttcactsatgactcctggttgcctatacaacagaagaattttagttctttttgttttgtttttttgagacagagtctcgcactctcgcccaggctggagtgtagtag

SEQ ID NO: 406709 - DNA, 201 bp, Homo sapiens
atcttggccctacctgtctttctgaacatgtgtcctgcaaatttcccaaatgtgctactgaactctagctgcactgaactatttcttgttctctgtggtarcacttaacagatccttccatctgaaatgcccttctttaatgcctctttgatctaatgcctcttgaggtttcaaaatttaacatgtcatctctcagaacac

SEQ ID NO: 406710 - DNA, 201 bp, Homo sapiens
gtgcagccaagattaagaacccccaatttagagaaatggttcaagccaccgcttcctttccatcccttctctcagctgcaactactcacctctcttcttcytcactgctagtactgctatcactgtctgagatgccatccttttcttccccttcaaggccagtggcagcttctgtccccgaagaagcctctgttcccttag

SEQ ID NO: 406711 - DNA, 201 bp, Homo sapiens
acctcttgtaaagatagcttatagattagtttaaaaacgtcagatgctgaaattttcttgcttgtaaagattcttactaaatttcatcacactggaattaygttgattccttgattgaaggaatccccttatgggattccgaaagacagcaggagatgaagttcaggtaaattagtacttactaaatacataccttagtca

SEQ ID NO: 406712 - DNA, 201 bp, Homo sapiens
tatctattgacattaaacaatatcacagtatatcattaggtgaagaaatcactaagacaatatgtacagtatggtttcaatttttaatttgtgtgtatatrcacatatgcatacaagtagcaaaaaatagaacaaaactacatatctgggagaggaaatttcaggtagttttaaattttgttcttttttgctttctgcttt

SEQ ID NO: 406713 - DNA, 201 bp, Homo sapiens
ccaccatgcccagctaattttttgtatttttagtacagacggggtttcaccgtgttagccacaatggtctcaatctcctgacctcatgatccgcccgcctyagcctcccaaactgctaggattatacaggcgtgagccactgggcccgggctacatctaagtcttcaaaactagtatgttggaacgtctgatagtggtaga

SEQ ID NO: 406714 - DNA, 201 bp, Homo sapiens
ttttcataatgaggcctagtctatagcagtgagctttcctgcttattttttcattctcatagatgtgtttatttttttaggatcgaggaaataacaatgtratgagcaattatgaggcctacaagccttccacaggagctatgggagatcgactaacggcaatgaaagcagctttccaggtctgaaataagcatttcatta

SEQ ID NO: 406715 - DNA, 201 bp, Homo sapiens
tttcctttatagcacaagaacaaaagggaccatactgtggggccatcaggacactaaactcacagtgccaggatagcacagagtttctgtaaacctcatcmtttgccaagttgtatattcaagtttcttgaacttgctatcttacctactcctgatgtctctttctctttcagtcacagtacaagagtcactttgttgcag

SEQ ID NO: 406716 - DNA, 201 bp, Homo sapiens
gtcccttagaccctgatgtcccctgactcctgccagctcctctggatccaggtcactatccagagatgtgtcatcaccgtcgtcctcaacatctgacacayagatatcatcccttggcagatcggacagaaatgtgtctgctgcactcatatccccttgtgttacttcctctaataactgaagtgtaacagaaacaaaggt

SEQ ID NO: 406717 - DNA, 201 bp, Homo sapiens
tactcacctctcttcttcctcactgctagtactgctatcactgtctgagatgccatccttttcttccccttcaaggccagtggcagcttctgtccccgaaraagcctctgttcccttaggggcttcatcttggtacaggggagacattatctcagtcttcaaacaggaagggggtgtctgtggcagctgctgcttctgctg

SEQ ID NO: 406718 - DNA, 201 bp, Homo sapiens
gaatacttcaggcaacatgtcagtgaatcatagtttcttcctggatagtgtttctattgggcagttgttcaataaatacatggttcatagtacctttcctkcagacatgaatacatagatactgtctacaaacaactgatcttttaagttttgattctttgattcttccagatgtcattaccagaggataacctctagttt

SEQ ID NO: 406719 - DNA, 201 bp, Homo sapiens
aactttgggcataatctgattgcatttctgtttaatagggttaatttccagaaatagaatttctgggttgagggcataagcatttttaaatgattgtcacygtgtcttttctcacaaagcagtagcagctttctaaaagtatccagttcctttgtagctcccacttcaagggttttcataatgaggcctagtctatagcag

SEQ ID NO: 406720 - DNA, 201 bp, Homo sapiens
tggagaatctcttgtgattacttttttgtaatattgaaattttgcatgtattaagtagtacttaataattaggtcattagccaaagccttggaggtctctmatttgatctgcattacatctcctaataataagatataccataataaaaatgttgttaaatgaaagatttactgaccccaaagtaagcattcactttacca

SEQ ID NO: 406721 - DNA, 201 bp, Homo sapiens
agacattcaacaccccccacctccaaacacccaaacagatccttctgtctcctaaacctgcacccccaatgccgcctcacctggtgaccccggatggtgcwcaaggagaacatgccagtctccccctcgtctgcaatggaaaccccaggcagatccatcttcagctccacacgctcccgctgctttctctgctcacgcaac

SEQ ID NO: 406722 - DNA, 201 bp, Homo sapiens
gcctacaagccttccacaggagctatgggagatcgactaacggcaatgaaagcagctttccaggtctgaaataagcatttcattaaaagcactttcagcartaactcttgggcagtgacagaggggcttagttttcctggttgtagctgggcgcctaggcttgatgctagatttagggtcttcacgctgcttggattttga

SEQ ID NO: 406723 - DNA, 201 bp, Homo sapiens
catatttatctaacaatggtcagtaagtttgtactgaaaactcttcccttttaacagaactgggagcatgatttgactatacactattgaaatggagaatstcttgtgattacttttttgtaatattgaaattttgcatgtattaagtagtacttaataattaggtcattagccaaagccttggaggtctctaatttgatc

SEQ ID NO: 406724 - DNA, 201 bp, Homo sapiens
agctcacacctataacccccagtattttgcagggccaaggtgggagaattgcttgaggttgggcagcatagtgagaccctgtctataaaaaaaaaaaaaawtttggccgggcacagtggctcacggctcacatttgtaatcccagcactttgggaggccgaggtgggctgatcaacagtttgagaccagcctggccaacat

SEQ ID NO: 406725 - DNA, 201 bp, Homo sapiens
atgtgtataaagccttgggaaaaatcatttaactcttctgaccttgattttcaaatgtataatgcaaatgattaattttgatcagtgatcatcaatttgcrgtatataaaaattgcctaggccgggcgcggtggatcacctgaggtcacgagctcgagaccagcctgaccaacatggagaaaccccgtctctactaaaaat

SEQ ID NO: 406726 - DNA, 201 bp, Homo sapiens
tgttgcttgccggttgccttaggaatagcaagcgctctaggttaggcagaaagtctgattagaaacagatggttgtgggaactaagcaaccatattttctytatagctcctgagacatacagcaagtggtgatggtccccttctccatgtgaactgtttaagcgttttattcccaaactcataaaggagttaatgtagttt

SEQ ID NO: 406727 - DNA, 201 bp, Homo sapiens
acattgccagatgttgcctaggggcaaaattgtcccagattgagagcaacctttccagagtcagatgtatgtggtcttaagctatactttgaggaaggcckatctgcctgaattgaaagcactttatatctgtaattttatcattaacttaaagcaacttaaggttatgtatttgtgaagcaagcatttttgttcattttt

SEQ ID NO: 406728 - DNA, 201 bp, Homo sapiens
ggggatttttttcaaccaacacaggtggaaaaataatattcacagtataaaaacctgtgtataaggagggctgtaataatacctaattttatttagctccrgagtgacattgtgctgtagcagccatagtcagaacttgaagtactttattttctgggaaagagaagtctctttgccttgatgaataaactcctaaggctt

SEQ ID NO: 406729 - DNA, 201 bp, Homo sapiens
gcagagccaaaattcacctccaaaccccatattccttatgcagtatcattctgtatctgagttcttatagtgttgtgtatttctgccacttacaaactatrcaggatacttaccaaacacccagactattcagggtatacgtgtgtcttgcagcatagtaggtatttagttaatatgttaagtgatttaccctaggagtaa

SEQ ID NO: 406730 - DNA, 201 bp, Homo sapiens
aaccaacacaggtggaaaaataatattcacagtataaaaacctgtgtataaggagggctgtaataatacctaattttatttagctccagagtgacattgtrctgtagcagccatagtcagaacttgaagtactttattttctgggaaagagaagtctctttgccttgatgaataaactcctaaggctttttctgccagtca

SEQ ID NO: 406731 - DNA, 201 bp, Homo sapiens
aaattataaattctgtattctgtagttttaaatgttatttcttcatcaacattcatgacctccctgtagaaatttaacctcatgaccacctccttgaaactcttctcactaggcttttgtgattttgtgttattttcctttttcatctttctgttttctgtttgtttttgttttcttgctatttttattgtggaaaaattt

SEQ ID NO: 406732 - DNA, 201 bp, Homo sapiens
ttgaaattttgcatgtattaagtagtacttaataattaggtcattagccaaagccttggaggtctctaatttgatctgcattacatctcctaataataagrtataccataataaaaatgttgttaaatgaaagatttactgaccccaaagtaagcattcactttaccagtttgctttctaattctcagctattttgaagat

SEQ ID NO: 406733 - DNA, 201 bp, Homo sapiens
tagcagccatagtcagaacttgaagtactttattttctgggaaagagaagtctctttgccttgatgaataaactcctaaggctttttctgccagtcatgaytggacttttttctccctgtgcttggcagtcagtgcttcagtcctttaccagggtttctgttccatatggagatttagctgtggttttggtattcactgta

SEQ ID NO: 406734 - DNA, 201 bp, Homo sapiens
atagcttgaacccagaaggcgggggttgcagggagcccagattgtgccactgcactccagcctgggcgatgaggaaaaccccgtctcaaaaaaaaaaaaaagttttcttttttcccatagcacagctctttaatatttgtcatatttatctaacaatggtcagtaagtttgtactgaaaactcttcccttttaacagaact

SEQ ID NO: 406735 - DNA, 201 bp, Homo sapiens
  misc_feature (1)...(201): n = A,T,C or G
atttgaactgtaacccatgaacatggtagctctagacgtatatgtgtgtatgtattttattttaataatcttagcatattcttaaatggaattaatattcnatctagcatttgttaagtacatatttatgtaaggtaattaaacttaaggaacttgccaaaattataaattctgtattctgtagttttaaatgttatttct

SEQ ID NO: 406736 - DNA, 201 bp, Homo sapiens
ttaaaaattagaataaactaataccttttaaaaatatgcatgtactaatttcagaatggtttaaactgcctaccagaaagttttgggctgcacattggctrcattggtttaaggtgctgatagatggtaaatgaaacacacagaaaaaatatgctatgctatctactctaatatagacaactttctcgcctgtgtgcacct

SEQ ID NO: 406737 - DNA, 201 bp, Homo sapiens
cccaaagtgctgggattataggcgtgagctactgcacccagcagatgttaattggaaaaaaaagcttctaaaagacttttttgtttttgtttttgtttttgtttttttttttttttttttgagacagagtttcgctcttgttgcccaggctggagtgcagtggcgtgatctaggctcacagcaacctctgcctcctgggtt

SEQ ID NO: 406738 - DNA, 201 bp, Homo sapiens
tgtatttttacttcatactccagctaaaatgctagatccaggtaagtattgttgaacttcaaatgctgttaatgttgaagtacaagtcattctggggagtygtctctatctctaggtctctggtgctgcacctcctagaccaggaagtagctttgctcattttgggtttgacgaacaacttatgcaccagattcggaaatc

SEQ ID NO: 406739 - DNA, 201 bp, Homo sapiens
tggcctcccaaagtgctgggattataggcgtgagctactgcacccagcagatgttaattggaaaaaaaagcttctaaaagacttttttgtttttgtttttgtttttgtttttttttttttttttttgagacagagtttcgctcttgttgcccaggctggagtgcagtggcgtgatctaggctcacagcaacctctgcctcc

SEQ ID NO: 406740 - DNA, 201 bp, Homo sapiens
taaaacataatgaaagaaaaataaagtagggtagtctttcatgactatattaatttaaaaacaaatcacagcagtaaaacagtgtttagtgtagaaccttrttgataaggatagaggtatttatcactcttaagaagtcactaaatggctgacaaatattcttttgtatctgatacgtatgttgaaaatatgatatgaaga

SEQ ID NO: 406741 - DNA, 201 bp, Homo sapiens
ttacatactctgttcccacattataataataatgatgatgatgcataataataggtaatatttattgagcactttatatgtgccaggaccattccaagcartcagatgttttggctcagttaatcttcaaaataactgaatggaagttagtacagataacaatgctgaggcacctaaggttacagtgacaagtgttcaagc

SEQ ID NO: 406742 - DNA, 201 bp, Homo sapiens
ccgccttggcctcccaaagtgctgggattataggcgtgagctactgcacccagcagatgttaattggaaaaaaaagcttctaaaagacttttttgtttttktttttgtttttgtttttttttttttttttttgagacagagtttcgctcttgttgcccaggctggagtgcagtggcgtgatctaggctcacagcaacctct

SEQ ID NO: 406743 - DNA, 201 bp, Homo sapiens
ggggcctgggattgttgtcctgcagcagggtgtgtgttccctcccttcccaacagcctgaagtgttgcccacctcccaggcacccacctccaactcacttytgaagcaaaatttactgatagtcacactaaggtgaatcgatagaatgagttcaaggcaggttttgctgtcaaacttaaattgcagtatgaaaattttttt

SEQ ID NO: 406744 - DNA, 201 bp, Homo sapiens
ttttttgtatttttagtacagacggggtttcaccgtgttagccacaatggtctcaatctcctgacctcatgatccgcccgcctcagcctcccaaactgctrggattatacaggcgtgagccactgggcccgggctacatctaagtcttcaaaactagtatgttggaacgtctgatagtggtagaaaaatctactcacattt

SEQ ID NO: 406745 - DNA, 201 bp, Homo sapiens
tctctcacccaggctggaatgcagtagcgcgatcttggctcactgcaacctccgcctcccaggttcaagtgattctcctgcctcagcctcccaagtaactrggactacaggcacgtgccaccatgcccagctaattttttgtatttttagtacagacggggtttcaccgtgttagccacaatggtctcaatctcctgacct

SEQ ID NO: 406746 - DNA, 201 bp, Homo sapiens
ctcaggccatgtttctggggctacctcatgtccctcaaggctggagactcacttcgctggccttggagaggaagtcaacagggttggcagctcggaggaartcagtgactgaggtacggtgatagagagtgaggtcaccctcagcatagccttcagccttaggaaggaaaagagagaagcttggtcaggcccttctaaggt

SEQ ID NO: 406747 - DNA, 201 bp, Homo sapiens
tggtgtttcttgctgaattttactcttgtttcaagctgatgctttacttcagctttaacatttagattttctcagtagtggaatactcttacatcatgagygtatgcatcttgtcatctctactaagtggttgagccacaaattccatgaggctttatagcctgttttgttcaaaagtataaccaaatcacttacatttga

SEQ ID NO: 406748 - DNA, 201 bp, Homo sapiens
ttttttttttgagaattttgctccagtagtctatagttgcatatatctacttccacttgccctgtagtacttttgcaatgattggtggctagaaatttgawctgtaacccatgaacatggtagctctagacgtatatgtgtgtatgtattttattttaataatcttagcatattcttaaatggaattaatattcaatctag

SEQ ID NO: 406749 - DNA, 201 bp, Homo sapiens
tacagtcactgtaacctcaaattcctaggctcaagtgatcctcctgcctcagcctcccaagtagctggaactacaggtgcacggcaccacaccaccacacytggctaatttttagaaaatattttttcccaggccggtctcaaactcgtagcctcaggcagtctctccaccttggcctctcagagtgctggaattgcaggt

SEQ ID NO: 406750 - DNA, 201 bp, Homo sapiens
ggtgttgcttgccggttgccttaggaatagcaagcgctctaggttaggcagaaagtctgattagaaacagatggttgtgggaactaagcaaccatattttytctatagctcctgagacatacagcaagtggtgatggtccccttctccatgtgaactgtttaagcgttttattcccaaactcataaaggagttaatgtagt

SEQ ID NO: 406751 - DNA, 201 bp, Homo sapiens
ctaccccacagcctggctatttttttttttttttttttttggtatttttagtagagatagctgtgttgaccaggctgcgaactcctgacctcaagtgatcygcctgcttcggcctccgaaagtgctaggattacaggcatgagccactgtgcctggcctggggtttctaattttcttaattcttacaacttcttatgaaga

SEQ ID NO: 406752 - DNA, 201 bp, Homo sapiens
aagaggaagacaatctagaatatgatagtgacggaaatccaattgcacctaccaaaaaaatcattgatcctcttccccccattgatcattcagaggtatgrtgtttcttgctgaattttactcttgtttcaagctgatgctttacttcagctttaacatttagattttctcagtagtggaatactcttacatcatgagcgt

SEQ ID NO: 406753 - DNA, 201 bp, Homo sapiens
tatgtgattgtcagataaaactttaaccttcccagagacatttgctttttttttttttttttttttttcttttttctgagatggagtcacactctatcacycaggctggagtgcagtggcgcagtctcagctcactgcaacctctgcgtctccggttcaaacagttctcctgcctcagcctcccaagcagctgggattaga

SEQ ID NO: 406754 - DNA, 201 bp, Homo sapiens
gcttgtttttccaggggtattcgagatgacattgaagaggaagatgaccaagtgagttcctatgcagtatttctatcttttatttttatccacaaagtctrtactggggacaagctagagcttgccttcactcaaaatggccattcctgacattcagcagggaatgtcatttgatttgctccttttgtacctgtgtgacca

SEQ ID NO: 406755 - DNA, 201 bp, Homo sapiens
ctgcgtctccggttcaaacagttctcctgcctcagcctcccaagcagctgggattagaggcatgtgccaccatgcctggctaatttttgtatttttagtarggacggggtttcaccatgttggtcaggctggtcttgactcctggcctcaagtgatccgcccacctcggcctccagagtgctgggattcataggcgtgagc

SEQ ID NO: 406756 - DNA, 201 bp, Homo sapiens
ggctatatacttcttttttgtttttgagacggagtctcgctgtgtcgcccaggctggagtgcagtggcacgatctcagctcactgcaacctccgcctctcrgattcaagtgattcttatgcctcagcctcccaagtagctgggaccacaggcatgtgccaccacgcccggccaatttttgtatttttagtagagaagggtt

SEQ ID NO: 406757 - DNA, 201 bp, Homo sapiens
atgttgcccaggctggaatacagtggctattcacaggcaggatcatagcacactgtaaccttgaactcctgggctcaagcagtttacctgcctcagcctcytgaatagctgggctggaaatgaatctcttaatgagatggattttcttttcttgtcttttcttttttaatgtaaaaagagacaatctctgtcacccaggct

SEQ ID NO: 406758 - DNA, 201 bp, Homo sapiens; identical to SEQ ID NO: 91100

SEQ ID NO: 406759 - DNA, 201 bp, Homo sapiens
tatttctttttatgagtatttttgtcagcttaataagatgttaattagcaggcaaatccttttggaggggatgatattaaatactgcattctggtttataytgagatcccaataaaattaaaacaatttcttcagtgttttagaaaatataatcatttgttgaggctagcatggtgtgtatctgaaatacaatgtcaactt

SEQ ID NO: 406760 - DNA, 201 bp, Homo sapiens
accatgcctggctaattttttttaaatatttttggtagagatggggttttgccatgttggccaggctggtcttgagctcctgacctcaggtgatccccctrcctcggcctcccaaagcgctgggattacaggcgtgagccaccgcacccagccttgacatctttctttcaaactgggaacgttttggcctgtgtttactgt

SEQ ID NO: 406761 - DNA, 201 bp, Homo sapiens
gacagatcaaggctctgtctcaaaaaacaaaaaacaaaaaaattttttttgggccaggtgcagtggctcatgcctgtaatcccagcacttagggaggcagrtgtgagaggggggggtctcttgaggctagaagtttgagaccagcctggacaacatcacaagaccctgttccttaaaaaaaaaaaaaaaagaaagaaaagg

SEQ ID NO: 406762 - DNA, 201 bp, Homo sapiens
gaggccaaggtggttggattgattgaggtcgggagtacaagaccagcctgcctaacataacgaaaccccatctctactaaaaatacaaaaaattagctgakcctggtggcacacgcctgtaatcccagctactcgggaggctgagacaggataatcacttgaaccatggaggcagaggttgcagtgagctaagattgtacc

SEQ ID NO: 406763 - DNA, 201 bp, Homo sapiens
aacccgggaggcagagcttgcagtgagccgagattgtgccactgcactccagcctgggcgacagagtgagactccgtctcaaaaaataaaaataaaaaaaraattgtcttaccagctgggcgcagtggatcacgaggtcaggagtttgagaccagcctggccaacatggtgaaacctgtctctactaaaaatacaaaaatt

SEQ ID NO: 406764 - DNA, 201 bp, Homo sapiens
ctcactattacttcatcattttatgctttactaaacagaatcacttctcatagactatggaagatttgctggttttagatgaagcatctggatgtacatccacattacttttccaataaaacagacattcttgggacagtagtcaggggaggattacctgtcaaatgtcattcatctcagagaggccttgcctgacttaag

SEQ ID NO: 406765 - DNA, 201 bp, Homo sapiens
cttttacaatgagcatgaagagataaccaacctcactccacagcagttaatagatctccggcataagctcaatcttcgggtaagcatcattaagctcaatrttcttaatattaatgttaattagtccagatttagtattattggttatctaaactaataaccttgaatttcttttctaatggtctctgaactgtctttgcc

SEQ ID NO: 406766 - DNA, 201 bp, Homo sapiens
cccacctccaactcacttctgaagcaaaatttactgatagtcacactaaggtgaatcgatagaatgagttcaaggcaggttttgctgtcaaacttaaattkcagtatgaaaattttttttaagttttcagaactttttggttttgaatgcagataaatgtgctaaatacatagatgctttattctagccaatcaggctata

SEQ ID NO: 406767 - DNA, 201 bp, Homo sapiens
ccgggccgggacagcgcgtactttgggctccgggattcgctccgcgcccgcggttgtagcagctgccgctgcagccatagcagcaggtttgtgcgtggggkttctggacgcaaggccgccagtccttgggggcactggaggcaactgctgggcctagcgagggcggaggaaccgcggcctcgcttaacaaagagtcggcag

SEQ ID NO: 406768 - DNA, 201 bp, Homo sapiens
agattttctcagtagtggaatactcttacatcatgagcgtatgcatcttgtcatctctactaagtggttgagccacaaattccatgaggctttatagcctrttttgttcaaaagtataaccaaatcacttacatttgactttagaattaaaacatttttttcaagtaattgtacttgttttccagaaccaatatttctttc

SEQ ID NO: 406769 - DNA, 201 bp, Homo sapiens
aagaggaagatgaccaagtgagttcctatgcagtatttctatcttttatttttatccacaaagtctatactggggacaagctagagcttgccttcactcaraatggccattcctgacattcagcagggaatgtcatttgatttgctccttttgtacctgtgtgaccaattggtaatacatagattcacatggctttccccc

SEQ ID NO: 406770 - DNA, 201 bp, Homo sapiens
tccccatgtgcagccaagattaagaacccccaatttagagaaatggttcaagccaccgcttcctttccatcccttctctcagctgcaactactcacctctyttcttcctcactgctagtactgctatcactgtctgagatgccatccttttcttccccttcaaggccagtggcagcttctgtccccgaagaagcctctgtt

SEQ ID NO: 406771 - DNA, 201 bp, Homo sapiens
  misc_feature (1)...(201): n = A,T,C or G
aaccaatctgtggttcctgtgaaaattcctcccttagcgtagtgctggctgaaaattaagcaaaagttcccccttcccacttaatttcctctttgtcctcnttctcttcttctgttcttttctccctcccttgacttaaccttgaattttgttcaatgcagaatgcctggtttcggaaatctcgattcaaaggagggaaag

SEQ ID NO: 406772 - DNA, 201 bp, Homo sapiens
ctcacttctgaagcaaaatttactgatagtcacactaaggtgaatcgatagaatgagttcaaggcaggttttgctgtcaaacttaaattgcagtatgaaawttttttttaagttttcagaactttttggttttgaatgcagataaatgtgctaaatacatagatgctttattctagccaatcaggctataaaagtacattt

SEQ ID NO: 406773 - DNA, 201 bp, Homo sapiens
cagaattaatttctcactattgagataaaaaaaaaagatgttatgtttatagatgcaacatgcttgagattgggtattttgcaagttgtggggatagacgwaacaagactggcaaaatgttgggaatcattgaagctaggtgatgggtatgagttgattttgttcattttgtgttttttttgttttattgaatgtctcaaa

SEQ ID NO: 406774 - DNA, 201 bp, Homo sapiens; identical to SEQ ID NO: 91102

SEQ ID NO: 406775 - DNA, 201 bp, Homo sapiens
agtagcttagttggaaatgcaagttgatctagagaaccccttgtgctggtctactttgagtcacacttggggcctgggattgttgtcctgcagcagggtgygtgttccctcccttcccaacagcctgaagtgttgcccacctcccaggcacccacctccaactcacttctgaagcaaaatttactgatagtcacactaagg

SEQ ID NO: 406776 - DNA, 201 bp, Homo sapiens
ggcagtgcccaagtttctggtcctaggagtaaaggacctgcactgcaggagagaagagaataatgtttcctcccctgctcctgagcacagagagctagtcytaaataaacttttaaaacaggacacattttgactttggcattttcttccatttctttttgtacctcaggctttctgtgctcaggactttgtccaagcctg

SEQ ID NO: 406777 - DNA, 201 bp, Homo sapiens
aaatcaaacctggagtcatctgaatccatgctgtccccaaattacaaatgggttcggaacactttctgagagcagaaactgttaagagtttgtcaaatgcytaggccagctcacacaactggtacaacccagctgcaatgtggcagtgcccaagtttctggtcctaggagtaaaggacctgcactgcaggagagaagagaa

SEQ ID NO: 406778 - DNA, 201 bp, Homo sapiens
ttttcttgagacagagttttgcttttgttgcccaggctgcagtgcagcggtgcgatctcactgcaacttcctccttccagtttcaagcgattcttctgccwcagcctcctgagtagttggggtgataggcacctaccccacagcctggctatttttttttttttttttttttggtatttttagtagagatagctgtgttga

SEQ ID NO: 406779 - DNA, 201 bp, Homo sapiens
aggagtgcaactgcttagaaagtccctgtgaatgcctttaattatacttactgttcattttgttgatcttatagggtcgactgatagatcatgtgaaaaaraaagctaccaatcttcaaagagtctcttaccttgtgtttgatgaagcagatcgaatgtttgacatgggatttggtatgccttgaataccagtttcttctg

SEQ ID NO: 406780 - DNA, 201 bp, Homo sapiens
gtgaaaactgctgaagtattgcaaagtctattcccccaaagtttatagagaaaaaatattgacgtacacttgtgtactttacttgaagttattcctgtatyttgaatactttaagaatagagatggcaacagtctttgcatttgcaataattaaaaagcattcagtttggtagaatagtatttggtctttgactataaata

SEQ ID NO: 406781 - DNA, 201 bp, Homo sapiens
tatttaaatttgttttgttacattgatagtcatataatcagctcttagttgctttaagctgacaggagaagggatgcttctaaaataaccataacctagcrtttacttgtatttggtttagaagaatgtgattacgttcttgagtttttatttagattctcatcaaagaactgacctgtatatagtgtgtgaggtactctc

SEQ ID NO: 406782 - DNA, 201 bp, Homo sapiens
ctgtccccatcctcatgatactagttttttttccatgtctttctagactgttttttcagcatgagagaagctaaaaatactcctggatggggttagactayagaaatatagctaagatgaacatttttaggagttttctctggaaaagtatgttaggttttattgggttgaggaaatttcaaagtgcctttgtatataagg

SEQ ID NO: 406783 - DNA, 201 bp, Homo sapiens
ttgtggttccagctgttgagtcctcctcatcaccttcatcttcctctccagagctgaggctggcaaaacagtcccaagagttgggttattttcccagactyttcccctggacacccggtccacacctgcctcgctgcgttctctcctcacctgatgtccagtgcctttgcttgttctttcagcttcttggccacatatcgc

SEQ ID NO: 406784 - DNA, 201 bp, Homo sapiens; identical to SEQ ID NO: 91103

SEQ ID NO: 406785 - DNA, 201 bp, Homo sapiens; identical to SEQ ID NO: 91098

SEQ ID NO: 406786 - DNA, 201 bp, Homo sapiens; identical to SEQ ID NO: 91099

SEQ ID NO: 406787 - DNA, 201 bp, Homo sapiens
attcatggctgaagtggaggcaagtatcaacatgtttcattaaaatatttagcagttagaaatagatcaagttaacttagtacttcaaatcttattcaaartttgttttctagtcttattatttttttttttttgagaattttgctccagtagtctatagttgcatatatctacttccacttgccctgtagtacttttgca

SEQ ID NO: 406788 - DNA, 201 bp, Homo sapiens
gccgccagtccttgggggcactggaggcaactgctgggcctagcgagggcggaggaaccgcggcctcgcttaacaaagagtcggcagagcctcggggcacyggcggccggggtgccgggaaggggtgggagtgggggctgaggcctctagggttccttcctagccgcgtcgccctcccacagctcccgcttccctcacaag

SEQ ID NO: 406789 - DNA, 201 bp, Homo sapiens
tttgagctaagtagtgcataaggtatgtggctgttggaccagtatctattacagtctgagactagagaattagcacttttgccaggagtgcaactgcttaraaagtccctgtgaatgcctttaattatacttactgttcattttgttgatcttatagggtcgactgatagatcatgtgaaaaagaaagctaccaatcttca

SEQ ID NO: 406790 - DNA, 201 bp, Homo sapiens
gttcatcaagaatcagaaagatacatatggtcagaatagcctagaagagtgtagtttaaacattgaaacctgtcattatgctttaaatcaggtcactttaraatgcctcaaaaactgcttctggccactttcccacagaatttaaatcacagtgtaaatgaagatgccgattgagttttcaaaatttctgttcctttgagc

SEQ ID NO: 406791 - DNA, 201 bp, Homo sapiens
gggcaccggcggccggggtgccgggaaggggtgggagtgggggctgaggcctctagggttccttcctagccgcgtcgccctcccacagctcccgcttccctcacaagtcttaccgaggcccagttggcggctttccggaggcggcgccccctcgcctaggaaaaggatttgcagggtgcccggctccagggcaggaatagc

SEQ ID NO: 406792 - DNA, 201 bp, Homo sapiens
cttcttaccaacaggcaactgtcgtatccggtgctgcttttcctcttgcacaaaccactccggaagctccccctcatcctcattaaatgtgtacctgagtrgaaaggacatctgtctaatatccaacattccaggctttctaaagaaattaccagactgggcacggtggctcacgcctgtaatccctgcactttgggaggc

SEQ ID NO: 406793 - DNA, 201 bp, Homo sapiens
agccactgtgcccggccagaactactttttttaagaggaaaagcctattgtgatatggggattgtttgtattataagctgacagtttttctgtaggatgarttcattttatcttggtagaaaagcagtgacaggatcaggaagagaagggggtaaaatgaataaaagattttagataatctgttgagatgcaataatggta

SEQ ID NO: 406794 - DNA, 201 bp, Homo sapiens
cagaaagctaagaggcattcctcacgtgacctggccttgcccacctcttctggacgcgggagatcaggctgggatcacaaggttctgcttgggagccaggygcctgcttgctaggagtaggaccatctgcccaggcttaggtgggggcctgtgtgaggagccacgtggctaacaggtgaactcagaggctgcttgttgcct

SEQ ID NO: 406795 - DNA, 201 bp, Homo sapiens
ctgctccgccttccgcccccgaggctgtgcaccatgtgcagtgtctggtccccaataatgagattagtcttggttgccttttaataaaacgcagtgggcaycgggagggagagcgatgcttggctcagtgaagatctgcgggtcatgctgtccctaatgcgctgattgcattaagtggattctggctgcaggtagggtgag

SEQ ID NO: 406796 - DNA, 201 bp, Homo sapiens
agagggagaggtgatgtcccctctgttcttcctaatttgtagctaatcagattctgcctgcagccaggctctctggggatgaatctaataaaggaggcggmgacctggagaggaggacagacaacaagtgaccaggggggacagcacttctttcagtacattttcctgttagactcggggtattagagacccaaagatacc

SEQ ID NO: 406797 - DNA, 201 bp, Homo sapiens
ctggatgactaaggagctgaagaaggcccccagaagcggatttgtggtgggttattttattttgcctgtggccaatcttctgtgaaatacaatgtgctgtyggtgcaacagatgattcaataaatgtctacagcagacctctcgcctgttatcttcctttactgtggtaataaaaggagccggagcttttagcagccagac

SEQ ID NO: 406798 - DNA, 201 bp, Homo sapiens
actggtctgtttgccaaagtgaacactggatgactaaggagctgaagaaggcccccagaagcggatttgtggtgggttattttattttgcctgtggccaaycttctgtgaaatacaatgtgctgttggtgcaacagatgattcaataaatgtctacagcagacctctcgcctgttatcttcctttactgtggtaataaaag

SEQ ID NO: 406799 - DNA, 201 bp, Homo sapiens
gagggtgggagtttcccgagtgggaaagccccatggcttcggtggcctcggtggccctgtggtgggtcaggccggtgccaactgcgctgagggcggagctsccgccaccttgacacctgggagatggcagggccaccctccctccctccctccctgccctgtccccgactgtatcacggagcgaggatcatccgtgtggat

SEQ ID NO: 406800 - DNA, 201 bp, Homo sapiens
accctaatagctcacaccacactttgctttctccttcatcacatgctaggacgctctagggcaattgagctgttttccccttcacccatcaagaagagatrtcggcctttccgcagtcacagtctttcctaactcaattcaaactctgctgttgataaggagggctgtagccagcccaggctgcccgcttcccagcctccc

SEQ ID NO: 406801 - DNA, 201 bp, Homo sapiens
taaggagggctgtagccagcccaggctgcccgcttcccagcctcccctgctccgccttccgcccccgaggctgtgcaccatgtgcagtgtctggtccccartaatgagattagtcttggttgccttttaataaaacgcagtgggcaccgggagggagagcgatgcttggctcagtgaagatctgcgggtcatgctgtccct

SEQ ID NO: 406802 - DNA, 201 bp, Homo sapiens
tttccgtggcgcacaggccgctgccgggtgaggggagagccccgcttgttctcctcctgccgcctctcctcccatccccagctgctgggtgctctccggcyggcatgaagctgtgcaggcactgggcactcccttgggctcttagcggggccttctcattgctgcttcgctaggaaccacccgctctcctttcctcctgga

SEQ ID NO: 406803 - DNA, 201 bp, Homo sapiens; identical to SEQ ID NO: 91125

SEQ ID NO: 406804 - DNA, 201 bp, Homo sapiens; identical to SEQ ID NO: 91126

SEQ ID NO: 406805 - DNA, 201 bp, Homo sapiens; identical to SEQ ID NO: 91127

SEQ ID NO: 406806 - DNA, 201 bp, Homo sapiens; identical to SEQ ID NO: 91129

SEQ ID NO: 406807 - DNA, 201 bp, Homo sapiens
tgcagcctccggccctgccctctttgtgcacagctgggggaggttggagggtgggggaggggtgttaaggtgcacacagccctaggtgccctcagagaagsccaggagctgcccagggtccccagggaacctggctttctcctccggttcctgcagctaggctcctgttacaagccgtcagctcacatcacctctccacca

SEQ ID NO: 406808 - DNA, 201 bp, Homo sapiens
agacagggcaccgcgagggtaaggaggctccgggagagcctggggacagagtgatctgcgcaccgcggtgcctgaggagtggaggcaggggtgtgggcccrcagcagggagccaggctgggccatgtccttggattctgtgagcccaggcgtctcctctagagggcctagcaggaacagtgggggctgcagatggaaacgg

SEQ ID NO: 406809 - DNA, 201 bp, Homo sapiens
gttagactcggggtattagagacccaaagatacccaaggaggagtgagagcgtccctgccttcgaggagcagacagggcaccgcgagggtaaggaggctcygggagagcctggggacagagtgatctgcgcaccgcggtgcctgaggagtggaggcaggggtgtgggcccacagcagggagccaggctgggccatgtcctt

SEQ ID NO: 406810 - DNA, 201 bp, Homo sapiens; identical to SEQ ID NO: 91131

SEQ ID NO: 406811 - DNA, 201 bp, Homo sapiens; identical to SEQ ID NO: 91132

SEQ ID NO: 406812 - DNA, 201 bp, Homo sapiens
ggcagggaccaggccccctctgtgtggccctagcacctggccaagtgcaggtggctgcgggttgagttgagctgctatttgctgatgggaatttgggggcstgtcgcttgtcctctttgagcctccatttcctggcctgtcaaattggggcaatgctcctgttatccacacagtgtcatttaagggtgacattagagatgg

SEQ ID NO: 406813 - DNA, 201 bp, Homo sapiens; identical to SEQ ID NO: 91133

SEQ ID NO: 406814 - DNA, 201 bp, Homo sapiens
ctgtgctgaggaggaaggaaaccaggcagggctgaggggctcacagtcgccacgtgggcacgtgggtgtgggcctggccgacctcggctgctggggtgtcyggccgccctgtcccggaaccgtctcctttcaaatcctagtggctggtgggcttcagcttcttcctgttccccggagcttcattctccctgcggagccgct

SEQ ID NO: 406815 - DNA, 201 bp, Homo sapiens
ctgttcttcctaatttgtagctaatcagattctgcctgcagccaggctctctggggatgaatctaataaaggaggcggcgacctggagaggaggacagacmacaagtgaccaggggggacagcacttctttcagtacattttcctgttagactcggggtattagagacccaaagatacccaaggaggagtgagagcgtccc

SEQ ID NO: 406816 - DNA, 201 bp, Homo sapiens; identical to SEQ ID NO: 91134

SEQ ID NO: 406817 - DNA, 201 bp, Homo sapiens
cacatcacctctccaccaaggtgcctccttgctgctggggcaggaggcctcacgcacaggcggatgcactcacgttccctctctcacctcccacagccctrctggtttaccgtgtcttcaggaacgaagctaaacgcaccaccaaggtcctgcacgggctgctgcacatctttgcgctcgtcatcgccctggttggtgagt

SEQ ID NO: 406818 - DNA, 201 bp, Homo sapiens
atccttaacttctgtgccaacaactacctgggcctgagcagccaccctgaggtgatccaggcaggtctgcaggctctggaggagtttggagctggcctcarctctgtccgctttatctgtggaacccaggtacacagtgagtggtggggggttgtggggactgaccccagctgcctgcttcccacagtcagcaaggctggt

SEQ ID NO: 406819 - DNA, 201 bp, Homo sapiens
actgtctgtcagattcctggcagctctgggatagcccatgtgtggcagaaagtaaggagactgaggctgcaggctttctgggttgggtctctgtggtcctscaagcctctgtcccctcgaacttgtcccacatgaccccacaggcatcaacacgtgtctcactcattttcttcagagcatccacaagaatctagaagcaaa

SEQ ID NO: 406820 - DNA, 201 bp, Homo sapiens
gcgtctccggaggtaacgctccgttccgggagtcgttccaagacctttcccgagcttgcgctggaatggaggtcctggaggtgggggtgggcggctcctayactcttagctactgttccccttcgcatctctcagggcgactttatggcttcctaatattgactcttgcctggttaaacccttttgacggagggaggcgat

SEQ ID NO: 406821 - DNA, 201 bp, Homo sapiens
gctaacttctagacgcaggaatgactaattccactttacaaacgaagaggctgaaatccacagatgtgaaatggcttgcccaaaagcccccagctagctgmaggcagcgctggaatattggagctggaacattgcctgactggccagagaggacagcttgctgggtaaactcatagcaagcaaggggtcccagggctgcca

SEQ ID NO: 406822 - DNA, 201 bp, Homo sapiens
acagtaccccgcccccaatccatccttctaagtcccgggcctccgcggtaaaataggggtgatggggatagtgatcaaaggcaggaggcgcaaaggatccrgaaaccggtggggagcactgtgcaaactgtaaagcgctgtgcaaataaaattattgatcgtcgtgtcattggattcatccagtctttaagacatgcacgg

SEQ ID NO: 406823 - DNA, 201 bp, Homo sapiens
tttttccttaaccagttgtgcaaggacagcaacaaccaatctaatgatgagaatgtacttatattttgttttgctattaacctacttacggggttagggayttgcggggggggcttgtgtgttttgttggcttgtttgccatgaaggtagatgtgggtggggagaagacacaaggcagtttgttctggctagatgagaggg

SEQ ID NO: 406824 - DNA, 201 bp, Homo sapiens
ccttaaccagttgtgcaaggacagcaacaaccaatctaatgatgagaatgtacttatattttgttttgctattaacctacttacggggttagggatttgcggggggggcttgtgtgttttgttggcttgtttgccatgaaggtagatgtgggtggggagaagacacaaggcagtttgttctggctagatgagagggaaccc

SEQ ID NO: 406825 - DNA, 201 bp, Homo sapiens
cagagtttcactctgtcgccaaggctggagtatagtggtgtgatctcggctcactgcaacctccacctcctgggttcaagtgattctcctgcctcagcctsccaagtagctgggattacaggcatccgccaccccacctggctaatttttgtatttttagtaaagacggggtttcatcatgttgtccaggctggtctcgaa

SEQ ID NO: 406826 - DNA, 201 bp, Homo sapiens
tggtggggcctgttaggctgaggaaggcttgggtgtgggcagtcgggagaacctagcaggattcagtgccatgcctagaggctccagagcccgcttctggmggtcaaggttgggccaggtaggtgctccaggaggaatcctggggcttgcagggagcctgagttccagagcctttgggggataagctacatcagctggaag

SEQ ID NO: 406827 - DNA, 201 bp, Homo sapiens
ctgggaggttggggctacagtgaaccatgattgcaccactgtactccaacctgggcgacagagctagaccctgtctcaaaaaaaaaaaagtttaaacttcttgctcttcaagatgtgtagcactgacgctccttctgtagctgttgaatttggtgcctcctcaatggtgactccaggtctgtttcctttctggaccatttc

SEQ ID NO: 406828 - DNA, 201 bp, Homo sapiens
tccaacctgggcgacagagctagaccctgtctcaaaaaaaaaaaagtttaaacttcttgctcttcaagatgtgtagcactgacgctccttctgtagctgtygaatttggtgcctcctcaatggtgactccaggtctgtttcctttctggaccatttccccagggcctggcactgtcatctttccaggcctgcccttgcccc

SEQ ID NO: 406829 - DNA, 201 bp, Homo sapiens
gaccttttgaactaacctgaccccccattgcttcccttccccgcctgtgccacggagataagcccagagagaaggcatctgacaccgagtcttgcgctccmcctcccccttcctcccctaatcatttggattaatccatcccttggcgtgcgggggaaacccattaatttgtcctggcttcagagactcccaggtccagta

SEQ ID NO: 406830 - DNA, 201 bp, Homo sapiens
gaaggaggtggaaaaaaaccgccaccgggctgacttccacctcccagtggtgagcagtgggggcccaaacccagtttccttctcatttttgttagtttgcsctttcggcctccctattttcttagggaaggggagtggggtccaagtgacagctggatgggagaagccatagtttctcccagtcagctaggatgtagccat

SEQ ID NO: 406831 - DNA, 201 bp, Homo sapiens
aagcttgaacaccccaagccatgaggcagtcccgaatctgagacctggggcagttcccttgccctctgtgttctgcccccaagcctgttggttctggcacrcccttgctttctaccctcccaggcatctttgtcatcgggttcagctaccccgtggtccccaagggcaaggcccggatccgggtacagatctcagcagtgc

SEQ ID NO: 406832 - DNA, 201 bp, Homo sapiens
gacaccttgtgcccacaggttccgtagtaagatggaagctgctggcttcactatctcgggagccagtcaccccatctgccctgtgatgctgggtgatgccyggctggcctctcgcatggcggatgacatgctgaagagaggtaagggtgctgagacaagggaactggtggtgggtcctgagagaagagaaagggaaacccc

SEQ ID NO: 406833 - DNA, 201 bp, Homo sapiens
cccctgaccaacccctccccccacctcttcccttcttctcagggggctacacgacagggcctgggcccctggtgtccctgctgcggcagcgcgcccggccrtacctcttctccaacagtctgccacctgctgtcgttggctgcgcctccaaggccctagatctgctgatggggagtaacaccattgtccagtctatggctg

SEQ ID NO: 406834 - DNA, 201 bp, Homo sapiens
atatacatatctagggctagtacttagtttcacacccgggagctgggagaaaaaacctgtacagttgtctttctcttatttttaataaaatagaaaaatckcgcacttgcgcgtcccccccccacccccttttttaaacaagtgttacttgtgccgggaaaattttgctgtctttgtaattttaaaactttaaaataaatt

SEQ ID NO: 406835 - DNA, 201 bp, Homo sapiens
ttagtttcacacccgggagctgggagaaaaaacctgtacagttgtctttctcttatttttaataaaatagaaaaatcgcgcacttgcgcgtcccccccccmcccccttttttaaacaagtgttacttgtgccgggaaaattttgctgtctttgtaattttaaaactttaaaataaattggaaaagggagaaactgagcggt

SEQ ID NO: 406836 - DNA, 201 bp, Homo sapiens
cagaaaggtgagagtgaaatgaatgtcagaggcagaactcctgactcgcatccagtcacttcccagcaaagccctcacccagacccaacagttttcaaatytacaaattagaggcccaggtgaacccagaattacctctgtgatctttttcttcaccattaggcgaccaaaaaagacactcagtatggtgttaggaagaca

SEQ ID NO: 406837 - DNA, 201 bp, Homo sapiens; identical to SEQ ID NO: 91168

SEQ ID NO: 406838 - DNA, 201 bp, Homo sapiens
gctgttgaatttggtgcctcctcaatggtgactccaggtctgtttcctttctggaccatttccccagggcctggcactgtcatctttccaggcctgccctygccccacctgagctgctgtatccatctcctctccttcacctcaggaatccttaacttctgtgccaacaactacctgggcctgagcagccaccctgaggtg

SEQ ID NO: 406839 - DNA, 201 bp, Homo sapiens
gggaacccgagttgtctttgaaaataaccaaaacaaagccaccagaatgttgtgttttcaaatgacgaaacttaagagaaattgacaccatcaaaagacgraccttgaccttttgaactaacctgaccccccattgcttcccttccccgcctgtgccacggagataagcccagagagaaggcatctgacaccgagtcttgc

SEQ ID NO: 406840 - DNA, 201 bp, Homo sapiens
ccagcctgagcaacagagtgagactctgtctcaaaaaaaaaaaaaaaaaaaaaaagcatagaacagcctggcacatagtactgctcaatgaatgttggctrttatttattttccaaatgttacaaaataaatttatataagtatgaaacttaaatagtacttattatgtgccaggaattcttttaagaaaattacaactat

SEQ ID NO: 406841 - DNA, 201 bp, Homo sapiens
cgcctggcgcgccgcactcttctgggtgccccgcggccgccgcgcacagtcagcgctggcccagctgcgtggcattctggagggggagctggaaggcatcygcggagctggcacttggaagagtgagcgggtcatcacgtcccgtcaggggccgcacatccgcgtggacggcgtctccggaggtaacgctccgttccggga

SEQ ID NO: 406842 - DNA, 201 bp, Homo sapiens
gggtgatgcccggctggcctctcgcatggcggatgacatgctgaagagaggtaagggtgctgagacaagggaactggtggtgggtcctgagagaagagaargggaaacccctagactgtgacccagccccgtacccagccacgctgcggcctcttaggccagctgtctgtctaagcttgaacaccccaagccatgaggcag

SEQ ID NO: 406843 - DNA, 201 bp, Homo sapiens
gcctggcgcgccgcactcttctgggtgccccgcggccgccgcgcacagtcagcgctggcccagctgcgtggcattctggagggggagctggaaggcatctycggagctggcacttggaagagtgagcgggtcatcacgtcccgtcaggggccgcacatccgcgtggacggcgtctccggaggtaacgctccgttccgggag

SEQ ID NO: 406844 - DNA, 201 bp, Homo sapiens
ttgggattacaggcgtgagccaccactcccagccctccctcatttcactctaaccagtggttacacctgacttattcgtgtcaggcctcaggtgagtggtratcatcaacaagctcccaaagctgccttctgcccaggaaataggcatagaacccttggtgctgttgcactcatttgtaaaacagaggtcccaggtaatcc

SEQ ID NO: 406845 - DNA, 201 bp, Homo sapiens
tctctgtccctgcctctcccctctagcttctgtgtctccttcttatccctcctgtctttccacctcccttgttgttctccctgccccctgcctggctcccytctgcctcttagagcttgtaactgtctttgttgatccttcttgcagacttgggcatagacctcgggcctggtccctgcaaggagcgggtgtgaatgctcc

SEQ ID NO: 406846 - DNA, 201 bp, Homo sapiens
agaccctctctctaaaaaaaaaaaaatgtttttaattagctgggtgtggtggtgcgcacctgtagtcccagctactagggaggggaggctgagttgggagsatcacttgagcccaggagttcaaggctacagtaagctatggtctcactactgcactccagcctgagtgacagagaatccctgtctcatttgccaaaaaaa

SEQ ID NO: 406847 - DNA, 201 bp, Homo sapiens
cttggctccctgtaaccttcgcctaccagactcaagggattctccatgcctcagcctcctgagtagctgcgattacaggcatgctaccacacccagctaatttttttttttttttttttttttgagatggagtctcgctctgtcgctgaggctggagtgcggtggcatgatcttggctactgcaagctgcgcctcccaggt

SEQ ID NO: 406848 - DNA, 201 bp, Homo sapiens; identical to SEQ ID NO: 91165

SEQ ID NO: 406849 - DNA, 201 bp, Homo sapiens
cacacctgtaatcccaatacttttggagcccaaagcagaaggatcacttgatgcctggagtttgagaccagcctgggcaacatagcaagaccctctctctaaaaaaaaaaaaatgtttttaattagctgggtgtggtggtgcgcacctgtagtcccagctactagggaggggaggctgagttgggaggatcacttgagccc

SEQ ID NO: 406850 - DNA, 201 bp, Homo sapiens
gcagggcaggctcgggggcggagagacgtggtgagagccagcctcatgtgtctgcccaggcccacagacagctctgtgcccaccgggtctgcttctgcctrttcccctcccttctctctgtccctgcctctcccctctagcttctgtgtctccttcttatccctcctgtctttccacctcccttgttgttctccctgcccc

SEQ ID NO: 406851 - DNA, 201 bp, Homo sapiens
ggcccacaagtaccgctatcgccacctggacatggccgacctagaagccaagctgcaggaggcccaggtggggcgacgcctgggtccaccctcagcctccrcctggggaaggaagtgaggcttagagaggccaactcctcactcacagagatagcctgaaagtttgaaacagcagagatttgtccaagatgtgaacccaga

SEQ ID NO: 406852 - DNA, 201 bp, Homo sapiens
cgggcatggtggcacgcacctgtagtcccagctactcaggaggttaagtgggaggattgcttgagcctgggaggttggggctacagtgaaccatgattgcmccactgtactccaacctgggcgacagagctagaccctgtctcaaaaaaaaaaaagtttaaacttcttgctcttcaagatgtgtagcactgacgctccttc

SEQ ID NO: 406853 - DNA, 201 bp, Homo sapiens
aggacgcagtcctgtcggacgagctgaaccatgcctccatcatcgacggcatccggctgtgcaaggcccacaagtaccgctatcgccacctggacatggcygacctagaagccaagctgcaggaggcccaggtggggcgacgcctgggtccaccctcagcctccgcctggggaaggaagtgaggcttagagaggccaactc

SEQ ID NO: 406854 - DNA, 201 bp, Homo sapiens
aggcccacaagtaccgctatcgccacctggacatggccgacctagaagccaagctgcaggaggcccaggtggggcgacgcctgggtccaccctcagcctcygcctggggaaggaagtgaggcttagagaggccaactcctcactcacagagatagcctgaaagtttgaaacagcagagatttgtccaagatgtgaacccag

SEQ ID NO: 406855 - DNA, 201 bp, Homo sapiens
cctgcccttgccccacctgagctgctgtatccatctcctctccttcacctcaggaatccttaacttctgtgccaacaactacctgggcctgagcagccacyctgaggtgatccaggcaggtctgcaggctctggaggagtttggagctggcctcagctctgtccgctttatctgtggaacccaggtacacagtgagtggtg

SEQ ID NO: 406856 - DNA, 201 bp, Homo sapiens
gacaggattccagatttgtctcagccagcttaagccccagtgtgggcagacctccatcccaggaggatttagtcctttgtcagcagcttcttagctacacstaagctattctgtggtactttatagtttacaggattttttgttttcttttttttttttttttgagacagagtctcgctctgtcacccaggctggagtaca

SEQ ID NO: 406857 - DNA, 201 bp, Homo sapiens
  misc_feature (1)...(201): n = A,T,C or G
gactgtttttggggccaaggaactgggcaagatggtggtggactgtgtgagtgtgggcccctcccccaggccacttccctcagggtctgtagcccaggtcnatggcttcccctcatcctgtggggcctttggtgttggaggagacagcagggctctgtccatcgcctttagccagctggagggagagagagtccacagttc

SEQ ID NO: 406858 - DNA, 201 bp, Homo sapiens
ggggcaggcttgcacttgtagcttcagagctccactgcaggcacagctgaccagggcagcgggtccactccttggagagctggacagccccacttttgagrtacacggccctggggataccactaatctccacgtaccaataatcaccaagttctgtcagttgtaaaatcccttgacaggattccagatttgtctcagcca

SEQ ID NO: 406859 - DNA, 201 bp, Homo sapiens
aacgttgaggctgcacccttgggctgaatgcattgtttttgaatgcattgtttttgttagagtttctgcctggagtttggaacctgttttctgtccaagtytcagtttcctcatctgtgacaggggaactgtacctcctgccctcgtaagtctgccatgaggttcaaaatttgaatgagaaaatgtagaaggtaaagcttt

SEQ ID NO: 406860 - DNA, 201 bp, Homo sapiens
agatagctcagttaagctcccaggcccagaactcaaaacctcactgctggccgggcgtggtggctcacacctgtaatcccagcactttgtgaggccgaggygggtgtatcacttgaggtcaggagtttgagaccagcctggccaacgtggtgaaaccccgtctctactaaaaatacaaaaaattagcaaggcgtggtggcg

SEQ ID NO: 406861 - DNA, 201 bp, Homo sapiens
  misc_feature (1)...(201): n = A,T,C or G
gtccagggtgacaattctcaggtgctgcaggtgagcagggggaggggcagggtgactggtactgatacctcccggtgtccacggttccctttgggcccctnggctcaggtgtcactctcaggcctctcactgtcccccattggtccttgaggcctgagctccttcatggagggtgcagacccctccctggctcttccctcc

SEQ ID NO: 406862 - DNA, 201 bp, Homo sapiens
  misc_feature (1)...(201): n = A,T,C or G
ttactgccctcacccccaccctcgctgtcctgcataggacagaagttcctcgggtccgtctgggtctgtctgccaggacacagctgcaggggacaagggcnatgagggtggatgtaaagtactgggctgtggcaggaccctcctctctcccactgctgttcccactgcagccacgaccacctgctgtgcctggatggagga

SEQ ID NO: 406863 - DNA, 201 bp, Homo sapiens
cagattaaagggtaaagagatacaaattcccactgctcagtgcaaggaatatcagtgattttagggggccctgttttaaaacccctacaaggtgctaagcrtggatttctggggctttcttgttttttgtttttttctatgtgtttttttttttttttttggtggtggggtcagggagggcttatagggtatgttaaatca

SEQ ID NO: 406864 - DNA, 201 bp, Homo sapiens
tcttttcagctctttaaggaagtcattccattatctctgggttccattgttgagaagccagctgtcattctaatggttgccctttgaagataacttttttycctctgctattttaaatatttcctccttgtattttattttcaacaggtgtaatgtggcacatatatcagcaattgttatgttacatacaatacatattgt

SEQ ID NO: 406865 - DNA, 201 bp, Homo sapiens
ctgtcccccattggtccttgaggcctgagctccttcatggagggtgcagacccctccctggctcttccctcccagcccttttccaggagccacgtcctcartctctttgcttgataaacctggggacggcctccaacccagcaaaataaaccccaaaaaaggcccagctccagtcagttagttcagttccacttttcctga

SEQ ID NO: 406866 - DNA, 201 bp, Homo sapiens
cgggaggctgaggtgggaggattacttaaacctgggaggttgaggctgcagtgagcgttgattgcaccactgcactccagcgtgggtgacaggagtgagaycatgtctccaaaaaaaaaaaagaaggaaagaaaaagcttttgtatttcctttcgtgtaggtctgctaatgacaaagtctctgggttttttgtttgactag

SEQ ID NO: 406867 - DNA, 201 bp, Homo sapiens
cacgtcctcagtctctttgcttgataaacctggggacggcctccaacccagcaaaataaaccccaaaaaaggcccagctccagtcagttagttcagttccrcttttcctgagcacaaactgtgagccagatgcctgcctggaggggctcgtgggccagcgggacctgggcttaaccttttgcaagcttgtccaatctgtgg

SEQ ID NO: 406868 - DNA, 201 bp, Homo sapiens
cgggaggatcgcttgagcccaggatttccagaccagcctgggctacgtggcaaaaccctgtctctactgaaaatacaaaaaattagccaggtgtggtggtkcacgtccctgctactcgggaggctgaggtgggaggattacttaaacctgggaggttgaggctgcagtgagcgttgattgcaccactgcactccagcgtgg

SEQ ID NO: 406869 - DNA, 201 bp, Homo sapiens
aaaaaaaaggcttcaggagggcagagcattttatgcaattgttcattaattgacccctccatttggcacagatcacatgcccagtagttaactgttaatcracgcactctctgtggaacaacaggctggtcccgttgagccaacactctctgggcactgccttcactagactctggctggctgctgcgcttgtagaggtat

SEQ ID NO: 406870 - DNA, 201 bp, Homo sapiens
gccattccagattctgagtgcagatggggctgagcagaccgccttccagctggactcgatcaggactgaccctggacggggcaggcttgcacttgtagctycagagctccactgcaggcacagctgaccagggcagcgggtccactccttggagagctggacagccccacttttgaggtacacggccctggggataccact

SEQ ID NO: 406871 - DNA, 201 bp, Homo sapiens
aggcaccagttttaatacagtggggccattccagattctgagtgcagatggggctgagcagaccgccttccagctggactcgatcaggactgaccctggayggggcaggcttgcacttgtagcttcagagctccactgcaggcacagctgaccagggcagcgggtccactccttggagagctggacagccccacttttgag

SEQ ID NO: 406872 - DNA, 201 bp, Homo sapiens
ggatcacaaggaggtgattgagagctactctgcgtctggaagagtgaggaggagcctgtgtggcagaacaaaatggataaggtcgttccagccgtgcagargtgtggaggtgtgagcctgcaggcaggtggctctggttggatcccaggtgcatgcagggctttggtgagagtgaggctgaaggaagcagctggggactca

SEQ ID NO: 406873 - DNA, 201 bp, Homo sapiens
  misc_feature (1)...(201): n = A,T,C or G
caataccacacactacaggtgaggaaactgagtctctgctgggacactgggtcaggaagcaggcagttaaggtcacctgtgcacagtggcagcacaggggnacagccttctaggtagccagcctggcctgagggttctgtcacttttacctcccactcagtgttgtttctctttctttcccctccttttaagatccctcca

SEQ ID NO: 406874 - DNA, 201 bp, Homo sapiens
acctgggatcaggacgagggatgtctcctttcatccatggacttaaaccccgaggaacgtcctgactcagccttttgactaaatgaccttgggtgaattayggaccctcttagagcctcacctgtcaatagggaataagaattcttaggccccaggtggttattgcagcatcggctccgatgcaagaagaagcactttgtc

SEQ ID NO: 406875 - DNA, 201 bp, Homo sapiens
gcagttcgttcatttccaaggagcttgcttttgtgtgctgtctctcggagctctttgggaaacctgtggtagcaggaaacaaaggatttagaccaatgccratgatccccttgctccgatagagtgtgacatgatgctggtcaccttttggtatctaggaggggggacattgattttgtttgcggaagtgaaatgatccat

SEQ ID NO: 406876 - DNA, 201 bp, Homo sapiens
agatccacagcaaagacccccgttacggagccagccccctccactgggccaagaacgcagaggtgagtggatcctgaggtgggtgggtggggcagggggcygggccccgcaggtcctcagggccctcaggaagcaggttcccgagaggaccctgaggctagcacttgggggctgaccttgcagtgggtgtgcaggcagaga

SEQ ID NO: 406877 - DNA, 201 bp, Homo sapiens
ccaaatacacaccttttgtcagtgatacgtgttcagctgcacacacggtgttttgcctttttattcttttaatggtatctattgataaacatgagttcttwgttttaatgaagtcaaatttgttcatcttctttacggtgtactttttgtgtcttgtttaaggaagtccttctctatcttaaagctttgagaagcattcct

SEQ ID NO: 406878 - DNA, 201 bp, Homo sapiens
ttcaaaaaaaccaacttttgctgaattgtgcccccaaggttggaccaatctgacactcctccagcactgccggagagagcctgttttgcggggatggtgcrgggagaagcccacctatcccgaacagaggttggagtgggcactctgctacccaaggccctggggtgtgaattgtggggaaagggaaaggtggatgggcgg

SEQ ID NO: 406879 - DNA, 201 bp, Homo sapiens
ataaaggaatacctaagtctgagtattatacatagaaaagaggttttatttgtctcatggctcctcaggccatacaagaaacatggtgccagcatcttacyagtgtcacatggcaagaaaggaagtgaggaagagaaaataagttgttaactggttgttaaaaagtgccaggcacgggccaggcacagtggctcgtgcctg

SEQ ID NO: 406880 - DNA, 201 bp, Homo sapiens
aagacatttctgttattctccaaatttccttcaccctcctttatagtccatggcacccaccccatccctgggcaacacctatgtgcttccttttttttttwccccgcaggaggacgtcttcctatacctatgtgcattccatcactgctgcttttaatcatatagcgtgtagtcttatgagtctgactttttcacttagca

SEQ ID NO: 406881 - DNA, 201 bp, Homo sapiens
gtccttcctgctcttccctcccctttccacaagcagagaagtctctctccatggccaccactgccccagccctgtggcagtgctgccaggccactgccaaygttcattcagggcctaagggctcttgaagcaactgaacactgccaggcctgggactctccctttagggtagtgggctcccctctgacccagggcaggtcc

SEQ ID NO: 406882 - DNA, 201 bp, Homo sapiens
agaaatttaaagtgtgaaaatttcaaaatattaattcatttaaaaataacaataataaatatatatgcctactatgtacccacaaaaattaaaattaaaawttttttaaaaaacttaaaaaataactggccagctgcagtggctcgtgtacaccagcactttgggaggccaagatggtcagatcacctgaggccaggagtt

SEQ ID NO: 406883 - DNA, 201 bp, Homo sapiens
aaggcaaagtccttcctgctcttccctcccctttccacaagcagagaagtctctctccatggccaccactgccccagccctgtggcagtgctgccaggccrctgccaacgttcattcagggcctaagggctcttgaagcaactgaacactgccaggcctgggactctccctttagggtagtgggctcccctctgacccagg

SEQ ID NO: 406884 - DNA, 201 bp, Homo sapiens
atacccaagccataaggcaaagtccttcctgctcttccctcccctttccacaagcagagaagtctctctccatggccaccactgccccagccctgtggcartgctgccaggccactgccaacgttcattcagggcctaagggctcttgaagcaactgaacactgccaggcctgggactctccctttagggtagtgggctcc

SEQ ID NO: 406885 - DNA, 201 bp, Homo sapiens
gttggatgctggggatgcagagctgagccaggcataccccagcctcaggagcagggggctcagccagtccaggaggtgctggggacagagtcccatgggcrgaggaggagagtcatctgtcaagttgccgggacgttagtgtccacggcggtttattgactggtatttcatttccttttgatgattctcaccatagccctg

SEQ ID NO: 406886 - DNA, 201 bp, Homo sapiens
catccacactggcacttggctttcctggtgcttctctttacgttctttttttttagacagagtttttgctctattgcccaggctagagtgcaatgatgcartctcagctcactgcaacctctgcctcctgggttcaagcgattctctttcctcaggttcctgagtagctgggattacaggtgcctgccaccatgcccggct

SEQ ID NO: 406887 - DNA, 201 bp, Homo sapiens
gttgtgtttccattatcatttgtttcaggatgtttttaaatttccttcttaatttcttcattgaccattcaagagcatattatttcatttccatgtgttcrtatggtgtgcaaaataccttgtttttgatttgtagttttatttcattgtgatcacagaagatacttgatatgatttcaaatttaaaaagtaatttggctg

SEQ ID NO: 406888 - DNA, 201 bp, Homo sapiens
atcacagcactaaccacggcccctcctctcagcaccttcccctctcgagccgtccagtcccagtgaaaatgctcaccgttcatgggtgggctgagcaagcycctgatctctgccttcctccgtgttctgatctgcttcatctgctgtgaaggcctctcgccatttcccccgctggcaaactcctgttcttcctggaaagtt

SEQ ID NO: 406889 - DNA, 201 bp, Homo sapiens
aaggaatttttctattttatcgaagttgtcaaatttgtctgcaggtccccttatttcctttttaatgtatggaggatctgaagggatggtactttgtgttktctctatttcttgtttggttttgctagtgatttgccaatttaaaaaatctttccaaagaaccaacttttggctttgtttattttttgaaaacctgagtag

SEQ ID NO: 406890 - DNA, 201 bp, Homo sapiens
gaaccagatttttgggactgagttctccctcaccacccgctctgagccaccctcttggtcccttgtcctctactgcacttcttccggggcttggctcctcrtcatgagaggagcttccctgggcatggcgaggggcgtgactgacatagcagccctggacaagtggctccaggtgacctgtgttcacgttgatcacagcac

SEQ ID NO: 406891 - DNA, 201 bp, Homo sapiens
gtgctaagtacagaattctcattggcatttatttatttagagacagagtcttgctctgtggcccaggctagagtacagtggcacgatctccgcctcccagkttcaagcgattctcctccctcaacctcctgagtagctggggctacaggcatgcaccactacacctgactaatttttgtatttttagtagagacggggttt

SEQ ID NO: 406892 - DNA, 201 bp, Homo sapiens
ggcatttatttatttagagacagagtcttgctctgtggcccaggctagagtacagtggcacgatctccgcctcccaggttcaagcgattctcctccctcarcctcctgagtagctggggctacaggcatgcaccactacacctgactaatttttgtatttttagtagagacggggtttcaccgtgttgcccaggctgatct

SEQ ID NO: 406893 - DNA, 201 bp, Homo sapiens
gtgcaggcccctttcactacagaaaagcagttttcacacagaccttccaaaggggaggagaggggactgcctgggcctggcagctgcggcaggtagcagcmatcagagggcagggaccgctcctcccgtgcctgagacctgcccagggtccttcagggaattcgtagctgaggaggaaccagatttttgggactgagttct

SEQ ID NO: 406894 - DNA, 201 bp, Homo sapiens
tacaaggtgctaagcgtggatttctggggctttcttgttttttgtttttttctatgtgtttttttttttttttttggtggtggggtcagggagggcttatrgggtatgttaaatcagcagaataattttatttatttatttggagatggagtttcactcttttgcctaagctggagtgaagtagcgtgatcagagatggag

SEQ ID NO: 406895 - DNA, 201 bp, Homo sapiens
gttataccataatttatataatattttgttgctgtacatttaggttaaacaatacttacttagttcctactatgaagaggggccaagtactcgaggctggrgctctcacatgtggcaatgaaattagaaagtggatatggcagggctgtggtaaaataaaatataaaaataataaatgatattaccaaagaaaaggaaagt

SEQ ID NO: 406896 - DNA, 201 bp, Homo sapiens
gcaatgaaattagaaagtggatatggcagggctgtggtaaaataaaatataaaaataataaatgatattaccaaagaaaaggaaagtttttcaaaataaargaaaatctagacaagcatagtggctcacacctgtaatcccagtacttttggaggctgaggcaggaggaacacttgaggccaggagttcaagaccagcctg

SEQ ID NO: 406897 - DNA, 201 bp, Homo sapiens
ggctgaggcaggaggaacacttgaggccaggagttcaagaccagcctgggcaacatagcaagaccccctgtcaacaaaaataaaaaaaaattaggccaggyacagtggctcacggtggctagtgcctgaaatcctagcactttgagaggctgaggggggtggattgcctgagctcaggagttcgagaccagcctgggcaac

SEQ ID NO: 406898 - DNA, 201 bp, Homo sapiens
accagcctcaccgaaatgaataagccactccaggacaggagacaccccagccacccagaatctcatagcgcagtgccagacaagcagtgagaaggcatggrcgggcagcactcaggcagggaggctggcacttgtgcctgtcctcaggttgttccttcctctgggagctgcatccaccttgctagccccatggggcattgc

SEQ ID NO: 406899 - DNA, 201 bp, Homo sapiens
cctgggtgggtccagcgtcccatcacataagaggatctttgcacagaagacaaaggaagaggctcctaccttgagtggagcagggagatcccttatcgacwtggcagccagcacagccctactccaagaatcccacggcctcagtgttactgacaagtggttccctcacagctcagactaggagctccctcgctgtttttc

SEQ ID NO: 406900 - DNA, 201 bp, Homo sapiens
taatccgtccttcttagctgcgcacacaccacacgccccctcccctgcaccctgtccccggcctctctcagccactcttctgcttcccttgttcactgtgsagccgtgtgccctggggagggggagacaccgcttcgcagccctcggttctgctttgctgcttctagactctgcacagtggtggggggctgtcagagttgg

SEQ ID NO: 406901 - DNA, 201 bp, Homo sapiens
agggcttatagggtatgttaaatcagcagaataattttatttatttatttggagatggagtttcactcttttgcctaagctggagtgaagtagcgtgatcrgagatggagtttcactcttttgcctaagctggagtgaagtagcgtgatctcggctcactgcaacctccgccccgctggttcaagcaattcccctgcctta

SEQ ID NO: 406902 - DNA, 201 bp, Homo sapiens
ctttcccctccttttaagatccctccaggcccaggatctggggacaacgctggtggggagtgatctgggtgtctgtgcaggaaaccgctgcactgggtgaratgggcatgggagactgtgcctggctgaccagagacctcgttttcttccagacagagggggaagacggtggggcctccccacctgccccgcagaagatgc

SEQ ID NO: 406903 - DNA, 201 bp, Homo sapiens
gcagcacagggggacagccttctaggtagccagcctggcctgagggttctgtcacttttacctcccactcagtgttgtttctctttctttcccctcctttyaagatccctccaggcccaggatctggggacaacgctggtggggagtgatctgggtgtctgtgcaggaaaccgctgcactgggtgagatgggcatgggaga

SEQ ID NO: 406904 - DNA, 201 bp, Homo sapiens
ttgagggcaggaagcatccagcacgggagaaagatgtaggctgggaggctaagccagtctagccttttcacatttttttctgcctgctttatattctggcygtgctggcagctgattagatggtgcccacccagattaagggtaggtctgccttcccctactgactcaaatgttaatctccgttagcagcaccctctcaga

SEQ ID NO: 406905 - DNA, 201 bp, Homo sapiens
gagtctcgctctgtcgcccaggctggagtgcagtggcacaatcttggctcactgcaagctctgcctcccaggttcatgccattctcctgcctcagcctccygagtagctgggactacaggcgcccgccaccacacccggctaatttttttgtatttttagtagagacgaggtttcaccgtgttagccaggatggtctcgat

SEQ ID NO: 406906 - DNA, 201 bp, Homo sapiens
cctggctcttccctcccagcccttttccaggagccacgtcctcagtctctttgcttgataaacctggggacggcctccaacccagcaaaataaaccccaaraaaggcccagctccagtcagttagttcagttccacttttcctgagcacaaactgtgagccagatgcctgcctggaggggctcgtgggccagcgggacctg

SEQ ID NO: 406907 - DNA, 201 bp, Homo sapiens
gactacctaccactgctcccggctgtgccatcgccaccagctcccagcctcctgctcagacccgggacagcccctccatggcccccgagatggaccagttytacaggtccaccatggccatctacaaggtgagcacatgggtggccaagccaggcctgagcccctcctcccagggcacagaaatcaggcccgctctggagg

SEQ ID NO: 406908 - DNA, 201 bp, Homo sapiens
gtcttccctcaatgaacccagcaggcaagcttggttttgacagaggatgggtgagcagagataaggaaaacggccagaaatatctggcttccctcagcagrggcaccaaaattggtacctggaaattgcctggcttggacaggcagaattgtcactgtcaacccccaccaccaaaggtcttgggtctttgtctttctgctt

SEQ ID NO: 406909 - DNA, 201 bp, Homo sapiens
ctccggagtagctgggattataggcgtgcaccaccatgcccggctaattttttgtattttagtagagacagggtttcaccatgttggccaggccagtctcraactcctaacctcgtgatccacccacctcggcctcccaaagtgctgggattacaggggtgagccaccgtgcccggccatgactggcttatttcacttggc

SEQ ID NO: 406910 - DNA, 201 bp, Homo sapiens
cctggggatggatcagtccgatcacttagggccgctcctgaaggagtgcaggtgctagatacaggttctcccggtggaggagcgaaccccttgtgggccgktagctactggtgggatttgagcatggtatttccctatccgttgtggagaggagcatggcagctcagagtgggtgggaacagtgtgtggtccctgttatca

SEQ ID NO: 406911 - DNA, 201 bp, Homo sapiens
accagcccaaagatctcttaaagtcacccctgtctcatgtgcttgggagctccagtgacagtttcggggcagtttgcttccagctgtggtccagccaagcsgagtgaatgaaagagatgctttttccttttgtgaaaggacgttttgctctggctcacgtgagcagcagtgcattttgagacgagggccttggcttttgga

SEQ ID NO: 406912 - DNA, 201 bp, Homo sapiens
ccccctcccctgcaccctgtccccggcctctctcagccactcttctgcttcccttgttcactgtggagccgtgtgccctggggagggggagacaccgcttygcagccctcggttctgctttgctgcttctagactctgcacagtggtggggggctgtcagagttggggtcacgcgggctgctgcaccaggcacctggggac

SEQ ID NO: 406913 - DNA, 201 bp, Homo sapiens
tagcatgtgccaacacatgtattttttgtagagatggggtttcaccatgttgtccaggctagtcttgaactcctgagctgaggcgatcctcccgccttggyttcccattacaggcatcagccaccatgcccagcctagtttgtgctttttatttctcgttcataaacccctttgctgcccccaagcagcacacgattctcc

SEQ ID NO: 406914 - DNA, 201 bp, Homo sapiens
tttttttgagacggagtttcactcttatcgcccaggctggagtgcaatgacgtgatctcggctcactgcaacctctgcctcctgggttcaagcaattctcytgcttcagcctcccaagtagctgggattacaggcatgcgcaaccacacctaatttttgtattattagtagagacggggtttccccatgttggccaggctg

SEQ ID NO: 406915 - DNA, 201 bp, Homo sapiens
gcgcatgagttgcttgaggtcacaccgatgaggttgaagctggaatctgacaccagagcctgtgtgattgtcctgatgtgtaaggtttgctactgtttagracacttcttgttccttccgtggattactttcttgttacatgagagactccccaaaagggagtttccctcttactcagcagaatgacatcactaagagata

SEQ ID NO: 406916 - DNA, 201 bp, Homo sapiens
ctcgaactcctgacctcaggtgatccacctgcctcggcctcccaaagtgctgggattacagacatgagccaccatgcccagccgattctcctttttctaaygtctgcagtgtgtgttggtgcggcccccttttctttcctgattttgataacagataacagccatgttttatcagtcttgcaacaggtttttccattggat

SEQ ID NO: 406917 - DNA, 201 bp, Homo sapiens
cgtgatccacctgcctcagcctcccaaagtgctgggattacaggcgtgagccaccgcccccggccaagataaaggcttttctatctggcttctttgttagmattttgttggcgagattgatacgttttgtgtgcagctgtctgtcattttcattgcaatagaattccattgtctactatatcacagttactcattctacta

SEQ ID NO: 406918 - DNA, 201 bp, Homo sapiens
gtggcgcaatctctgcttactgcaagctctgcctcctgggttcacgccattctcctgcctcagcctcctgagtagctgggactacaggtgcccgccaccamgcccggctaattttttgtattttagtagagacgaggtttcaccgtgttagccaggatggtcttgatctcctgacctcgtgatccacctgcctcagcctcc

SEQ ID NO: 406919 - DNA, 201 bp, Homo sapiens
gctggtgtggcgggcggcccgaagcagcggggcagctcctacttacttccgacccaatgggcgcttcctggacggtgggctgctggccaacaaccccacgytggatgccatgaccgagatccatgagtacaatcaggacctgatccgcaaggtgagtgccgtaggccagagggcctggacccactgctccctggagccaat

SEQ ID NO: 406920 - DNA, 201 bp, Homo sapiens
tctctttaaacttttcaaaaatagcaaaatataacacatatagagaaaatgatatacagctcagtgatttatcacaaacacctgtgtaaccaccactcgamtctagagataggacattacagcaccccagaagccctccttttgtcccctcttcccaaagaagggtaaccaataacttgccttttatgataaaggcttttt

SEQ ID NO: 406921 - DNA, 201 bp, Homo sapiens
cttagacgaagaggcaagaaagagatgatctgtctctgccatgtgagggcacaacgagaagatagccgtctgcaaaccaggaagtgaaccctcatcaggarctctatcagccagcaccttgatcatagacttcctagcctctagaactgtgagaaataaaggttgtttaagcctcccagtctgtagttttctgttataatg

SEQ ID NO: 406922 - DNA, 201 bp, Homo sapiens
cctgtcatctacttcttgacaccatttgaacaattatctcccctctttcctacataacactttccccttttctactatatattttttgctatggattgaawgtatccccccgaaatcatatgttgaagccccaatccctcgtgtgatggtattaggaggtagagcactatgggggtgattaggtcatgaggatggagccct

SEQ ID NO: 406923 - DNA, 201 bp, Homo sapiens
cccctcagcctggccaccccagagtctcccacccctaatcctgtgtccacctcctgctcccacagatgacttggaagctggtgacagggagcatgtgaccmgggtgatcatgggactgggtcggggcaagcctgtgggtgtgggacagggagggcacagggcaaggggacctgtggccgtatttttaatgggctacccaca

SEQ ID NO: 406924 - DNA, 201 bp, Homo sapiens
ctcactttgaaatcacgacatgagccacagtgagcctatgatgtggtttgacgtctttctgcatttctctgttcacccctctcccagaaggcatgcctccytccctcccctcagcctgcagccccttcccctccacgcttactctcagctgatagccctgctgctgtctcgctgagaaaatagaaatagccagaggagaat

SEQ ID NO: 406925 - DNA, 201 bp, Homo sapiens
ggaagtgttgcctgtgttgcagacagccacgtgccagtcgaaaatcagaggttctttctccctccgtcttgctgctggctcgcttctccagaccacagtcrttgtgcacgtgtctcctgctgctccggctgtggcctgcactcctctcatcctcttccaagctgctgtcacagcgctgtttccagagggcaaatctgattg

SEQ ID NO: 406926 - DNA, 201 bp, Homo sapiens
agaacccggtcacatggccacagctaactgcaaaggatgctgggaagtgttgcctgtgttgcagacagccacgtgccagtcgaaaatcagaggttctttcyccctccgtcttgctgctggctcgcttctccagaccacagtcattgtgcacgtgtctcctgctgctccggctgtggcctgcactcctctcatcctcttcca

SEQ ID NO: 406927 - DNA, 201 bp, Homo sapiens
ctcttcctatgagtttaactgctccaggtactgttaagtaaaatttttaggggataattgatttggaccaggattctgtaccaggcccaacagaagaaacsaatatggagtcattcatgccaagtgaacctagttagcttaggcgtatacccatgtaacaaatagctgagttctggttagctacaacagctaagctttaat

SEQ ID NO: 406928 - DNA, 201 bp, Homo sapiens
ttggattagcctttcaaaaaaaccaacttttgctgaattgtgcccccaaggttggaccaatctgacactcctccagcactgccggagagagcctgttttgyggggatggtgcggggagaagcccacctatcccgaacagaggttggagtgggcactctgctacccaaggccctggggtgtgaattgtggggaaagggaaag

SEQ ID NO: 406929 - DNA, 201 bp, Homo sapiens
gtcccctgcccagcctgagcatcctagggtgaccccctcctccctggcccgaacagattgaacccccagctggggacggacatcatgctggatgaggtcastgacacagtgctggtcaacgccctctgggagaccgaggtctacatctatgagcaccgcgaggagttccagaagctcatccagctgctgctctcaccctga

SEQ ID NO: 406930 - DNA, 201 bp, Homo sapiens
ttcatccccctgcgtccccaattcccatcccgagaccgcccgtgtctcatctcgaacttgtggaccccagggaccccagcttcgaccctgagtttctcccytgaaccccagtctcctccgtgtgtctccctcagtatccctaacttcccgagtcaatccatctcttctctttccccgaccctcagtgcctctttaggcccc

SEQ ID NO: 406931 - DNA, 201 bp, Homo sapiens
agtaatttgctcaaagtcaggcagtcagtaagtgccagacctgggaattaaacccatgtgggctgtcctagtaattgcactaaaaaaaaaaaaaaaaaaaagctttattgagatatagttcctattccatacaatccacctattgaaagtatacaatgattctgatatattatgtttattttttccaactgtgatagatta

SEQ ID NO: 406932 - DNA, 201 bp, Homo sapiens
tcaactgattctcctgcctcagcctcccaaggagctgggattacaggtgtgcgccactatgcccagctaatttttgtatttttagtagagatggggtttcrtcatgttgaccaggctagtcttgaactcctgacctcaggtgatctacttgcctcgccctcccaacatgctgggattacaggcgtgagccaccgcgcctgg

SEQ ID NO: 406933 - DNA, 201 bp, Homo sapiens
gtttcactctgtcacccaggctggagtgcaatggcatgatcttggctcactgcaacctctgcctcccaggttcaactgattctcctgcctcagcctcccarggagctgggattacaggtgtgcgccactatgcccagctaatttttgtatttttagtagagatggggtttcatcatgttgaccaggctagtcttgaactcc

SEQ ID NO: 406934 - DNA, 201 bp, Homo sapiens
actgacaagtggttccctcacagctcagactaggagctccctcgctgtttttctttttcttttcttttctttgttttgtttttgagacagagtttcactcygtcacccaggctggagtgcaatggcatgatcttggctcactgcaacctctgcctcccaggttcaactgattctcctgcctcagcctcccaaggagctggg

SEQ ID NO: 406935 - DNA, 201 bp, Homo sapiens
aagcaccccactttccagtctctgccttctgtctttccagttcattccctctagtcctccacccacacagtgcttttccccattgacagggaattgctccyggccgcttttcccagccccatcccgttcatgtgccttgctttgtacccagcatggactccatggcctgtcattgtcactccttcacctatacttcctgcc

SEQ ID NO: 406936 - DNA, 201 bp, Homo sapiens
gcagggctcctgagggacagggcctggggccaagtctcctctgcgttcctgatgcctggtggtgtgccacgctctccgtgggtgcacggtaaatatctgcygagtggctagatgtatccatggttgctgaaggccaagtgtgttgaccagagggcgtgggaaaggctccactggggtggctggggtagagatagaccttaa

SEQ ID NO: 406937 - DNA, 201 bp, Homo sapiens
gccgtgggtctgtttccacatctgtttcccctccagactgcagggctcctgagggacagggcctggggccaagtctcctctgcgttcctgatgcctggtgktgtgccacgctctccgtgggtgcacggtaaatatctgccgagtggctagatgtatccatggttgctgaaggccaagtgtgttgaccagagggcgtgggaa

SEQ ID NO: 406938 - DNA, 201 bp, Homo sapiens
cagggccgggggtggtcattgcagtgttctcccagctcctctcaacaccctgcggtctgtggagagcaggcctggtgcactggacttgcctctggccaggrctgagtttctgccttctaaacgatcttcctcctgtgttgccctagaggcctctggactgtcctgagtacttgacgcgtgttagagtgagcatgggctgct

SEQ ID NO: 406939 - DNA, 201 bp, Homo sapiens
agcctcccaagtagctgggactacaggcacccgccaccacgcctggctaatattttgtatttttagtagagatggggtttcaccatgttagccaggatggwctcaatctcctgacctcgtgatccgcctgcctcggcctcccaaagtgctgggattacaattttacaggatgtttttaagtatgttgggttagcacattct

SEQ ID NO: 406940 - DNA, 201 bp, Homo sapiens
gggcatggccgttctcataggggctgcccagggtttgcttaggaaggctggacagagctgttgcctcttggggcatgctgggactcccctgggcctgaagrgaaggctcaaaagccaggacaggcctgagggaaccgggccaacggcagagctggttgggaaaaggggagaagcagccaaggttccaaatgcaggccccag

SEQ ID NO: 406941 - DNA, 201 bp, Homo sapiens
ggcagctgattctgttccagaacactcccaaccgcacctgggactgcgtcctggtcaaccccaggaactcacagagtggattccggtgggtgatgctcagygggaacatacttctctcctttcactcccccacgtctcggattggaggtcttattggccgagaagcagtttctttgagtctctgtctgaggggtctggaga

SEQ ID NO: 406942 - DNA, 201 bp, Homo sapiens; identical to SEQ ID NO: 91175

SEQ ID NO: 406943 - DNA, 201 bp, Homo sapiens
acatttcatggaagttgcacgcattggccagaacccggtcacatggccacagctaactgcaaaggatgctgggaagtgttgcctgtgttgcagacagccamgtgccagtcgaaaatcagaggttctttctccctccgtcttgctgctggctcgcttctccagaccacagtcattgtgcacgtgtctcctgctgctccggct

SEQ ID NO: 406944 - DNA, 201 bp, Homo sapiens
ttagccaggcgggcatagtggcaggagcctgtagtcccagctactcgggatgctgaggcaggagaatggtgtgaacccaggaggcggagcttgcagtgagycgagatcgcgccactgcactccagactgggagacagagcgagactccgtctcaaaaaaaaaaaaaaaaaggcagcacccagggctcaggttcaagcctta

SEQ ID NO: 406945 - DNA, 201 bp, Homo sapiens
cgaacctttccatttcagcagatagcatcattgcaacgggctgtgccagatccagccatcacatccacctttccagccaaagggagggtggaagggcaggrtgcagaaggtcaatctccccctcctcagggacatttcatggaagttgcacgcattggccagaacccggtcacatggccacagctaactgcaaaggatgct

SEQ ID NO: 406946 - DNA, 201 bp, Homo sapiens
atcctgggcctgtgctgggcacccctaataatagagaacagcagctgaacactaacgctgtcccagccaccggcttagccttcatgtgggctatttcactrtagcccagagagctgatgtattttattccccctctaaagctgagggccaagtgtggtggctcatgcctctaatcccagcactttgggaggctgaggcagg

SEQ ID NO: 406947 - DNA, 201 bp, Homo sapiens
cccctctaacctgctcccacccgaacctttccatttcagcagatagcatcattgcaacgggctgtgccagatccagccatcacatccacctttccagccaragggagggtggaagggcaggatgcagaaggtcaatctccccctcctcagggacatttcatggaagttgcacgcattggccagaacccggtcacatggcca

SEQ ID NO: 406948 - DNA, 201 bp, Homo sapiens
tcccaaagtgctgggattacaggcgtgagccaccacacccaggccacgccagctaatttttaaaatttttttggtaaagatggggtctccctatgttgccsaggctggtatcacactcttggtctcaagtgatcctctcacctcccagtgtgttggaattacaagcatgagccactgcgcctggcccctggctctcttttt

SEQ ID NO: 406949 - DNA, 201 bp, Homo sapiens
atcctctcccgtgcagcgccccccacctcagggagctaagattcccagcaggggtggggacaggagagccagcagcagccttctttccccaccgttggggrattcactgatggaaccactggctagaatgaccaagggtgcatgcactacactgcacgagctctgggcatgcctgtgtgggcagagtgcatggccatgtgc

SEQ ID NO: 406950 - DNA, 201 bp, Homo sapiens
cactgtctcatctcaccatcactctgtccatttcctggggcaggcacagcagcttgtgtcgataaggatattgacgcccagaaaggttaagtgaattgccygaggctagtgagatatccgtgttctgtgaccctttcctgtgccaccaccctgcccacttcctgctggtgtggccctggggcccatctcttgtacgagtga

SEQ ID NO: 406951 - DNA, 201 bp, Homo sapiens
tttattttcacagtcatagctctggagtcttttttatcttctcccctctaacctgctcccacccgaacctttccatttcagcagatagcatcattgcaackggctgtgccagatccagccatcacatccacctttccagccaaagggagggtggaagggcaggatgcagaaggtcaatctccccctcctcagggacatttc

SEQ ID NO: 406952 - DNA, 201 bp, Homo sapiens
taggtttggtcactcattgtcatcacatgctgtgaggtggggacttgcattcccatcttcacagaagccctgaagtgcacatggctacagtgacccatccmagcgcaggcagctgggatgagtgaagctgggctttgggctcaggtctgtgactccaaagccaggctcccctccctgttcccaaggctctgccagggatgt

SEQ ID NO: 406953 - DNA, 201 bp, Homo sapiens
ggctgcagtgagctgtgatcatgccactgcactccagcctgagcaacagaaggagaccttgtctcaaaaagaaagaaagaaagagagagagagagagagaggagggagggagggaaacttcagggagaggggacatggaggcctgtcgactcagccgctaccctttcccccactcatcatccctgaaagggcactgctgag

SEQ ID NO: 406954 - DNA, 201 bp, Homo sapiens
aggctgcagtgagctgtgatcatgccactgcactccagcctgagcaacagaaggagaccttgtctcaaaaagaaagaaagaaagagagagagagagagagaggagggagggagggaaacttcagggagaggggacatggaggcctgtcgactcagccgctaccctttcccccactcatcatccctgaaagggcactgctga

SEQ ID NO: 406955 - DNA, 201 bp, Homo sapiens
tcctgagcagctgggactacaggctcgtgccaccacatgggctaattttttttttttttgagacggagtcttgctctgtcgcccaggctggagtgcagtgscgcgatcttggctcactgcaagctctgcctcccgggttcatgccatcctcctgcctcagcctccagagtagctgggactacaggcgcccgccaccacacc

SEQ ID NO: 406956 - DNA, 201 bp, Homo sapiens
tctcctgcctcagcctccggaatagctgggattacagtaatgtgccatcatgcccgggtaattttttttttttttttttttttttttgagacggagtctcrctctgtcgcccaggctggagtgcagtggcgcgatctcggctcactgcaagctccgcctcccgggttcacgccattctcctgcctcagcctcccgcgtagc

SEQ ID NO: 406957 - DNA, 201 bp, Homo sapiens
aagatgggataataatacttgttcctcccgtccttcagctcctccaggggaccctcacaccagcacactctctgtcagtcttccctcaatgaacccagcakgcaagcttggttttgacagaggatgggtgagcagagataaggaaaacggccagaaatatctggcttccctcagcaggggcaccaaaattggtacctggaa

SEQ ID NO: 406958 - DNA, 201 bp, Homo sapiens
tgggttcaggtgattctcctgcctcagcctccggaatagctgggattacagtaatgtgccatcatgcccgggtaattttttttttttttttttttttttttgagacggagtctcgctctgtcgcccaggctggagtgcagtggcgcgatctcggctcactgcaagctccgcctcccgggttcacgccattctcctgcctca

SEQ ID NO: 406959 - DNA, 201 bp, Homo sapiens
ggctcactgcaccctctgcctcctgggttcaggtgattctcctgcctcagcctccggaatagctgggattacagtaatgtgccatcatgcccgggtaattktttttttttttttttttttttttgagacggagtctcgctctgtcgcccaggctggagtgcagtggcgcgatctcggctcactgcaagctccgcctcccgg

SEQ ID NO: 406960 - DNA, 201 bp, Homo sapiens
cccctccatagtttgacttaaaaaggagcagggcctggcatggtcgctcactaacgcagtcccagcactttgggaggctgaggagggaggatcacttgagrctaggagttcaagaccagcctggcaaaatagcaagaccttgtctctacgaaaaaattaaaaaattagcatgtgtctatactcctagctacttgggatgct

SEQ ID NO: 406961 - DNA, 201 bp, Homo sapiens
ttgcttgaacccgggaggtgaaggtcgcagtgaggtgagattacaacactgcactccagcctgggtgacaaaatgagactctatctcaaaaaaaaaaaaaattagctgggcatggtggtgcatgcctgtaatcccagctactcaggaactaaggtaggaggatcccttcagcccaggaattcgaagatgcagtgagtcatg

SEQ ID NO: 406962 - DNA, 201 bp, Homo sapiens
ccaggaggcagaggttgcagtgagccgagatcacgccactgcactccagcctgggtgacagagcgagactccgtctcaaaaaaaaaaaaaaaaaaaaaaaagaaataatctagagcctagtttgatgtttccttacaaagaatgaatttatttttgcttctcccattgcaactaggataacctcagtctagtttctggaac

SEQ ID NO: 406963 - DNA, 201 bp, Homo sapiens
cagtggctcatgcctgtaatcccagcactttgggaggctgaggcaggtggatcacgagatcaggagatcaagaccatcctggctaacatggtgaaaccccrtctctactaaaaatacaaaaaattagctgagcatggtggcacgttcctgtaatccctgctactcgggaggctgaggcaggagaatcacttgaaccaggag

SEQ ID NO: 406964 - DNA, 201 bp, Homo sapiens
tagtcctagctactcaggaggctgaggtggaaggaggtagaggctgcagtgagccatgattgagccactgtactccagcctgggcaacagagccagacccwgtttcaaaacaacaacaacaaaaacatttttaaggaggaggctgagaaccacgagaaccaagcttggatttgaagaaggatcagggctttctcagacaga

SEQ ID NO: 406965 - DNA, 201 bp, Homo sapiens
tagagtggttgtcagacagaatgattaatgtacgtaaagctttcaggatggtgccagcaagatgcacaggagtgtttggtaggaggatgacgaagcttacmgtctggcaggaggggcagttgtaacatgctgggctgtgatagtacagatgtgtttaaagtgagggagagcccagagcaaggagagagaacctggcatctg

SEQ ID NO: 406966 - DNA, 201 bp, Homo sapiens
tcactgcacccctggtgactttctccctcaatctgaggctcatgggtgctggatgctcttgactctctgcccttcctgggagcacccctccgcgtccctgygggcccgtcctcggggtagcctctctgcgctcttccaggccaggcctgagtcccacaggtccccatcttcccggctgcagcccccagaggctcagcctat

SEQ ID NO: 406967 - DNA, 201 bp, Homo sapiens
ctttgatttcactgcacccctggtgactttctccctcaatctgaggctcatgggtgctggatgctcttgactctctgcccttcctgggagcacccctccgygtccctgtgggcccgtcctcggggtagcctctctgcgctcttccaggccaggcctgagtcccacaggtccccatcttcccggctgcagcccccagaggct

SEQ ID NO: 406968 - DNA, 201 bp, Homo sapiens
agcgattctcctgcctctcagcctcccgagtagctgggactacaggcgcccgccaccacacctggcgaatttttgtatttttaatagacggggtttcaccrtgttgggcaggctggtctcaaactcctgacctcaagtgatccacctgcctcagcctcccaaagtgctgggattacaggcgcgagccaccatgtccagccg

SEQ ID NO: 406969 - DNA, 201 bp, Homo sapiens
tgtggaatctttctttgatttcactgcacccctggtgactttctccctcaatctgaggctcatgggtgctggatgctcttgactctctgcccttcctgggmgcacccctccgcgtccctgtgggcccgtcctcggggtagcctctctgcgctcttccaggccaggcctgagtcccacaggtccccatcttcccggctgcag

SEQ ID NO: 406970 - DNA, 201 bp, Homo sapiens
gttttctgtgacaaacaacgtgggtctagcttttataagcttttactcttgaggggctcttctttaaggaaaataatacaaaatcatgaatacaagatgargtgcagagccgtggggcttcagtggtttttgagtctctccgttgcccaggctggagtgcagtggtgcatcttggctcactgcaacctccgctcccgggtt

SEQ ID NO: 406971 - DNA, 201 bp, Homo sapiens
ctggatgccagccaagcctgtcgtttctgtggccatgctgtcgtgggtgtgtggggggcatcccctagccccaggctctggtggggggtacacaggctggsccattgacgaaggggtgtgtggaatctttctttgatttcactgcacccctggtgactttctccctcaatctgaggctcatgggtgctggatgctcttgac

SEQ ID NO: 406972 - DNA, 201 bp, Homo sapiens
gccctgcggggtgagcagatggggaaactgagaaccagagaggatcagccagtgaattgggcagtcaggactgggtctccagcagtgtgcccagctctctmccccagcctcagggtcccagcatcccctctctggtcttccacagggtccaagggcgggcacgaggtctgagcaggcagactgggcagagtcctagcttct

SEQ ID NO: 406973 - DNA, 201 bp, Homo sapiens
aggcctgtgttggatgctggggatgcagagctgagccaggcataccccagcctcaggagcagggggctcagccagtccaggaggtgctggggacagagtcycatgggcggaggaggagagtcatctgtcaagttgccgggacgttagtgtccacggcggtttattgactggtatttcatttccttttgatgattctcacca

SEQ ID NO: 406974 - DNA, 201 bp, Homo sapiens
ccgccttcctggttggcaatgccgtgagtgttccaggatgtggccccgtggctgtcatttcctttcttccacctagtgataacaatggccactgtttgtgygcccacagtcggcctgtgtcccagacaccttccctccattgcgtcatctcgtcctcctgcctaccctgaaggctggatgccagccaagcctgtcgtttct

SEQ ID NO: 406975 - DNA, 201 bp, Homo sapiens
gagcgcccccacatctggatcctggtcatgcaaagtcttggaggtgcccggggaggactccccaccctagggtgggtatcagggcctgtgggccaggcctrtgttggatgctggggatgcagagctgagccaggcataccccagcctcaggagcagggggctcagccagtccaggaggtgctggggacagagtcccatggg

SEQ ID NO: 406976 - DNA, 201 bp, Homo sapiens
gcacagtggcagcacagggggacagccttctaggtagccagcctggcctgagggttctgtcacttttacctcccactcagtgttgtttctctttctttccyctccttttaagatccctccaggcccaggatctggggacaacgctggtggggagtgatctgggtgtctgtgcaggaaaccgctgcactgggtgagatgggc

SEQ ID NO: 406977 - DNA, 201 bp, Homo sapiens
catgtctgactggtgcccctgcccctgtgctggtcagattccattttctccagagcgcccccacatctggatcctggtcatgcaaagtcttggaggtgccmggggaggactccccaccctagggtgggtatcagggcctgtgggccaggcctgtgttggatgctggggatgcagagctgagccaggcataccccagcctca

SEQ ID NO: 406978 - DNA, 201 bp, Homo sapiens
gggtggtcagtgttgtgacggctcctctgtggagctgtctgagcttctaggtgctgacaggtggggaggggcactgccagatcagggtcctcagctccccscaaccccctggacattgtcctgggactcaacatgtctgactggtgcccctgcccctgtgctggtcagattccattttctccagagcgcccccacatctgg

SEQ ID NO: 406979 - DNA, 201 bp, Homo sapiens
ctatcgactgccttaacccctcctcccctcacccctgcaaagcaggcaccaggggccacacagcctgctgcacataaggaatcccattcccagggtgcacrcagcaggcagtctcaggaatgaggagccactgagcctcaggatgccagagccctcgcctgcacacttcattttactgggaaattttactgggaaattaag

SEQ ID NO: 406980 - DNA, 201 bp, Homo sapiens
ttttttttttttttttttttgagacagagtttccctatgtctcccaggctagagtgcagtggtgcgatctcggctcactgcaacctccacctcctgggttsaagtgatgctcgtgcctcagcttcctgagtagctgggattacaggcatgtgccaccatgcctgggtagtttccgtatttttagtagggatggggttttgc

SEQ ID NO: 406981 - DNA, 201 bp, Homo sapiens
aagaggttttatttgtctcatggctcctcaggccatacaagaaacatggtgccagcatcttaccagtgtcacatggcaagaaaggaagtgaggaagagaawataagttgttaactggttgttaaaaagtgccaggcacgggccaggcacagtggctcgtgcctgtaatcccagcactttgggtggccaaggcgagtggatc

SEQ ID NO: 406982 - DNA, 201 bp, Homo sapiens
tgtttagtgttgctataaaggaatacctaagtctgagtattatacatagaaaagaggttttatttgtctcatggctcctcaggccatacaagaaacatggwgccagcatcttaccagtgtcacatggcaagaaaggaagtgaggaagagaaaataagttgttaactggttgttaaaaagtgccaggcacgggccaggcaca

SEQ ID NO: 406983 - DNA, 201 bp, Homo sapiens
gtgcattccatcactgctgcttttaatcatatagcgtgtagtcttatgagtctgactttttcacttagcataatgcttttgcaatttgtgattgagcgttktcatatgattctgttttttctgtctcttagcttggaagttatacactttttagtagtaactgttgggagatcgttctccaagagtctctctcatatttcc

SEQ ID NO: 406984 - DNA, 201 bp, Homo sapiens
tttagggggccctgttttaaaacccctacaaggtgctaagcgtggatttctggggctttcttgttttttgtttttttctatgtgtttttttttttttttttggtggtggggtcagggagggcttatagggtatgttaaatcagcagaataattttatttatttatttggagatggagtttcactcttttgcctaagctgga

SEQ ID NO: 406985 - DNA, 201 bp, Homo sapiens
tccaaaaaaaaaaaagaaggaaagaaaaagcttttgtatttcctttcgtgtaggtctgctaatgacaaagtctctgggttttttgtttgactagagaaatrttttaattttaaccttattcttgaaggttttgtttttgttttcattttgttttgtgtgctaagtacagaattctcattggcatttatttatttagagaca

SEQ ID NO: 406986 - DNA, 201 bp, Homo sapiens
catatttaacttgccatggtgcttcattctttcatgcctctttaagcatccatctaggatcgtgttcattccacatgaagagaaagcttttggcccagcaygatggctcacacctgtaatcccagcactttgggaagcctaggcgggaggatcgcttgagcccaggatttccagaccagcctgggctacgtggcaaaaccc

SEQ ID NO: 406987 - DNA, 201 bp, Homo sapiens
ggccgactacacctcgagtgaccgagttcgggaggaagggcagctgattctgttccagaacactcccaaccgcacctgggactgcgtcctggtcaaccccrggaactcacagagtggattccggtgggtgatgctcagcgggaacatacttctctcctttcactcccccacgtctcggattggaggtcttattggccgaga

SEQ ID NO: 406988 - DNA, 201 bp, Homo sapiens
gttaaaaagtgccaggcacgggccaggcacagtggctcgtgcctgtaatcccagcactttgggtggccaaggcgagtggatcacctgaggtcgggagttttgagaccagcctgaccaacatggagaaaccctgtctctactaaaaaaaatacaaaaaaattagctgggcatggtggtgcatgcctgtaatcctagctactc

SEQ ID NO: 406989 - DNA, 201 bp, Homo sapiens
ggatgtcaccgactacaagggagagaccgtcttccattatgctgtccagggtgacaattctcaggtgctgcaggtgagcagggggaggggcagggtgactkgtactgatacctcccggtgtccacggttccctttgggcccctaggctcaggtgtcactctcaggcctctcactgtcccccattggtccttgaggcctgag

SEQ ID NO: 406990 - DNA, 201 bp, Homo sapiens
acaagaaacatggtgccagcatcttaccagtgtcacatggcaagaaaggaagtgaggaagagaaaataagttgttaactggttgttaaaaagtgccaggcmcgggccaggcacagtggctcgtgcctgtaatcccagcactttgggtggccaaggcgagtggatcacctgaggtcgggagttttgagaccagcctgaccaa

SEQ ID NO: 406991 - DNA, 201 bp, Homo sapiens
tttcttccacctagtgataacaatggccactgtttgtgtgcccacagtcggcctgtgtcccagacaccttccctccattgcgtcatctcgtcctcctgccwaccctgaaggctggatgccagccaagcctgtcgtttctgtggccatgctgtcgtgggtgtgtggggggcatcccctagccccaggctctggtggggggta

SEQ ID NO: 406992 - DNA, 201 bp, Homo sapiens
accgtcttccattatgctgtccagggtgacaattctcaggtgctgcaggtgagcagggggaggggcagggtgactggtactgatacctcccggtgtccacrgttccctttgggcccctaggctcaggtgtcactctcaggcctctcactgtcccccattggtccttgaggcctgagctccttcatggagggtgcagacccc

SEQ ID NO: 406993 - DNA, 201 bp, Homo sapiens
gtttgggttttctctctttttttgttagtctagttaaagatttattgattttgtttatcttttcaaaaaactttattttgttgatcttttgtattgttttrtttcaatttcatttatttctgctatgatctttattatttcttttcttctactaattttgggtttggtttgctcttttctagttctttaagagacatcatt

SEQ ID NO: 406994 - DNA, 201 bp, Homo sapiens
tgagttgacaggttggggctggcagccaggggcccctttgttcttcacttccccggcagttgcacgtcttatcctctctccatctccaacagaaagacaaygtggagatgatcaaggccctcatcgtgttcggagcagaagtggacaccccgaatgactttggggagactcctacattcctagcctccaaaatcggcagac

SEQ ID NO: 406995 - DNA, 201 bp, Homo sapiens
tcggtgcaacatcatgggccccaacggctaccccatccactcggccatgaagttctctcagaaggggtaagacctcctcccctccccatctgctggcctgytgggctccagctctcctgtcacctgtcccgtgcctgaggcaagcagtatccaccatagatcttagcatctccagcctcagagcagaggccccgggttcac

SEQ ID NO: 406996 - DNA, 201 bp, Homo sapiens
aaaatctttccaaagaaccaacttttggctttgtttattttttgaaaacctgagtagctgggattacaggcgcccaccaccacacccggctaattttttttatttttagtagaggtggggtttcaccatattggccaggctggtctcgaactcctgacctcagatgatccacccgcctcggcctcccaaagtgctgggatt

SEQ ID NO: 406997 - DNA, 201 bp, Homo sapiens
tctatcttaaagctttgagaagcattccttctttctcctattttctaaaaattgttgaagatctccttccttccttccttccttccttccttccttcctttcatctatctctctctcacccaggccaaacttcagtggcatgatcatggctcactgcagcctcaacttcccaggctcaagtgatcctcctgcctcagcctc

SEQ ID NO: 406998 - DNA, 201 bp, Homo sapiens
aagtccttctctatcttaaagctttgagaagcattccttctttctcctattttctaaaaattgttgaagatctccttccttccttccttccttccttccttccttcctttcatctatctctctctcacccaggccaaacttcagtggcatgatcatggctcactgcagcctcaacttcccaggctcaagtgatcctcctgc

SEQ ID NO: 406999 - DNA, 201 bp, Homo sapiens
ggaagtccttctctatcttaaagctttgagaagcattccttctttctcctattttctaaaaattgttgaagatctccttccttccttccttccttccttccttccttcctttcatctatctctctctcacccaggccaaacttcagtggcatgatcatggctcactgcagcctcaacttcccaggctcaagtgatcctcct

SEQ ID NO: 407000 - DNA, 201 bp, Homo sapiens
ttcgtagctgaggaggaaccagatttttgggactgagttctccctcaccacccgctctgagccaccctcttggtcccttgtcctctactgcacttcttccsgggcttggctcctcgtcatgagaggagcttccctgggcatggcgaggggcgtgactgacatagcagccctggacaagtggctccaggtgacctgtgttca

SEQ ID NO: 407001 - DNA, 201 bp, Homo sapiens
gtaggacgctgtgagaagccagggggagagatgaagtgaggcatgatgcggggggccctcatccaccatccccctcttgcagctgtgctgggaagagcctrggctccagggtccaaggtggcagggacagaaggaagcacgtgtgagcactttctccctgctggcccgccttcctggttggcaatgccgtgagtgttccag

SEQ ID NO: 407002 - DNA, 201 bp, Homo sapiens
tactgcacttcttccggggcttggctcctcgtcatgagaggagcttccctgggcatggcgaggggcgtgactgacatagcagccctggacaagtggctccrggtgacctgtgttcacgttgatcacagcactaaccacggcccctcctctcagcaccttcccctctcgagccgtccagtcccagtgaaaatgctcaccgtt

SEQ ID NO: 407003 - DNA, 201 bp, Homo sapiens
cagtcttccctcaatgaacccagcaggcaagcttggttttgacagaggatgggtgagcagagataaggaaaacggccagaaatatctggcttccctcagcrggggcaccaaaattggtacctggaaattgcctggcttggacaggcagaattgtcactgtcaacccccaccaccaaaggtcttgggtctttgtctttctgc

SEQ ID NO: 407004 - DNA, 201 bp, Homo sapiens
cacctatcccgaacagaggttggagtgggcactctgctacccaaggccctggggtgtgaattgtggggaaagggaaaggtggatgggcgggtggctcagcygtcctcctgcctcatttctctccagggtgatgctgacagggacactgtctgaccggcagccggctgaactccacctcttccggaactacgatgctccaga

SEQ ID NO: 407005 - DNA, 201 bp, Homo sapiens
tacaattcagggcctctctgggcctcagtttcttgatctctgagatgggaagatgggataataatacttgttcctcccgtccttcagctcctccaggggascctcacaccagcacactctctgtcagtcttccctcaatgaacccagcaggcaagcttggttttgacagaggatgggtgagcagagataaggaaaacggcc

SEQ ID NO: 407006 - DNA, 201 bp, Homo sapiens
ggcatggcgaggggcgtgactgacatagcagccctggacaagtggctccaggtgacctgtgttcacgttgatcacagcactaaccacggcccctcctctcrgcaccttcccctctcgagccgtccagtcccagtgaaaatgctcaccgttcatgggtgggctgagcaagcccctgatctctgccttcctccgtgttctgat

SEQ ID NO: 407007 - DNA, 201 bp, Homo sapiens
cgtttgtttttgttttttggtggacatcaactttaatttgccctttgttttgttttgtttttgaggcagggtcttgctctgtctcccaggctggagtgcartagtgcaatcttggctcactgcagtctcgacctcaagaggatcaagcaatcctcttgccttagcctcccgagtagctgggaccacaggcgcacaccacca

SEQ ID NO: 407008 - DNA, 201 bp, Homo sapiens
tggcacctgagctgtatcttcatggataagaagagatttgttcatttgtcctttgtggagcacacattcaggttaagaaagtggggaggatgggctacgcygatggagcgtatgtgtggtatccccaagtgcactgagacacgagtttgacgtgttctgggaagatcgatggtgcggcgtggctggagtagaggtgaggga

SEQ ID NO: 407009 - DNA, 201 bp, Homo sapiens
tagacaggacccttctctggactttctgtgggctggcccactcagggacctccattgtttgggagcggggtcccctgaacagagggcagccaggagccagkccttggtgagccagacttcactgtggaggcggcagcaccttcagccagggtagcccgaccaagcctggaactctggagaggcaccgtgactgtggcttct

SEQ ID NO: 407010 - DNA, 201 bp, Homo sapiens
gccatgattgagccactgtactccagcctgggcaacagagccagaccctgtttcaaaacaacaacaacaaaaacatttttaaggaggaggctgagaaccaygagaaccaagcttggatttgaagaaggatcagggctttctcagacagaaaaggagaggaagaacattccagatagacatcattgagagatggcactgagc

SEQ ID NO: 407011 - DNA, 201 bp, Homo sapiens
tagggccgctcctgaaggagtgcaggtgctagatacaggttctcccggtggaggagcgaaccccttgtgggccgttagctactggtgggatttgagcatgrtatttccctatccgttgtggagaggagcatggcagctcagagtgggtgggaacagtgtgtggtccctgttatcaccttcaagggaataaagtgtgtctgg

SEQ ID NO: 407012 - DNA, 201 bp, Homo sapiens
gagggtgctcaggagggtgtcactgctgccaggttctgctgccaggaccatccaacagttgttccaatcatgggacatcctgtcgtcagcagctggggctsgtgaggcctgatttccacctcgggcagttctgtgtgtgctcctggaatcccccacgtggccaagcctgtgaggtctgcttcctggcctgctgcctgtggg

SEQ ID NO: 407013 - DNA, 201 bp, Homo sapiens
cggagctacaggaaggaagttggggcagcttggcactctgagtggaccctgagtttccagcctgctctgtcttgactgggtgggaggagggtgctcaggasggtgtcactgctgccaggttctgctgccaggaccatccaacagttgttccaatcatgggacatcctgtcgtcagcagctggggctcgtgaggcctgattt

SEQ ID NO: 407014 - DNA, 201 bp, Homo sapiens
tgtgagaggacggaggccggtgtgtggtggcatgctcccgtgctgtgtggcacagacggagctacaggaaggaagttggggcagcttggcactctgagtgraccctgagtttccagcctgctctgtcttgactgggtgggaggagggtgctcaggagggtgtcactgctgccaggttctgctgccaggaccatccaacagt

SEQ ID NO: 407015 - DNA, 201 bp, Homo sapiens
accaaacagagaagataccaacacccccagccccgcagtcaggttccccatttgcaggttgtgacctgagtggacaccaggtgatgctcttctctacccaragggctggcacatggccccactcttgcttgtctccagccaccctgagctgtactgggcaggagctgtaattgaccagttttctctctcttcaaacaacct

SEQ ID NO: 407016 - DNA, 201 bp, Homo sapiens
ttggaggtggatcacaagtgtgaaaccctttgccaaccgtgaggcatggtggccttgtgagaggacggaggccggtgtgtggtggcatgctcccgtgctgkgtggcacagacggagctacaggaaggaagttggggcagcttggcactctgagtggaccctgagtttccagcctgctctgtcttgactgggtgggaggagg

SEQ ID NO: 407017 - DNA, 201 bp, Homo sapiens
ttttttttttttgagacggagtcttgctctgtcgcccaggctggagtgcagtggcgcgatcttggctcactgcaagctctgcctcccgggttcatgccatyctcctgcctcagcctccagagtagctgggactacaggcgcccgccaccacacccggctaattttttttgtatttttagtagagacagggtttcaccgtgt

SEQ ID NO: 407018 - DNA, 201 bp, Homo sapiens
gcccagggagggccacaaagctgagagagtggggcttgaccttacattggcctcgatgccagccctttgctcttcctgctgtgtctctggcctgccttcargtccagtgggactgctgtgaggtgaccctggtgtcacatgggtacactgtggttgtaatgaacctcatggggacagcactgagccaaaagtgagacagta

SEQ ID NO: 407019 - DNA, 201 bp, Homo sapiens
ttattctccaaatttccttcaccctcctttatagtccatggcacccaccccatccctgggcaacacctatgtgcttcctttttttttttccccgcaggagkacgtcttcctatacctatgtgcattccatcactgctgcttttaatcatatagcgtgtagtcttatgagtctgactttttcacttagcataatgcttttgc

SEQ ID NO: 407020 - DNA, 201 bp, Homo sapiens
gtgacccagtgtccactcagatgtcctctctcccccagggcacccatactctgtccttagtgtcttttgtctggtgacatcttggcacagaggcagagggyggcctccgtctgattggcgcctggctttggtgacagtaccttaggaaggcagtgtattttctgggaacctaggaaataacaaggtatctaattccatcat

SEQ ID NO: 407021 - DNA, 201 bp, Homo sapiens
catttctgttattctccaaatttccttcaccctcctttatagtccatggcacccaccccatccctgggcaacacctatgtgcttcctttttttttttcccygcaggaggacgtcttcctatacctatgtgcattccatcactgctgcttttaatcatatagcgtgtagtcttatgagtctgactttttcacttagcataat

SEQ ID NO: 407022 - DNA, 201 bp, Homo sapiens
acatttctgttattctccaaatttccttcaccctcctttatagtccatggcacccaccccatccctgggcaacacctatgtgcttcctttttttttttccscgcaggaggacgtcttcctatacctatgtgcattccatcactgctgcttttaatcatatagcgtgtagtcttatgagtctgactttttcacttagcataa

SEQ ID NO: 407023 - DNA, 201 bp, Homo sapiens
ggctactgcctacgtttgcttaaggcactagggctctacagtcagcaggtggtgaagccagtgagattatgtccttcccttcaaggcagcaagttcccccyacccccatcctgggaaggtccttagatgccatctgggaggcagggcctgcagtcagaaaccttagtaatctccccagtgctctattctattacagcctgg

SEQ ID NO: 407024 - DNA, 201 bp, Homo sapiens
gagtgcctgtgctaactcagcctgaccgtctcccgcagatggcccgcatgctgctgaaacggggctgcaacgtgaacagcaccagctccgcggggaacacrgccctgcacgtggcggtgatgcgcaaccgcttcgactgtgccatagtgctgctgacccacggggccaacgcggatgcccgcggagagcacggcaacaccc

SEQ ID NO: 407025 - DNA, 201 bp, Homo sapiens
tttatcaggcacctgctttggatcaggcctgatactgaccaaaatcaggtgtcccaagttggggagactggccgagatcctgctgggatggcgcctggtcrgtgatgctatcccccgaccttcctttccctttctctgttgcactctccagcccctgaaatactagacatttgttcctttactgccctcacccccaccctc

SEQ ID NO: 407026 - DNA, 201 bp, Homo sapiens
cgtgaacagcaccagctccgcggggaacacggccctgcacgtggcggtgatgcgcaaccgcttcgactgtgccatagtgctgctgacccacggggccaacrcggatgcccgcggagagcacggcaacaccccgctgcacctggccatgtcggtgagcccaggaccgcgtgtcctgccctgtggggccccggtgggaatgca

SEQ ID NO: 407027 - DNA, 201 bp, Homo sapiens
atggcgccatctcagctcaccgcaacctccgcctcccaggttcaagcgattcttctgcctcagcctcccaagtagctgggattacaggcatgcgccaccaygcctggctaattttttgtatttttagtagagacggggtttctccatgttggtcaggctggtctcaaactcctgacctcaggtgatccgcccgagtcggcc

SEQ ID NO: 407028 - DNA, 201 bp, Homo sapiens
catctttggctttttgtccctagtcttgggatgctgatgggatgggaggcagtctaggcccccctagaactggggcctgcccctggaatcctcttgctagygctttccaacatcccagtacctgtaggcctctcagagcagaagtggcagtgcccacgtgtcccggggtgcggcagctccccgagtgcctgtgctaactca

SEQ ID NO: 407029 - DNA, 201 bp, Homo sapiens
ctttacatagcatctggaaaatagggaaaaggaaaaaacaaaagcccataaacccagcaccctcatctactcaatggcatgttttctgtcagtctatcttkgtttgttttctatcaggctttgttttttctatgcataatatttactcagttaaatttttgttttgacaaactttctgtgagccaagcttgtggacggaga

SEQ ID NO: 407030 - DNA, 201 bp, Homo sapiens
tcctgtggcctgtggctcagctttctcctgggacagagtccttcctgtggggaagggacagatgacagggggagtggggggatgagggcgtggccgtgggygaggcacagcccaggtttgatctagggacctctggggtagcagggcttggggacccacctgaccacagcatgccctgctctgtgcctcacagaactacag

SEQ ID NO: 407031 - DNA, 201 bp, Homo sapiens
tgagccactgtactccagcctgggcaacagagccagaccctgtttcaaaacaacaacaacaaaaacatttttaaggaggaggctgagaaccacgagaaccragcttggatttgaagaaggatcagggctttctcagacagaaaaggagaggaagaacattccagatagacatcattgagagatggcactgagccttgtaat

SEQ ID NO: 407032 - DNA, 201 bp, Homo sapiens
cagattctgagtgcagatggggctgagcagaccgccttccagctggactcgatcaggactgaccctggacggggcaggcttgcacttgtagcttcagagcyccactgcaggcacagctgaccagggcagcgggtccactccttggagagctggacagccccacttttgaggtacacggccctggggataccactaatctcc

SEQ ID NO: 407033 - DNA, 201 bp, Homo sapiens
tggggggctgtcagagttggggtcacgcgggctgctgcaccaggcacctggggactgggctgcttgtcaggaggggcagctagtcagttgggtggacgtcrggcaggccttggacacaaaggaagacatggacagagtggatggtgggcctgatcccggaggccactgggatttccagacctgggatcaggacgagggatg

SEQ ID NO: 407034 - DNA, 201 bp, Homo sapiens
gccactgtgtctggtccatactagcctctttgagtgctgaaaggttatctctgtaacttatttagtgagaaccctccatttgcccagggcattactgcctrtaatgtatgttcacatgtgctatctcctttggtcaataccacacactacaggtgaggaaactgagtctctgctgggacactgggtcaggaagcaggcagt

SEQ ID NO: 407035 - DNA, 201 bp, Homo sapiens
cgttggccaggctggtcttgaacttctgacctcaggtgatctgcccatctcaccctcccaaagtgctgggattacaggtgtgagccaccgcgcccggctgygccttccctgtttctttgtgagcttggaggtggatcacaagtgtgaaaccctttgccaaccgtgaggcatggtggccttgtgagaggacggaggccggtg

SEQ ID NO: 407036 - DNA, 201 bp, Homo sapiens
ctgtaattgaccagttttctctctcttcaaacaacctcagccctcaccggtccctctgtccccacacaggccatcctgggtgggtccagcgtcccatcacrtaagaggatctttgcacagaagacaaaggaagaggctcctaccttgagtggagcagggagatcccttatcgacttggcagccagcacagccctactccaa

SEQ ID NO: 407037 - DNA, 201 bp, Homo sapiens
ccttccttgtttctttttttttttttttgagacagtctcactttgtcatccaagctttagtgcagtggcatgatctcggctcactgcagcctctgcctctygggttcaaagattctcctgcttcagcctcccaagtagctgtgattataggcacccaccatcacgccaggctaattttttttgtagttttagtagagatgg

SEQ ID NO: 407038 - DNA, 201 bp, Homo sapiens
ccatttcctctcttggggccttgatttctccacatgccaaacagggagaatgattgcaccttccttgtttctttttttttttttttgagacagtctcactytgtcatccaagctttagtgcagtggcatgatctcggctcactgcagcctctgcctctcgggttcaaagattctcctgcttcagcctcccaagtagctgtg

SEQ ID NO: 407039 - DNA, 201 bp, Homo sapiens
aggaagtccttctctatcttaaagctttgagaagcattccttctttctcctattttctaaaaattgttgaagatctccttccttccttccttccttccttccttccttcctttcatctatctctctctcacccaggccaaacttcagtggcatgatcatggctcactgcagcctcaacttcccaggctcaagtgatcctcc

SEQ ID NO: 407040 - DNA, 201 bp, Homo sapiens
aaaggcaggatgttggattatgttttattgtctagaattagaaaattcttctaaagatcatgttctctctgccttggcatcagaatgcaactacgttatascagaaaatgtggattcctttttttttttttttttttttttttttgagacagagtttccctatgtctcccaggctagagtgcagtggtgcgatctcggctc

SEQ ID NO: 407041 - DNA, 201 bp, Homo sapiens
ggtcagagggaacatttgcggggacattttgccgggaggctgccttggaggttcagaggctcagatgacccctgtgttcattcagtgttttctcacccatrgattgagcacctgctgtgtggccagccctttgcctagtgctgttcaagagtcagaggacataggcaggcaatcccccaccacaacctgccaccccatttc

SEQ ID NO: 407042 - DNA, 201 bp, Homo sapiens
accccagaagccctccttttgtcccctcttcccaaagaagggtaaccaataacttgccttttatgataaaggctttttttttttgagatggagtctcactstgttgcccaggttggagtgcggtggcgcaatctctgcttactgcaagctctgcctcctgggttcacgccattctcctgcctcagcctcctgagtagctgg

SEQ ID NO: 407043 - DNA, 201 bp, Homo sapiens
gggtcagagggaacatttgcggggacattttgccgggaggctgccttggaggttcagaggctcagatgacccctgtgttcattcagtgttttctcacccayggattgagcacctgctgtgtggccagccctttgcctagtgctgttcaagagtcagaggacataggcaggcaatcccccaccacaacctgccaccccattt

SEQ ID NO: 407044 - DNA, 201 bp, Homo sapiens
ctggccagggctgagtttctgccttctaaacgatcttcctcctgtgttgccctagaggcctctggactgtcctgagtacttgacgcgtgttagagtgagcrtgggctgctagccttccgctccaggtggaggagtttctgttgttcttttgctgctgttgctgcagtgagctgccaggctgagcttctggatggacctggg

SEQ ID NO: 407045 - DNA, 201 bp, Homo sapiens
gaggatggagccctcatgaatgggattagtgcccttagacgaagaggcaagaaagagatgatctgtctctgccatgtgagggcacaacgagaagatagccrtctgcaaaccaggaagtgaaccctcatcaggaactctatcagccagcaccttgatcatagacttcctagcctctagaactgtgagaaataaaggttgttt

SEQ ID NO: 407046 - DNA, 201 bp, Homo sapiens
agcgtctggcgccctgtgggtgctgggcagcagtgggtgctgatggggtgtgaggggatgggatcaagccctttcccactaacttaggaaagaggttggartgagctggggtcagagggaacatttgcggggacattttgccgggaggctgccttggaggttcagaggctcagatgacccctgtgttcattcagtgttttc

SEQ ID NO: 407047 - DNA, 201 bp, Homo sapiens
gaggatttagtcctttgtcagcagcttcttagctacacgtaagctattctgtggtactttatagtttacaggattttttgttttcttttttttttttttttgagacagagtctcgctctgtcacccaggctggagtacagtgacgcgatctcggcttactgcaagctccgcctcccaggttcacgccattctcctgcctca

SEQ ID NO: 407048 - DNA, 201 bp, Homo sapiens
ttaaagtcacccctgtctcatgtgcttgggagctccagtgacagtttcggggcagtttgcttccagctgtggtccagccaagccgagtgaatgaaagagaygctttttccttttgtgaaaggacgttttgctctggctcacgtgagcagcagtgcattttgagacgagggccttggcttttggaatctaagagcctgttga

SEQ ID NO: 407049 - DNA, 201 bp, Homo sapiens
cgaccccttccctcccatccacactggcacttggctttcctggtgcttctctttacgttctttttttttagacagagtttttgctctattgcccaggctasagtgcaatgatgcaatctcagctcactgcaacctctgcctcctgggttcaagcgattctctttcctcaggttcctgagtagctgggattacaggtgcctg

SEQ ID NO: 407050 - DNA, 201 bp, Homo sapiens
accgccttccagctggactcgatcaggactgaccctggacggggcaggcttgcacttgtagcttcagagctccactgcaggcacagctgaccagggcagcrggtccactccttggagagctggacagccccacttttgaggtacacggccctggggataccactaatctccacgtaccaataatcaccaagttctgtcagt

SEQ ID NO: 407051 - DNA, 201 bp, Homo sapiens
tagactctggctggctgctgcgcttgtagaggtatgcaagacaaaaccttttggtatgttaaaagccctggtcagaactttaagtaaccatcactgacatrtaatggttatggttttgaaagtgcttttatagtggtttttcatctgtcctcacagcacctctgggaggtaggtaggacaggtacagttagtctcatgttt

SEQ ID NO: 407052 - DNA, 201 bp, Homo sapiens
cttaagagtttagaattgagctcctgttagttctgccctccatccctgaccccactcttcaccaaaacatgtccctcccactctctttctcatcttaggamataggagtattgttcattcagttgctcaggtcaaagctgtgagattatctatgatgcctctctgtttcttaccccacacccagccagagtgatcttgtta

SEQ ID NO: 407053 - DNA, 201 bp, Homo sapiens
acattccctagtctgctgttaatggaaagtggaagttctgagagagaatcatcgttcccgtcagcattcaaatgcctgattacactttccccattcgctaycctttcctttatttgctcctcaccacagcaaaactcctcaaaaatatctatctttgcaatcttcagattctcacattgtgtccttaaacccactttaatc

SEQ ID NO: 407054 - DNA, 201 bp, Homo sapiens
aaggaaggacagggagactgagagtgtccacatcagataaggcccatggggagaacctttagccctggctctttatttttggttttggtttttgttttttsagacagtcttgctctgttgcccaggctggagtgcagtggcgcaatctcggctcactgcaacctctgcctcccaggttcaagcgattctcctgcctcagcc

SEQ ID NO: 407055 - DNA, 201 bp, Homo sapiens
agaacattccagatagacatcattgagagatggcactgagccttgtaatgggacactgcgaacttttcttcagttgttatgatctttttttttttttttttgagacggagtttcgctcttgttgcccaggctggagtgcaatggcgccatctcagctcaccgcaacctccgcctcccaggttcaagcgattcttctgcctc

SEQ ID NO: 407056 - DNA, 201 bp, Homo sapiens
aagtcatcccctttaggggtccttccctcaggggaccgtgcacttggcgagacagggactggtcttgggtctctctgttgactgttttatgaacccaggtwgtcacttccagggaactcatcagagatgctaccattggctccaatctccctctgttcccactcgaggttttttgtttcttcgtttgtttttctttctttc

SEQ ID NO: 407057 - DNA, 201 bp, Homo sapiens
gatctcggctcactgcaacctccacctcctgattctcctgcctcagcctcccaagtagctgggattacaagcatgcgccatcatgcccaactaatttttgyatttttgtagaggcggggtttcaccgtgttggccaggctggtctcgaactcctgatctcaagtgatccacctgccttggcctcccaaagtggtgggatta

SEQ ID NO: 407058 - DNA, 201 bp, Homo sapiens
gattacactttccccattcgctatcctttcctttatttgctcctcaccacagcaaaactcctcaaaaatatctatctttgcaatcttcagattctcacatbgtgtccttaaacccactttaatcaggccttggttccctccattccactaaaagtaatgttgtcaaggtcgtgcatgcctccgtgatgctaattccagtga

SEQ ID NO: 407059 - DNA, 201 bp, Homo sapiens
ccttggcctcccaaagtggtgggattacaggtatgagccactgtgcctgacctataatgttttttaaaaatcagttttggaaagtttgcagacattaactyttcaaatgtagcttccatttgattctttttctactctgcctctgatcctccacttatgtatgtatgctagatcttttattagatagtctgtgtctcttat

SEQ ID NO: 407060 - DNA, 201 bp, Homo sapiens
aagaacattccagatagacatcattgagagatggcactgagccttgtaatgggacactgcgaacttttcttcagttgttatgatctttttttttttttttttgagacggagtttcgctcttgttgcccaggctggagtgcaatggcgccatctcagctcaccgcaacctccgcctcccaggttcaagcgattcttctgcct

SEQ ID NO: 407061 - DNA, 201 bp, Homo sapiens
acatcatgggccccaacggctaccccatccactcggccatgaagttctctcagaaggggtaagacctcctcccctccccatctgctggcctgctgggctcyagctctcctgtcacctgtcccgtgcctgaggcaagcagtatccaccatagatcttagcatctccagcctcagagcagaggccccgggttcacaagcctca

SEQ ID NO: 407062 - DNA, 201 bp, Homo sapiens
tgatgttgagaggctggtgagatgaaggaaaaacccagccaagggcaatgaggaatggcttccttccgcctcctccttccctatctttgttgtggtttttkttgtttctgtaacactgattacgttatagtttatttaatgtacttccttattctatgtttttactttagtcattttgttgatctcctccataataacata

SEQ ID NO: 407063 - DNA, 201 bp, Homo sapiens
gtgaagtagcgtgatctcggctcactgcaacctccgccccgctggttcaagcaattcccctgccttagcctcccaagtagctgggattataggcacccacygccacgcccggctaatttttatatttttagtagacatggggtttcgccatggctagtctggaattcctgacctcaggtgatccacccaccttggcctccc

SEQ ID NO: 407064 - DNA, 201 bp, Homo sapiens
aggctggtctcgaactcctgatctcaagtgatccacctgccttggcctcccaaagtggtgggattacaggtgtgagccaccgcgccaggcctcaaacttaagagtttagaattgagctcctgttagttctgccctccatccctgaccccactcttcaccaaaacatgtccctcccactctctttctcatcttaggacatag

SEQ ID NO: 407065 - DNA, 201 bp, Homo sapiens
ctggattaggagtttctgctgggcatcccatggcacccgtccctgcactggggatcctgctttcctggtaggccacagaccttgtgaggggagggactgtrtctgttgggttcatgacagtgtgcccagcccccagcaggtgcctggcgtagatcaggtttgtggaacaaatgaatgtgatatattaatttagctttagag

SEQ ID NO: 407066 - DNA, 201 bp, Homo sapiens
caggagtgagccaccgcgcccggccagcttcctgttttcttaacacatcaggtgcttaatgacttaaaagggcccagtgtgatcaagtttctgcctctgtrttctcagctcatgccgccttgtgctcctggcctttgcccaggctcttgctgtggcctggaatactcccctttctttgcctgccttccttcctcttgccct

SEQ ID NO: 407067 - DNA, 201 bp, Homo sapiens
gtgatctgcccgcctcagcctcccaaagtgctgggattacaggagtgagccaccgcgcccggccagcttcctgttttcttaacacatcaggtgcttaatgrcttaaaagggcccagtgtgatcaagtttctgcctctgtgttctcagctcatgccgccttgtgctcctggcctttgcccaggctcttgctgtggcctggaa

SEQ ID NO: 407068 - DNA, 201 bp, Homo sapiens
tgacctcgtgatccgcctgcctcggcctcccaaagtgctgggattacaattttacaggatgtttttaagtatgttgggttagcacattctctgccaatccrtggaggtgggcaaggaaggcagtattccattttatgcatgagaaaatagccttgggatgataagtgattcatcccacttatacacaggaagcagtgaaga

SEQ ID NO: 407069 - DNA, 201 bp, Homo sapiens
tgcataggagttaactactctaaaaattttagttctttgacttttggcaaggtgtagcaccttgaaccttcccctcccccccgccccgccccgcccccgamtaaggcatatgcagtagaattttgaagctttctgaaccccaggctccttatctgtaaaggaaaatagtgctaagccacaggtcaggtacgggggaactga

SEQ ID NO: 407070 - DNA, 201 bp, Homo sapiens
atacaaaaattagccgggtgtggtggcgcgcgcctataatcccagctactcgggaggctgaggcaagagaatcgcttgaacctgggaggcggaggttgcastgagccaagatcgtgccactaatccagcctgggtgacagagtgagactctgttaccaaaaataatttaaaaaaaaaaaaaagacataatccccagtcctc

SEQ ID NO: 407071 - DNA, 201 bp, Homo sapiens
agaatcgcttgaacctgggaggcggaggttgcagtgagccaagatcgtgccactaatccagcctgggtgacagagtgagactctgttaccaaaaataattwaaaaaaaaaaaaaagacataatccccagtcctccaggtgttttctggtgggggagatagacctgtgcacaggtacccacaacccaaggcagatgcgagtg

SEQ ID NO: 407072 - DNA, 201 bp, Homo sapiens
ttcaagtgtgttcagtagccacatgtggctactggttaccataaaggatagcacagggggataggacatttctgtcattgcagagcattctatggggcacmctaatataggctaaaagtggcccagtagaaagaagaattcataagttatttttaaaacaaatagactgcttatttgcaagttaaacagtctttcagcact

SEQ ID NO: 407073 - DNA, 201 bp, Homo sapiens
aaggacacattcttgcacattccatgtgcataataggtgcggaatgagtgaatgcccttgaattatttatattttgaaagaaagcaggcatatgcagatcrggtattttgccacattctttaaagctttatattttgggaaagtttaaatacttattaagagaggatatagggaaagttaaatacttcatctctgcccttg

SEQ ID NO: 407074 - DNA, 201 bp, Homo sapiens
cctcctatttggggctggtgatcccctgaggccttggggacatggtgctggggtggtggtgctcctgggttccaggtgttacattaagtcagagctggagytcccccttcctctgcctgaggttctaatgggtcctcttcctttctccaccctgcttacccaacctgaggtaagaccagtcacactggctcctccctccta

SEQ ID NO: 407075 - DNA, 201 bp, Homo sapiens
ttcctttctccaccctgcttacccaacctgaggtaagaccagtcacactggctcctccctcctagagggggtcagggggagggtgtatattgacatgaacrgggatagagggtaaactggctccctgaatatgccagccttaacctccattccactgccagctccccttcaaagaggaggagctgggcttccctaacctct

SEQ ID NO: 407076 - DNA, 201 bp, Homo sapiens
gcagagccacgcctggtggcttggagatccaggcggagtgtccactggccacggccagggcactgcccagcccatagccggctgctgagtagctgctcacrtggcctgggtgcccattgggcggcaggtactggtccaactcagccacatcaaaggtctccatgttggacattacctcgtggctgatctcaccaatgtcca

SEQ ID NO: 407077 - DNA, 201 bp, Homo sapiens
tggctgatctcaccaatgtccacgttgccgaagtcgatgtgaggcttcccgccctcccccatggagcgcccgtcccgcttcgggtctgccttgcccgactrcagctctgtcttcggggtggttggaggggtgggtgggccatggctctggcctgggtagaagggagacagagagagagagcgcaagggggaagcaggttag

SEQ ID NO: 407078 - DNA, 201 bp, Homo sapiens
ccgccctcccccatggagcgcccgtcccgcttcgggtctgccttgcccgactgcagctctgtcttcggggtggttggaggggtgggtgggccatggctctrgcctgggtagaagggagacagagagagagagcgcaagggggaagcaggttagaggcaggtgggcgcacgtgaacttccatggttcaccttcaggcagcgg

SEQ ID NO: 407079 - DNA, 201 bp, Homo sapiens
agaagatgacgtttctaggtggggaccaggatgccgttccaccctcactgcctgttgggcccttctccctgggtttgtagtctccctaacacctgtccctrtccctacaggatgtgtgcccctgtgatggtggagctggagggggagacagatcctctgctcattgccatgaaggaactcaagtaagtcactcaaatcatg

SEQ ID NO: 407080 - DNA, 201 bp, Homo sapiens
tggtcagagtagtcaaactgggggcgggagatggaggggaaggctgagccatagtggggcaggctgagggaggtgtaggcgatctgtgaggtggatggctrgtcggtgtagtgtgggggcccctggggccccgcggtctctgtcttcacctgggctttggcatccacaccaggtggtgagaccgtgggcagagccacgcct

SEQ ID NO: 407081 - DNA, 201 bp, Homo sapiens
tacaaagccaccatgcccggcctctgaattttttttttttttaatttttcttatttattttgagacaggttcttgttctgtcacccatgctggagtacagyggtgcaatcttggctcactgcaacctccacctcctgggttcaagcaattcttgtgactcagccccccaagtagctggtattacagacatgtgccaccatg

SEQ ID NO: 407082 - DNA, 201 bp, Homo sapiens
ctcgtggctgatctcaccaatgtccacgttgccgaagtcgatgtgaggcttcccgccctcccccatggagcgcccgtcccgcttcgggtctgccttgccckactgcagctctgtcttcggggtggttggaggggtgggtgggccatggctctggcctgggtagaagggagacagagagagagagcgcaagggggaagcagg

SEQ ID NO: 407083 - DNA, 201 bp, Homo sapiens
tttttagtagagacggggtttcaccatgttggccaggctggtctcaaactcctgacctcaggtgattcacctgtctcagcctcccaaagtgctgtgattasaggcgtgagccactgcacctggccagaacaactgtttgttgggtaggttttggatggggtttcagtctggttcattagcaccacctggtggctgatgatg

SEQ ID NO: 407084 - DNA, 201 bp, Homo sapiens
gggatgggatgtggggagtgaatggtgaggatctgcattggtgggaggggtgtccgctgccctggagaagggttaattcagggagcagtggacttcacacycccatccaccctcctccaagcctgtggaatcctttaatcaagttgggtgctgaaatttcagctctgaaatgccgcctttgtgctggcatccaggcagccg

SEQ ID NO: 407085 - DNA, 201 bp, Homo sapiens
tgaagggatgagaactccactaagtccctcgaaccccccactccccaatgaggctcctcaaagctactctcagcccctgagtgggagacacggccagctcygggcacagtctctgggtggcctagcccttaggcactgtggcataggtggcatgggcatgtcagaccctcactatctgtgagagagaaaacaggagtcata

SEQ ID NO: 407086 - DNA, 201 bp, Homo sapiens
ggtcctgagggctgatggtcagagtagtcaaactgggggcgggagatggaggggaaggctgagccatagtggggcaggctgagggaggtgtaggcgatctrtgaggtggatggctggtcggtgtagtgtgggggcccctggggccccgcggtctctgtcttcacctgggctttggcatccacaccaggtggtgagaccgtg

SEQ ID NO: 407087 - DNA, 201 bp, Homo sapiens
gtgagaccgtgggcagagccacgcctggtggcttggagatccaggcggagtgtccactggccacggccagggcactgcccagcccatagccggctgctgaktagctgctcacgtggcctgggtgcccattgggcggcaggtactggtccaactcagccacatcaaaggtctccatgttggacattacctcgtggctgatct

SEQ ID NO: 407088 - DNA, 201 bp, Homo sapiens
tattaagtaaatatttattgagtgcttcctacatactgggcgagacacagatctctgccctctttgattttttttttgtttgttttttgttttgcggtggygggggggggttttgagacggagtttcactcttgttgcccaggctggagtgcaatggcgtgatctcagctcaccacaacctccgcctcctgggttcaagtg

SEQ ID NO: 407089 - DNA, 201 bp, Homo sapiens
tgggaaagtttaaatacttattaagagaggatatagggaaagttaaatacttcatctctgcccttgggaaattttcaggcttttgggagtaatataaatcraaatatttagtaataaaattagtaagctggtagctctcagactagctgattatcagaatcatctgggcagttttgcaaatgcaggctctcaggccgcttc

SEQ ID NO: 407090 - DNA, 201 bp, Homo sapiens
ttctccatgttggccaggctggtcttggactcctgacctcaagtgatgcacccacctcggcctctcaaagtgctgggattacagacgtgagccactgcacycagctgatttacttattaagtaaatatttattgagtgcttcctacatactgggcgagacacagatctctgccctctttgattttttttttgtttgttttt

SEQ ID NO: 407091 - DNA, 201 bp, Homo sapiens
tgctctgtgtgctcttctcctttcagcaccctttcttacttgcccacatgctcagttactactggctttcctaaatggcctctctgcttctgccactgccscctgcagaatattcgcaacagagtatccagagtgatcctttctttctgttttttgttgttgttgttgttgtttgtttgcttgttttaaattaagaagtgg

SEQ ID NO: 407092 - DNA, 201 bp, Homo sapiens
cccctgtgatggtggagctggagggggagacagatcctctgctcattgccatgaaggaactcaagtaagtcactcaaatcatggttcacttctccaaatckctgggaggcatctgttgggctctctgttgcaccctttgctcccacttgcctggctggagaagttgatgcttattcctacagatccttaggaacagctcac

SEQ ID NO: 407093 - DNA, 201 bp, Homo sapiens; identical to SEQ ID NO: 91185

SEQ ID NO: 407094 - DNA, 201 bp, Homo sapiens
caactagttgtccaaacctctttctcctctatgcctttgcatgttgcctccttcctcattggtttgacagctcctgctcatccttctaggtgagctcaagyctcatccctggagttttcctaacccccagtgtgagtgaggtgtccccacctcctcgggaactctgttgcacccttcatagcacctgctctgtttactctt

SEQ ID NO: 407095 - DNA, 201 bp, Homo sapiens
attgtcctgcctcagcctcccgcgtagctgggactacaggcgtccaccaccacacctggctaatttttgtattttttcttttttctttgagatggagtctsgctctatcacccagcctggagtgcagtggcgcgttctccgctcactgcaagtgctgcctcctggcttcacgcccttctcctgcctcagcctccagagtag

SEQ ID NO: 407096 - DNA, 201 bp, Homo sapiens
atggggtttcagtctggttcattagcaccacctggtggctgatgatgtttgtcacatctacttcttaactggatggttgatgtgtttctctgtagaagccrtggtgcaagaaaaattaaattacttaaggacacattcttgcacattccatgtgcataataggtgcggaatgagtgaatgcccttgaattatttatatttt

SEQ ID NO: 407097 - DNA, 201 bp, Homo sapiens
tgcctcagcctcccaggtagctggaattacaggcatgtgccaccatgcctaactaattgtgtttttaatagagacggggtctcgccatgttgcctaggctrgtctcgaacgcctagcttcaagtgatccacctgcctctgcctcccaaagtgttgggattgcaggtgagagccaccgcgcccggccatggtggttctttgt

SEQ ID NO: 407098 - DNA, 201 bp, Homo sapiens
ctcaaactcctgaccttgtgatccacccgccttggcctcccaaaatgttgggattacaggcgtgagccaccgtgcccggccggtgcaattttcttttttctttttttttttttttgagatggagtctcgctctgtcgcccaagctggagtgccgtggcgtgatctcggttcactgcaatatccacctcctaggatcacgcc

SEQ ID NO: 407099 - DNA, 201 bp, Homo sapiens
ctgtgggaggccaaggtgggcggatcacctgaggtcaggagttcgagagcagcctggccaacatggtgaaaccccgtctctactaaaaatacaaaaattarccgggtgtggtggcgcgcgcctataatcccagctactcgggaggctgaggcaagagaatcgcttgaacctgggaggcggaggttgcagtgagccaagatc

SEQ ID NO: 407100 - DNA, 201 bp, Homo sapiens
ttgtatttttagtggagatggggtttcacggtgttagtcaggatggtctccatctcctgaccttgtgatccacctgccttggcctcccaaagtactgggaktacaggcatgagccaccgcgcctggccggctcaagcaattttcttgtctcaacctcccaagtagcttcaagctgggattacaggtatgtgccactatgcc

SEQ ID NO: 407101 - DNA, 201 bp, Homo sapiens
taaattacttaaggacacattcttgcacattccatgtgcataataggtgcggaatgagtgaatgcccttgaattatttatattttgaaagaaagcaggcayatgcagatcaggtattttgccacattctttaaagctttatattttgggaaagtttaaatacttattaagagaggatatagggaaagttaaatacttcatc

SEQ ID NO: 407102 - DNA, 201 bp, Homo sapiens
tctggggagcgaccgcaggccaaccagaagcgaatcaccacaccatacatgaccaagtacgagcgagcccgcgtgctgggcacccgagcgctccagattgygtgagtgattgccccttcactgtcttctccatctgtcaggccacagtaagctcttgtaccgctgatctttcccagcctggcacctgaaaacagactctct

SEQ ID NO: 407103 - DNA, 201 bp, Homo sapiens
taagcattaacggtggctgtagcgagaattgtgattgttgtcattatcactctccctgtaacccaaaagtgccacctgagtctttccctcttttttgtctyggtgtccaggaaggccaggagaatgtcgagatcctcccctctggggagcgaccgcaggccaaccagaagcgaatcaccacaccatacatgaccaagtacg

SEQ ID NO: 407104 - DNA, 201 bp, Homo sapiens
gagcgagcccgcgtgctgggcacccgagcgctccagattgcgtgagtgattgccccttcactgtcttctccatctgtcaggccacagtaagctcttgtacygctgatctttcccagcctggcacctgaaaacagactctctgctctcacattccaaaagtggtgccgtccctgcgtaccaggcattgagctagtcccctgc

SEQ ID NO: 407105 - DNA, 201 bp, Homo sapiens
ctgcacctggccagaacaactgtttgttgggtaggttttggatggggtttcagtctggttcattagcaccacctggtggctgatgatgtttgtcacatctrcttcttaactggatggttgatgtgtttctctgtagaagccatggtgcaagaaaaattaaattacttaaggacacattcttgcacattccatgtgcataat

SEQ ID NO: 407106 - DNA, 201 bp, Homo sapiens
ctacttcttaactggatggttgatgtgtttctctgtagaagccatggtgcaagaaaaattaaattacttaaggacacattcttgcacattccatgtgcatrataggtgcggaatgagtgaatgcccttgaattatttatattttgaaagaaagcaggcatatgcagatcaggtattttgccacattctttaaagctttata

SEQ ID NO: 407107 - DNA, 201 bp, Homo sapiens
tttccttggggccagcattccaggaacgctgcattaaggagatagactcctgctgacttgcattggggtcacattttttaattaaatatatttactggatktattaaataaatgtattaagtacattataaaaatacaacacagtaattacaaaacagatgctggatcatcctaatgccaaaaactggcagagacacaaca

SEQ ID NO: 407108 - DNA, 201 bp, Homo sapiens
caattacatgaagtaagacaaatgcaatggttttataagctggcaacaccaattcacattctagttactgatattcttgtaatgagggttcttcccatccyagatccacaaaaagcatgaaaggccacagagtcaccgagacctacaggatggaaagacactgaatcattttaacaatgacagggtacctttccccagagg

SEQ ID NO: 407109 - DNA, 201 bp, Homo sapiens
aaagcatgaaaggccacagagtcaccgagacctacaggatggaaagacactgaatcattttaacaatgacagggtacctttccccagaggcttatgagagrcgtatgactcacaagtgaaaaaatgatttctcttgttgcaacaagtaacatcggtgagtcatcttccacctctgactgtaattaatcccctggtaccagc

SEQ ID NO: 407110 - DNA, 201 bp, Homo sapiens
agaattatttctttgtaagctatgagcgcctctgtccgatgagtcatgctgtggctcagcagtggaggcaagctagagaaactcaaatatcttattttgastttggggatgcatgcagaaaactctgacagtgaagggtatttcaggaaagaattatttcaaataacgagcccgctcttctcctcagggcctgtcagcaga

SEQ ID NO: 407111 - DNA, 201 bp, Homo sapiens
gccgtaaccattaagtctatgaccttacagatcatccagtccaacctcccacggcaggaaatatggaaatccacattactctgagcaatcccagtgacagrtgggtccctgcccagtgcctgtcatttcctctgaggcaatacaagccaatgttagatcgtggaaccagatgactgaagttgcaatgactgtctgaggttt

SEQ ID NO: 407112 - DNA, 201 bp, Homo sapiens
catcctcgagtgtgatgaccagaagtatggtctcttattttagttttattatctctctattcagtacggcaagaagaaaatcaaatacatcaactatgaaragcagcacctgtacttctacaaaggtgagtctcccagagccacattccttgtatcccatttacttgaagcaagtacttgtcaagggagaaggccgattgg

SEQ ID NO: 407113 - DNA, 201 bp, Homo sapiens
tccattcaaaagaataagataacgtcctttgaagcaacatggatggagatggaggccattatcctaggtgaactaacgcaggaacagaaaaccaaacactrcatgttctcacttctaagtgggagctaaacattaaatacacatgaacacattttgtttatttattcagcatcattttttgttctgtttcagtttggctcc

SEQ ID NO: 407114 - DNA, 201 bp, Homo sapiens
tgggtggtgagtaatgtggctcattctccgaaactagaccaagtagaagagggaaaatgaaaatgctgtgtcctctccagatacagcttccttgaataacmgggcataagatttagccagaacatgaagggatcccaggccaatgaagaggaaatgaaatcatgttcagggtgtataactttcaagtgcttttctctgcaa

SEQ ID NO: 407115 - DNA, 201 bp, Homo sapiens
cccctgaaaaaaatctaattctgaattccataacagctttaggacagtttacaagtcactattcatctttcacttctgcagaaaacaacaaaaaaatttcrtaaactttttaaaggttttatttgctggttcattgttttggggttttaattctggacaattaaatgtattaataaaattctattaataaaagagatgtat

SEQ ID NO: 407116 - DNA, 201 bp, Homo sapiens
gtagatcttcctccatccttttattttgagcctatctgtgtctttgcacgtgagatgggtttcctgaatacagcacactgatgggtcttgactctttatcyaatttgccagtctgtgtcttttaattggagcatttagtccatttacatttgaagttaatattgttatgtgtgtatttgatcctatcattatgatgttatt

SEQ ID NO: 407117 - DNA, 201 bp, Homo sapiens
ggcatgtttttgtagtggctggtactggttattcctttccatgtttagcgcttccttcgggagctcttttagggcagtcctggtggtgtcagaatctctcmtcatttgcttgtctgtaaagtattttatttctccttcatttatgaagcttagtttatctggatatgaaattctgggttgaaaattcttttctttaggaat

SEQ ID NO: 407118 - DNA, 201 bp, Homo sapiens
cttttagggcagtcctggtggtgtcagaatctctcctcatttgcttgtctgtaaagtattttatttctccttcatttatgaagcttagtttatctggataygaaattctgggttgaaaattcttttctttaggaatgttgaatattggcccccactctcttctggcttgtagagtttctgccaagagatctgctgttagtc

SEQ ID NO: 407119 - DNA, 201 bp, Homo sapiens
acaccaatcagacatagatttggtcttttcacatagtcccatatttcttggaggctttgctcatttctttttattctttttactctaaacttcccttctcrcttcatttcattcatttcatcttccatcgctggtaccctttcttccagttgatcgcatcagctcctgagacttctgcattcttcacgtagttcttgagcc

SEQ ID NO: 407120 - DNA, 201 bp, Homo sapiens
cagcaaccaggcaacctcgttcatgagccaaggtaggaaaattggactctatgtactgtcttagtggttggaggtcaagtgtgtgtaactgagatgtatcytagatacaaagtgagtgcagagttttgttctcctacaagggaaatggccagagatggatgaagcgattctcagagtgtgcaaaaaatctccagtagtggg

SEQ ID NO: 407121 - DNA, 201 bp, Homo sapiens
gatgtacagatgggtttttggtgtggatgtccttcctgtttgttagtttttcttctaacggacaggaccctcagctgcaggtctgttggagtacccggccrtgtgaggtgtcagtctgccccggctggggggtgcctcccagttaggctgctcaggggtcaggggtcagggacccacttgaggaggcagtctgcccattct

SEQ ID NO: 407122 - DNA, 201 bp, Homo sapiens
taagattataaccccatagtactcaaccagtgaggaactggggaagggactcgtgtgctaggagataaattacctgctgtaactgccccaggtgtgcctgyctgccagacacccaatcttgcaaggccaccattaaaagacttgcttctgctgttctttgtgtctccgagtccattctctgggtttcaacggatgaatgtg

SEQ ID NO: 407123 - DNA, 201 bp, Homo sapiens
gatgggtttttggtgtggatgtccttcctgtttgttagtttttcttctaacggacaggaccctcagctgcaggtctgttggagtacccggccatgtgaggygtcagtctgccccggctggggggtgcctcccagttaggctgctcaggggtcaggggtcagggacccacttgaggaggcagtctgcccattctcaggtctc

SEQ ID NO: 407124 - DNA, 201 bp, Homo sapiens
attatatatcattctactgtaaagacacatgcacacatatgtttactgcaacactattcacaatagcaaagacttggaaccaacccaaaagcccattaatrttagactggataaagaaaatgtgtcacatatttactgtggaatactatgcagccataaaaaaggatgagttcatgtcctttgcagggacatgggtgaagc

SEQ ID NO: 407125 - DNA, 201 bp, Homo sapiens
acacaggaagaggaacatcacacaccaggggctgtttgtgggttgggggttaggggagggataacattaggagaacaacctaatgtagatgatgggttgaygggtgcagcaaacaaccatggcacgtgtatacctatgtaacaagccttcacgttctgtacatgtatcccagaacttaaagtataatttaaaaaaaagatg

SEQ ID NO: 407126 - DNA, 201 bp, Homo sapiens
tgtggatgtccttcctgtttgttagtttttcttctaacggacaggaccctcagctgcaggtctgttggagtacccggccatgtgaggtgtcagtctgcccsggctggggggtgcctcccagttaggctgctcaggggtcaggggtcagggacccacttgaggaggcagtctgcccattctcaggtctccagctgcgtgctg

SEQ ID NO: 407127 - DNA, 201 bp, Homo sapiens
cacgtgtatacctatgtaacaagccttcacgttctgtacatgtatcccagaacttaaagtataatttaaaaaaaagatgctggaaaatatttagagaaatrggaagatggtcatgatatgttttctttttaaagatagtgtaaaaaacagtactacaggtagcataataccaatttttagaacatatattaatatatctat

SEQ ID NO: 407128 - DNA, 201 bp, Homo sapiens
gtggatgtccttcctgtttgttagtttttcttctaacggacaggaccctcagctgcaggtctgttggagtacccggccatgtgaggtgtcagtctgcccckgctggggggtgcctcccagttaggctgctcaggggtcaggggtcagggacccacttgaggaggcagtctgcccattctcaggtctccagctgcgtgctgg

SEQ ID NO: 407129 - DNA, 201 bp, Homo sapiens
agctgcgtgctgggagaatcactgctctcttcaaagctgtcagacagggacatttaagtctgcagaggttactgctgtctttttgtttgtctgtgccctgccccagaggtggagcctacagaggcaggcaggcctccttgagctgtggtggtctccacacagttggagctttccggctgctttgtttacctaagcaagcct

SEQ ID NO: 407130 - DNA, 201 bp, Homo sapiens
ctgtctttttgtttgtctgtgccctgccccagaggtggagcctacagaggcaggcaggcctccttgagctgtggtggtctccacacagttggagctttccrgctgctttgtttacctaagcaagcctgggcaagggcaggcgcccctcccccggcctcactgccaccttgcagtttgatctcagactgctgtgctagcagt

SEQ ID NO: 407131 - DNA, 201 bp, Homo sapiens
taattgtagctactatgcatcagacactttgttaaaggctttacatgcattatcttatttgatttaatcctcacacaactctgcagtgtagatagtatcayggtcatttttctgctaaaggaactgaagtttaaggagattaaatcatatgcccaagggcatgtaagagcaagtaagagccaaggccaatgccaaaacaga

SEQ ID NO: 407132 - DNA, 201 bp, Homo sapiens
tttaatcctcacacaactctgcagtgtagatagtatcatggtcatttttctgctaaaggaactgaagtttaaggagattaaatcatatgcccaagggcatktaagagcaagtaagagccaaggccaatgccaaaacagaacttgaatccacctcttatctgaggacaaagcctaggctgtcaaccagtttgcatatgccct

SEQ ID NO: 407133 - DNA, 201 bp, Homo sapiens
catatggatataaatgtggaaacaatagactctggagactactaggggacagaaagggaagagggtatgggttgaaagactacctattgggttctatgctyactacttgagtgcaatatagtcatgtaaaaaacctgcacatgtaccccctgtatttaaaataaaagttgaaattttaaaaaaattatatgtgtttgtgtg

SEQ ID NO: 407134 - DNA, 201 bp, Homo sapiens
aaattatgtcttttttagcaccatggatggagctggaggccataatcctaactgaattaatgctggaatggaaaaccaaatactgcatgttctcacttatwagcgggagataaacactgagcacatatggatataaatgtggaaacaatagactctggagactactaggggacagaaagggaagagggtatgggttgaaag

SEQ ID NO: 407135 - DNA, 201 bp, Homo sapiens
ccatgcatccagagcttgacattgtgcagttgtacctgaagccactgctcattggagaacttgccccaggagagcccagccaggaaagacacaaaaatgtragtgagatgtcaggatccaggggtgtagaaggatggagacgaggcatattttaaagccaattaactgttttctgtgaagggtgggaccacagtagagtca

SEQ ID NO: 407136 - DNA, 201 bp, Homo sapiens
agtagaagagggaaaatgaaaatgctgtgtcctctccagatacagcttccttgaataacagggcataagatttagccagaacatgaagggatcccaggccmatgaagaggaaatgaaatcatgttcagggtgtataactttcaagtgcttttctctgcaagacatcgcctgggttagcagcttttacatctgatatttcat

SEQ ID NO: 407137 - DNA, 201 bp, Homo sapiens
aagatttagccagaacatgaagggatcccaggccaatgaagaggaaatgaaatcatgttcagggtgtataactttcaagtgcttttctctgcaagacatcrcctgggttagcagcttttacatctgatatttcatcacatttggcctttactatggaatcttcgggaccatgttgctcatatatttggtcaagtaagaata

SEQ ID NO: 407138 - DNA, 201 bp, Homo sapiens
gtaatcttccctcattctgttgccacgttattctaagtcctaaataattataagaataattgtagctactatgcatcagacactttgttaaaggctttacrtgcattatcttatttgatttaatcctcacacaactctgcagtgtagatagtatcatggtcatttttctgctaaaggaactgaagtttaaggagattaaat

SEQ ID NO: 407139 - DNA, 201 bp, Homo sapiens
actcctcctctttctctatcctccagataatttcctccagaaattaatgcaattagcctaccttaagttgctgtgaaactcccttccctagttgtcttatycttttgccactttttcttctgcctggaatgttcctccaaacctccacctcccctgacatcatcttgtcaattgccattctttctccaaggctcaactcaa

SEQ ID NO: 407140 - DNA, 201 bp, Homo sapiens
tccaaaccaggtgcgggatataatctcctggtgcaccatttttttaagcccatcggagaagtgcagtattcgggtgggagtgacctgattttccaggtgcygtctgtcaccactttctttgactaggaaagggaactccctgaccccttgcacttcccgagtgaggtgatgcctcgccctgctttggctcgcacatggtgc

SEQ ID NO: 407141 - DNA, 201 bp, Homo sapiens
ggtttacttccaactatgtggtcaattttggaataggtgtggtgtggtgctgagaaaaatgtatattctgttgacttggagaggagatttctgtagacatytttaggtccgcttggtgcagagctgatttcaattcctggatatccttgttaaatttttgtcttgttgatctgtctaatgttgacagtggggtgttaaagt

SEQ ID NO: 407142 - DNA, 201 bp, Homo sapiens
gaagttgctcttcttgactatctttgtggcattctctgtatttcctgaatgtgaatgttggcttgccttgctagattggggaagttctcctggataatatmctgcagagtgttttccaacttggttccattctccttattactttcaggtacaccaatcagaagtagatttggtcttttcacatagtctcatatttcttgg

SEQ ID NO: 407143 - DNA, 201 bp, Homo sapiens
aagaaaatcaaatacatcaactatgaagagcagcacctgtacttctacaaaggtgagtctcccagagccacattccttgtatcccatttacttgaagcaartacttgtcaagggagaaggccgattggaatgctctcacagagaccagcccatgtcctattgctactgagcaaagcagaatgtcttatttatactcactgg

SEQ ID NO: 407144 - DNA, 201 bp, Homo sapiens
tctctaaacttctcttcttgcttcatttcattcatttcatcttccatcactgataccctttcttccagttgatcgcattggctactgaggcttgtgcattygtcatgtggttctcatgccatggttttcagctccatcagatcctttaaggacttctctgcattggttattctagttagccattcatctaatcttttttca

SEQ ID NO: 407145 - DNA, 201 bp, Homo sapiens
gagaagtttgatcatctgaagccttcttctctcaactcgtcaaagtcattctccatccagctttgttcccttgctggtgaggagctgcagtcctttggagkggggagaggagctctgatttttagaattttcagtttttctgctctgctttatccccatctttgtggttttatctacctttggtctttgatgatggtgaca

SEQ ID NO: 407146 - DNA, 201 bp, Homo sapiens
tagtaaggcaaagccttctgaaggttaactttgtaactaagagctggcctgacattacaaagaaattaccaaaaaaactgatgaatggaatgagaaaccarttgaggaatcactgagtgaagctgagaaggtctttgtaagaagagaagagaagcagaaacagaaagccaaaatcatagtttccattgtggaagaggtagt

SEQ ID NO: 407147 - DNA, 201 bp, Homo sapiens
aagtcattctccatccagctttgttcccttgctggtgaggagctgcagtcctttggagtggggagaggagctctgatttttagaattttcagtttttctgctctgctttatccccatctttgtggttttatctacctttggtctttgatgatggtgacatacagatggggttttggtgtggatgtcctttctgtttgttag

SEQ ID NO: 407148 - DNA, 201 bp, Homo sapiens
gaggagctctgatttttagaattttcagtttttctgctctgctttatccccatctttgtggttttatctacctttggtctttgatgatggtgacatacagrtggggttttggtgtggatgtcctttctgtttgttagttttccttctaacagtcaggaccctcacctgcaggtctgttggagtttgctggaggtccactcc

SEQ ID NO: 407149 - DNA, 201 bp, Homo sapiens
agagaagagaagcagaaacagaaagccaaaatcatagtttccattgtggaagaggtagtcagaaaaaggttagatcaagatccccctcaaagtagataagstgttgacacagagaaagaagggaaactcagggaaaactcctaagactaactggatgttacaattgtgataagccagggcatcttaagagagaatgccctg

SEQ ID NO: 407150 - DNA, 201 bp, Homo sapiens
tccgtgctggggtaaccactactctcttcaaagctgtcagacagggacatttaagtctgcagaggtttctgctgtcttttgtttggctatgcctttccccmagaggtggagtctacagtggcaggcaggcctcctagaactgcggtgggctccacccagttcgagcttccttgacaccctgcttcagctcatgctccatgc

SEQ ID NO: 407151 - DNA, 201 bp, Homo sapiens
aagaggtagtcagaaaaaggttagatcaagatccccctcaaagtagataaggtgttgacacagagaaagaagggaaactcagggaaaactcctaagactarctggatgttacaattgtgataagccagggcatcttaagagagaatgccctgaatggaagaaagaagaaaaggttatccctctcatgaccattgatgaaga

SEQ ID NO: 407152 - DNA, 201 bp, Homo sapiens
caaactacaatgagatatttcttcatgcttgttagtatggctattattaaaaacacaaaatataagtgttacagggatgtggagtaaaggaaacccttgtrtactgttggtgggaatgtaatttggtacagccagtatgggaaacagtatagaggttcttcaaaaagttagaattagaattaccatatcatcaagcaattc

SEQ ID NO: 407153 - DNA, 201 bp, Homo sapiens
agggacatttaagtctgcagaggtttctgctgtcttttgtttggctatgcctttcccccagaggtggagtctacagtggcaggcaggcctcctagaactgyggtgggctccacccagttcgagcttccttgacaccctgcttcagctcatgctccatgcactgcacccactgtcctgcacccactgtccaacaagccctgg

SEQ ID NO: 407154 - DNA, 201 bp, Homo sapiens
tttaagtctgcagaggtttctgctgtcttttgtttggctatgcctttcccccagaggtggagtctacagtggcaggcaggcctcctagaactgcggtgggytccacccagttcgagcttccttgacaccctgcttcagctcatgctccatgcactgcacccactgtcctgcacccactgtccaacaagccctggtgagatg

SEQ ID NO: 407155 - DNA, 201 bp, Homo sapiens
aattaccatatcatcaagcaattctacttctggttattatccaaaggaatctaaatcaggatctccaggagatatcttcatgcccatatttttgcaatatkattcacaatagctgcaatattaaaacaacctaaatgtccatcaatgaatgaataaagaaaaagtagtatcacacacacacacacacacacacacacacac

SEQ ID NO: 407156 - DNA, 201 bp, Homo sapiens
atcagcattttgggcaaagccattcaacaagtctctaggaagttccaaactttcccacattttcctgccttattctgagccatccaaactgttccaacctstgcctgttacccagttccaaagtcgtttccacattttgaggtatcttttcagcaacatcccacttctggttccaatttactgtattagtctgttttcaca

SEQ ID NO: 407157 - DNA, 201 bp, Homo sapiens
atatcctttacacagtttcctctccaaaataccttttaatcctacagatatattcacaataatttacagtaacattgtttatattagtaaaatattgaaawcaatctaaatgtcaccaatgggtgggggaaagagtctgattaaacagagtatgaatgcaactgttcaataaaatataatacaaacaataaaaagagtgag

SEQ ID NO: 407158 - DNA, 201 bp, Homo sapiens
tacccgagactgggaagaaaatggggcttaattggacttacagttccaaatggctggggaggcctcagaatcatggcgagaggcaaaaggcacttcttacrtggcagtggcaagagaaaatgaggaagaagcaaaagcagaaacccttgatcaacccatcatatctcgtgagacttattcactatcatgagaatagcatgg

SEQ ID NO: 407159 - DNA, 201 bp, Homo sapiens
cagccagtaaatagccactaccctaaatcctacaattcctgccaacctaatccttttgccaagaggccctgaccctcatcccagcctgcgaccaaatgggkgtgggtggtagttgaaaagcttatttacaaataaagaaatagcttatttacaaagtaagaagaaagcttattcacaaaagacaaatatgctgtccaaaac

SEQ ID NO: 407160 - DNA, 201 bp, Homo sapiens
acatgaacttgtaacagtggtgatccccagggaaggaaactgaagatcagaaatcaagggaggggtggggacatggtttatactccatacactttcatatytctgaatttttaccataaaatgatttgttatttatccctcaaactcaaaataagagaagctgagggtaagaaataaaagcaggaagaaagaaaaaagagg

SEQ ID NO: 407161 - DNA, 201 bp, Homo sapiens
ggctggggaggcctcagaatcatggcgagaggcaaaaggcacttcttacatggcagtggcaagagaaaatgaggaagaagcaaaagcagaaacccttgatmaacccatcatatctcgtgagacttattcactatcatgagaatagcatgggaaagactggcccccatgactcaattaccttcctttgggtccctcccacaa

SEQ ID NO: 407162 - DNA, 201 bp, Homo sapiens
gggtaaccactactctcttcaaagctgtcagacagggacatttaagtctgcagaggtttctgctgtcttttgtttggctatgcctttcccccagaggtggrgtctacagtggcaggcaggcctcctagaactgcggtgggctccacccagttcgagcttccttgacaccctgcttcagctcatgctccatgcactgcaccc

SEQ ID NO: 407163 - DNA, 201 bp, Homo sapiens
caatatttcagtaaattagggtctcccaggatgcaggttggaaagttctggtctataccactgaaagggcacatgtccagattttcctgctaatcctacargcacaagataatattcggccagttaacctgcatcagttgttaaaatactgagatactaccatgtcagccagtaaatagccactaccctaaatcctacaat

SEQ ID NO: 407164 - DNA, 201 bp, Homo sapiens
cgctcacactgggagctgtagactggagctgctcctatcagccatcttggaacagcccacctagttagctcttcttgttgaattgatccctttaccattakgtaatggccttctttgtctcttttcatctttgttggtttaaagtctgttttggctacctttatttttaaaaaatattagtctagactctgatggaagaaa

SEQ ID NO: 407165 - DNA, 201 bp, Homo sapiens
agatgtgagaaaccacacagctcatgcacctagaaattcacaataagcaaacagaatgtagaggatgggtcagcccataaaagggaagtttcattattggsaaatcaaaacttatgtggggaaggagaccagggcataaccttataagggggataatgaaacttaggcaacatccagtaagattataaccccatagtactc

SEQ ID NO: 407166 - DNA, 201 bp, Homo sapiens
aaaataaaaaccctagaaaataccctttctctacatcagacttggccaaaaaattttggcaaagtcttcaaaagcaactgaaataaaaacaaaaattgacragtgagacctaattaaaaatcttcctcacagcaaaagtaactatcaatagagtaaacagacaacttacaggatgggagaaaatattcacaaacaatacat

SEQ ID NO: 407167 - DNA, 201 bp, Homo sapiens
ccctttctctacatcagacttggccaaaaaattttggcaaagtcttcaaaagcaactgaaataaaaacaaaaattgacgagtgagacctaattaaaaatcytcctcacagcaaaagtaactatcaatagagtaaacagacaacttacaggatgggagaaaatattcacaaacaatacatccaacaaaggtctaatatcaac

SEQ ID NO: 407168 - DNA, 201 bp, Homo sapiens
agatataaataaactaaatatcaactcatataaaggagggtacttaactcaatatcaattttaaaacaaaatactttttcagatggcaacgtatataacasataattcacataaaataaaaaattaattattctgagaaatataaaaagatatccaacctggttcatatgagtaaagggcaaacaaaatatattatttttc

SEQ ID NO: 407169 - DNA, 201 bp, Homo sapiens
gaatttagagaaatagtcactagatttggtagaagtagtataaattggtacagcctctggagggtacctgagcaataagtatcaaaagttatcattattawatcctttacacagtttcctctccaaaataccttttaatcctacagatatattcacaataatttacagtaacattgtttatattagtaaaatattgaaaac

SEQ ID NO: 407170 - DNA, 201 bp, Homo sapiens
cactagatttggtagaagtagtataaattggtacagcctctggagggtacctgagcaataagtatcaaaagttatcattattatatcctttacacagtttyctctccaaaataccttttaatcctacagatatattcacaataatttacagtaacattgtttatattagtaaaatattgaaaacaatctaaatgtcaccaa

SEQ ID NO: 407171 - DNA, 201 bp, Homo sapiens
ccctgttatagttctcataacctggtcactttcccagctgtcctagtttcaaacccataatagtcaataagccaagagatatttctttccaaccttgtgasctccccagtatgatgtggcaagcttgtaaaccaatgctaatgctgaacatgaacactcacacatgcacatacacacagggcccttaaacgagacctttcc

SEQ ID NO: 407172 - DNA, 201 bp, Homo sapiens
ctcatatttcttggaggctgtgttcatttctttttattcttttttctctaaacttctcttcttgcttcatttcattcatttcatcttccatcactgatacyctttcttccagttgatcgcattggctactgaggcttgtgcattcgtcatgtggttctcatgccatggttttcagctccatcagatcctttaaggacttct

SEQ ID NO: 407173 - DNA, 201 bp, Homo sapiens
atgtgaatgttggcttgccttgctagattggggaagttctcctggataatatcctgcagagtgttttccaacttggttccattctccttattactttcagstacaccaatcagaagtagatttggtcttttcacatagtctcatatttcttggaggctgtgttcatttctttttattcttttttctctaaacttctcttct

SEQ ID NO: 407174 - DNA, 201 bp, Homo sapiens
ccactgtccaacaagccctggtgagatgaacccggtacctcatttggaaatgcagacatcacccatgttctgcgtcgctcacactgggagctgtagactgkagctgctcctatcagccatcttggaacagcccacctagttagctcttcttgttgaattgatccctttaccattaggtaatggccttctttgtctcttttc

SEQ ID NO: 407175 - DNA, 201 bp, Homo sapiens
tatagttggttgtctacccactattcattttcctttatttcttcctgaaaggactattattttgtgtggaaggtaatgcagccatataaataaagtctttwtgtccaagcttccattgtagctatggtggcacttgtcttagtttgcattcctgagatatggctgtgagtaaaggtcatgtactgggggagaaattgtagt

SEQ ID NO: 407176 - DNA, 201 bp, Homo sapiens
ctttgccctcagctactgggagacaatctctgaatcactggagtgtactgcctaataagaatgtctttctttgtttggaggctttagccactggacaatckaacaatgtgatttgtgatggggtctttaggatattctatgtcgatttatacctccagaggcactggagactgaggtattattctgaacttccaggagtat

SEQ ID NO: 407177 - DNA, 201 bp, Homo sapiens
aagcgaagggctgcttttaagcaccttgagtttatggtatgaaaagaaaacctaaatgaagatgtctagcagataattggaaaaaatgtccttctggattwtttttttttatactttaggttttagggtacatgtgcacaatgtgcaggttagttacatatgtatacatgtgccatgctggtgtgctgcacccattaactc

SEQ ID NO: 407178 - DNA, 201 bp, Homo sapiens
gggtccactgtttggcatagagacatagagtggatgttcaataaatattttagtaatgattagtttgttagttaattagagcaatgatagataagcctagmaagttaaactgagctcgtattgggaaaaaaaatctaaaattctagctgaaaagtttgtgcttggtttagtagaccagatgggtccatagagaagaatgca

SEQ ID NO: 407179 - DNA, 201 bp, Homo sapiens
actcatcccagatttaaattaccaggttaatattccctttataagcttttgtgccctgtgcacctcactgatacaaatgatctctgcctgtgccactcacragactgaaaactccatgagagcagtgattctgtatgctgttattcaccatttcatccctagcaatgtatccctagcaatcaaatccttagcattttatcc

SEQ ID NO: 407180 - DNA, 201 bp, Homo sapiens
atgaaaggccacagagtcaccgagacctacaggatggaaagacactgaatcattttaacaatgacagggtacctttccccagaggcttatgagaggcgtawgactcacaagtgaaaaaatgatttctcttgttgcaacaagtaacatcggtgagtcatcttccacctctgactgtaattaatcccctggtaccagcctgca

SEQ ID NO: 407181 - DNA, 201 bp, Homo sapiens
atttttagttggacatcaagtaagagtgcctggattagaagtcagaaatctagactctaatttcattttattaacttagtatcctacagtgaacttggccrtgtcacttccacgcttcatacctcaatccccacatttgtataggtgcgatgcataatatttcctggcctatgtgcatcataggatgattgtgacaattac

SEQ ID NO: 407182 - DNA, 201 bp, Homo sapiens
actaagttgcaaggtacctggaatcatctacttttatctaccctctctcccattgagcagtttgagccttaagtcaatcagataacacagagttggatttygattcatattggagatgtgtcccccaaaatagttagaatgaataataagttgttatttcatgtgataggtcacatttgaccagaaaattcctgtgggcat

SEQ ID NO: 407183 - DNA, 201 bp, Homo sapiens
atacaggaaatgcttaataattgttaattgttattaatactagaaacagtctttccataatcaaaatgaagactcagaatcaataagaaaaatatttaatygttgaagtattaagaagatggaaataaatcacatcatcactaagttgcaaggtacctggaatcatctacttttatctaccctctctcccattgagcagtt

SEQ ID NO: 407184 - DNA, 201 bp, Homo sapiens
ggatgttgttaggattatacgcaatactcatgtgtcatgctcaacaaagtgtctggcatacaggaaatgcttaataattgttaattgttattaatactagraacagtctttccataatcaaaatgaagactcagaatcaataagaaaaatatttaatcgttgaagtattaagaagatggaaataaatcacatcatcactaa

SEQ ID NO: 407185 - DNA, 201 bp, Homo sapiens
gcatgagggggattcctgaacatgagtccctaaggagtggttcccatatttgtacattgatatcagtaaaaaatatttatgataccccacaaataaatataagtgtactaacaaggtagataatatgtactaatatataatacaacactataaaatatgtgctgaaatgagaattttaaattaaattttttgtgaggattt

SEQ ID NO: 407186 - DNA, 201 bp, Homo sapiens
catgagggggattcctgaacatgagtccctaaggagtggttcccatatttgtacattgatatcagtaaaaaatatttatgataccccacaaataaatataagtgtactaacaaggtagataatatgtactaatatataatacaacactataaaatatgtgctgaaatgagaattttaaattaaattttttgtgaggattta

SEQ ID NO: 407187 - DNA, 201 bp, Homo sapiens
tacactgtcctatgcaccactgcagtgcagcacctaggagagtgcttggtgcatggcggcgggggggagccttcaataagcttttgttgaaggaaggaatraaagaaagaaagaaagaaagagtgaatgaatgaaccagttaacagtgcaggacttccaagcatggcttccaggcctggctctgacagtgctcattgtgag

SEQ ID NO: 407188 - DNA, 201 bp, Homo sapiens
attttacagatgaggaaattgctcaaggtcacatacctaaatagatggccaagcagggattaaattcaggttggtttcattccaaagcctgggttcattcttttttttttttaataccctaagttctagggtacatgtgcacaatgtgcatgtttgaaacatagatatacatgtgccatgatggtttgctgcaaccatcaa

SEQ ID NO: 407189 - DNA, 201 bp, Homo sapiens
tatatatatttggaaagtccccattcaggcataagattcaggatagagagtcaggctggaggattgcaaggttagggagtgttaactggggatgcgatggsggttgctaagaaacaactgcaaagaagactatggaaagacaatgctaatgcttacaggttttcaaataaagagccatccccttctactatagatgtatga

SEQ ID NO: 407190 - DNA, 201 bp, Homo sapiens
acagcaaaagaaactaccatcagagtgaacaggcaacctacaaaatgggagaaaattttcgcaacctactcatctgacaaagggctaatatccagaatctrcaatgaactcaaacaaatttacaagaaaaaaacaaacaaccccatcaaaaagtgggcgaaggacatgaacagacacttctcaaaagaagacatttatgca

SEQ ID NO: 407191 - DNA, 201 bp, Homo sapiens
tttacaagaaaaaaacaaacaaccccatcaaaaagtgggcgaaggacatgaacagacacttctcaaaagaagacatttatgcagccaaaaaacacatgaaraaatgctcatcatcactggccatcagagaaatgcaaatcaaaaccactatgagataccatctcacaccagttagaatggcaatcattaaaaagtcgggaa

SEQ ID NO: 407192 - DNA, 201 bp, Homo sapiens
acacatgcacacgtacgtttattgcagcactattcacaacagcaaagacttggaaccaacccaaatgtccaacaatgatagactggattaagaaaatgtgrcacatatacaccatggaatactatgcagccataaaaaatgatgagttcacgtcctttgtaggcacatggatgaaattggaaatcatcattctcagtaaac

SEQ ID NO: 407193 - DNA, 201 bp, Homo sapiens
acccaaatgtccaacaatgatagactggattaagaaaatgtggcacatatacaccatggaatactatgcagccataaaaaatgatgagttcacgtcctttktaggcacatggatgaaattggaaatcatcattctcagtaaactatcgcaagaacaaaaaaccaaacaccacatattctcactcacaggtgggaattgaac

SEQ ID NO: 407194 - DNA, 201 bp, Homo sapiens
tcctcagggcctgtcagcagaccggtggaattactggcactttgaacaacacgtaaagccgaacatctaccccaaagacccagatattgacacggacccastttttctccttggagattcacaacctgtcaaggtacacttagaaatcttgagcaccgaggaaatgttcctggaagtggttcgtggaaaggcttacagcct

SEQ ID NO: 407195 - DNA, 201 bp, Homo sapiens
cacacacgctaataagccctgccttgttttgggggatccactaagcagctctcagaaaattcatcctgagagctaatctaagtgaactatattgttctacratctccatcttccatgaaataaccctttctacacattaagcaactgatggcctggaaagcactttgtaaactataccagtaactggtaacacagatccat

SEQ ID NO: 407196 - DNA, 201 bp, Homo sapiens
atgtctctttaaactagataactcctggcagttatgttatagccctatctgaaactcttcaatggattcccatgactcttggaataaagtccaaaccccargactgccccatggccactacccaaccttgtaccactctggctcttgctatctctgtttcagcccactggatctcttcaagtcttcacactcttttctgcc

SEQ ID NO: 407197 - DNA, 201 bp, Homo sapiens
gcaacatagagattttttgagcaactagagttttgttttttttagagattctgtctctaaaataaataaataaatacataaaattcataattcaaaaaagrtgctagaccatccgattctgggctcttctttgctgggaggtttttgattactgcttcactctccttaatcattattgacctgttcagattttctttcttc

SEQ ID NO: 407198 - DNA, 201 bp, Homo sapiens
ataataagtaggctcatatgtaattcttggatatatctaaagttgatttactatttgaagatgtagcactcattatattcattaatataattcagagctcrctccacgttaggcattgaggtaaagggaggaaatctctgaatattgaagagaaggtaggtagtgggttcttatcagtggaggtatacacatatgaaatat

SEQ ID NO: 407199 - DNA, 201 bp, Homo sapiens
tccaggggtgtagaaggatggagacgaggcatattttaaagccaattaactgttttctgtgaagggtgggaccacagtagagtcaatggatggagtccacrtatttcaaaacaatgcctttttctttagatcatgggaactcttaaatcttagtgaagaaaaagaataaaattcttatcccttcatcaaacagtaatttca

SEQ ID NO: 407200 - DNA, 201 bp, Homo sapiens
tgtgaagcagagggagcaaggattttattctctcttaaaaaaatgaagaaacagactcacaaagggagcaggactaatctgaggacacagaactggttacrggcaaatctgagactaataggtaagctccatctttaggcccatgttcatcccacagcacagctctgttccaaagagtgggatggtaggatggacagcctg

SEQ ID NO: 407201 - DNA, 201 bp, Homo sapiens
tgggtggtagttgaaaagcttatttacaaataaagaaatagcttatttacaaagtaagaagaaagcttattcacaaaagacaaatatgctgtccaaaacaraattcaaactctaggcttcaaattagttgagtctgactacctcaacatggcctattttaaacctcccaattaagaaaaacaatcaaagccagaatatgtc

SEQ ID NO: 407202 - DNA, 201 bp, Homo sapiens
ggagtttatattctagtgcagaaggcagtcaataaacaagtaaatggaagaaaaaacaagatgattacatttaaagaaaataaataggatgaggtgagagagaatgataagcaggggactagattagttcagggggtcaggcagaagggaatctgagaatattgaaggagcctgccatgacatcctgagaagcagaatcat

SEQ ID NO: 407203 - DNA, 201 bp, Homo sapiens
tgtatttctatggtttacaaaaatgtgcaaactaaacaatgtgctgtttaaggattcataaatatgtagtaacatgataaagagaagcaagagaatagtaracacaaaaatgaggatcatagtgggggaaaggtgctaggtaagaatgaaaatgtataagtgaggtaaattttaatttgcttagtaggctgttagttaatg

SEQ ID NO: 407204 - DNA, 201 bp, Homo sapiens
gttgacgcagtttcttcctagtctcgatggtctttacaatttggcatgtttttgtagtggctggtactggttattcctttccatgtttagcgcttccttcrggagctcttttagggcagtcctggtggtgtcagaatctctcctcatttgcttgtctgtaaagtattttatttctccttcatttatgaagcttagtttatc

SEQ ID NO: 407205 - DNA, 201 bp, Homo sapiens
tattttgactttggggatgcatgcagaaaactctgacagtgaagggtatttcaggaaagaattatttcaaataacgagcccgctcttctcctcagggcctrtcagcagaccggtggaattactggcactttgaacaacacgtaaagccgaacatctaccccaaagacccagatattgacacggacccactttttctccttg

SEQ ID NO: 407206 - DNA, 201 bp, Homo sapiens
actatcgcaagaacaaaaaaccaaacaccacatattctcactcacaggtgggaattgaacaatgagatcacatggacacaggaaggggaatatcacactcyggggactgtggtggggtggggggagggatagcattgggagatatacctaatgctagatgacgagttagtgggtgcagcgcaccagcacggcacatgtata

SEQ ID NO: 407207 - DNA, 201 bp, Homo sapiens
ccttgtaaatctccaaacagacttggttactgtgtaatctgaagaaagttgggagatttagacagattatataaggaaacatgaaatcaattcaaaaaagktgcttgggccaggctcacatctgtaatctcaacacttgggaggccaaggcaggaggatctcttgagcccaggagttcaataccagcctgggcaacataga

SEQ ID NO: 407208 - DNA, 201 bp, Homo sapiens
tatgtaatttcttccaactagataaattttattaaatatatgagaataattccatattctaattttgaattgttttaattttatcatggtaaaaacacttwttatgagccgggcatggtggttcacgcctgcaatcccggtactttgggaggctgaggggggcggatcacgagatcaggagatcgagaccatcctggctaa

SEQ ID NO: 407209 - DNA, 201 bp, Homo sapiens
ttagtgggtgcagcgcaccagcacggcacatgtatacatatgtaactaacctgcacaatgtgcacatgtaccctaaaacttaaagtataaaaaaaaaaataaaaaaaaaaactccaacttaaaaccatcatgtaaaggacaatgtcaattaccgagatttttaggagggagtatttcttaagcataggagatataaggata

SEQ ID NO: 407210 - DNA, 201 bp, Homo sapiens
taccttagctgcagaaagcacaatagtgcaagcttgcttccccagctccaagcaaatcggcgctactggattatctgttgcctgaaattctaccagtatayattcattcccttacttcaagctctgcaaaatactcttttagctttgtttgtttctcaattaaacccctactggaaaataacacattaaatcactcatagc

SEQ ID NO: 407211 - DNA, 201 bp, Homo sapiens
ctgggggttaaaccaaaatcagggaaggaaccaaacatttcctgtaatccagttgttctcaacccgagcaattttgcctcccagaggcagtctaaagacatttttttggttatcgcaacagaggaagagggaacgtattggcagtcagtggatagaagccagggatgctgctaaacattccgcgatgcaaaggacagcccc

SEQ ID NO: 407212 - DNA, 201 bp, Homo sapiens
gggaagatggtcatgatatgttttctttttaaagatagtgtaaaaaacagtactacaggtagcataataccaatttttagaacatatattaatatatctayattcaaaatatttatggtagtatctgggtagtaagattactggtgattttccttttttttttttttacttttattttagtttcaaggatacatgtgcagg

SEQ ID NO: 407213 - DNA, 201 bp, Homo sapiens
ttttctttttaaagatagtgtaaaaaacagtactacaggtagcataataccaatttttagaacatatattaatatatctatattcaaaatatttatggtartatctgggtagtaagattactggtgattttccttttttttttttttacttttattttagtttcaaggatacatgtgcaggtttgttatacagataaattg

SEQ ID NO: 407214 - DNA, 201 bp, Homo sapiens
cgggaggcggagcttgcagtgagccgaggtcgcaccactgcactctggcctgggagacagagccagactccgtctcaaaaaaaaaaaaaaaaaaaaaaaamcatttattatgacatctatcctattaacatttttaagtgtacaatacagtattgttttctataagcacaatattgtgaagtctatctctagaacttattt

SEQ ID NO: 407215 - DNA, 201 bp, Homo sapiens
ggaggcggagcttgcagtgagccgaggtcgcaccactgcactctggcctgggagacagagccagactccgtctcaaaaaaaaaaaaaaaaaaaaaaaaacrtttattatgacatctatcctattaacatttttaagtgtacaatacagtattgttttctataagcacaatattgtgaagtctatctctagaacttatttat

SEQ ID NO: 407216 - DNA, 201 bp, Homo sapiens
ttttaggggcaagcattcagttggtaactattaagtaggatgttagctataggtttttctgtagatattcttcatcaagttgaggaagttgccctattttsctagtgttctgagatttttaaaattatgagtagatgttgaatttcatcaaattccttatgtttatctatttatatgatcctgtgatttttctcctttaga

SEQ ID NO: 407217 - DNA, 201 bp, Homo sapiens
acaaaaccagagctcactcaacacctgaaataattctggtggtttacaaggcaacagttaggcacatgtatctctccactgccctctcctctccttccccmtcccctgaaaaaaatctaattctgaattccataacagctttaggacagtttacaagtcactattcatctttcacttctgcagaaaacaacaaaaaaattt

SEQ ID NO: 407218 - DNA, 201 bp, Homo sapiens
ggcacatgtatctctccactgccctctcctctccttccccatcccctgaaaaaaatctaattctgaattccataacagctttaggacagtttacaagtcaytattcatctttcacttctgcagaaaacaacaaaaaaatttcataaactttttaaaggttttatttgctggttcattgttttggggttttaattctggaca

SEQ ID NO: 407219 - DNA, 201 bp, Homo sapiens
aagaattgtggagcatcgcagaggctatgaacatgttccatgccaacctggggttcttctttcttcactttgtgcagatcttaattttggaagtgctggcrtggctaatagtgtatcattttggcagtggctggcctgttactatgttcatttcctttcttctcacaatttctcaggcaagcaggtatactaagcccaggc

SEQ ID NO: 407220 - DNA, 201 bp, Homo sapiens
tctcctctctaaagtgaggataataatgaatgtggaattattctgagaaggactaatcaggcaaatgtgtaaaatataaagcacagtgtctggcctatggyaaatgtttaattagtgacaattgctgctgtttgccctgttttatgcccaccatctcagtgattgaagttctgtccttagccatgccacacacatatttat

SEQ ID NO: 407221 - DNA, 201 bp, Homo sapiens
gttcctccataaatgacaaatagcaactgacacttagcagggcatttgataaatctttgttgaatgaagtatgaatctctgaacatagccttctatgagcrtgataccatgttgtcgatacaaaggaaaagtcaacatgctccctgctcctgagaaagaagtcgtgtagtggaggaaatagtccttcacaaacagcttaac

SEQ ID NO: 407222 - DNA, 201 bp, Homo sapiens
ataggtatgtagtacaataaccccgtgagttaggtattagtgtccccttctatcagatgaagaactgaaggtgagagctatcgagtaacttgcccagagtygtgaagctcgttagtggtgaagaacagtttagaattcaaatctgtctgacaccaaagaccatggtctttgcactccatactggaaacctttgaaagtgac

SEQ ID NO: 407223 - DNA, 201 bp, Homo sapiens
caaggaggaggcagctatgaagaaataaaggaaaagatgcaaaacagatactagtgaacagaaagactagtcaggaaaagccagatggctctgttcaagartgcaggattgcaaaatccagactgctggaaaaagcaggtagtgatatgacagctggtcttatcccctcttacttgggctccaggaagcaggtacactgtc

SEQ ID NO: 407224 - DNA, 201 bp, Homo sapiens
gaattcatagcatagcactaaataatgcaggcactagagcagagctgctcaatgctggctatcatttgaagccacctaaagaagttattttttaaagtccyaatgcctaagtaccatctctagatattctaaattcatccccagtagagtctagacatcagtatttttggaaagttccccaggtgattctaacctacaaaa

SEQ ID NO: 407225 - DNA, 201 bp, Homo sapiens
tgctactgaaacaccccaaacagtcatcactccctccttttattcctccaaaaggtttcttgaaagtccttggattgtatatgttacccagatgagccacrtaacaatgagaatgagcacagaggagaaccgggactggctcaccactcaggtaatgatggagttcctgggggagaatctttcaaaccacactgacttaga

SEQ ID NO: 407226 - DNA, 201 bp, Homo sapiens
caggtgattctaacctacaaaaatgaacctgccttctgtgagaattcaggcactcatgagctgagtcactttgaacaaattacttaatgattttgaaccayagtttcttcaactgtaaaatgatgatagatgatggcttcaacctgataaggatgttgttaggattatacgcaatactcatgtgtcatgctcaacaaagtg

SEQ ID NO: 407227 - DNA, 201 bp, Homo sapiens
gaaagaccaccattttactggaaactttgagtctctttcatttcctccaatgatcaaccagctctactaggggttatgcaagtccagtgcttgctactgamacaccccaaacagtcatcactccctccttttattcctccaaaaggtttcttgaaagtccttggattgtatatgttacccagatgagccacataacaatga

SEQ ID NO: 407228 - DNA, 201 bp, Homo sapiens
tatatatatataacttcatgatccttcatatatatctttattattctctttcatttgcaacattaattgagcacttaccatttatcaggcattgacctagrtgatgtgaatgaagagtcagaagccctacctctaggagtttatattctagtgcagaaggcagtcaataaacaagtaaatggaagaaaaaacaagatgatt

SEQ ID NO: 407229 - DNA, 201 bp, Homo sapiens
atagtataccatggtgtatatgtgccacaatttcttaatccagtctatcattgttggacatttgggttggttccaagtctttgctattgtgaatagtgccrcaataaacatacgtgtgcatgtgtctttatagcagcatgatttatagtcctttgagtatatacccagtaatgggatggctgggtcaaatggtatttctag

SEQ ID NO: 407230 - DNA, 201 bp, Homo sapiens
tttttttttaagttcttttatgactagaggttttcccaaagcaaaacgacttccaacgcatttttgcttgaatagtcctctccagttttccaatgtaatcytccctcattctgttgccacgttattctaagtcctaaataattataagaataattgtagctactatgcatcagacactttgttaaaggctttacatgcatt

SEQ ID NO: 407231 - DNA, 201 bp, Homo sapiens
aatccaggagctggttttttgaaagaataactttaaactacagaaactcaatgggaattcaaagggaggtcatgaaagctttgagtcaagaaaagaaattktttgcagaaaagctttagtacacaggttgtacatcgcatcctaatggtgtgaatgcaataaagaaaacaatttgtggtcatttttataacctaccacacc

SEQ ID NO: 407232 - DNA, 201 bp, Homo sapiens
cacgggttcaagcgattcttcagcctcagcctcccaagtagctggaattacaggcatgcaccaccccatctgcctaatttttgtattttcagtagagacagggtttcaacatgttggccaggctggtcttgaactcctgacctcaggagatctgcccaccttgtcctcccaaaatactgggattacaggcaggagccacca

SEQ ID NO: 407233 - DNA, 201 bp, Homo sapiens
gggtttcaacatgttggccaggctggtcttgaactcctgacctcaggagatctgcccaccttgtcctcccaaaatactgggattacaggcaggagccaccrcgcccagcctcagctaactttattttttttctattatactttaagttctagggtacatgtgcacaatgtgcaggtttgttacataagtacacatgtgcca

SEQ ID NO: 407234 - DNA, 201 bp, Homo sapiens
taactcgtcatttacattaggtatatgtcctaatgctttccctccctacttctcccactccatgacaggccccggtgtgtgatattccccttcctgtgtcmaagtgttctcattgttcagttcccacctatgagtaagaacatgcggtgtttggttttttgttcttgcgatagtttgctgagaatgatggtttccagcttc

SEQ ID NO: 407235 - DNA, 201 bp, Homo sapiens
gtggttttgacttgcatttctctgatggccagtgatggtgagcattttttcatgtgttttttggctgcataaatgtcttcttttgagaagtgtctgttcaygtcctttgcccactttttgatggggttgtttgtttttttcttgtaaatttgtttgagttcattgcagattctggatattagccctttgtcagatgagtat

SEQ ID NO: 407236 - DNA, 201 bp, Homo sapiens
tgagaagtgtctgttcatgtcctttgcccactttttgatggggttgtttgtttttttcttgtaaatttgtttgagttcattgcagattctggatattagcmctttgtcagatgagtatgttgcaaaaattttctcccattctgtaggttgcgtgttcactctggtggtagtttcttttgctgtgcagaagctctttagttt

SEQ ID NO: 407237 - DNA, 201 bp, Homo sapiens
caactggaaacattaacttggagttacaagaaaatcctctgcaatgaggtctgtgctgattcccagactgagcacaggacaagataagaaaaggaacggayctgtggataagcatgtctcttcaaagcctctgacaggtatctctgatttacaggatgtcttcagggccatgcatccagagcttgacattgtgcagttgta

SEQ ID NO: 407238 - DNA, 201 bp, Homo sapiens
acaaagaaaattacaatataaacagcaacatccccgccttagacatgcatcacaattttaaagtttaaaatttaacttcatgtcaattacctccccccacmaccgcctggaaaagacaccaatatggagattctttagaattttcattcaccaactgtgcaaaaatgtatatgttctggtctttccagtgtttgtacaata

SEQ ID NO: 407239 - DNA, 201 bp, Homo sapiens
tcccaaaataaaccatgaaatgtttgcatacattttggactactgtgcaatactaaaaacaaagtggactccttgtagcatatttttcatattcatcagtrtgtgcatataaaaaaactaagagtcaagtctcattatagggatagtgggacagaacatttgaaattaagatcttcctagaaaatctggcctatactgatt

SEQ ID NO: 407240 - DNA, 201 bp, Homo sapiens; identical to SEQ ID NO: 91192

SEQ ID NO: 407241 - DNA, 201 bp, Homo sapiens
acattactactcaccacagataatcattggctaaaagagtacagtcagctggcggaagaatccaaacattggttctcaggtgacttaattgaaaaggagawtctctccttatcatattgtccttgttcagttgtctactgctcccattagattatatgtttcctaagtgtggaaaccccattttatcatgtttatctttat

SEQ ID NO: 407242 - DNA, 201 bp, Homo sapiens
acagcttgtctttattcggtcgcttttcaagtgctcaatagccacatgtgctaatggctattgcattggacagagcagactagaacatgtatagactgctygctaagctatgtgaaatatgcaataaaaactactactgctgctcattcttctgtaaatgattaacataaaggaggaaaaactgaatatgccaacatttta

SEQ ID NO: 407243 - DNA, 201 bp, Homo sapiens
attccttttttcatactgaatcttcaaaatccagtaggtattttatacttacagcttgtctttattcggtcgcttttcaagtgctcaatagccacatgtgytaatggctattgcattggacagagcagactagaacatgtatagactgcttgctaagctatgtgaaatatgcaataaaaactactactgctgctcattctt

SEQ ID NO: 407244 - DNA, 201 bp, Homo sapiens
tctactatagatgtatgatatccagaccagcattctccaacagaaatataatgcaccatattaaaatgacatatgcattttaaatttttcaatagtcatayttaaaaggtaagtttattactccatatatattcaaaacagtattatttcaacatgtaatcaatgtaaaagttattgatgaaatattttacattccttttt

SEQ ID NO: 407245 - DNA, 201 bp, Homo sapiens
ttctacttctggttattatccaaaggaatctaaatcaggatctccaggagatatcttcatgcccatatttttgcaatattattcacaatagctgcaatatyaaaacaacctaaatgtccatcaatgaatgaataaagaaaaagtagtatcacacacacacacacacacacacacacacacagagaaatagtattcagtctt

SEQ ID NO: 407246 - DNA, 201 bp, Homo sapiens
ttgaagccgggacatgcaaggatctgagccaagacccccagggagatcacttcagatccatgattctttgaaacactcattgaagtaagatacctggggcygcatctttttccccagaactaattaaagtctcggagctaagtcttctttatatgtaaaatagaaaaaatactctctgccccagctaccttcagatttatt

SEQ ID NO: 407247 - DNA, 201 bp, Homo sapiens
agaaacacagagcactgatggggcccttgaaggggggacagaaattgttaagtatagtttgtgacatgtagaggcttgagtatcatgaaatatccaaatayacacacacacacacacacacacacacacatacacatatatatatcacatatatatcacatatatatcatatatatcacatatatatcatatatatatgat

SEQ ID NO: 407248 - DNA, 201 bp, Homo sapiens
ggcctggctctgacagtgctcattgtgagatctttagtaaatcacattctatccctggtcctcagtgttcccatcagtagtactaggagttaaactagatmtctacttttctagaactttctagggtttggtgactatgtactctggcctagaagggaagcaaatgtctctgagccttccactaaaccaaatccttgcatt

SEQ ID NO: 407249 - DNA, 201 bp, Homo sapiens
caccaataacagacaaacagaaagccaaatcatgagtgaacttccattcacaattgctacaaagataataaaatacctaggaatacaacttacaaggaacrtgaaggatcatttcaaggagaactacaaagcactgctcaaggaaataaaagaggacacaaacaagtgtaaaaatataccatgctcatgaataggaagaat

SEQ ID NO: 407250 - DNA, 201 bp, Homo sapiens
cctattcaacatagtattgaaagtttctggccagggcaatcaagcgaaagaaggaattcaaattggaagagaggaagtcaaagtgtctctgtttgaacatsacatgattatatatttagaaaaccccatcatctcagcccaaaatctccttaagctgatcagcaacttcagcagagtctcaggatacaaaatcaacgtaca

SEQ ID NO: 407251 - DNA, 201 bp, Homo sapiens
aatttgtttgagttcattgcagattctggatattagccctttgtcagatgagtatgttgcaaaaattttctcccattctgtaggttgcgtgttcactctgrtggtagtttcttttgctgtgcagaagctctttagtttaattagatcccgtttgtcaattttggcttttgttgccattgctttttatgttttcgacatgaa

SEQ ID NO: 407252 - DNA, 201 bp, Homo sapiens
gagtatgttgcaaaaattttctcccattctgtaggttgcgtgttcactctggtggtagtttcttttgctgtgcagaagctctttagtttaattagatcccrtttgtcaattttggcttttgttgccattgctttttatgttttcgacatgaagtccttgcccatgcctatgtcctgaatagtgttgcctaggttttcttct

SEQ ID NO: 407253 - DNA, 201 bp, Homo sapiens
aagagtcaaacactgcccagagttgtaactgaagggcaaaaatacagagtgagtatgaattatcattcattcgttaattccttcaataaacatttattgagtgtctgccagatactagagatataatcattacttctatcctcctttcaaagcatttgctttgtgccctgaatatatgccagattaactaaggagactcct

SEQ ID NO: 407254 - DNA, 201 bp, Homo sapiens
gcctcataaaatgaattagggaggattccctctttttctattgattggaatcatttcacaagtaatggtaccagttcctccttgtacctctggtagaattyggctgtgaatccatctggtcctggactctttttggttggtaagctattgattattgccacaatttcagatcctgttattggtctattcagcgattcaact

SEQ ID NO: 407255 - DNA, 201 bp, Homo sapiens
ctgtgaagcagagggagcaaggattttattctctcttaaaaaaatgaagaaacagactcacaaagggagcaggactaatctgaggacacagaactggttaygggcaaatctgagactaataggtaagctccatctttaggcccatgttcatcccacagcacagctctgttccaaagagtgggatggtaggatggacagcct

SEQ ID NO: 407256 - DNA, 201 bp, Homo sapiens
gggcatttagtgctataaatttccctctacacactgctttgaatgcatcccagagattctgctatgttgcatctttattctcattggtttcaaagaacatstttatttctgccttgattttgttatgtacccagtagtcattcaggagcaggttgttcagttgccatgtagttgagcggttttgagtgagattcttttttt

SEQ ID NO: 407257 - DNA, 201 bp, Homo sapiens
gaacatgtttatttctgccttgattttgttatgtacccagtagtcattcaggagcaggttgttcagttgccatgtagttgagcggttttgagtgagattcttttttttttattatactttaagttttagggtacacgtgcacattgtgcaggttagttacatatatatacatgtgccatgctggtgcgctgcacccactaa

SEQ ID NO: 407258 - DNA, 201 bp, Homo sapiens
ctcaatagccacatgtgctaatggctattgcattggacagagcagactagaacatgtatagactgcttgctaagctatgtgaaatatgcaataaaaactactactgctgctcattcttctgtaaatgattaacataaaggaggaaaaactgaatatgccaacattttacatacgtcatctcataactccccagaccaccca

SEQ ID NO: 407259 - DNA, 201 bp, Homo sapiens
ttgttcaattcccacctatgagtgagaatatgcggtgtttggttttttgttcttggcgatagtttactgagaatgatgatttccaatttcatccatgtccytacaaaggacatggactcatcattttttatggctgcatagtattccatggtgtatatgtgccacattttcttaatccagtctatcattgttggacatttg

SEQ ID NO: 407260 - DNA, 201 bp, Homo sapiens
gcacctgttgtttcctgactttttaatgattgccattctaactggtgtgagatggtatctcattgtggttttgatttgcatttctctgatggccagtgatratgagcattttttcatgtgttttttggctgcataaatgtcttcttttgagaagtgtctgttcatgtcctttgcccactttttgatggggttgtttgtttt

SEQ ID NO: 407261 - DNA, 201 bp, Homo sapiens
gagatagcaaattaatattagataattattaaaataacctgtggccacaagaattctaagattgatggggtttgggagatgagcctatccagaacttttgscaggcaatgggtcctttaaaagttgtatctgtgaattttgaaatttttggcttctggaattattttcatagctctttcttttttttgtttctaacatttc

SEQ ID NO: 407262 - DNA, 201 bp, Homo sapiens
gtcctttgcccactttttgatggggttgtttgtttttttcttgtaaatttgtttcagttcattgtagattctggatattagccctttgtcagatgagtagsttgcaaaaattttctcccattttgtaggttgcctgttcactctgatggtagtttcttttgctgtgcagaagctctttagtttaattagatcccatttgtc

SEQ ID NO: 407263 - DNA, 201 bp, Homo sapiens
acagatggggactcacattgtgtgagcctgacaagtgccaggttcggaatttgccccgttaggctattttctcaagtaattctaatgatgtgaggatatascactcctagttttcagttgaaattcatgttcagaggggttaagcatttaagccaatggacataaactggtcagtggagaattcatagcatagcactaaat

SEQ ID NO: 407264 - DNA, 201 bp, Homo sapiens
attaatgtgtgggagtctcactctctttgtaggtcactcaggacttactttatgaatctgggtgctcctgtattgggtgcatatatatttaggatacttarctcttcttgttgaattgatccctttaccattaagtaatggccttctttgtctcttttgatctttgttcatttaaagtctgttttatcagagactagattt

SEQ ID NO: 407265 - DNA, 201 bp, Homo sapiens
gtgcatatatatttaggatacttaactcttcttgttgaattgatccctttaccattaagtaatggccttctttgtctcttttgatctttgttcatttaaastctgttttatcagagactagatttgcaatccctgcctttttttgttttccatttgcttcgtagatcttcctccatccttttattttgagcctatctgtgt

SEQ ID NO: 407266 - DNA, 201 bp, Homo sapiens
aggggttatgcaagtccagtgcttgctactgaaacaccccaaacagtcatcactccctccttttattcctccaaaaggtttcttgaaagtccttggattgkatatgttacccagatgagccacataacaatgagaatgagcacagaggagaaccgggactggctcaccactcaggtaatgatggagttcctgggggagaat

SEQ ID NO: 407267 - DNA, 201 bp, Homo sapiens
caaattctttgctctattaaaatttcagactttctatgattaaaaaagaaaaaaaaacacaaaaacctaatcagaggtgactcaagattggcatgtgctawaatctttttattctcatttatttttgtatgacagcattgaagccgggacatgcaaggatctgagccaagacccccagggagatcacttcagatccatgat

SEQ ID NO: 407268 - DNA, 201 bp, Homo sapiens
gattagatccagaggacctagtaaggcaaagccttctgaaggttaactttgtaactaagagctggcctgacattacaaagaaattaccaaaaaaactgatkaatggaatgagaaaccaattgaggaatcactgagtgaagctgagaaggtctttgtaagaagagaagagaagcagaaacagaaagccaaaatcatagtttc

SEQ ID NO: 407269 - DNA, 201 bp, Homo sapiens
atatcacactctggggactgtggtggggtggggggagggatagcattgggagatatacctaatgctagatgacgagttagtgggtgcagcgcaccagcacrgcacatgtatacatatgtaactaacctgcacaatgtgcacatgtaccctaaaacttaaagtataaaaaaaaaaataaaaaaaaaaactccaacttaaaac

SEQ ID NO: 407270 - DNA, 201 bp, Homo sapiens
tgtcctgtgcttatatcctggaagaccgaatcctcctttaaggtgatactcaaaatctgtccattactgtttgtccactcccacgcatttccaactagtcyctttaccatgtttcctgttcctaaaatatttaaaggtttaggaataactgcaaatagctattattactttatcactatgatttttttgtaatttttgaca

SEQ ID NO: 407271 - DNA, 201 bp, Homo sapiens
cattccctctcaaagaagaagaaaaaaaaactagtaaaaagcccttgcccagtgaaaagccctgggacccccctatcacacttgccccctccatatatctyacaatataggagacagaaagatcaaggggcagcaggtgggttagaggaggaaagacctggagaccatgggggagccaaaccaactcttcctttcaatcct

SEQ ID NO: 407272 - DNA, 201 bp, Homo sapiens
agaaaaagaataaaattcttatcccttcatcaaacagtaatttcatgtctctaagcacctacctcatgccagggaacttacggatataatttccttttcaytgactgcttttaattatgttttatatctatgtctatgttcccagcccaaatatgttgcatgagaggcgagactatgtccacttttcttatccctgtgtcc

SEQ ID NO: 407273 - DNA, 201 bp, Homo sapiens
atcttagatacaaagtgagtgcagagttttgttctcctacaagggaaatggccagagatggatgaagcgattctcagagtgtgcaaaaaatctccagtagkgggggttgagtacacaaggaaaagttcagacacagagactgaccaaaaatgggaaacagaaattctaggcctaggggacaaaggaaagagggagtcaaag

SEQ ID NO: 407274 - DNA, 201 bp, Homo sapiens
cgtgcaggtttgttacatatgtatacatgtgccatgtgctgcacccattaactcgtcatttagcattaggtatctctcctaatgttatccctcccccctamccccaccccacaacagtccccggtgtgtgatgttcctcttcctgcgtccatgtgttctcattggcgccccatttttaaaaggtagccgattcccagccta

SEQ ID NO: 407275 - DNA, 201 bp, Homo sapiens
tgagaaactatgctagtgtttgttcaagtttcttagtttggagagtggatgaaatcatttgtgctgagagtctgcaattctcgtaggccaaggttgaggcytagtcaagaagagggctcagaggatcctaactaaagttcgaccagggagacagcctttgtcaaaagccaggggatgtccttaaggatcctctgtgcctgg

SEQ ID NO: 407276 - DNA, 201 bp, Homo sapiens
ttcctagcccagccttttagacttgaaatgcccagtgcagtccaggatgaggctgtggatctccaccttgcatctttccttggggccagcattccaggaaygctgcattaaggagatagactcctgctgacttgcattggggtcacattttttaattaaatatatttactggatttattaaataaatgtattaagtacatt

SEQ ID NO: 407277 - DNA, 201 bp, Homo sapiens
atcatcagccatgacacccggcgcttccgctttgccctgccgtcaccccagcacatcctgggcctccctgtcggtgagtcacgcccctgctgggcccattyggagcccggcaggctgctggggcactagatcagagagatggaagctttacatttccaccagggagagcagggaagccttcaggaggaggtgacagctgcc

SEQ ID NO: 407278 - DNA, 201 bp, Homo sapiens
tcgtcctgttgcccaggctggtctcaaactcctgggctctagtgatccccgcacctccacctcccaaagtgttgggattacaggcatgagccgtggtgccyggcctgactcctttttttcaaagctctgattatgatttaaaaccatcctctccctcttttgccttgcccccagtaaaggctgcttccatcggtcacttgc

SEQ ID NO: 407279 - DNA, 201 bp, Homo sapiens
ccccagttacttcggggactgggctgggaggattgcttgggtacaagaggtcaaggctatagtgagctgagatcacgccactgcattccagcctgggtgatagagtgaaaccctgtctcaaaaaaaaaaaagagctcttatgtactcttcacccagatgtacctaatgttattatttgctacatttgctttatttctctct

SEQ ID NO: 407280 - DNA, 201 bp, Homo sapiens
agagaacatcatctgccagggcccaagtctccaccctgggcttgtgcctggtgcctctgactcaggcttcacaggaatctcaggcttccatggcacggagytggccgtttcctgtaactgttggggcaagtgtctgtaattgtcccaggagctcacagagaagttgacaaccagagagaagcaaaaaaatacaaaatgaaa

SEQ ID NO: 407281 - DNA, 201 bp, Homo sapiens
cctcccaggttcaagtgattctcctgcctcagcctcctgagtagctgggattacaggcatgcgccaccacgcctggctaacattgtagttttagtagagaygggatttctccatgttgttcagactggtctcgaacttccgacctcagatgattcgcccacctcggcctcccaaagtgctgggattacaggcatgagccac

SEQ ID NO: 407282 - DNA, 201 bp, Homo sapiens
cgcccaggcctggcctcaggagcccgtctttggctggaggacggacactggacacatagtcatggggaagccagtgctccctgcaggggacaggtacctgygaccgagcttccagaagggccaccagggatgggtggggttggctggtgagagtggctccctagcaggtgacagtgaaggtgagatctggggctgagtagg

SEQ ID NO: 407283 - DNA, 201 bp, Homo sapiens
gcgacctttacccgctcaaaaattcgtctcacattagcagtgaggattcgggcgtcaccccgaatcgttattttccttactcataagtttaaggcataagracgtttttagtttatttcctaggtaatgaattctattctcattaggcgtatgatgactatcgtagttgactgttgaggtcatgatccagttccattgaag

SEQ ID NO: 407284 - DNA, 201 bp, Homo sapiens
agtaacggagaaaacaacgaaaaaaacgcattcaccacctaccaacaagaaacaaaaaacacgaccaccccacagtcagtctactttttaggcgtgaatarggtcgggcagatcgcaactcccaggcatcccgcaaagtaggcgggtcaccttgagggcgacctttacccgctcaaaaattcgtctcacattagcagtgag

SEQ ID NO: 407285 - DNA, 201 bp, Homo sapiens
cgtgccactgcactccagcctgggcaacagagcgagactccatctcaaaaaaaataataatttcaaagttactgtaaaagaacatttatgggctggacgcrggggcttatacctgcaatcctagaacttggaaggctgaggctggctgttggcttgagctcagaagtttgagattagcctgggcaacatggtgaaaccgca

SEQ ID NO: 407286 - DNA, 201 bp, Homo sapiens
ttctttatatttttagtagagacggggtttcaccatgttggccaggctggtctcgaactcatgagctcaagtgatccacccacctcagcctcccaaagtgmtgagattacaggcatgagccaccatgcctggcctaaaaagaaagttacacatagttaatagaaaaagaaaagtgaaaagatgcacacaaaaatcctaaca

SEQ ID NO: 407287 - DNA, 201 bp, Homo sapiens
caaaccctggtctctctgacccaagtccacagctgccaactggggccttaaaggaggcctgggatgagtgaaacacctgggccatgctgattaaatgggtrgtggccagagaccccagctgggtggccctgggcatgggtgaggggtgggctaggcatccacagcccttcctttagacccatgggtcaaataccaagggcc

SEQ ID NO: 407288 - DNA, 201 bp, Homo sapiens
catgcctggcctaaaaagaaagttacacatagttaatagaaaaagaaaagtgaaaagatgcacacaaaaatcctaacagtcattatttctgaagggtttcrggtactttttcttccatattttctgtatttttttccttgagttcatctagcccaaagcctgtccctgtccctgtcctcaccccattagggcagaaagggc

SEQ ID NO: 407289 - DNA, 201 bp, Homo sapiens
tcaggaagagcagcactttgggctggacattgagagtccactcccggcccaccctgaatggctatatgaccttggcaggtcacttcatctatctgagggayagataacagtgtcatgtggtgagcgatgcttggagggctggctttggtgtactccgggcaggtcactcccctttcctggcctcagtttcctcacgtgctg

SEQ ID NO: 407290 - DNA, 201 bp, Homo sapiens
agcccgtgaagccagctgcccgcggaggggccttaagctgggctgtgcactgacgcagctgtgctggaaaaacagaactccagggagcaccaagcacaacyccagctcctaatgtcattcaagttcattgccagggcccccaacaatggtgatttcctgtgaatgtaacttcggccaactttttccctagactctattcca

SEQ ID NO: 407291 - DNA, 201 bp, Homo sapiens
caccactgtgggagggccagggaggaaatgggggaaggtgcctcgcagcccgtgaagccagctgcccgcggaggggccttaagctgggctgtgcactgacrcagctgtgctggaaaaacagaactccagggagcaccaagcacaactccagctcctaatgtcattcaagttcattgccagggcccccaacaatggtgattt

SEQ ID NO: 407292 - DNA, 201 bp, Homo sapiens
gaaaccaggctccaccctgggcctccttgagctacatttgtcccctcattgtcacacggggagcctggttgttcccaccttgcaccactgtgggagggccrgggaggaaatgggggaaggtgcctcgcagcccgtgaagccagctgcccgcggaggggccttaagctgggctgtgcactgacgcagctgtgctggaaaaac

SEQ ID NO: 407293 - DNA, 201 bp, Homo sapiens
tttttcgtgtacatttgttgccactgtgacccacaattcaagattagttgaggtactgctgtagcattaaatgtaagctgaaattccagaggttgagaaaraaagtggtaacaggccagtctggctgtaccgtagctaagcgaaggatgaggagagccccaaggactccaggcaggggcagtgagtatttcccccacagag

SEQ ID NO: 407294 - DNA, 201 bp, Homo sapiens
tgaacaggcttgaggactgaatgaggtggcgtgagcagaggctgcccgcctggctccgggcagcccctgttgttgggagcagacactggaaggaaggtccytgactctcatctgctgcccacggcgagcctggccttctgagcagtgcttgactcccagctcagccacgggagctgcgtatgtcctctctgagtgtggaac

SEQ ID NO: 407295 - DNA, 201 bp, Homo sapiens; identical to SEQ ID NO: 91209

SEQ ID NO: 407296 - DNA, 201 bp, Homo sapiens
cgcaggcgggcgcgatgacgaggcgcgtctctgttgagtgtctccaggggcagtctgccacccatccttcctgactgcctggccctgtcccctgcagaccragaaggacatcctgctgcgacctgagctggaggaactcaggaacaaacattctgcacgcttcaagctctggtacacgctggacagagcccctgaaggtga

SEQ ID NO: 407297 - DNA, 201 bp, Homo sapiens
gctctgtccacaccaccctctgctcctcccagaaaggagcacatgggctctgggacttgcaccacctggctagcacctaggagctgggtcacctgggcccrtccctgagggagcagccgcccttctcagatgaccaccttgggttccaggcctccaggctgagagacccaggcctggagggggtggtggatgtgtgggttg

SEQ ID NO: 407298 - DNA, 201 bp, Homo sapiens; identical to SEQ ID NO: 91216

SEQ ID NO: 407299 - DNA, 201 bp, Homo sapiens
aggggccagtgctgacccctggtggcaacaggcagcagcacctgcaccaccaccacgggacagttacctgccaatgagaggaatagttgggtgatctcctrgcatttttcgtgtacatttgttgccactgtgacccacaattcaagattagttgaggtactgctgtagcattaaatgtaagctgaaattccagaggttgag

SEQ ID NO: 407300 - DNA, 201 bp, Homo sapiens
agtgctttctgtgtggagtgttggggatacagtggtgacgacagacacagatcctgcggtctgctccagggccacttctggagacttgtggggagccggcrgcctggggttggaggccagcattcggggacttgccatcggagccactaatacgcgggtgtctttttcttggcccagcgcccacccaggctcacttccatg

SEQ ID NO: 407301 - DNA, 201 bp, Homo sapiens
gagcacatgggctctgggacttgcaccacctggctagcacctaggagctgggtcacctgggcccatccctgagggagcagccgcccttctcagatgaccascttgggttccaggcctccaggctgagagacccaggcctggagggggtggtggatgtgtgggttgtcaccgtgtccggcctctggctggacctgctgtcct

SEQ ID NO: 407302 - DNA, 201 bp, Homo sapiens
ggcgtggaaacagcctggagccggatcctaagcccacctctgaggcctgtgctcttggaggacaagcgggcttttctgacaaacaggacaggctgtgccgygccctcatccaggagtctgggctcttgtcctggttctggaaacttctaggcaaaataaaaacactgggagggtgggagcctgttgtcccttcactaattc

SEQ ID NO: 407303 - DNA, 201 bp, Homo sapiens
tcctcgcttggcccagaatgtctccagcacattctgagccaggcctcctggcttacgggctccccacagtctggaggaggctggctgggggcctggtgctytaggtgtcttatctaagacatgcaggccccatgggaggcctctcccaacactttgtgggatccaggccaggggttggccctggagtctgccagccacact

SEQ ID NO: 407304 - DNA, 201 bp, Homo sapiens
ctctcatctgctgcccacggcgagcctggccttctgagcagtgcttgactcccagctcagccacgggagctgcgtatgtcctctctgagtgtggaacaggygtggaaacagcctggagccggatcctaagcccacctctgaggcctgtgctcttggaggacaagcgggcttttctgacaaacaggacaggctgtgccgcgc

SEQ ID NO: 407305 - DNA, 201 bp, Homo sapiens
cctggctccgggcagcccctgttgttgggagcagacactggaaggaaggtccctgactctcatctgctgcccacggcgagcctggccttctgagcagtgcytgactcccagctcagccacgggagctgcgtatgtcctctctgagtgtggaacaggcgtggaaacagcctggagccggatcctaagcccacctctgaggcc

SEQ ID NO: 407306 - DNA, 201 bp, Homo sapiens
ttgtcacacggggagcctggttgttcccaccttgcaccactgtgggagggccagggaggaaatgggggaaggtgcctcgcagcccgtgaagccagctgccygcggaggggccttaagctgggctgtgcactgacgcagctgtgctggaaaaacagaactccagggagcaccaagcacaactccagctcctaatgtcattca

SEQ ID NO: 407307 - DNA, 201 bp, Homo sapiens
aactcgggcggggcctcctggcctgtgtcccctgcgttgcacatgggacctgccacctcagtgcccactggggtttgtggactaaacgactgaccgacggkgatggtctgcctgtggctgcctccccagataagaacttttacctataaaaagcccaccccttctctttagtggccagaaagtgtccccgggctcaagtct

SEQ ID NO: 407308 - DNA, 201 bp, Homo sapiens
tccactgctcctggctgtggtgcgccctctctgccggtgtctgtctccccgtctggcttgaactcgggcggggcctcctggcctgtgtcccctgcgttgcwcatgggacctgccacctcagtgcccactggggtttgtggactaaacgactgaccgacggtgatggtctgcctgtggctgcctccccagataagaactttt

SEQ ID NO: 407309 - DNA, 201 bp, Homo sapiens
gcccctccactgctcctggctgtggtgcgccctctctgccggtgtctgtctccccgtctggcttgaactcgggcggggcctcctggcctgtgtcccctgcrttgcacatgggacctgccacctcagtgcccactggggtttgtggactaaacgactgaccgacggtgatggtctgcctgtggctgcctccccagataagaa

SEQ ID NO: 407310 - DNA, 201 bp, Homo sapiens
ctctggctttctggaggtgaaaccttcgcccctccactgctcctggctgtggtgcgccctctctgccggtgtctgtctccccgtctggcttgaactcgggyggggcctcctggcctgtgtcccctgcgttgcacatgggacctgccacctcagtgcccactggggtttgtggactaaacgactgaccgacggtgatggtct

SEQ ID NO: 407311 - DNA, 201 bp, Homo sapiens
aggtcaggggctgggaggcagctgtctcctgggcccccaggtggctggggtgaggtggtctgtgtgtgtgagtgtgtgtgtgagtgtgcacgcagcacagstgaggaggcacaggggtgggaccttggcctcagccacctgccttctgtttacttggcccactgctggtgagggttggggtggtgctgtggacgaggacgg

SEQ ID NO: 407312 - DNA, 201 bp, Homo sapiens
cgggcgtcaccccgaatcgttattttccttactcataagtttaaggcataaggacgtttttagtttatttcctaggtaatgaattctattctcattaggcstatgatgactatcgtagttgactgttgaggtcatgatccagttccattgaagtttgtctcacttgttaataatgtattttgttgcttttcatttaatttt

SEQ ID NO: 407313 - DNA, 201 bp, Homo sapiens; identical to SEQ ID NO: 91210

SEQ ID NO: 407314 - DNA, 201 bp, Homo sapiens
tgcacagctctgctgagattctggggatgaccgggatggggggccctgaatgttctgtgcactggcggccttggcagcagcacggcgggcaggctttgtgrtgcagcgcctgtgtctggctgagggggctgccttgcggggagctccctgagcaccccctcccctggctgcttcctccaaaactcagaactcccttcacca

SEQ ID NO: 407315 - DNA, 201 bp, Homo sapiens
actttttaggcgtgaatagggtcgggcagatcgcaactcccaggcatcccgcaaagtaggcgggtcaccttgagggcgacctttacccgctcaaaaattcrtctcacattagcagtgaggattcgggcgtcaccccgaatcgttattttccttactcataagtttaaggcataaggacgtttttagtttatttcctaggta

SEQ ID NO: 407316 - DNA, 201 bp, Homo sapiens
gatcgcgggagggacaggtacacggaaccccccactgaggcgtccggcggctcatgttaagggtggggttggggtgtgggtgaggcgcaggttctgagtgyctgggagctaccagaggtcaggggcccaggcccagtggtcctggcccctccaccccagtacacctgggcggggcggtgcctgtgaacaggcctcgctcag

SEQ ID NO: 407317 - DNA, 201 bp, Homo sapiens
  misc_feature (1)...(201): n = A,T,C or G
gtgggcatgatcgcgggagggacaggtacacggaaccccccactgaggcgtccggcggctcatgttaagggtggggttggggtgtgggtgaggcgcaggtnctgagtgcctgggagctaccagaggtcaggggcccaggcccagtggtcctggcccctccaccccagtacacctgggcggggcggtgcctgtgaacaggcc

SEQ ID NO: 407318 - DNA, 201 bp, Homo sapiens
caggcccctggctctgtgtggatgggtgactctcgtcaggccagctgtccctctctgggaactgagtctccctggctgtagagggggtaagttgctggcayaggggttgcagacaggccactcctgggggccacgtctcacccactgccagcctctatttggctttctcagcatctgaaacaagcaagcaagaggacagag

SEQ ID NO: 407319 - DNA, 201 bp, Homo sapiens
  misc_feature (1)...(201): n = A,T,C or G
tccccggatatgtcaggtggaggctgactcctgggaggacggggtgaaggacggggtgcaggacaggtaggatttgacggctgggtggatggggctccacnggagaaggccatgtgtgggcctcagaagaagctgcagaagaggcacttgtctcccactgtgggcaagagctcgcccctgagacctggagctggggactga

SEQ ID NO: 407320 - DNA, 201 bp, Homo sapiens
tgatgggctttctggggtctgctgcggggttcgaggtggaggttcacaggagaagatgcaggcgttaggggcagcagcccggaacctgaaacacacatgcygagtgggaagtaagaggcagcatgacggccccagcagggacgtttttatgaaaattagaaatacaagctttcagccaggcacagtggctcacacctgtaa

SEQ ID NO: 407321 - DNA, 201 bp, Homo sapiens
gatggggtgtgtgtgtgtgtacgggagtatgtgaatgggcgatgtcactgactgcgactgaacgtgtgtgtgtgtgcgatgtcactatgtcagagggtttygcacgtttagcaacaaggaacagaacccggatgacacgggggcatcctcccaatgctcagtgggccaggctcccagcaaggccaggctcccactgaccct

SEQ ID NO: 407322 - DNA, 201 bp, Homo sapiens
tgatgtcctgccctgttggagaggtctgttgtccccctctaagtgatgacaccatccacatgtggactttgccacgtttggatgtaagcgcctctgcagcrccgaccttccgcatggcttcttcacactccctctcctggccatgctgggtactggggaccccacagggagtgcaccctcaggacgctgggtttggttcca

SEQ ID NO: 407323 - DNA, 201 bp, Homo sapiens
ttttcttcccgaagcagtttgtaaaccagttaaaccactcaatgataactgactcaggccaggatcctggctagatgcagaaaccattatatgaagtttaytggggatcagggcattcacagggtatcaaagcaaaaggttatcttacatcggggaggcctggcaggcgccaccaacaatgggacaagctgacatcacata

SEQ ID NO: 407324 - DNA, 201 bp, Homo sapiens
ctggggaccgttcagcagctttgggcctctctccagatcatcagccatgacacccggcgcttccgctttgccctgccgtcaccccagcacatcctgggccyccctgtcggtgagtcacgcccctgctgggcccattcggagcccggcaggctgctggggcactagatcagagagatggaagctttacatttccaccaggga

SEQ ID NO: 407325 - DNA, 201 bp, Homo sapiens
ggtcgggcagatcgcaactcccaggcatcccgcaaagtaggcgggtcaccttgagggcgacctttacccgctcaaaaattcgtctcacattagcagtgagrattcgggcgtcaccccgaatcgttattttccttactcataagtttaaggcataaggacgtttttagtttatttcctaggtaatgaattctattctcatta

SEQ ID NO: 407326 - DNA, 201 bp, Homo sapiens
tgcagtctcggaggccgggggaagattccgcctcttattctcgctcccatccggggggcgccatcttgcttcctttatggcggcgaacgaggcccagagakgccaccgtcccgcgcggggcagcacagcggcgggagagctcggagcgcagagggccgcatccccagttcccagtctccatccccggcagaagcaggcgga

SEQ ID NO: 407327 - DNA, 201 bp, Homo sapiens
agagattcctgagggagttgctccactaccctcctgattctctgctctctctgggcctcattttcctcctctagaaaatgactgtttctctgccccgtctrcctcccagcctttcccaaggatcaaactcctcagcaggatgggtcagagatcctcagctaacatgcccaaagtaaaaggggtttgtagggagtttctgaa

SEQ ID NO: 407328 - DNA, 201 bp, Homo sapiens
ttgaatgccgggtggggtgcaggggagtgggttgacaagacccaggggtcacccgcaggatgatctctggcccagagtgaccccgttctgtcctgcaggcyagcacatctacctctcggctcgaattgatggaaacctggtcgtccggccctatacacccatctccagcgatgatgacaagggcttcgtggacctggtcat

SEQ ID NO: 407329 - DNA, 201 bp, Homo sapiens
aggccaggcaggaccggcccctgcagtctcggaggccgggggaagattccgcctcttattctcgctcccatccggggggcgccatcttgcttcctttatgrcggcgaacgaggcccagagaggccaccgtcccgcgcggggcagcacagcggcgggagagctcggagcgcagagggccgcatccccagttcccagtctcca

SEQ ID NO: 407330 - DNA, 201 bp, Homo sapiens
tcgcccctgagacctggagctggggactgagggctgcgggggtgtcttgcaggtttacttcaaggacacccatcccaagtttcccgctggagggaagatgyctcagtacctggagagcatgcagattggagacaccattgagttccggggccccagtgggctgctggtctaccagggcaaaggtgattcgggtcggaatcc

SEQ ID NO: 407331 - DNA, 201 bp, Homo sapiens
tagcccatatataccgggaagacccctgctgtctttcagcattaccccacccaggaaacaagtgcagcaaaaatctttcccttgttgcacaataacccatmgaggtgggaagtggagcttgaaacagtgtgactacgtcaggcccagggaacaggggggcagaggggggcagttccccagagagggcatctttctctaatt

SEQ ID NO: 407332 - DNA, 201 bp, Homo sapiens
cacctgtgaatagccactgcctgccagctggggcaacatagccaattcctgtctcttaaaaacacacacacacacacacacacacacacacacacacacamtaaaaagaaatcgctgtgaaattgaaaggtgtcttacatacctgcacattttgtacactagcagtttatgcccatgcagtttttacaaggtactttcaga

SEQ ID NO: 407333 - DNA, 201 bp, Homo sapiens
cgaggcaggcagatcatgaggtcaagagatcgagaccatcctggccaacatggtgaaactctgtctctactaaaaatacaaaaattagctgggcgtggtgkcgcgtgcctgtagtcccagctactcggaggctgaggcaggagaatggcttgaacccgggaggcagaggttgcaatgagccgagatggtgccactgcactc

SEQ ID NO: 407334 - DNA, 201 bp, Homo sapiens
gggaggccgaggcaggcagatcatgaggtcaagagatcgagaccatcctggccaacatggtgaaactctgtctctactaaaaatacaaaaattagctgggygtggtgtcgcgtgcctgtagtcccagctactcggaggctgaggcaggagaatggcttgaacccgggaggcagaggttgcaatgagccgagatggtgccac

SEQ ID NO: 407335 - DNA, 201 bp, Homo sapiens
agccagggcactggctctgggagtctagctgctgtttctcttctactaacgaaaggagcaggccgggcgcggtggctcacgtctgtaatcccagcactttkggaggccgaggcaggcagatcatgaggtcaagagatcgagaccatcctggccaacatggtgaaactctgtctctactaaaaatacaaaaattagctgggc

SEQ ID NO: 407336 - DNA, 201 bp, Homo sapiens
cctgaggtcaggagttagagaccagcctggccgacatggagaaaccccgtctctactaaaaatacaaaaaaattagctgggcatggtggtgcgcacctgtmatcccagctacttgggaggctgaggcaggagaatcacttgaagctgggaggcagaggttgcagtaagccaagatcatgctactgtactccagcctgggca

SEQ ID NO: 407337 - DNA, 201 bp, Homo sapiens
gtggatcacctgaggtcaggagttagagaccagcctggccgacatggagaaaccccgtctctactaaaaatacaaaaaaattagctgggcatggtggtgcrcacctgtaatcccagctacttgggaggctgaggcaggagaatcacttgaagctgggaggcagaggttgcagtaagccaagatcatgctactgtactccag

SEQ ID NO: 407338 - DNA, 201 bp, Homo sapiens
tgcgccaccacgcctggctaacattgtagttttagtagagacgggatttctccatgttgttcagactggtctcgaacttccgacctcagatgattcgcccrcctcggcctcccaaagtgctgggattacaggcatgagccaccacgcctggccatctcatttctattcttcctccaaatattttctggtacatgggtgtct

SEQ ID NO: 407339 - DNA, 201 bp, Homo sapiens
ccccggcagcccccacgaccgtccaccccggcccgcccggcccgggctcccgctctctcggccgctctccgcggagccccgcagcccaaggggcagcaccyatcccgggacagcggcctctcttccccaccgaggcgtctgcagggctccccgtagcggcgcggggctcggggacacggactcgaaggaacctgaacacct

SEQ ID NO: 407340 - DNA, 201 bp, Homo sapiens
acacgaccaccccacagtcagtctactttttaggcgtgaatagggtcgggcagatcgcaactcccaggcatcccgcaaagtaggcgggtcaccttgagggygacctttacccgctcaaaaattcgtctcacattagcagtgaggattcgggcgtcaccccgaatcgttattttccttactcataagtttaaggcataagga

SEQ ID NO: 407341 - DNA, 201 bp, Homo sapiens
gatgatctctggcccagagtgaccccgttctgtcctgcaggccagcacatctacctctcggctcgaattgatggaaacctggtcgtccggccctatacacmcatctccagcgatgatgacaagggcttcgtggacctggtcatcaaggtgaagcctctgggtcatgactgtggagggggtgtgggtgggtggccatggcaa

SEQ ID NO: 407342 - DNA, 201 bp, Homo sapiens
ctgtcctgcaggccagcacatctacctctcggctcgaattgatggaaacctggtcgtccggccctatacacccatctccagcgatgatgacaagggcttcrtggacctggtcatcaaggtgaagcctctgggtcatgactgtggagggggtgtgggtgggtggccatggcaacagcccatgtggaccccctggacagggaa

SEQ ID NO: 407343 - DNA, 201 bp, Homo sapiens
ggagagggtgctcctggcagagggggcagcgtgagcagaggcctggtagtgtggacaagccggtgtgtttggggaaaggcaggctcctgcactgaccccgmgggtcctgtcgtttcagttgggccatatggtgctcttcccagtctggttcctgtacagtctgctcatgaagctgttccagcgctccacgccagccatcac

SEQ ID NO: 407344 - DNA, 201 bp, Homo sapiens
ggttcctgtacagtctgctcatgaagctgttccagcgctccacgccagccatcaccctcgagagcccggacatcaagtacccgctgcggctcatcgaccgrgaggtgagtgccggccgccgccgctgcctcgtcagcatcacagcattgcccagcacctactctgtgctcagggcatggtcctgctctgaagtagatactg

SEQ ID NO: 407345 - DNA, 201 bp, Homo sapiens
gacacccatcccaagtttcccgctggagggaagatgtctcagtacctggagagcatgcagattggagacaccattgagttccggggccccagtgggctgcyggtctaccagggcaaaggtgattcgggtcggaatcccttggttacacggcaggctcagagaattggagagcttgggcgtgctgggtgcagggtgcaggcc

SEQ ID NO: 407346 - DNA, 201 bp, Homo sapiens; identical to SEQ ID NO: 91197

SEQ ID NO: 407347 - DNA, 201 bp, Homo sapiens
gccgggcctcaccccttctctctccccagggaagttcgccatccgacctgacaaaaagtccaaccctatcatcaggacagtgaagtctgtgggcatgatcrcgggagggacaggtacacggaaccccccactgaggcgtccggcggctcatgttaagggtggggttggggtgtgggtgaggcgcaggttctgagtgcctgg

SEQ ID NO: 407348 - DNA, 201 bp, Homo sapiens
ccctgtgcagcccagcctcggtcatggctgccccacttcctcaggggcttgcaggggcagtggcttctagagcccctctcgagtccatgtccccccgcagyccggactccaaagacccagtgctcccttgtgcctggtttctgagtaaatagcacgtcatctttaccaacaaaagccaaagaagggggtcttggcagagaa

SEQ ID NO: 407349 - DNA, 201 bp, Homo sapiens
ttggttttgcctgttcagtgggcaccaagaatccactgaggggttatctggtcagaggtgggagcccttcttcctccacatgttctcaaggagctctgccmaggccagggaactttctctggctcactcctggcaggctgcagctttctgccccaccacgccatttccctggggcagcaaacacagggaaagggaagcgga

SEQ ID NO: 407350 - DNA, 201 bp, Homo sapiens
ccgggcctcaccccttctctctccccagggaagttcgccatccgacctgacaaaaagtccaaccctatcatcaggacagtgaagtctgtgggcatgatcgygggagggacaggtacacggaaccccccactgaggcgtccggcggctcatgttaagggtggggttggggtgtgggtgaggcgcaggttctgagtgcctggg

SEQ ID NO: 407351 - DNA, 201 bp, Homo sapiens
cgctcagcacgtgcgaggcccggccggctattttgcaggcatcaccccgatgctgcaggtgatccgcgccatcatgaaggaccctgatgaccacactgtgygccacctgctctttgccaaccaggtcagtgggcatccccatgatggggaaactcagcttaccctgagaggggacttcgggcctggtcaggtgctgttcca

SEQ ID NO: 407352 - DNA, 201 bp, Homo sapiens; identical to SEQ ID NO: 215835

SEQ ID NO: 407353 - DNA, 201 bp, Homo sapiens
cgagggcaaggcaggggagggcgccgcccagcgccccgtggggcttccgccgcctcgaggcagacccggatccagagggcgcctggacaaggtagggcccscatcccgccccggctccgcgtgccctcacaagaatcacccgtctccgaccgtcacctcctcccgctcccgggcctccccggcagcccccacgaccgtcca

SEQ ID NO: 407354 - DNA, 201 bp, Homo sapiens
gctcagcacgtgcgaggcccggccggctattttgcaggcatcaccccgatgctgcaggtgatccgcgccatcatgaaggaccctgatgaccacactgtgtrccacctgctctttgccaaccaggtcagtgggcatccccatgatggggaaactcagcttaccctgagaggggacttcgggcctggtcaggtgctgttccag

SEQ ID NO: 407355 - DNA, 201 bp, Homo sapiens
tggccctgtcccctgcagaccgagaaggacatcctgctgcgacctgagctggaggaactcaggaacaaacattctgcacgcttcaagctctggtacacgckggacagagcccctgaaggtgagtgagggaggcccctcactgggtgggtgggaggtgccagcccacagttcacctttgcccagctgtttgtggcgttgagc

SEQ ID NO: 407356 - DNA, 201 bp, Homo sapiens
agtgcagtggcatgatctctgtcgactgcaacctccgccttcagggttcaagcgattctcctgcctcagcctcccaagtagctgggactacaggcatgcgycaccacgcccagttaatttttgtagttttagtagagccagggtttcaccatgttggccaggatggtctcgatctcttgacctcgtgatctgcctgcccca

SEQ ID NO: 407357 - DNA, 201 bp, Homo sapiens
ctggctcttcagaggaaatggagctttttctcatggtactgagcatagaagcccaggtaatgctcagtgacaggtgtcatgaggctggtctttatagcttstcctagtgggcaccaaaatggatgatgaagctttctggatgagggtggtggggagagggtgctcctggcagagggggcagcgtgagcagaggcctggtag

SEQ ID NO: 407358 - DNA, 201 bp, Homo sapiens
ccgttggaaccagcttgtggaataaactttcagaaacagatcgaagaagataggtggctggaaggggcagcaacgatgaggctggagagggaggcggggcyaggctggtgctccggagacttgctgggtggccctaggagcacagtgaggccagtgtggctggaggggagtggggaagaagaggggacggggcaggttcac

SEQ ID NO: 407359 - DNA, 201 bp, Homo sapiens
gtcacccaggctgctttctgcaacctcaaactcctgggcacaagccttctgagtagctgggaccatgtgcatgcaccactatgcctggctctgttactgtygttcctttttgttgttgttgagatggactttcgctcttgttgcccaggctggagtgcaatggcacaatctcgactcaccgcaacctccacttcccaggtt

SEQ ID NO: 407360 - DNA, 201 bp, Homo sapiens
acctctgcctcccaggttcaagcggttctcctgcctcagcttcccaagtagctaggattacaggtgcccaccaccacgccctgctaattttttttttttttgtatttttagtagagtcagggtttcaacatgttggccaggctggtctcgaactcctgacctcaggtgatccacccgacttggcctctcaaagtgctcgaa

SEQ ID NO: 407361 - DNA, 201 bp, Homo sapiens
gtggtggtgtgatcttggctcactgcaacctcctccacaggcaaccttctgcctcagcctcctgagtagctgggattacaggcatgcgccactgtgcccgsccagggattcaggttttctaaccaacttttagggtctttttttttttttttttcaacagagacagagttttgctatgttgcccaggctggtcgcgaacta

SEQ ID NO: 407362 - DNA, 201 bp, Homo sapiens
agacgcccgctaccatacctggctaatttttgtatttttggtagagacgcggtttttccatgttgtccaggctggtctccaactcctgacctcaggtgatycacctgcctcggcctcccaaagtgctgggattacaggcgtgagccaccgtgcccggtccccccccactttttttttttttgagacagagtctcgctctgt

SEQ ID NO: 407363 - DNA, 201 bp, Homo sapiens
tttttttttttttttgagacagagtctggctctgtcgcccagggtggagtgcagtggcgtgatctccgctcactgcagcctccgcctcccgggttcaagcratctgggattacaggcatgcgccaccactccaggctaatttttgcatttttagtagagacagggatttcaccatgttggccaggctggtctcggactcct

SEQ ID NO: 407364 - DNA, 201 bp, Homo sapiens
agttagccaagatcacaccactgtactccagcctgggtgatagagtgagactccatctcaaataaataaataaataaataaataaataaataaataaataagtgaaccacgcagggtccttccggggggtgaccttcagctggccattcgggatgatggactttccatcccagaaccatggctccatttgtccgtaacctt

SEQ ID NO: 407365 - DNA, 201 bp, Homo sapiens
cagttagccaagatcacaccactgtactccagcctgggtgatagagtgagactccatctcaaataaataaataaataaataaataaataaataaataaataagtgaaccacgcagggtccttccggggggtgaccttcagctggccattcgggatgatggactttccatcccagaaccatggctccatttgtccgtaacct

SEQ ID NO: 407366 - DNA, 201 bp, Homo sapiens
agctcgcccctgagacctggagctggggactgagggctgcgggggtgtcttgcaggtttacttcaaggacacccatcccaagtttcccgctggagggaagrtgtctcagtacctggagagcatgcagattggagacaccattgagttccggggccccagtgggctgctggtctaccagggcaaaggtgattcgggtcggaa

SEQ ID NO: 407367 - DNA, 201 bp, Homo sapiens
acagttagccaagatcacaccactgtactccagcctgggtgatagagtgagactccatctcaaataaataaataaataaataaataaataaataaataaataagtgaaccacgcagggtccttccggggggtgaccttcagctggccattcgggatgatggactttccatcccagaaccatggctccatttgtccgtaacc

SEQ ID NO: 407368 - DNA, 201 bp, Homo sapiens
cacagttagccaagatcacaccactgtactccagcctgggtgatagagtgagactccatctcaaataaataaataaataaataaataaataaataaataaataagtgaaccacgcagggtccttccggggggtgaccttcagctggccattcgggatgatggactttccatcccagaaccatggctccatttgtccgtaac

SEQ ID NO: 407369 - DNA, 201 bp, Homo sapiens
cctctcgagtccatgtccccccgcagcccggactccaaagacccagtgctcccttgtgcctggtttctgagtaaatagcacgtcatctttaccaacaaaarccaaagaagggggtcttggcagagaacaggggccagggttcagggcaagtgccttcaaacaaggacaggtacctgcagcagaggctccaggaaggccggc

SEQ ID NO: 407370 - DNA, 201 bp, Homo sapiens; identical to SEQ ID NO: 91204

SEQ ID NO: 407371 - DNA, 201 bp, Homo sapiens
tggtgctcttcccagtctggttcctgtacagtctgctcatgaagctgttccagcgctccacgccagccatcaccctcgagagcccggacatcaagtacccrctgcggctcatcgaccgggaggtgagtgccggccgccgccgctgcctcgtcagcatcacagcattgcccagcacctactctgtgctcagggcatggtcct

SEQ ID NO: 407372 - DNA, 201 bp, Homo sapiens
agcaagactccgtctcaaaaaagaaaaaccaaccaaccaaccaaacaaacaaaaaaaacagtaggtcaggtgggtgggtaggcagacgggcatggtggctyatgcctgtaatcccagtgctccgggaggctgtggtgggaggatggcttgagctgcagtgagctgtgactgcatcactacactccagcctgggcatcagag

SEQ ID NO: 407373 - DNA, 201 bp, Homo sapiens; identical to SEQ ID NO: 91208

SEQ ID NO: 407374 - DNA, 201 bp, Homo sapiens
gttggggttacccttgttccacctgtccagtggctgagctgcttgccaagggagttgtgggagagccaagctggaggcagcgagtgagggccgccccaccyccaccacttgcagtgaggttgcctctgggagttaaagcgcccttcccttttcggcttcagatagagatgtaggtataagtaatatctcaatttcttcttt

SEQ ID NO: 407375 - DNA, 201 bp, Homo sapiens
aagggctcactgaagccacacagccggaaaccaccacagcccggcctgaaacccaggtcctcgcctccagaggcggagtcctttcccgggcgcactgcacygcccagctgggcagagaaggccagcgtcccctccctgggcggggctcacttcggggcaagtctcggggcagcggtggcggctgctgcttccacatcccag

SEQ ID NO: 407376 - DNA, 201 bp, Homo sapiens
cgatgtcactatgtcagagggttttgcacgtttagcaacaaggaacagaacccggatgacacgggggcatcctcccaatgctcagtgggccaggctcccakcaaggccaggctcccactgaccctgcaagctgtgctggggacctcacactttgcggtgtcagtgctgtttgccccatttcacagatggggaaatgcaaac

SEQ ID NO: 407377 - DNA, 201 bp, Homo sapiens
acagatgaggaacaagggctcactgaagccacacagccggaaaccaccacagcccggcctgaaacccaggtcctcgcctccagaggcggagtcctttcccrggcgcactgcactgcccagctgggcagagaaggccagcgtcccctccctgggcggggctcacttcggggcaagtctcggggcagcggtggcggctgctgc

SEQ ID NO: 407378 - DNA, 201 bp, Homo sapiens
tgggttcattccctgttctggccaccttgtttgtggcccctctaggccagcaggacagacacacccagcgtgcgcctggcctcagcacctcacacgcagcrtgcatgtgtgtgcatctgtgcttggcgtcggcgtcacgtcttacaaggacaagcaggcactggggaagggtggggacacaaaggaggaatgggatggggg

SEQ ID NO: 407379 - DNA, 201 bp, Homo sapiens
cagctgtccctctctgggaactgagtctccctggctgtagagggggtaagttgctggcataggggttgcagacaggccactcctgggggccacgtctcacmcactgccagcctctatttggctttctcagcatctgaaacaagcaagcaagaggacagagctgagcctccgggttcccagcctctccactgctcctgcacc

SEQ ID NO: 407380 - DNA, 201 bp, Homo sapiens
tcacagttagccaagatcacaccactgtactccagcctgggtgatagagtgagactccatctcaaataaataaataaataaataaataaataaataaatawataagtgaaccacgcagggtccttccggggggtgaccttcagctggccattcgggatgatggactttccatcccagaaccatggctccatttgtccgtaa

SEQ ID NO: 407381 - DNA, 201 bp, Homo sapiens
atctctggtttcccagtctagccctgggcacactgttgaccctcagttaatgatacctcgtgtgtgtgtgtgtgtgtgtgtgtgtgtgtgtgtgtgtggtkttatttatttatttatttatttatgagacagagtcttgttcagtctcccaggctggagtgtagtggtgctttcagctcactgcaacctttgcctcccagg

SEQ ID NO: 407382 - DNA, 201 bp, Homo sapiens
cataaggaagagaaaacatatttactattcattaagaggaagtggatcatcataaaggtcttcatccttgttctcacgttgagaaggctgaggaggaggcagggggtagtcttgctgtctcgggtgacagaagaggaagaagatccttgtataagtgaaccactcagggtcctggccgggcacagtggctcacgcctgtaa

SEQ ID NO: 407383 - DNA, 201 bp, Homo sapiens
gattgcttgggtacaagaggtcaaggctatagtgagctgagatcacgccactgcattccagcctgggtgatagagtgaaaccctgtctcaaaaaaaaaaaagagctcttatgtactcttcacccagatgtacctaatgttattatttgctacatttgctttatttctctctatacagtatatatctaatgtatgttaaata

SEQ ID NO: 407384 - DNA, 201 bp, Homo sapiens
cccagttacttcggggactgggctgggaggattgcttgggtacaagaggtcaaggctatagtgagctgagatcacgccactgcattccagcctgggtgatagagtgaaaccctgtctcaaaaaaaaaaaagagctcttatgtactcttcacccagatgtacctaatgttattatttgctacatttgctttatttctctcta

SEQ ID NO: 407385 - DNA, 201 bp, Homo sapiens
gcaacagagcgagactccatctcaaaaaaaataataatttcaaagttactgtaaaagaacatttatgggctggacgcaggggcttatacctgcaatcctaraacttggaaggctgaggctggctgttggcttgagctcagaagtttgagattagcctgggcaacatggtgaaaccgcatctctacaaaaaatacaaaaaaa

SEQ ID NO: 407386 - DNA, 201 bp, Homo sapiens; identical to SEQ ID NO: 91213

SEQ ID NO: 407387 - DNA, 201 bp, Homo sapiens
tcctccacctccacctctacctctatgcctggcatctgccacttggagggcacctgggtcctccctccttggggaggacctggagtctcctccttggggawccaggcaaaaggcctcttggcttgggtggttgctaaggaaagtgtggcccaacccagaacttcgggatgttcagaccccaggcaaccttggccagggtga

SEQ ID NO: 407388 - DNA, 201 bp, Homo sapiens
aggcggagcttgcattgagccgaaatggcgccactgcattccagcctgggggacagggcgagactctgtctcaaaaaaaaaaaaaaaaaaaaaaaaaaaargattagctggttagccagatgtggtggcacatgcctgtaatttcgggaggctgaggcaggaggatctgttgaaccctggaggcggagtttgcggtgagcc

SEQ ID NO: 407389 - DNA, 201 bp, Homo sapiens
cgaggtcaggagatcgagaccatcctcgctaacacggtgaaaccccgtccctactgaaaatacaaaaaattagccgggcgcggtggggtgcctgtagtgcyagctactcgggaggctgagaatggcgtgaaccctggaggcggagcttgcattgagccgaaatggcgccactgcattccagcctgggggacagggcgagac

SEQ ID NO: 407390 - DNA, 201 bp, Homo sapiens
agcagtttgtaaaccagttaaaccactcaatgataactgactcaggccaggatcctggctagatgcagaaaccattatatgaagtttattggggatcaggrcattcacagggtatcaaagcaaaaggttatcttacatcggggaggcctggcaggcgccaccaacaatgggacaagctgacatcacatacctgtacctccc

SEQ ID NO: 407391 - DNA, 201 bp, Homo sapiens
tgggggcagccagaggacaggattgctggaactggggaccaagccagctggagggtatggacaatgaggggtctccagtgaccccatctttttttttttttgagagagagagagaaatatgcaactggacaatttgttagcttttcttttcttttttttttttttttgagatggagtctctctcagtggcccaggctggaa

SEQ ID NO: 407392 - DNA, 201 bp, Homo sapiens
cctcccgatcccatcggtctccagattaaaggagactaaagagactttccaagtaaatgcaatgcttgacctgggattagagcctgagtcagaaaaaaaaagaatagctagaaaggactttatggggtaattgggaatatggacagataatagcatcgggtcaatgttaagtttcctgaatttgataatcacacaatgtag

SEQ ID NO: 407393 - DNA, 201 bp, Homo sapiens
accgcagcatttaacccggcccgaggcagctgggaacagtgctgcccagggaactacaaattcaaaggcccggggaagggccgcgctgagcagctgcaggmacaggcccaggccaggccaggcaggaccggcccctgcagtctcggaggccgggggaagattccgcctcttattctcgctcccatccggggggcgccatct

SEQ ID NO: 407394 - DNA, 201 bp, Homo sapiens; identical to SEQ ID NO: 215838

SEQ ID NO: 407395 - DNA, 201 bp, Homo sapiens
tagggtcgggcagatcgcaactcccaggcatcccgcaaagtaggcgggtcaccttgagggcgacctttacccgctcaaaaattcgtctcacattagcagtraggattcgggcgtcaccccgaatcgttattttccttactcataagtttaaggcataaggacgtttttagtttatttcctaggtaatgaattctattctca

SEQ ID NO: 407396 - DNA, 201 bp, Homo sapiens
tattctcgctcccatccggggggcgccatcttgcttcctttatggcggcgaacgaggcccagagaggccaccgtcccgcgcggggcagcacagcggcgggrgagctcggagcgcagagggccgcatccccagttcccagtctccatccccggcagaagcaggcggagcgacccggtccccgcccccgcgcccgccccgccc

SEQ ID NO: 407397 - DNA, 201 bp, Homo sapiens
aaagcatctgcctcctttattgttgaaatgtcctgcctgtgtctctaaagcttcccctggtctccacccaacccttccctgctgtttttggtggtgttccwtaccttccagctggtggttggatttatggccacgtcccctgcacctggctgctccatacatttcttttttcttttttcttttttgagaagagtctctcac

SEQ ID NO: 407398 - DNA, 201 bp, Homo sapiens
aagctttctggatgagggtggtggggagagggtgctcctggcagagggggcagcgtgagcagaggcctggtagtgtggacaagccggtgtgtttggggaarggcaggctcctgcactgaccccgcgggtcctgtcgtttcagttgggccatatggtgctcttcccagtctggttcctgtacagtctgctcatgaagctgtt

SEQ ID NO: 407399 - DNA, 201 bp, Homo sapiens
gagtcgggagacctccaccaaccctcccccgcccagccccatctctccaagggtgggtggggattaccctttgtgggtgctgctgggatcctcgcttggcscagaatgtctccagcacattctgagccaggcctcctggcttacgggctccccacagtctggaggaggctggctgggggcctggtgctctaggtgtcttat

SEQ ID NO: 407400 - DNA, 201 bp, Homo sapiens
ttcccagcctctccactgctcctgcaccttcctcatggctcgcgttagaatggcagctgcctctacctcggacctcacagtgggggcaggttctccagccycctctccagcctctccagccaccacacatggcatgtttgatggccgggcctcaccccttctctctccccagggaagttcgccatccgacctgacaaaaag

SEQ ID NO: 407401 - DNA, 201 bp, Homo sapiens
ctttgggaggccgaggcaggcagatcacctgaggtcaggagttcgagaacagcctgaccaacatggagaaaccctgtctctcctaaaaatacaaaattagytgggtgtggtggcgcatgcctgtaatcctcgctactcgggaggctaaggtaggagaatcacttgaacctgagaggcggaggttgcggcgagccgagatcg

SEQ ID NO: 407402 - DNA, 201 bp, Homo sapiens
ggctaaggtaggagaatcacttgaacctgagaggcggaggttgcggcgagccgagatcgcaccattgcactccagcctgggcaacaagaacgaaactccgyctcaaaaaatataataataataataataattagctgggcatggtggcacgcacctgtagtcccagccactagggaagctgaggcaggagaatcgcttgaa

SEQ ID NO: 407403 - DNA, 201 bp, Homo sapiens
agtttctgaatcacagcaggactttgagggaataggacaagggtctttctttttttttttttcttcccgaagcagtttgtaaaccagttaaaccactcaaygataactgactcaggccaggatcctggctagatgcagaaaccattatatgaagtttattggggatcagggcattcacagggtatcaaagcaaaaggttat

SEQ ID NO: 407404 - DNA, 201 bp, Homo sapiens
cctcagctaacatgcccaaagtaaaaggggtttgtagggagtttctgaatcacagcaggactttgagggaataggacaagggtctttctttttttttttttcttcccgaagcagtttgtaaaccagttaaaccactcaatgataactgactcaggccaggatcctggctagatgcagaaaccattatatgaagtttattgg

SEQ ID NO: 407405 - DNA, 201 bp, Homo sapiens
ggtttcccagtctagccctgggcacactgttgaccctcagttaatgatacctcgtgtgtgtgtgtgtgtgtgtgtgtgtgtgtgtgtgtgtggttttatttatttatttatttatttatgagacagagtcttgttcagtctcccaggctggagtgtagtggtgctttcagctcactgcaacctttgcctcccaggttcaag

SEQ ID NO: 407406 - DNA, 201 bp, Homo sapiens
tctggtttcccagtctagccctgggcacactgttgaccctcagttaatgatacctcgtgtgtgtgtgtgtgtgtgtgtgtgtgtgtgtgtgtgtggttttrtttatttatttatttatttatgagacagagtcttgttcagtctcccaggctggagtgtagtggtgctttcagctcactgcaacctttgcctcccaggttc

SEQ ID NO: 407407 - DNA, 201 bp, Homo sapiens
ctctggtttcccagtctagccctgggcacactgttgaccctcagttaatgatacctcgtgtgtgtgtgtgtgtgtgtgtgtgtgtgtgtgtgtgtggtttkatttatttatttatttatttatgagacagagtcttgttcagtctcccaggctggagtgtagtggtgctttcagctcactgcaacctttgcctcccaggtt

SEQ ID NO: 407408 - DNA, 201 bp, Homo sapiens
gtggccccgtctcacagatgaggaacaagggctcactgaagccacacagccggaaaccaccacagcccggcctgaaacccaggtcctcgcctccagaggcrgagtcctttcccgggcgcactgcactgcccagctgggcagagaaggccagcgtcccctccctgggcggggctcacttcggggcaagtctcggggcagcgg

SEQ ID NO: 407409 - DNA, 201 bp, Homo sapiens
tcatctctggtttcccagtctagccctgggcacactgttgaccctcagttaatgatacctcgtgtgtgtgtgtgtgtgtgtgtgtgtgtgtgtgtgtgtgkttttatttatttatttatttatttatgagacagagtcttgttcagtctcccaggctggagtgtagtggtgctttcagctcactgcaacctttgcctccca

SEQ ID NO: 407410 - DNA, 201 bp, Homo sapiens
cagctgtttgtggcgttgagcctttggacgacatctggcactcactatggccctgtgggaggcaggtggtgtggccccgtctcacagatgaggaacaaggkctcactgaagccacacagccggaaaccaccacagcccggcctgaaacccaggtcctcgcctccagaggcggagtcctttcccgggcgcactgcactgccc

SEQ ID NO: 407411 - DNA, 201 bp, Homo sapiens
acatttcccgtctcttccctttttgctgtcgcgcagcttggccgcctttagttttttccatttttcccactctcgggacatcgagcccatttcctcacaayagcagaagcagttgacacactgagtttctagcgaacgccttcgccccttcagcagcagctttgaggggctccttaggctagacaaggagagaggggtgcc

SEQ ID NO: 407412 - DNA, 201 bp, Homo sapiens
gaccagttttgcagaagacaacgtttccacggatggggggctgagggggtggtttcaggatgattcaagcacatgacatttatttgcactttatttccatyattattacattgtaatatataatgaaataattatacaactcaccatcatgtagaatcagtgggagccctgagcttgttttcctgcaactagacggtccca

SEQ ID NO: 407413 - DNA, 201 bp, Homo sapiens
gggctgaccccctggagtatcttggcacatttcccgtctcttccctttttgctgtcgcgcagcttggccgcctttagttttttccatttttcccactctcrggacatcgagcccatttcctcacaacagcagaagcagttgacacactgagtttctagcgaacgccttcgccccttcagcagcagctttgaggggctcctt

SEQ ID NO: 407414 - DNA, 201 bp, Homo sapiens
tggaggtgccacacacttccccttcccttgccctatggatctcttccatctggttgttcttctgtatccttctgaatatcctttattttattttattttakttttttgagatggggtctcagtctgtcacccaggctggagtgcagtggcaggatcttggatcactgcaacctccacctcccaggctcaagtggtcctccc

SEQ ID NO: 407415 - DNA, 201 bp, Homo sapiens
ttgggtggggagtggtgtctgtacttcctggtttctggaggtacaacctgaatgagatcccagaacgcaaaaagacttgccggagggctgagggtgcaaaycctgagccttctcacggggccattgcttattgtatgtgttacacccgctcccgggctgaccccctggagtatcttggcacatttcccgtctcttcccttt

SEQ ID NO: 407416 - DNA, 201 bp, Homo sapiens
ttgctggtgcctggagggtagtgtgcctggagagggcatggaggtgccacacacttccccttcccttgccctatggatctcttccatctggttgttcttctgtatccttctgaatatcctttattttattttattttatttttttgagatggggtctcagtctgtcacccaggctggagtgcagtggcaggatcttggatc

SEQ ID NO: 407417 - DNA, 201 bp, Homo sapiens
cttgctggtgcctggagggtagtgtgcctggagagggcatggaggtgccacacacttccccttcccttgccctatggatctcttccatctggttgttcttctgtatccttctgaatatcctttattttattttattttatttttttgagatggggtctcagtctgtcacccaggctggagtgcagtggcaggatcttggat

SEQ ID NO: 407418 - DNA, 201 bp, Homo sapiens
gccaccacacatggcatgtttgatggccgggcctcaccccttctctctccccagggaagttcgccatccgacctgacaaaaagtccaaccctatcatcagkacagtgaagtctgtgggcatgatcgcgggagggacaggtacacggaaccccccactgaggcgtccggcggctcatgttaagggtggggttggggtgtggg

SEQ ID NO: 407419 - DNA, 201 bp, Homo sapiens
agaggaagacataactttttttaaaaaaattgagacggaatttcactcttattgcccaggctggagtgcaatggcgtgaatctcggctcactgcaacctcygcctcccgggttcaagcgattgtcctgcctcagctacctgagtagctgcgattacaggtgcccgccaccacatccagctaattctttatatttttagtag

SEQ ID NO: 407420 - DNA, 201 bp, Homo sapiens
cagccccccaaggttccatccctctgttcatctgtcaggtgggtcgcggcggtggccacctcaaaggatggtggtgaggattaaagcatgagacacacttyagctcagagaggaagacataactttttttaaaaaaattgagacggaatttcactcttattgcccaggctggagtgcaatggcgtgaatctcggctcactg

SEQ ID NO: 407421 - DNA, 201 bp, Homo sapiens
ctccgtgacctcagtgcctggttttgagctgggagccccctaccctcgagtagcagccccccaaggttccatccctctgttcatctgtcaggtgggtcgcrgcggtggccacctcaaaggatggtggtgaggattaaagcatgagacacactttagctcagagaggaagacataactttttttaaaaaaattgagacggaa

SEQ ID NO: 407422 - DNA, 201 bp, Homo sapiens
aaggcccggggaagggccgcgctgagcagctgcaggcacaggcccaggccaggccaggcaggaccggcccctgcagtctcggaggccgggggaagattccscctcttattctcgctcccatccggggggcgccatcttgcttcctttatggcggcgaacgaggcccagagaggccaccgtcccgcgcggggcagcacagcg

SEQ ID NO: 407423 - DNA, 201 bp, Homo sapiens
aacccggcccgaggcagctgggaacagtgctgcccagggaactacaaattcaaaggcccggggaagggccgcgctgagcagctgcaggcacaggcccaggycaggccaggcaggaccggcccctgcagtctcggaggccgggggaagattccgcctcttattctcgctcccatccggggggcgccatcttgcttcctttat

SEQ ID NO: 407424 - DNA, 201 bp, Homo sapiens
ggcatcagagcgagatctcttctctgggtaaataaacccagtgagtcactccctcagctacctagatcctgcagggctccccattctccttgacattccarttctttccacccggggctccacattgcctccccaacgtcacatcacaccccagctcggctgtatcagcccctctaaccttgcccatcaggcctctgttca

SEQ ID NO: 407425 - DNA, 201 bp, Homo sapiens
tagataacagtgtcatgtggtgagcgatgcttggagggctggctttggtgtactccgggcaggtcactcccctttcctggcctcagtttcctcacgtgctrggatgatcacagtgcccgcagcctagggttgaggtggggagtattccaggaaacccgcggcccctactcagaacagtgccagctcaggggcgctgaccgc

SEQ ID NO: 407426 - DNA, 201 bp, Homo sapiens
caggttctccagccccctctccagcctctccagccaccacacatggcatgtttgatggccgggcctcaccccttctctctccccagggaagttcgccatcygacctgacaaaaagtccaaccctatcatcaggacagtgaagtctgtgggcatgatcgcgggagggacaggtacacggaaccccccactgaggcgtccggc

SEQ ID NO: 407427 - DNA, 201 bp, Homo sapiens
acttgctggtgcctggagggtagtgtgcctggagagggcatggaggtgccacacacttccccttcccttgccctatggatctcttccatctggttgttcttctgtatccttctgaatatcctttattttattttattttatttttttgagatggggtctcagtctgtcacccaggctggagtgcagtggcaggatcttgga

SEQ ID NO: 407428 - DNA, 201 bp, Homo sapiens
ggaaggtgcctcgcagcccgtgaagccagctgcccgcggaggggccttaagctgggctgtgcactgacgcagctgtgctggaaaaacagaactccagggarcaccaagcacaactccagctcctaatgtcattcaagttcattgccagggcccccaacaatggtgatttcctgtgaatgtaacttcggccaactttttccc

SEQ ID NO: 407429 - DNA, 201 bp, Homo sapiens
ttggcctcagggatcctctccagggtcccaaccccaggggtccccatgctacactccgagaaccgtgccagtcgggtcattgctgctcgtttcctctcctwccttcctccgtgacctcagtgcctggttttgagctgggagccccctaccctcgagtagcagccccccaaggttccatccctctgttcatctgtcaggtgg

SEQ ID NO: 407430 - DNA, 201 bp, Homo sapiens
gcgtgagccacagtacccagcctatttttatttttaaaaaactattttagaaaacatcattctgttttacgtttttgcaaaccttggaatgtctggcttcrtaggacagctagattcctgtgtttgtttctacatcccatctgtgtgatgttgccagtcacgcagcctctggaaagtggccccatctactgagagaggaag

SEQ ID NO: 407431 - DNA, 201 bp, Homo sapiens
agaggcacttgtctcccactgtgggcaagagctcgcccctgagacctggagctggggactgagggctgcgggggtgtcttgcaggtttacttcaaggacabccatcccaagtttcccgctggagggaagatgtctcagtacctggagagcatgcagattggagacaccattgagttccggggccccagtgggctgctggtc

SEQ ID NO: 407432 - DNA, 201 bp, Homo sapiens
gctctgattatgatttaaaaccatcctctccctcttttgccttgcccccagtaaaggctgcttccatcggtcacttgccctcttcagagcccctcccttgytctatttctggccacccccagcaggcacaggaggggtgtggcagggaaaactgagtcacagcagagaacatcatctgccagggcccaagtctccaccctg

SEQ ID NO: 407433 - DNA, 201 bp, Homo sapiens
ctccactcccctctgcctccacaccccatagccaccctctgtgctgaagccacaacaggctcccctccctgaggcactgtgtacacgctgtccctcccccrgccaccttccccttctccatccatcagactccttgggcagggtgagccgctcctcctctgtctccccatttctttgtaggtgtcggattgaggcccttct

SEQ ID NO: 407434 - DNA, 201 bp, Homo sapiens
atgatctctggcccagagtgaccccgttctgtcctgcaggccagcacatctacctctcggctcgaattgatggaaacctggtcgtccggccctatacaccmatctccagcgatgatgacaagggcttcgtggacctggtcatcaaggtgaagcctctgggtcatgactgtggagggggtgtgggtgggtggccatggcaac

SEQ ID NO: 407435 - DNA, 201 bp, Homo sapiens
ggtcagcggccgggcctctgtgacacgcaggccctgttcttacccgtttccctaagaaatgtccctcaggcctgctagggaaacatgtgaggggctcgtgkggtgttgtctgggagctggggtgatgggctttctggggtctgctgcggggttcgaggtggaggttcacaggagaagatgcaggcgttaggggcagcagcc

SEQ ID NO: 407436 - DNA, 201 bp, Homo sapiens
ccttgggttagtgtgtatagtgccaagcacagcagcatacttttggtggtgagcgcttgtgcagtcgatggaggtgtgtggaactgtggccctgctggctsgtggcagacaccagtgcccctgtctctagtgcagagtggagcttgggctttgtttctcaggcctggccttttctccttcattctgtgccctcatttttcc

SEQ ID NO: 407437 - DNA, 201 bp, Homo sapiens; identical to SEQ ID NO: 91347

SEQ ID NO: 407438 - DNA, 201 bp, Homo sapiens
  misc_feature (1)...(201): n = A,T,C or G
atggaggtgtgtggaactgtggccctgctggctggtggcagacaccagtgcccctgtctctagtgcagagtggagcttgggctttgtttctcaggcctggncttttctccttcattctgtgccctcatttttccaaatgcgcttctctctggccaggtttgtatgcagtgaaaatccgagctgaggccatgcaggaagctt

SEQ ID NO: 407439 - DNA, 201 bp, Homo sapiens
gagagagaaaagggccctgggctctgctttgttgcccaggaatgccagggacaggaggcagggggcgagtgccaggagctgggggctcccaggagaggtgygggaagcagccaagggtttcagtatagccccagagtgtcaaggcacatcccccacagagcttcctcagggcccagccctgtgctgtgttcagggcctcca

SEQ ID NO: 407440 - DNA, 201 bp, Homo sapiens
tcaacttcgcctgtttggaagcccgggaacactgcaagtctttaggcatagagaaccccgtatgtgaagtgtccaactacctctttccagattgcagggtsatttcaggacaccaagaggtgggtgttgatgggaactgccttcataggccagtccagtacggagggttggaactgctccacacccgtgaggcctagcagt

SEQ ID NO: 407441 - DNA, 201 bp, Homo sapiens
tgggaactgccttcataggccagtccagtacggagggttggaactgctccacacccgtgaggcctagcagtctggcgggtgctgggtccagcccggtcttyaggaagtattttggggccagggcagtgaggtagaccgagtgctgcaaagcaggcaggagcaagaatgctgccctgctccaccacgtgtagaatggggtct

SEQ ID NO: 407442 - DNA, 201 bp, Homo sapiens; identical to SEQ ID NO: 91349

SEQ ID NO: 407443 - DNA, 201 bp, Homo sapiens
attggagaggagactgctggcccctgtgatggtgaccttgagccctgtggccctagcctgggacttgagagggctcagctgttgagccagagtccagagaycttacacggaaagcactttgagaccacagatgctccaggaagtgctactgagtagccatccccatacctgccagtcactcagacaatctaggtgtggagg

SEQ ID NO: 407444 - DNA, 201 bp, Homo sapiens
tcttggccctgccagaggcttccgcctgccattccgggggctcccacgtcttactcattcgatcgagtttttttttttgtttgtttttgttttttttttttgagacggagtctcgctctgtcgcccaggctagagtgcagtggcgcgatctcggctccgcctcccgagttcacgccattctcctgcctcagcctcccaagt

SEQ ID NO: 407445 - DNA, 201 bp, Homo sapiens; identical to SEQ ID NO: 91351

SEQ ID NO: 407446 - DNA, 201 bp, Homo sapiens
agggggaaggtgagctctgcctgagctcttggccctgccagaggcttccgcctgccattccgggggctcccacgtcttactcattcgatcgagtttttttktttgtttgtttttgttttttttttttgagacggagtctcgctctgtcgcccaggctagagtgcagtggcgcgatctcggctccgcctcccgagttcacgc

SEQ ID NO: 407447 - DNA, 201 bp, Homo sapiens
tttaagtaaacgcatgagtccctccaggaccccagaacgcagcccgaagggcctcagagccggggcggaaccagcgtctgcggaacctttcttcccgctcmcggtgccccggaagccccggcaggaaatgcgtcagggaccacgctgcgccgcgccgccgcagtcgggcctcggtcgccacggtaacgcgcgcgggcaggt

SEQ ID NO: 407448 - DNA, 201 bp, Homo sapiens; identical to SEQ ID NO: 91354

SEQ ID NO: 407449 - DNA, 201 bp, Homo sapiens
tcccaaagtgctgggattataggtgtgagccactgtgcccagcttccctttggtattcttggtagtgccacagcaaagagctcaggtgagggcaggggtascccctcaggggggaagcccctttccaacaactgatgtgaaaaggctcctgggccctgctcgcccaatgcctgggccaaggactggccattggagaggaga

SEQ ID NO: 407450 - DNA, 201 bp, Homo sapiens
  misc_feature (1)...(201): n = A,T,C or G
atgtccacatctagcagctgtgggtctctttgtggtcaccctcccagtttggccctgtgaatggtcagatctgtaaaggcggatttctgggacattgctcngctgaaacctccttccttccccaggctctacggtttctccagaagaattcctctaagtttcatttcagacgcaccaggatgttgccggttagtggcgcat

SEQ ID NO: 407451 - DNA, 201 bp, Homo sapiens; identical to SEQ ID NO: 91348

SEQ ID NO: 407452 - DNA, 201 bp, Homo sapiens
gtcatgggggtggggccagccccgccctgagccgccggggcctcacttgagcagcaggtgcaggcccccgctgagcagcggcagcagcagcgccagcagcrgcagcagcgccagcagcacctgttcgcaggacacctgtgggagcaaagcagaggagtcaggctcggggcaggccccagcaatggggccagacgggtgaca

SEQ ID NO: 407453 - DNA, 201 bp, Homo sapiens; identical to SEQ ID NO: 91350

SEQ ID NO: 407454 - DNA, 201 bp, Homo sapiens
cggggtttaaatataaaaaggcatcatgagaaaacagttaaaaagataacagcagcaggccgccacctccagggcagtggtcatgggggtggggccagccmcgccctgagccgccggggcctcacttgagcagcaggtgcaggcccccgctgagcagcggcagcagcagcgccagcagcagcagcagcgccagcagcacct

SEQ ID NO: 407455 - DNA, 201 bp, Homo sapiens
agggcctccacccaccgcccagggcccctccccaggtgtagaggcatagggcataggccggctacctgtgcatggccacctcggagagctgggccaggcgyggggccctgaggctcacgtccatctcgtccccgatgcaggccagccgcagggccaatgcgtcactgcagggagcacacacaggagtcgggtgtggctgtg

SEQ ID NO: 407456 - DNA, 201 bp, Homo sapiens
tgtctgtcctcggccagcctcagtccaagttcaacttcgcctgtttggaagcccgggaacactgcaagtctttaggcatagagaaccccgtatgtgaagtrtccaactacctctttccagattgcagggtgatttcaggacaccaagaggtgggtgttgatgggaactgccttcataggccagtccagtacggagggttgg

SEQ ID NO: 407457 - DNA, 201 bp, Homo sapiens
cagaacaaccggaaaacgtctccggacactgcccccggcctgttgagcaccactgtcctactccaaaccagctttatagcaggaagctccttgggttagtktgtatagtgccaagcacagcagcatacttttggtggtgagcgcttgtgcagtcgatggaggtgtgtggaactgtggccctgctggctggtggcagacacc

SEQ ID NO: 407458 - DNA, 201 bp, Homo sapiens
aatttgaacctcaaggaggttgtgacttggctaaggcaatgtggcttccaccctgttcctctttaccttttaccagggtttctcaatagtggcactatttwaaaaaaaaaaaaaacagtggcgctattgggccaggtcatttgttttgttgggggcaaggggggctgacctgtgcagtgcagcatgttgagcagcatccct

SEQ ID NO: 407459 - DNA, 201 bp, Homo sapiens
ggttagtgtgtatagtgccaagcacagcagcatacttttggtggtgagcgcttgtgcagtcgatggaggtgtgtggaactgtggccctgctggctggtggyagacaccagtgcccctgtctctagtgcagagtggagcttgggctttgtttctcaggcctggccttttctccttcattctgtgccctcatttttccaaatg

SEQ ID NO: 407460 - DNA, 201 bp, Homo sapiens
cagaacgcagcccgaagggcctcagagccggggcggaaccagcgtctgcggaacctttcttcccgctcccggtgccccggaagccccggcaggaaatgcgwcagggaccacgctgcgccgcgccgccgcagtcgggcctcggtcgccacggtaacgcgcgcgggcaggtgtccgaccatgagcgtccgggtcgcacgggta

SEQ ID NO: 407461 - DNA, 201 bp, Homo sapiens
ccacatggagggtgatggtggaggggaagcacgggtgagtcagtacaggccaggttttgttgcagtgacaagtagcccacacctcagtggtcacagcacasaagcaccggtcccactcctggtctgtgctcgccaggctgggttctgcttttcagcccaggactcaggctacaggaacagtctctagggaacactgacaga

SEQ ID NO: 407462 - DNA, 201 bp, Homo sapiens
ctcctcccttttcttgtatgttttcttctacttcttgtcacaggctcttgttcatttgttttttaagagacagagttttcctctgtcttccagccttgagwgcagtgatgcaaccatagctcactgcagcctctaactcctgatctcaagcagtcctcctgccttagcctcctaagtacctgatgtcacaggctgtttatg

SEQ ID NO: 407463 - DNA, 201 bp, Homo sapiens
cagtatcttgctctgtcaccccagctgcagtgcagtggtgcagtcgtagctcactgcagcctcagcctcttggcctcaagtgatcctcccgcttcagtctmcagactaactgggactacaggctcacaccatcatgcccagctaattttagaagtttttgtagagatggggtctcgctatgttgccagggctggtctggaa

SEQ ID NO: 407464 - DNA, 201 bp, Homo sapiens; identical to SEQ ID NO: 91353

SEQ ID NO: 407465 - DNA, 201 bp, Homo sapiens
cgccagagggagcacagcacatacctgcctcggagctgacccctggctccatgccccgtcctcagagaagctcctgcgtcaatattaagtatgagacattycaagctgcttgggtggttgttcattatacagagatagtgggaaaatattattgggaatgaactctctgattgtcttaaaatgttaccattgtgtagacac

SEQ ID NO: 407466 - DNA, 201 bp, Homo sapiens
ctggtcacccactgggactgcgggtctgcggggcgccagagggagcacagcacatacctgcctcggagctgacccctggctccatgccccgtcctcagagmagctcctgcgtcaatattaagtatgagacattccaagctgcttgggtggttgttcattatacagagatagtgggaaaatattattgggaatgaactctct

SEQ ID NO: 407467 - DNA, 201 bp, Homo sapiens
aagtagcccacacctcagtggtcacagcacacaagcaccggtcccactcctggtctgtgctcgccaggctgggttctgcttttcagcccaggactcaggcwacaggaacagtctctagggaacactgacagactaaagcaggtggatgacttgaggccaggagttcaagaccagcctgaccaacatggtgaaaccccatct

SEQ ID NO: 407468 - DNA, 201 bp, Homo sapiens
ctgggactgcgggtctgcggggcgccagagggagcacagcacatacctgcctcggagctgacccctggctccatgccccgtcctcagagaagctcctgcgycaatattaagtatgagacattccaagctgcttgggtggttgttcattatacagagatagtgggaaaatattattgggaatgaactctctgattgtcttaa

SEQ ID NO: 407469 - DNA, 201 bp, Homo sapiens; identical to SEQ ID NO: 91356

SEQ ID NO: 407470 - DNA, 201 bp, Homo sapiens
aggccgtcggccacactgccccgcccccggcatctcggctttgcccaataaggaccacccggagggtttaaccgcttcgctcctggggctctggcaaatarcctcagtctttcccccactgtatccccacccccacttgttctgctccgccttccgccaccctcgcccggccctccagtccgccacgcagcttcagtcgtc

SEQ ID NO: 407471 - DNA, 201 bp, Homo sapiens
taagctcaaaaggagcctggatgtgggatcctgtgccttccccaggaagtgaacgatcccgccaagaatgacgctctggagatggtggaggagaccacttrgcagggcctcaaggagctgggggcctttggtctgcaagtgcccagtgagctgggtggtgtgggcctttgcaacacccaggtgagggcgccctatcgccac

SEQ ID NO: 407472 - DNA, 201 bp, Homo sapiens
agctgtcccattcccccaggtcccaaggcaccagcaccgccaccatcttgctccacacaccctggccccctcttcccataggcaggcagaacctagccacrctctcctgagaagccagcaaagagggcctcctcacagagggctccagcagctcaaaaagaagctgagcccagctctctctcctcctgggcctcctctcac

SEQ ID NO: 407473 - DNA, 201 bp, Homo sapiens
tctcaggaggggcgggggcaccgggggctggcagccccggagttcgggggctggggcatgagctggggtgggggaggggaactggatttcggggagccccsgggtaggggggggtcttgccaaacggccaggggctaggggccgtggcgggggagtggggtgggggggttggaaacggcagcggccgagggagccgtggag

SEQ ID NO: 407474 - DNA, 201 bp, Homo sapiens
ttggtgccaggtacctgcctactgctcagtcgccgaaagtaggggaaagggcaagccagggtgccctagggcgaaactaggggaaaggtcaccgcttcgcsccgcctccccgcgcggctctcgcctgttctccccttgacacagcggaagtcccttccctgaacttgctaaccgtctcttttcccagctggctctggacaa

SEQ ID NO: 407475 - DNA, 201 bp, Homo sapiens
cttggtgccaggtacctgcctactgctcagtcgccgaaagtaggggaaagggcaagccagggtgccctagggcgaaactaggggaaaggtcaccgcttcgsgccgcctccccgcgcggctctcgcctgttctccccttgacacagcggaagtcccttccctgaacttgctaaccgtctcttttcccagctggctctggaca

SEQ ID NO: 407476 - DNA, 201 bp, Homo sapiens
ggcgcccgccatcggcagggatctccctcttggtgccaggtacctgcctactgctcagtcgccgaaagtaggggaaagggcaagccagggtgccctagggsgaaactaggggaaaggtcaccgcttcgcgccgcctccccgcgcggctctcgcctgttctccccttgacacagcggaagtcccttccctgaacttgctaac

SEQ ID NO: 407477 - DNA, 201 bp, Homo sapiens
gggccaggggtgggtaggcacatctcagcacgggcatataatttgtgtggccctgtgctaggaacctggagtagagcgtgtgctccgagatcttcgcatcytccggatctttgaggggacaaatgacattcttcggctgtttgtggctctgcagggctgtatggtaagacagagaattgggtgggggtagaggtggggagg

SEQ ID NO: 407478 - DNA, 201 bp, Homo sapiens
ggtaaagtagctctctccccaacaggggagactgtggccgctttctgtctaaccgagccctcaagcgggtcagatgcagcctccatccgaacctctgctgwgcccagcccctgtggaaaatactataccctcaatggaagcaagctttggatcaggcaacctgcctcccatttctccccttctcctccgcccaattccagg

SEQ ID NO: 407479 - DNA, 201 bp, Homo sapiens
ggagaacagggctccggatcctaggcgtcccctaccaaaggcctgggttccctcctcacctccctcccctgcagtcaagaatctgaaggactcactggaargatggaggccttgagtccccaatgccgctggtcctctcgggtggcaaaggaggtaaaggtggggctggaggcgccagttctgcccgaggctcatggactg

SEQ ID NO: 407480 - DNA, 201 bp, Homo sapiens
gacgctctgaccaggaaaaaaccggccaaggcggtaggtagccccgaggccaggtggaccttagccagacccaaccagagccctgaaatttgcctctctcygcccaggaatctaagtcctttgctgtgggaatgttcaaaggccagctcaccacagatcaggtgttcccatacccgtccggtaagggaagggataatcaga

SEQ ID NO: 407481 - DNA, 201 bp, Homo sapiens
agcggaagtcccttccctgaacttgctaaccgtctcttttcccagctggctctggacaagtcagattcccacccctctgacgctctgaccaggaaaaaacyggccaaggcggtaggtagccccgaggccaggtggaccttagccagacccaaccagagccctgaaatttgcctctctctgcccaggaatctaagtcctttg

SEQ ID NO: 407482 - DNA, 201 bp, Homo sapiens
gctttgctcctgtgtgacggttctttccccctgctgcctgcctccctcccaaagaaaggagccagaggcgtggggagtttgcctctattgctttatttggkgttttatacaagtgactaaaataaatagagtaacaaaggcagctacatggcccaaatctcccagcttcctcaggctgctgtctaggatgcctaaccccgg

SEQ ID NO: 407483 - DNA, 201 bp, Homo sapiens
agggcgaaactaggggaaaggtcaccgcttcgcgccgcctccccgcgcggctctcgcctgttctccccttgacacagcggaagtcccttccctgaacttgytaaccgtctcttttcccagctggctctggacaagtcagattcccacccctctgacgctctgaccaggaaaaaaccggccaaggcggtaggtagccccgag

SEQ ID NO: 407484 - DNA, 201 bp, Homo sapiens; identical to SEQ ID NO: 91385

SEQ ID NO: 407485 - DNA, 201 bp, Homo sapiens
ttgggtgctcagctcccaaaaccagtctcatctgttctttgtccctaggaggcagcctggaaggtgacagatgaatgcatccaaatcatggggggtatggrcttcatgaaggtacaggacggtcttctgcagagcctcggctgggccaggggtgggtaggcacatctcagcacgggcatataatttgtgtggccctgtgct

SEQ ID NO: 407486 - DNA, 201 bp, Homo sapiens
gcaccgggccggcactgaacccccactccccacagctcgcggctcacggcgctcctggggcagccccggcccggccctgcccggcggccctatgccggggrtgccgctcaggtaagtcaccgcagccttggcaagggggtgtgggagcggcggtccgcttcggcgcccgccatcggcagggatctccctcttggtgccagg

SEQ ID NO: 407487 - DNA, 201 bp, Homo sapiens
atggagtacgggtgccatcggagaacgtgctgggtgaggttgggagtggcttcaaggttgccatgcacatcctcaacaatggaaggtttggcatggctgcrgccctggcaggtaccatgagaggcatcattgctaaggcggtgagtaccctgcccgagtccctaggtaacccaaacagaagtctcactgtcccccttgcca

SEQ ID NO: 407488 - DNA, 201 bp, Homo sapiens
aatacatcttacttctgatgctgccactccaggggcgccagtcccagataaggcctactaacccctccccacaaactcataccctccccccagtttatagyccccccatcatgcttaccttggttgtcactatacagagacagtccatgttggggggcctggccgcggcggcgggtaaggggctctgacttcatcggagtt

SEQ ID NO: 407489 - DNA, 201 bp, Homo sapiens
tgctttcccacactgccctgacacagtgggccccctgagaagaagatgggcatcaaggcttcaaacacagcagaggtgttctttgatggagtacgggtgcyatcggagaacgtgctgggtgaggttgggagtggcttcaaggttgccatgcacatcctcaacaatggaaggtttggcatggctgcggccctggcaggtacc

SEQ ID NO: 407490 - DNA, 201 bp, Homo sapiens
ggttgggagtggcttcaaggttgccatgcacatcctcaacaatggaaggtttggcatggctgcggccctggcaggtaccatgagaggcatcattgctaagkcggtgagtaccctgcccgagtccctaggtaacccaaacagaagtctcactgtcccccttgccatgtgtccctgatcacttgcaggcactccctacactag

SEQ ID NO: 407491 - DNA, 201 bp, Homo sapiens
cggcgcccgccatcggcagggatctccctcttggtgccaggtacctgcctactgctcagtcgccgaaagtaggggaaagggcaagccagggtgccctaggscgaaactaggggaaaggtcaccgcttcgcgccgcctccccgcgcggctctcgcctgttctccccttgacacagcggaagtcccttccctgaacttgctaa

SEQ ID NO: 407492 - DNA, 201 bp, Homo sapiens
aatagcactgctcagagaaggtgatcttgttgacggtgtgtcggatcaggcctgctttgagcagcccgctggcatacttgcgggcctcccgccgctcaggraagccctccacgtgatggtagagccagtcaaccacatccgagcctgggagcacccacagtggaaaaaggcctcaggttcttcttccaactcctgctctcg

SEQ ID NO: 407493 - DNA, 201 bp, Homo sapiens
gggcagccccggcccggccctgcccggcggccctatgccgggggtgccgctcaggtaagtcaccgcagccttggcaagggggtgtgggagcggcggtccgsttcggcgcccgccatcggcagggatctccctcttggtgccaggtacctgcctactgctcagtcgccgaaagtaggggaaagggcaagccagggtgcccta

SEQ ID NO: 407494 - DNA, 201 bp, Homo sapiens
ggggcagccccggcccggccctgcccggcggccctatgccgggggtgccgctcaggtaagtcaccgcagccttggcaagggggtgtgggagcggcggtccscttcggcgcccgccatcggcagggatctccctcttggtgccaggtacctgcctactgctcagtcgccgaaagtaggggaaagggcaagccagggtgccct

SEQ ID NO: 407495 - DNA, 201 bp, Homo sapiens
ctcctcctcaggggctggcaagctcggctgctgcaatcttctgcctcctatgggagtacccccaaatccttgcctcacctggtccattccctcaggtgatmccatgccagggccccagccctctgacaacttccaactacctccattctatatgactgaaccctaaattaacagttccctcaaattgagagagcatcccta

SEQ ID NO: 407496 - DNA, 201 bp, Homo sapiens
acgccagagctgggtcagagctcgagccagcggcgcccggagagattcggagatgcaggcggctcggatggccgcgagcttggggcggcagctgctgaggytcgggggcggaaggtctgtgtgtgacaagagggacggtgggcagcggccctgggcaccgggccggcactgaacccccactccccacagctcgcggctcac

SEQ ID NO: 407497 - DNA, 201 bp, Homo sapiens
ctgaggctcgggggcggaaggtctgtgtgtgacaagagggacggtgggcagcggccctgggcaccgggccggcactgaacccccactccccacagctcgcrgctcacggcgctcctggggcagccccggcccggccctgcccggcggccctatgccgggggtgccgctcaggtaagtcaccgcagccttggcaagggggtg

SEQ ID NO: 407498 - DNA, 201 bp, Homo sapiens
tcattctccctcttcctctcaggcgggcagggctgggcagcggcctgagtctcagcggacttgtccacccggagttgagtcggagtggcgagctggtaagyggccaggggtccaggagagcctgcatcagggactgcagccgatggcccctctgagccccgcactgtccccatctcttaaggcagtacgggctctggagca

SEQ ID NO: 407499 - DNA, 201 bp, Homo sapiens
ctcggtgaggtcccaggcatgctgggagggagtccagtttgggtgctcagctcccaaaaccagtctcatctgttctttgtccctaggaggcagcctggaargtgacagatgaatgcatccaaatcatggggggtatgggcttcatgaaggtacaggacggtcttctgcagagcctcggctgggccaggggtgggtaggcac

SEQ ID NO: 407500 - DNA, 201 bp, Homo sapiens
ctgctgaggctcgggggcggaaggtctgtgtgtgacaagagggacggtgggcagcggccctgggcaccgggccggcactgaacccccactccccacagctmgcggctcacggcgctcctggggcagccccggcccggccctgcccggcggccctatgccgggggtgccgctcaggtaagtcaccgcagccttggcaagggg

SEQ ID NO: 407501 - DNA, 201 bp, Homo sapiens
ctggagatggtggaggagaccacttggcagggcctcaaggagctgggggcctttggtctgcaagtgcccagtgagctgggtggtgtgggcctttgcaacamccaggtgagggcgccctatcgccacatcccagtatgccataccccagcttggcagactcagctcttttgccatagacctagagactagggctaaggtctc

SEQ ID NO: 407502 - DNA, 201 bp, Homo sapiens
gagatggtggaggagaccacttggcagggcctcaaggagctgggggcctttggtctgcaagtgcccagtgagctgggtggtgtgggcctttgcaacacccrggtgagggcgccctatcgccacatcccagtatgccataccccagcttggcagactcagctcttttgccatagacctagagactagggctaaggtctcttc

SEQ ID NO: 407503 - DNA, 201 bp, Homo sapiens
actgcctgctggagggatggggaagtgggccgaggggactttgaagctcatcagaacttggggtaaagtagctctctccccaacaggggagactgtggccsctttctgtctaaccgagccctcaagcgggtcagatgcagcctccatccgaacctctgctgtgcccagcccctgtggaaaatactataccctcaatggaag

SEQ ID NO: 407504 - DNA, 201 bp, Homo sapiens
tttctgtctaaccgagccctcaagcgggtcagatgcagcctccatccgaacctctgctgtgcccagcccctgtggaaaatactataccctcaatggaagcvagctttggatcaggcaacctgcctcccatttctccccttctcctccgcccaattccaggccccactgctccccgtcctccacgccctgaatatcccattc

SEQ ID NO: 407505 - DNA, 201 bp, Homo sapiens
ttctgtctaaccgagccctcaagcgggtcagatgcagcctccatccgaacctctgctgtgcccagcccctgtggaaaatactataccctcaatggaagcamgctttggatcaggcaacctgcctcccatttctccccttctcctccgcccaattccaggccccactgctccccgtcctccacgccctgaatatcccattct

SEQ ID NO: 407506 - DNA, 201 bp, Homo sapiens
gacatcttcacggtctttgccaagacaccagttacagatccagccacaggagccgtgaaggagaagatcacagcttttgtggtggagaggggcttcggggrcattacccagtgagtgaatttgggttgggggagcttaggactgaggggcaggactgggctcctgggcagatggctgttgcaagtcaccctggggacgtgt

SEQ ID NO: 407507 - DNA, 201 bp, Homo sapiens
gtcattcctccctggtgcataaggagcgaaggagcagtttttcccccagtgacaacctgttgaacacacctctgctttcccacactgccctgacacagtgrgccccctgagaagaagatgggcatcaaggcttcaaacacagcagaggtgttctttgatggagtacgggtgccatcggagaacgtgctgggtgaggttggg

SEQ ID NO: 407508 - DNA, 201 bp, Homo sapiens
gcataaggagcgaaggagcagtttttcccccagtgacaacctgttgaacacacctctgctttcccacactgccctgacacagtgggccccctgagaagaakatgggcatcaaggcttcaaacacagcagaggtgttctttgatggagtacgggtgccatcggagaacgtgctgggtgaggttgggagtggcttcaaggttg

SEQ ID NO: 407509 - DNA, 201 bp, Homo sapiens
ctctgctttcccacactgccctgacacagtgggccccctgagaagaagatgggcatcaaggcttcaaacacagcagaggtgttctttgatggagtacgggygccatcggagaacgtgctgggtgaggttgggagtggcttcaaggttgccatgcacatcctcaacaatggaaggtttggcatggctgcggccctggcaggt

SEQ ID NO: 407510 - DNA, 201 bp, Homo sapiens
ctcctttacgcacggggggccacgccacgcccatcccaggtcagccccgccctcatttcggtcaggtaacccagccccaaggttcctcccctttccgaagkttgctgcctccctcgatagagtaagccagaccccacccacctgcccgggaggccacgcctccgtccacttcccgcccgttcgctccccctgcctcgccca

SEQ ID NO: 407511 - DNA, 201 bp, Homo sapiens
gctgccaagctcaggtgagggctggaggtgcaggcccaacccctccttccctctccccaggctgcagctcggatccgagagggcatggccgccctgcagtytgacccctggcagcaagagctctaccgcaacttcaaaagcatctccaaggccttggtggagcggggtggtgtggtcaccagcaacccacttggcttctga

SEQ ID NO: 407512 - DNA, 201 bp, Homo sapiens; identical to SEQ ID NO: 91381

SEQ ID NO: 407513 - DNA, 201 bp, Homo sapiens
cctccctcccaaagaaaggagccagaggcgtggggagtttgcctctattgctttatttggtgttttatacaagtgactaaaataaatagagtaacaaaggyagctacatggcccaaatctcccagcttcctcaggctgctgtctaggatgcctaaccccggggtaccgctgaccacccccaaccctgcaaagggcagggct

SEQ ID NO: 407514 - DNA, 201 bp, Homo sapiens
gccagggggcggtccatagggatggagccctgggtgggctcggagattaggggcacccccagttgagcctctggatggaggagggcccccatcgctagtcycacttgcttccccaccccgccgaaggctgccccctcggctggagggctcagactcactgccactgccggacttggactcgggggcccgctcctcgggcct

SEQ ID NO: 407515 - DNA, 201 bp, Homo sapiens
catcagaacttggggtaaagtagctctctccccaacaggggagactgtggccgctttctgtctaaccgagccctcaagcgggtcagatgcagcctccatcygaacctctgctgtgcccagcccctgtggaaaatactataccctcaatggaagcaagctttggatcaggcaacctgcctcccatttctccccttctcctcc

SEQ ID NO: 407516 - DNA, 201 bp, Homo sapiens
cctcactatgctggctgctggcactgcccccaccataggtgtaagatgaaagctcatggtagggtggaggctgcgggctgtaggggtgtggggcagggtaytggtaggagaaagtgggcagcaggggccagggggtggccccaggcagaggagccagggtatcctggtctgaagccccactggagccatcgttgtcattga

SEQ ID NO: 407517 - DNA, 201 bp, Homo sapiens
ccccagattcctgcttcccctccagtacgcccgtttggtggagatcgtgggcatgcatgaccttggcgtgggcattaccctgggggcccatcagagcatcrgtttcaaaggcatcctgctctttggcacaaaggcccagaaagaaaaatacctccccaagctggcatctggtgaggcaaccctaggagagccagggattgg

SEQ ID NO: 407518 - DNA, 201 bp, Homo sapiens
gttaaggtcaggtccccctgcagccagtgacaaccccagattcctgcttcccctccagtacgcccgtttggtggagatcgtgggcatgcatgaccttggcrtgggcattaccctgggggcccatcagagcatcggtttcaaaggcatcctgctctttggcacaaaggcccagaaagaaaaatacctccccaagctggcatc

SEQ ID NO: 407519 - DNA, 201 bp, Homo sapiens
ctctggcgcaagcccagcccctctcctagggagactgcagaaccacactgaaccacagcgggatgtgtggaccctcttccaggtagatcatgccactaatygtacccagtttggggagaaaattcacaactttgggctgatccaggagaagctggcacggatggttatgctgcagtatgtaactgaggtgagggcctccca

SEQ ID NO: 407520 - DNA, 201 bp, Homo sapiens
aatattagtgatatttggctcacccctccagccctgcctgcccctcaggaagttaggcgctcgcccccacctccttacctgactctctgagagggaagccwcataatagtccaggatgtctgtcacaggaacagaactgagttacctccccaccccaggcctctccaggcacatcacccctgtcatcaccgctgctggctg

SEQ ID NO: 407521 - DNA, 201 bp, Homo sapiens
tctggcgcaagcccagcccctctcctagggagactgcagaaccacactgaaccacagcgggatgtgtggaccctcttccaggtagatcatgccactaatcrtacccagtttggggagaaaattcacaactttgggctgatccaggagaagctggcacggatggttatgctgcagtatgtaactgaggtgagggcctcccaa

SEQ ID NO: 407522 - DNA, 201 bp, Homo sapiens
caggggatgtggggaagaggcagcctgggagaaagcccgaaacccacagaatgaaggacaagaaagtcgccctggtggagagagggtgggggctccagatmtaaaggtcctcagcccccaatctcttccaaccatcctcacacgtgcacaatgcatgtgtacacacatgtgtgagtttgtggcagggaacatgtgtgtcct

SEQ ID NO: 407523 - DNA, 201 bp, Homo sapiens
gcccttatcttggagatctgggtgatgaggccaagtctgacaaagccctttgcaattttccttcccatgtcccaactatgcaacctcagtccatggcttamatggtgagtgctaacatggaccagggagccacggacttccagatagaggccgccatcagcaaaatctttggctcggtgaggtcccaggcatgctgggagg

SEQ ID NO: 407524 - DNA, 201 bp, Homo sapiens
ccttaaattactgcggcaggagtctaaatataggcaatgaaagatggaagactcaggcagagctggggagctcaacgaccgcaaagcctgagcactccctrccccatccagcatttggggaagcaggagccatgtgccccctgcaggctcctcttgggctaccctccgctggctgccctggatagagatgaaccacaactc

SEQ ID NO: 407525 - DNA, 201 bp, Homo sapiens
ttggctcggtgaggtcccaggcatgctgggagggagtccagtttgggtgctcagctcccaaaaccagtctcatctgttctttgtccctaggaggcagcctrgaaggtgacagatgaatgcatccaaatcatggggggtatgggcttcatgaaggtacaggacggtcttctgcagagcctcggctgggccaggggtgggtag

SEQ ID NO: 407526 - DNA, 201 bp, Homo sapiens
cggtcttctgcagagcctcggctgggccaggggtgggtaggcacatctcagcacgggcatataatttgtgtggccctgtgctaggaacctggagtagagcrtgtgctccgagatcttcgcatcttccggatctttgaggggacaaatgacattcttcggctgtttgtggctctgcagggctgtatggtaagacagagaatt

SEQ ID NO: 407527 - DNA, 201 bp, Homo sapiens
taggaacctggagtagagcgtgtgctccgagatcttcgcatcttccggatctttgaggggacaaatgacattcttcggctgtttgtggctctgcagggctrtatggtaagacagagaattgggtgggggtagaggtggggaggacagtgagtcctgactgctggaccctcttcccccataggacaaaggaaaggagctctc

SEQ ID NO: 407528 - DNA, 201 bp, Homo sapiens
atgcgcccgtcggccgccacagccccacccttcatgatggagccaatgtagatgcctccgtctccccgctcattgctctggccaacaatggagatacccargaagttgtacttctctgtggagagaggccatgtgaaaagaggagcccctgccacaggacgcccggaaccctagagaccaggccctccccacgccctagcc

SEQ ID NO: 407529 - DNA, 201 bp, Homo sapiens
tccgccacgcccctgacggccaatgaatgaggccgtcggccacactgccccgcccccggcatctcggctttgcccaataaggaccacccggagggtttaamcgcttcgctcctggggctctggcaaatagcctcagtctttcccccactgtatccccacccccacttgttctgctccgccttccgccaccctcgcccggcc

SEQ ID NO: 407530 - DNA, 201 bp, Homo sapiens
caactaaccagtcattctccctcttcctctcaggcgggcagggctgggcagcggcctgagtctcagcggacttgtccacccggagttgagtcggagtggcragctggtaagcggccaggggtccaggagagcctgcatcagggactgcagccgatggcccctctgagccccgcactgtccccatctcttaaggcagtacgg

SEQ ID NO: 407531 - DNA, 201 bp, Homo sapiens
tgacacctggtgtatcgaggtgagactcggggctgccaagctcaggtgagggctggaggtgcaggcccaacccctccttccctctccccaggctgcagctyggatccgagagggcatggccgccctgcagtctgacccctggcagcaagagctctaccgcaacttcaaaagcatctccaaggccttggtggagcggggtgg

SEQ ID NO: 407532 - DNA, 201 bp, Homo sapiens
gcaaaagcatgtcccctggctcaatgcgcccgtcggccgccacagccccacccttcatgatggagccaatgtagatgcctccgtctccccgctcattgctytggccaacaatggagatacccaggaagttgtacttctctgtggagagaggccatgtgaaaagaggagcccctgccacaggacgcccggaaccctagagac

SEQ ID NO: 407533 - DNA, 201 bp, Homo sapiens
tggtgtatcgaggtgagactcggggctgccaagctcaggtgagggctggaggtgcaggcccaacccctccttccctctccccaggctgcagctcggatccragagggcatggccgccctgcagtctgacccctggcagcaagagctctaccgcaacttcaaaagcatctccaaggccttggtggagcggggtggtgtggtc

SEQ ID NO: 407534 - DNA, 201 bp, Homo sapiens
ctggtgtatcgaggtgagactcggggctgccaagctcaggtgagggctggaggtgcaggcccaacccctccttccctctccccaggctgcagctcggatcygagagggcatggccgccctgcagtctgacccctggcagcaagagctctaccgcaacttcaaaagcatctccaaggccttggtggagcggggtggtgtggt

SEQ ID NO: 407535 - DNA, 201 bp, Homo sapiens
caagaggattgactggaagacgagacggggctgggtgcgctggggagagctgtgcggagccacacctgctcatggtgtcctcctcgtccgagtcccccagrctggtactctccagctcgctggtcatgagggtagaggagctctcgtatccggccaggtggcgctccagccttgaggggccaccagtcctgtggcccccag

SEQ ID NO: 407536 - DNA, 201 bp, Homo sapiens
tcaaaacaggggttcacaagggtctctgacaagaaactcccatctacttctgccatgagggcaggggcacagccactagcccacgtctttgcgggactcargtaagaggtgcaccttcccccggtggacacagtcctgcacctggcacatggcttgtccagcagcacatgggtggacgtcagcccccatcctcggccagtg

SEQ ID NO: 407537 - DNA, 201 bp, Homo sapiens
gaggccacgcctccgtccacttcccgcccgttcgctccccctgcctcgcccacactgtccctccgccacgcccctgacggccaatgaatgaggccgtcggmcacactgccccgcccccggcatctcggctttgcccaataaggaccacccggagggtttaaccgcttcgctcctggggctctggcaaatagcctcagtctt

SEQ ID NO: 407538 - DNA, 201 bp, Homo sapiens
actgactcaggcttttgtcagcagggcccccaagattccaggtaatattagtgatatttggctcacccctccagccctgcctgcccctcaggaagttaggygctcgcccccacctccttacctgactctctgagagggaagcctcataatagtccaggatgtctgtcacaggaacagaactgagttacctccccaccccag

SEQ ID NO: 407539 - DNA, 201 bp, Homo sapiens
gacccaaccagagccctgaaatttgcctctctctgcccaggaatctaagtcctttgctgtgggaatgttcaaaggccagctcaccacagatcaggtgttcycatacccgtccggtaagggaagggataatcagagctgggtggggccagggtggtttcccctgccagcctggcctgaccagcctgtcccccaccctctgca

SEQ ID NO: 407540 - DNA, 201 bp, Homo sapiens
ccttccccaggaagtgaacgatcccgccaagaatgacgctctggagatggtggaggagaccacttggcagggcctcaaggagctgggggcctttggtctgyaagtgcccagtgagctgggtggtgtgggcctttgcaacacccaggtgagggcgccctatcgccacatcccagtatgccataccccagcttggcagactca

SEQ ID NO: 407541 - DNA, 201 bp, Homo sapiens
ggcacatctcagcacgggcatataatttgtgtggccctgtgctaggaacctggagtagagcgtgtgctccgagatcttcgcatcttccggatctttgaggrgacaaatgacattcttcggctgtttgtggctctgcagggctgtatggtaagacagagaattgggtgggggtagaggtggggaggacagtgagtcctgact

SEQ ID NO: 407542 - DNA, 201 bp, Homo sapiens
cttgacacagcggaagtcccttccctgaacttgctaaccgtctcttttcccagctggctctggacaagtcagattcccacccctctgacgctctgaccagraaaaaaccggccaaggcggtaggtagccccgaggccaggtggaccttagccagacccaaccagagccctgaaatttgcctctctctgcccaggaatctaa

SEQ ID NO: 407543 - DNA, 201 bp, Homo sapiens
ccaggggtgggtaggcacatctcagcacgggcatataatttgtgtggccctgtgctaggaacctggagtagagcgtgtgctccgagatcttcgcatcttcyggatctttgaggggacaaatgacattcttcggctgtttgtggctctgcagggctgtatggtaagacagagaattgggtgggggtagaggtggggaggaca

SEQ ID NO: 407544 - DNA, 201 bp, Homo sapiens
gtggccccaggcagaggagccagggtatcctggtctgaagccccactggagccatcgttgtcattgagagacaggttgactaggtctggaaagcaagggargagaggaagaaatcactgcttcaagaggctagggccccaagacaccgaatggagaggaactgggaacagttctcccagacccacccacgatggggctcaa

SEQ ID NO: 407545 - DNA, 201 bp, Homo sapiens
acgtggaccccgtacgcaccacgtccaatgacattgtggagatcttcacggtgagcccgtgtgtgctgcctagctgcctttcgtggatctctggctctcasgcccctcattctgtgctgtccactcaggactttttctgcctgattccatttctgagtgtgggatatcctggctcctgacaccctccctggatctgggtgg

SEQ ID NO: 407546 - DNA, 201 bp, Homo sapiens
cccatcccgatgatgaagacagtggcccttacaagcacatctctcctggggacaccaaggtagggcttggcttctggatatgtgaggacagaatttggacrtgggagccaggaccagagcaggggccttgagtgggtgctttgtccttaggtggtggtggagaatggggagctgatcatgggcatcctgtgtaagaagtct

SEQ ID NO: 407547 - DNA, 201 bp, Homo sapiens; identical to SEQ ID NO: 91457

SEQ ID NO: 407548 - DNA, 201 bp, Homo sapiens
acaatcagctgcggcgcaatgagcagaacggcgcagcggcccatgtcattgcagaggatgtgaagctcctccagttccatgtggccaccatggtggacaaygagctgcctggcttgccccgtgtgagtcagcatgctccccacccctctgtgtattggagccagggtgggggctagcatgaggcttcagagctctggaaga

SEQ ID NO: 407549 - DNA, 201 bp, Homo sapiens
cctccaaaatctggctttctcccttgggcagggaaacctccccaacatttctctatcatccctgagatgtggggcctgcactctgacttctgtctgccttmctctttgtcttacagggtgaagtgatgaacctcctgatgttcctgtcgacgtgggatgggaaggtcccacagccggccatcctaaagccccggcccctgt

SEQ ID NO: 407550 - DNA, 201 bp, Homo sapiens
ccaagaatgtgacgctgggtgtgccccgacttaaggagctcatcaacatttccaagaagccaaagactccttcgcttactgtcttcctgttgggccagtcygctcgagatgctgagagagccaaggtagggatcaggactgctgggctttttggccggaagaaaagaaggagaactcaactgggtgtggtggctcatgtct

SEQ ID NO: 407551 - DNA, 201 bp, Homo sapiens
tttcctgtcatctttgcctccaaaatctggctttctcccttgggcagggaaacctccccaacatttctctatcatccctgagatgtggggcctgcactctracttctgtctgccttcctctttgtcttacagggtgaagtgatgaacctcctgatgttcctgtcgacgtgggatgggaaggtcccacagccggccatccta

SEQ ID NO: 407552 - DNA, 201 bp, Homo sapiens
ctacgactggtgtggactgttgggcagcatcctaggactaatcatcattgtgggacctggactctggacactacaggaggggatcacgggtgtctacaccrccctgggctatgggcaggctttcgtgggaggactggcgctgtccctggggcttctggtctatcgttctctgcactttccctcctgcctcccaacagtggc

SEQ ID NO: 407553 - DNA, 201 bp, Homo sapiens
gtgaactcgggaggcagagcttgcagtgagccgagatcacaccactgcactccagcctgggcgacagagcgagactccgtctcaaaaaaaaaaaaaaaaaagtttttgggactgggcatggtgactcacacctgtaattctagcactttgggaggccgaggcaggcacatcatttgaggccaggagttggagacaactctg

SEQ ID NO: 407554 - DNA, 201 bp, Homo sapiens
aggctgggttaggccatctgagtctgtctcgttcattgggatccagacttgactgtcttgttaaaggctgttgctgcccagatgtgcagggagctgttggyctctggcattcagggtgggggtggtataaacccggggcagcttgcatatggcagggaagagggatccgtggaggaacagtgcagaaggctttatgttcag

SEQ ID NO: 407555 - DNA, 201 bp, Homo sapiens
tagccatcagggaaatgcaaatgaaaccagagtgatgtgccacttcacatgcactaggatgactgtaatccaaaacacagataataacaagtgttgacaargatgtggaaaaattagaaccctcatacattgctagtagaaaaggtacaactgctttaggaagttaaagcagttaccatatggcccagcagtttcattcct

SEQ ID NO: 407556 - DNA, 201 bp, Homo sapiens
actccagcctggcgacagagcgagactccatctcaaaacaaaacaaaaccaataataaaatctccatctggacacgaaagggttcaagcagttcaggcctygagaaggagggcatgacaaagatgagggaaaagaaacagggctgcatctctgagtgcctcgtttcttatcaggggcttgagttggcggggcatgtcttgg

SEQ ID NO: 407557 - DNA, 201 bp, Homo sapiens
cctggcaggcgagagcgttgagttccagaacctggctacgcttaagccttccaacaaggcttttgagaagaagtgaggaggcgggcaggcgggtggttctygcccctggggctcagggcctgagtagtaggattcccatacctattccagagagatagcctggtatgtgtcttgcactagagcttacctttcagcatcctt

SEQ ID NO: 407558 - DNA, 201 bp, Homo sapiens
tgctccctggccaggctcaatcacgtctgtaatcccagcactttgggaggccaaggtgggcagataacgaggtcaggagtttgagaccagcctggccaaartagtgaaactctgtctttactaaaaatacaaaaattagctaggtgtggtggcacgcctctgtagtcccagctactagggaagctgaggtaggagaatcac

SEQ ID NO: 407559 - DNA, 201 bp, Homo sapiens
ccgggaggcagaggttgcagtgagctgcgattgcgccactgcactccagcctggcgacagagcgagactccatctcaaaacaaaacaaaaccaataataaratctccatctggacacgaaagggttcaagcagttcaggccttgagaaggagggcatgacaaagatgagggaaaagaaacagggctgcatctctgagtgcc

SEQ ID NO: 407560 - DNA, 201 bp, Homo sapiens
ggtgccaaatggcgtcctataaatggaagctcttgtgtgaggaaggggatgatcaaataagagttttgtttttgttaagagtctgtctgccttttccgaaytcatctatccatgtcctttaagattacagtcctggccctgtgataagccagatgcagatccacatcgtactcattcactgaaagagaggcgttggctttg

SEQ ID NO: 407561 - DNA, 201 bp, Homo sapiens
aagagcgagattccatctgaaagaaaaaaagaaaaaaaaggagaacttttccccttgaataaagggttttggattcccttgataaggagggttagaagagrcgtttagagctactcagttccctgtgtcatggacttctgtctcttcccaggatattctgtgccgtctggagcatacaacgttgaggaaggtgactgccaa

SEQ ID NO: 407562 - DNA, 201 bp, Homo sapiens
ctgtctcttcccaggatattctgtgccgtctggagcatacaacgttgaggaaggtgactgccaacacagccatctactatgaccccaacccccagagcacrgtggtggcagaggatcaggaatgggtgaatgtctactatgaaatgcctgactttgatgtggcccgaatctccccctggctgttgcgggtggagctggatc

SEQ ID NO: 407563 - DNA, 201 bp, Homo sapiens
gcctcggcctctcaaagtgctgggattacaggcgtgagctaccgcgcccgtcgaggtggggctactttagatgggatggcgtcagggtctgggaaggcctrtcttagaagacattacccaaatgatgagaggcagccagtcgtcgaagccatagtttggatggcgagagcttttccggcagaggaaatagcaagtgcaaag

SEQ ID NO: 407564 - DNA, 201 bp, Homo sapiens
agcgcaagggagggcgggaaaggaaggggcggggacgcgagggcgaatctataagaagcgtcgttcagcgagttcgctgctcagaagcgccgagagcgcgsccgggacggttggagaagaaggcggctcccggaagggggagagacaaactgccgtaacctctgccgttcaggaacccggttacttatttattcgttaccc

SEQ ID NO: 407565 - DNA, 201 bp, Homo sapiens
gctggaacatgggaggtagaggttgcagtgagctgagatcgtggcattgcactccagcccaggctgataacagcgagactccacctcaaaaaaaaaaaaaagtctcactggaactgtgaggggcagagcctggtgactgactcgtttggccctcaaagaggctgtagttggaggcgagagctggggaagagaccagaggat

SEQ ID NO: 407566 - DNA, 201 bp, Homo sapiens
gggggtcctagaagtcagcgtgtcacatgtataaaacgcatgaatcacgttagagaccaaagaaaagaagatgcaatcaacgttgaggggcggccaggcgyggtggctcacgcctgtaatcccagcactttgggaggctgaggcgggtggatcacctgagctcgggagttcgagaccagcctgaccaacatggagtaaccc

SEQ ID NO: 407567 - DNA, 201 bp, Homo sapiens
gaggccgaggcgggcagattacctgaggtcgggagttcgagaccagcctgaccgacatggagaaaccccgtctctactaaaaatacaaaatgagccgggcrtggtggcgcatgcctgtaatctcagttactcaggaggctgaggcaggagaaatgcttgaacatgggaggcagaggttgtggtgaggcaagatcacaccat

SEQ ID NO: 407568 - DNA, 201 bp, Homo sapiens
caaagatcaaggatatcctggctaagtccaagggacagcccaagaagcggctcacacatgtctacgacctttgcaagggcaaaaacatatgcgagggtggrgaggagatggacaacaagttcggtgtggaacaacctgagggtgacgaggatctgaccaaagaaaaggtggctggggctggcggagacttttgggaaggag

SEQ ID NO: 407569 - DNA, 201 bp, Homo sapiens
ttgaataaacaagtgaatgaaataattgggcaaatatgcatagataatgtagaaggacttttattgcaacattgtttgaaagtgacaattataaattactyggtatttactaataggaatcctgttgaataacttagggtgtattcttacaatgtaatagaggaacttcccaataaggtcccacactgtgctgatgccctg

SEQ ID NO: 407570 - DNA, 201 bp, Homo sapiens
ctgagctcgggagttcgagaccagcctgaccaacatggagtaaccccgtctctactaaaaataaaaattagccgggcatggtggtatgtgcctgtaatccyagctacttgggaggctgaggcaacaagagtgaaactatctcaaaaaataaaaaaaacattgaggggccagtcatacccacctaatttagggatagggaat

SEQ ID NO: 407571 - DNA, 201 bp, Homo sapiens
ctgcatctttaatgatgacaatgcagagaagctggtgctccgtattcgcatcatgaacagcgatgagaacaagatgcaagaggtaatgggggtcctagaartcagcgtgtcacatgtataaaacgcatgaatcacgttagagaccaaagaaaagaagatgcaatcaacgttgaggggcggccaggcgtggtggctcacgcc

SEQ ID NO: 407572 - DNA, 201 bp, Homo sapiens
tacctgaggccaggaggttgaagctgcaatagtgagctgagatcatgctactgtacttcagcctgggcaacagagtgagactctatctcaaaaaaaaaaaatctgtcaagccacaaaaagacagtgataagccagatgcactggctcataactctaatctcaacactttgggaggccgaggcaggaggctcacgagagccc

SEQ ID NO: 407573 - DNA, 201 bp, Homo sapiens
cgtgagcttgatgcgggtgctgagtgagaaggacgtggaccccgtacgcaccacgtccaatgacattgtggagatcttcacggtgagcccgtgtgtgctgyctagctgcctttcgtggatctctggctctcaggcccctcattctgtgctgtccactcaggactttttctgcctgattccatttctgagtgtgggatatcc

SEQ ID NO: 407574 - DNA, 201 bp, Homo sapiens
ggacccgcccgccttggcctcccaaagtgctgggattacaggcatgagccaccatgcccggcctctggtctaacaattttatcaaccttttaatatgtaartcatttgatcaagcattaccacttataaaaattcatccttaggttaaaaaagcttaattatcccctcaatgatgcccctttcccagtcttgcatggttca

SEQ ID NO: 407575 - DNA, 201 bp, Homo sapiens
ctgcataccaggtgccaaatggcgtcctataaatggaagctcttgtgtgaggaaggggatgatcaaataagagttttgtttttgttaagagtctgtctgcyttttccgaactcatctatccatgtcctttaagattacagtcctggccctgtgataagccagatgcagatccacatcgtactcattcactgaaagagaggc

SEQ ID NO: 407576 - DNA, 201 bp, Homo sapiens
gtgctgggattacaggcatgagccaccatgcccggcctctggtctaacaattttatcaaccttttaatatgtaaatcatttgatcaagcattaccacttayaaaaattcatccttaggttaaaaaagcttaattatcccctcaatgatgcccctttcccagtcttgcatggttcattaaatagtttctccattcatccatt

SEQ ID NO: 407577 - DNA, 201 bp, Homo sapiens
tccttaggttaaaaaagcttaattatcccctcaatgatgcccctttcccagtcttgcatggttcattaaatagtttctccattcatccatttgctcaggcsaaaaatctaaaagccatctttgattctctttctcacaatctccacttagtccatctgccagagtgtcagtcctacctttcaaaatatgcctggaatccag

SEQ ID NO: 407578 - DNA, 201 bp, Homo sapiens
atagtgaaactctgtctttactaaaaatacaaaaattagctaggtgtggtggcacgcctctgtagtcccagctactagggaagctgaggtaggagaatcastttaacctgggaggtggaggttgcattgagctgatactgtgccattgcactccagcctgcgtgacggagtgagactgtctcaaaaaaaaaaaaaaaaagg

SEQ ID NO: 407579 - DNA, 201 bp, Homo sapiens
tcatgaacagcgatgagaacaagatgcaagaggtaatgggggtcctagaagtcagcgtgtcacatgtataaaacgcatgaatcacgttagagaccaaagaraagaagatgcaatcaacgttgaggggcggccaggcgtggtggctcacgcctgtaatcccagcactttgggaggctgaggcgggtggatcacctgagctcg

SEQ ID NO: 407580 - DNA, 201 bp, Homo sapiens
acactctgcggcagacgtttgagaatcaggtgaaccgcattcttaacgatgcccgagacaagactggctcctctgctcagaaatccctgtctgaatacaayaacttcaagtctatggtcgtgtccggagctaaaggttccaagattaacatctcccaggtgagaagccttgtttttccatatatggggccgctgtgaagtt

SEQ ID NO: 407581 - DNA, 201 bp, Homo sapiens
cattgacttgcgtttccaccccaagcccagtgaccttcacctgcagaccggctataaggcacgtagcaggccagggcctctctcagccacctgagcagaawgctttccaagatagggcaggctgggttaggccatctgagtctgtctcgttcattgggatccagacttgactgtcttgttaaaggctgttgctgcccagat

SEQ ID NO: 407582 - DNA, 201 bp, Homo sapiens
gctctgcccgtaaccaggtcagtggctccagggctctgcctcttagctggagggcgaggtgtctaaagggaggaagacctgtaggtggggatgggtggatsgacctgggtttgaaaattcccctgctacttactagctgtatgatctttaatgagtcctttcacatggttaaaggccacaaacgtgtttctgaatctataa

SEQ ID NO: 407583 - DNA, 201 bp, Homo sapiens
gtgaggtattttaaatttccaagagaaacacaggtacatttgtcagataccctggaactcctagttcctggtagttctgtttcaacattagatggtgccaratccctttctataatgtcatatttttgtgaaactgggtttttagcagttgctaagtacaggcaaaaatcagtttgtagaagaaataaaggtggtgctgtt

SEQ ID NO: 407584 - DNA, 201 bp, Homo sapiens
gtttgtagaagaaataaaggtggtgctgtttagtctgattccaaggtttgagaggtgcagtgcctaacaggcgccataagtgagtgagatggttatttggyaaagaaataaaaatgttattttgttttaatatattaatagtattttcaacttgtgtgtattttctcaaatggctagtaagttcctaggacataaatgctt

SEQ ID NO: 407585 - DNA, 201 bp, Homo sapiens; identical to SEQ ID NO: 91463

SEQ ID NO: 407586 - DNA, 201 bp, Homo sapiens
cctggtgaaaccctgtctctactaaaaatacaaaaattagctcgatgtggtggcgctcacctgtagtcccagctacttgggaggctgaggcaggagaatcrcttgaacccgggaggcagaggttgcagtgagctgcgattgcgccactgcactccagcctggcgacagagcgagactccatctcaaaacaaaacaaaacca

SEQ ID NO: 407587 - DNA, 201 bp, Homo sapiens
gtaagtgctgtgagagttactgaaatggtaagggcactgtgggctgttgataatgttagggaatctatggataaatgaaaaagttactcagaagtatgcaragtgaaggccttatgttaaagtgggaacgtatttacggtttttttaaagcatgaaaaaaaatgcatgccgtggctcatgcctgtaatcccagcacttttg

SEQ ID NO: 407588 - DNA, 201 bp, Homo sapiens
ggagttttttggttgccattgtgcatgttacattagtactatgctgtagtctactaagtctaagtgtacaatagcattacaatttttttttttttttttttgagacggagtcttgctctgtcattcaggctgaagtgcagtggtgcgatctcagctcactgcaacctccgcctcctgggttcaagtgattctcctgcctca

SEQ ID NO: 407589 - DNA, 201 bp, Homo sapiens; identical to SEQ ID NO: 91466

SEQ ID NO: 407590 - DNA, 201 bp, Homo sapiens; identical to SEQ ID NO: 91469

SEQ ID NO: 407591 - DNA, 201 bp, Homo sapiens; identical to SEQ ID NO: 91471

SEQ ID NO: 407592 - DNA, 201 bp, Homo sapiens
agagaagctggtgctccgtattcgcatcatgaacagcgatgagaacaagatgcaagaggtaatgggggtcctagaagtcagcgtgtcacatgtataaaackcatgaatcacgttagagaccaaagaaaagaagatgcaatcaacgttgaggggcggccaggcgtggtggctcacgcctgtaatcccagcactttgggaggc

SEQ ID NO: 407593 - DNA, 201 bp, Homo sapiens
ggaagcaggctggaattggtgggaggcgggcaggctgggtggctcctcaaggtttcactgcagacatcttcccaaccctgacttttctctttaactgtagygtgacaactccgtacaatgcagactttgacggggatgagatgaacttgcacctgccacagtctctggagacgcgagcagagatccaggagctggccatgg

SEQ ID NO: 407594 - DNA, 201 bp, Homo sapiens
tataaaacgcatgaatcacgttagagaccaaagaaaagaagatgcaatcaacgttgaggggcggccaggcgtggtggctcacgcctgtaatcccagcactktgggaggctgaggcgggtggatcacctgagctcgggagttcgagaccagcctgaccaacatggagtaaccccgtctctactaaaaataaaaattagccgg

SEQ ID NO: 407595 - DNA, 201 bp, Homo sapiens
tttatcccgtttgagtttccctgagatttttgattctgtaaaattgccttttagcgtatttgggaagtttttagacttttttttttttttttaagatggcrtctcggtctatcgcccaggctggagtgcagtggcgctatcttggctcactgcaacctctgactcctgggttcaagcgattctcctgcctcagcctcccaa

SEQ ID NO: 407596 - DNA, 201 bp, Homo sapiens
tccagcctaggcgacggtgagactccgtctcgaaaaaatttggatctcagatggtatagtagctttctttggatgtgctgcataccaggtgccaaatggcrtcctataaatggaagctcttgtgtgaggaaggggatgatcaaataagagttttgtttttgttaagagtctgtctgccttttccgaactcatctatccatg

SEQ ID NO: 407597 - DNA, 201 bp, Homo sapiens
cctgttgggccagtccgctcgagatgctgagagagccaaggtagggatcaggactgctgggctttttggccggaagaaaagaaggagaactcaactgggtrtggtggctcatgtctgtaatcccagcactttgggaggccaaggcaggtggatcacctgaggtcaggagttcaagactaacctggccaaggtggtgaaacc

SEQ ID NO: 407598 - DNA, 201 bp, Homo sapiens
gtgcgtgccaccacacccagctaattttttagtagagactgggtttcagcatgttagccaggatggtctcgatttcctgacctcgtgatccacctgcctcrgcctcccaaagcactgggattacaggcatgagccactgtgcccagcctcaagccataggtttttatgctacatgggactctatcatcattattccaaatc

SEQ ID NO: 407599 - DNA, 201 bp, Homo sapiens
tccagcgtgggcaacaagagtgagactctgtctcaaaaatagtaataaaataaaaaaacaggctgggcgcagtggctcacgcctgtaatcccagcactttkggaggccgaggcgggcagatcacgaggtcaggagattgagaccatcctggctaagacggtgaaaccccgtctctactaaaaaatacataaataaataaat

SEQ ID NO: 407600 - DNA, 201 bp, Homo sapiens
gaggccgaggcgggcagatcacgaggtcaggagattgagaccatcctggctaagacggtgaaaccccgtctctactaaaaaatacataaataaataaatawtaaaaaaaacatgtttccccaaagaagagtactattcatgtaaatgatcagtaagtgcatgaaaagatactcaacatcattagccatcagggaaatgcaa

SEQ ID NO: 407601 - DNA, 201 bp, Homo sapiens
ttcgtaggacactatcaagaaagtaaaaagataacacagagaatgggagaaaatatttggaaatcatctgataagggccatacataaagaatatataaagractataacaataaaaagtcaacaataaaaagtctcaaaggatttcaacaaatgtttcctggctgggcgtggtggctcacgcctgtaatcctaacactttg

SEQ ID NO: 407602 - DNA, 201 bp, Homo sapiens
cacctgaacccggggatggaggttgcggtgacccgagattgcaccattgcactccagcctgggcaacaagagtgagactgtatcaaaaaaaaaaaaaaaaaccctaaatgaaagacctctcatattcatggattggaagacttaatattgttgaatattaatattgttaatatacttcccaaaataagctatagatctaat

SEQ ID NO: 407603 - DNA, 201 bp, Homo sapiens
atggtccaccctctgggctctgatggcccctgtctctccttggaagggccatggtggctgtgggcggtaccagcccaggatccggcgttctggcctagagytgtatgcggaatggaagcacgttaatgaggactctcaggagaagaagatcctgctgagtccagagcgagtgcatgagatcttcaaacgcatctcagatga

SEQ ID NO: 407604 - DNA, 201 bp, Homo sapiens
tcacctgaacccggggatggaggttgcggtgacccgagattgcaccattgcactccagcctgggcaacaagagtgagactgtatcaaaaaaaaaaaaaaaaaccctaaatgaaagacctctcatattcatggattggaagacttaatattgttgaatattaatattgttaatatacttcccaaaataagctatagatctaa

SEQ ID NO: 407605 - DNA, 201 bp, Homo sapiens
cactttaacctgggaggtggaggttgcattgagctgatactgtgccattgcactccagcctgcgtgacggagtgagactgtctcaaaaaaaaaaaaaaaaaggccaggcgcggtggctcacacctgtagtcccagcactttgggaggctgaggcgggcggatcacgaggtcaggagatcgagaccgtcctggctaacacgg

SEQ ID NO: 407606 - DNA, 201 bp, Homo sapiens
tcactttaacctgggaggtggaggttgcattgagctgatactgtgccattgcactccagcctgcgtgacggagtgagactgtctcaaaaaaaaaaaaaaaaaggccaggcgcggtggctcacacctgtagtcccagcactttgggaggctgaggcgggcggatcacgaggtcaggagatcgagaccgtcctggctaacacg

SEQ ID NO: 407607 - DNA, 201 bp, Homo sapiens
acaagatgcaagaggtaatgggggtcctagaagtcagcgtgtcacatgtataaaacgcatgaatcacgttagagaccaaagaaaagaagatgcaatcaacrttgaggggcggccaggcgtggtggctcacgcctgtaatcccagcactttgggaggctgaggcgggtggatcacctgagctcgggagttcgagaccagcct

SEQ ID NO: 407608 - DNA, 201 bp, Homo sapiens
gaaaattcccctgctacttactagctgtatgatctttaatgagtcctttcacatggttaaaggccacaaacgtgtttctgaatctataaatgatagtgggmagtcctgcctcctggggtggtgtgaggatgagagctgtgctgtgtgcctggtacgttcctgccgagcgctggcagtggtggctggaccatgatgattctg

SEQ ID NO: 407609 - DNA, 201 bp, Homo sapiens
cagacatttgttaggagcccaccatgtttcaggcaggcacatgggattcaggatggttgaggcattctgcctgcctgagaggtgcttatagttatagggargacagacccccgtaggtcattttattgcattgttgtatgtgcagtgatagagggctgtggaagcacagaggaggggtgcctgtctactttgggcaggctg

SEQ ID NO: 407610 - DNA, 201 bp, Homo sapiens
gtgcctgtctactttgggcaggctgtggaaaggcttcctggaggaagcagtgcctgagccgagtcttgaaataggagttttgcagtgggaagagcattccwagcagagaggcactagcatatagaaaaccccggaggaacgcagcacgtgttgcgctggatgtgataggcgactccagggaattgttactgaggagtgaac

SEQ ID NO: 407611 - DNA, 201 bp, Homo sapiens
aaatgaaggttgagaacatcataaaatccttttgggaagctgtcctgctgagtttggatgtcagtctgaggacaagagggtatgaatgattacatttttaktttattattaatttttattttatttatttttagcacacgtttttattttagaatgagcaccccagttgtaatgtagaaggattggagagagacaggctgg

SEQ ID NO: 407612 - DNA, 201 bp, Homo sapiens; identical to SEQ ID NO: 91464

SEQ ID NO: 407613 - DNA, 201 bp, Homo sapiens; identical to SEQ ID NO: 91465

SEQ ID NO: 407614 - DNA, 201 bp, Homo sapiens
atggtctacctttcgcttgaatcttaggtcagtccctggctgagggaagcaggctggaattggtgggaggcgggcaggctgggtggctcctcaaggtttcrctgcagacatcttcccaaccctgacttttctctttaactgtagcgtgacaactccgtacaatgcagactttgacggggatgagatgaacttgcacctgcc

SEQ ID NO: 407615 - DNA, 201 bp, Homo sapiens; identical to SEQ ID NO: 91467

SEQ ID NO: 407616 - DNA, 201 bp, Homo sapiens
aggagcccaccatgtttcaggcaggcacatgggattcaggatggttgaggcattctgcctgcctgagaggtgcttatagttatagggaagacagacccccrtaggtcattttattgcattgttgtatgtgcagtgatagagggctgtggaagcacagaggaggggtgcctgtctactttgggcaggctgtggaaaggcttc

SEQ ID NO: 407617 - DNA, 201 bp, Homo sapiens
ttggcgtcccaaagtgctgggattacaggcttgagccactgcgcctggtcaataatgtattcttttaggtagagtgtgggctacattgatgagtgagaagrtgatccttgttttcaagttacttataatcttgtgagggatttcctatgtatgcagcaaatagttactgagcctcaaccatatgttggttactgtgctagg

SEQ ID NO: 407618 - DNA, 201 bp, Homo sapiens
ctgggattccaggcatgagacactgcgcctggccgatgtcatatctttaggagcgcttccctgaccactctgtttaaatagcatcccccgcccttcccttsttttctctgatcattctctgctatattttccttcacagcctgtcactccagaaagaattagtttttctgtttcttgcttccttgctagagaatgaatttc

SEQ ID NO: 407619 - DNA, 201 bp, Homo sapiens
gttccagctttgcaaatgtagtcatccatgaggactgtctccctgagatttcatcaggtcatgttgatgagagttttgaacctgtctgaggctgagaggtktgcagaacttcttcagctttgcatctgtagaccattttggtttctacccagcagtggccaatcagacctattatgaggggattactggtttgactgtcag

SEQ ID NO: 407620 - DNA, 201 bp, Homo sapiens
ttacaggcttgagccactgcgcctggtcaataatgtattcttttaggtagagtgtgggctacattgatgagtgagaagatgatccttgttttcaagttacytataatcttgtgagggatttcctatgtatgcagcaaatagttactgagcctcaaccatatgttggttactgtgctaggtgctgaggatatgaagagaaaa

SEQ ID NO: 407621 - DNA, 201 bp, Homo sapiens; identical to SEQ ID NO: 91477

SEQ ID NO: 407622 - DNA, 201 bp, Homo sapiens
aaggcgatccgacgaatcctagggagtcttcacaagtttggttaagaagccaaacccgggtagcttcctcctcttctgtaatacaaatgttaactgagcayctgctctgttgaagacacaggagactcgggttacagaggtgaacacgacagaccaggaccctaccttcaagagcactgtctgtgggaaagggcaagcagt

SEQ ID NO: 407623 - DNA, 201 bp, Homo sapiens
acagaagtcttaggggtcagagtgtatggaggtacggaggggtctttgaattggctttgagatagagctgttgtccttgctgttagaagatggatttagaygttgctaggtgaggggaaggttacaaggcgggttggtactagagctttgtaccagcgtgtgcacaaaattttggggaaagagggtgctggatttccttcg

SEQ ID NO: 407624 - DNA, 201 bp, Homo sapiens
aaaggcgatccgacgaatcctagggagtcttcacaagtttggttaagaagccaaacccgggtagcttcctcctcttctgtaatacaaatgttaactgagcwcctgctctgttgaagacacaggagactcgggttacagaggtgaacacgacagaccaggaccctaccttcaagagcactgtctgtgggaaagggcaagcag

SEQ ID NO: 407625 - DNA, 201 bp, Homo sapiens
ggctcatgtctgtaatcccagcactttgggaggccaaggcaggtggatcacctgaggtcaggagttcaagactaacctggccaaggtggtgaaaccccatstctactaaaaatagaaaaattagccgggcatggtcgtgtgtgcctgtaatcccagctgctagttggggctgagacaggagaatcgcttgaacctgggggg

SEQ ID NO: 407626 - DNA, 201 bp, Homo sapiens
aaagcagatgcagaggggtgggcctgtactcaggtcccagtggcagtccttgggcctgaatttttctctgtccaggattcttgcctccaaaccactgtacytggtcggctgtgcacctttgggaaccttacagtgcgttttgtggggaccaaggtcccagagcccacctgtccactagctaccccttgcacttccaggttc

SEQ ID NO: 407627 - DNA, 201 bp, Homo sapiens
tccctgtctgaatacaacaacttcaagtctatggtcgtgtccggagctaaaggttccaagattaacatctcccaggtgagaagccttgtttttccatatayggggccgctgtgaagtttgggaggaggaaggaaggtgtttgtatgtattagggtcaggagaatcacgggagttgggggaaattttgggaactgttattct

SEQ ID NO: 407628 - DNA, 201 bp, Homo sapiens
ggctggcggagacttttgggaaggaggggtcagaggcctggagggaggaaactggaagggaaggaaacaggaggggctggcctggtgtggagggaaatggyccaccctctgggctctgatggcccctgtctctccttggaagggccatggtggctgtgggcggtaccagcccaggatccggcgttctggcctagagctgta

SEQ ID NO: 407629 - DNA, 201 bp, Homo sapiens
gcatgcccgctgcgcaccatcaagagagtccagttcggagtcctgagtccggatgaactggtaagcggctctgtcctccccttcccccctcctcccctggsgggcggggccggacgggggctgcggaaacttggcgctttctcgctgcttatgggtgacgggccaggagcatggctcagcagcgccaaggccgtgtaggcg

SEQ ID NO: 407630 - DNA, 201 bp, Homo sapiens
ctgcttgatgcagagaagtgcaagtatggcatggagatccccaccaatatccccggcctgggggctgctggacgtgagtatgaggccccagctgcggtacytgcttgcgtcggcgaggcgggggggcaggccatgggtgcaagggtgtcaccagtccatgattgctgttcttgctcctcacgatttcctgtgttcctcttt

SEQ ID NO: 407631 - DNA, 201 bp, Homo sapiens; identical to SEQ ID NO: 91460

SEQ ID NO: 407632 - DNA, 201 bp, Homo sapiens; identical to SEQ ID NO: 91461

SEQ ID NO: 407633 - DNA, 201 bp, Homo sapiens; identical to SEQ ID NO: 91462

SEQ ID NO: 407634 - DNA, 201 bp, Homo sapiens
gatacatccagcggcggctgatcaagtccatggagtcagtgatggtgaagtacgacgcgactgtgcggaactccatcaaccaggtggtgcagctgcgctayggcgaagacggcctggcaggcgagagcgttgagttccagaacctggctacgcttaagccttccaacaaggcttttgagaagaagtgaggaggcgggcagg

SEQ ID NO: 407635 - DNA, 201 bp, Homo sapiens
caggcgggtggttctcgcccctggggctcagggcctgagtagtaggattcccatacctattccagagagatagcctggtatgtgtcttgcactagagcttrcctttcagcatccttccccacctatctgaaacagctgtgtgacatgggggaggtggtggatggaggtggatttaagattggtccccacatcgtccctgct

SEQ ID NO: 407636 - DNA, 201 bp, Homo sapiens
gagaccagcctgaccaacatggtgaaacaagggtgaaatacaaaacttagccgggcgtggtggcgtgtgcctataatcccagctactcaggacgctgaggsaggagaatcgcttgagcacaggaggcagaggttgcagtgagccaagagtgcgcctttgcactccagcctgggcaacagagcaagactccgtctcaaaaag

SEQ ID NO: 407637 - DNA, 201 bp, Homo sapiens
ctcatctcctttgttggctgcttccccacaggtggtgccatgtctcccagctactcgccaacgtcacctgcctacgagccccgctctcctgggggctacayaccccagagtccctcttattcccccacttcaccctcctactcccctacctctccatcctattctccaaccagtcccaactatagtcccacatcacccagc

SEQ ID NO: 407638 - DNA, 201 bp, Homo sapiens
gtggcgtgtgcctataatcccagctactcaggacgctgagggaggagaatcgcttgagcacaggaggcagaggttgcagtgagccaagagtgcgcctttgmactccagcctgggcaacagagcaagactccgtctcaaaaagggagttggagagagtaaatagaaaaaagatttatggctattggaatgtgctttcactgg

SEQ ID NO: 407639 - DNA, 201 bp, Homo sapiens
gggaggagaatcgcttgagcacaggaggcagaggttgcagtgagccaagagtgcgcctttgcactccagcctgggcaacagagcaagactccgtctcaaaragggagttggagagagtaaatagaaaaaagatttatggctattggaatgtgctttcactggctttaaggattttataggatagtaagagggtaaagcact

SEQ ID NO: 407640 - DNA, 201 bp, Homo sapiens; identical to SEQ ID NO: 91473

SEQ ID NO: 407641 - DNA, 201 bp, Homo sapiens
aagtgacaattataaattacttggtatttactaataggaatcctgttgaataacttagggtgtattcttacaatgtaatagaggaacttcccaataaggtyccacactgtgctgatgccctgagacactgtggcacacggtgggcacagtgaggtattttaaatttccaagagaaacacaggtacatttgtcagataccct

SEQ ID NO: 407642 - DNA, 201 bp, Homo sapiens
ggagagagtaaatagaaaaaagatttatggctattggaatgtgctttcactggctttaaggattttataggatagtaagagggtaaagcactgttacaggygtacctctgaacctgtttactgtaagtcagtttttataaattaaataattaaaaatgtattagggaacaccatagaacatggctgaaagaaattgtaaaa

SEQ ID NO: 407643 - DNA, 201 bp, Homo sapiens
tctttaatgatgacaatgcagagaagctggtgctccgtattcgcatcatgaacagcgatgagaacaagatgcaagaggtaatgggggtcctagaagtcagygtgtcacatgtataaaacgcatgaatcacgttagagaccaaagaaaagaagatgcaatcaacgttgaggggcggccaggcgtggtggctcacgcctgtaa

SEQ ID NO: 407644 - DNA, 201 bp, Homo sapiens
aaaaccctaaatgaaagacctctcatattcatggattggaagacttaatattgttgaatattaatattgttaatatacttcccaaaataagctatagatcyaatataatccctatcaaaattccaactggctttttctcagaaatttattaagctgatgttaaaattcatatggaaatgcaagggatatagaatagccaaa

SEQ ID NO: 407645 - DNA, 201 bp, Homo sapiens
agtgacaattataaattacttggtatttactaataggaatcctgttgaataacttagggtgtattcttacaatgtaatagaggaacttcccaataaggtcscacactgtgctgatgccctgagacactgtggcacacggtgggcacagtgaggtattttaaatttccaagagaaacacaggtacatttgtcagataccctg

SEQ ID NO: 407646 - DNA, 201 bp, Homo sapiens
gaagctcttgtgtgaggaaggggatgatcaaataagagttttgtttttgttaagagtctgtctgccttttccgaactcatctatccatgtcctttaagatkacagtcctggccctgtgataagccagatgcagatccacatcgtactcattcactgaaagagaggcgttggctttgtctgatgctagctttttcttaggcg

SEQ ID NO: 407647 - DNA, 201 bp, Homo sapiens
  misc_feature (1)...(201): n = A,T,C or G
atggcgtcctataaatggaagctcttgtgtgaggaaggggatgatcaaataagagttttgtttttgttaagagtctgtctgccttttccgaactcatctanccatgtcctttaagattacagtcctggccctgtgataagccagatgcagatccacatcgtactcattcactgaaagagaggcgttggctttgtctgatgc

SEQ ID NO: 407648 - DNA, 201 bp, Homo sapiens
cccttctccctaaaagtgtggacttagattcccacggccagccacccagcagtgctttaccaagtcttggctagggttccacccctggggtgtagttaccrgcaaccgaaggttggaagcggggaagagcagccccccaagcgcaatcctcatgatgggatggcgtttgctggtcaggggcccagagacctgtctcaggcg

SEQ ID NO: 407649 - DNA, 201 bp, Homo sapiens
gctgggcatacacccacgtcctctttctctatctctttgtcacaactccaatctcggcagccctgagagcagatggctttggagacaatcctttctatcaytgtttggtagcagagattcttccagcgcccgggaagctactgggtaagagcacctggcccttagaagtccacctctccagccggcctcagaggtctcccc

SEQ ID NO: 407650 - DNA, 201 bp, Homo sapiens
gctgaggctggggtgggagcaaagcaccccacagaccccactgttatcccctgtccccagagcccagccggtgtcattttctgatccccttcagctcaaasaatagctattttttgcctctttctctccacaacaggtcaagggattggttccaaaataatcaaaaaggtggctgaggtgaggagatgggtggggcgacaa

SEQ ID NO: 407651 - DNA, 201 bp, Homo sapiens
ctctctcagggccctgcgtggtgggctatgggatatactatttcatctacagtacatggaagggacgcaccatttatctggaggatatctatgtgatgccrgaatatcggggtactgggcagaagctgaggctggggtgggagcaaagcaccccacagaccccactgttatcccctgtccccagagcccagccggtgtcat

SEQ ID NO: 407652 - DNA, 201 bp, Homo sapiens
gcgcgaggtagccagtgggcctctgctctccataatcagccactgtccactcggcggctcagacaactcttgggagaatgtgtagaggcaggcagccttgygtgtgggcggtggagggttaaaggttgcccggggaggagggggtaaaggaaacaggggcactgacccttgacccctgcccaggggcccagtcacaagact

SEQ ID NO: 407653 - DNA, 201 bp, Homo sapiens
ctgtgagtccagatctcatggcttctgttcagggcctggtccacatccagcctctgaccttgtgcccaaaggccattcaggcaaaaagaggtggaagagtyttctcctagagggaggtagtgcaaaggtggcattagagcattaaggtggctcggatccagaatcttctccccacttttccactcctccaacctgagtttg

SEQ ID NO: 407654 - DNA, 201 bp, Homo sapiens
ttgaaagagggagtgagaaaacctttttcttttttgaccccagaaaagttagtgttgtcttctcccacaggtggccttggataagggctgctcccaattcygcctggccgtcctggactggaaccagagggccatggacttgtacaaggccctaggagcccaagatctgacggaagctgagggctggcacttcttctgctt

SEQ ID NO: 407655 - DNA, 201 bp, Homo sapiens
gggcagatgctgagatctcggcctgtttgtccagccaggaatcccggcgcaggcagccatccagggcaggaaccagctggagtgtgacagagataagatayggggatgtagaaatcagggcatcggagccgcagtcccgacctccctgccctcagttgactcccctctgagcatttggcctcccccttgcagctctcaacc

SEQ ID NO: 407656 - DNA, 201 bp, Homo sapiens
ggtagaggaaatggagagcggggatgggaaggaaaggcggaggctagccagagcctaatggctgctctgacaccctcgccccaaaccctcctttaaagatycgcaagcacatagatccgctgaccggctgcctgaggtactgcaccccgcggggccgctttgtgcacgttccgcctcagctgccctgttcggactgggcca

SEQ ID NO: 407657 - DNA, 201 bp, Homo sapiens; identical to SEQ ID NO: 91541

SEQ ID NO: 407658 - DNA, 201 bp, Homo sapiens
tggcccaacataacaggcccgaagacctctgggtatcttacctgggacgcgtgtacgacctaacgtcattggcacaggaatacaagggtaagggccacacrttgggccggggccggagtgtgtgtgtgtgcacgcgcgcgtttgcctggttctcgaagggctggcattgacagtggctgtgctgctcttttcaagggaacc

SEQ ID NO: 407659 - DNA, 201 bp, Homo sapiens
ttcgagtttggctttttctgtgccttgaggaaaagtggtggggccgaggggtgcctggacccagatctccactcctctccaggagctagcctgtgcccttytgaagtgtaaaggccctattccctgccttcattacagtttgctctgagaaaattagtgaattaatctttgggaatgatacaagaagatcaagtaccttgg

SEQ ID NO: 407660 - DNA, 201 bp, Homo sapiens
ggccacacgttgggccggggccggagtgtgtgtgtgtgcacgcgcgcgtttgcctggttctcgaagggctggcattgacagtggctgtgctgctcttttcwagggaacctgctgctgaaacccatcgtggaagttgcaggccaggatatcagccactggtttgatccaaagaccagagacgtgagttatgctggaacctgg

SEQ ID NO: 407661 - DNA, 201 bp, Homo sapiens
atcccctctcctccccctcctagtctcctcggcaacggcacagatctcgcgagcttctcctacttctctagcgctgtggctcactgaagcgtactacgccrgatgtcttaagatatcgcgagacctttacctctggtttcttacacatcctttagaaactggaatttagcgagaatacattctttcatactgcctcctccc

SEQ ID NO: 407662 - DNA, 201 bp, Homo sapiens; identical to SEQ ID NO: 91539

SEQ ID NO: 407663 - DNA, 201 bp, Homo sapiens
taagggccacacgttgggccggggccggagtgtgtgtgtgtgcacgcgcgcgtttgcctggttctcgaagggctggcattgacagtggctgtgctgctctyttcaagggaacctgctgctgaaacccatcgtggaagttgcaggccaggatatcagccactggtttgatccaaagaccagagacgtgagttatgctggaac

SEQ ID NO: 407664 - DNA, 201 bp, Homo sapiens
gctcccgacctctttcctttcgcgagatcccctctcctccccctcctagtctcctcggcaacggcacagatctcgcgagcttctcctacttctctagcgcygtggctcactgaagcgtactacgccggatgtcttaagatatcgcgagacctttacctctggtttcttacacatcctttagaaactggaatttagcgagaa

SEQ ID NO: 407665 - DNA, 201 bp, Homo sapiens
accccccatcgcagcccgccttcagatgtccgagcgcagcatcctcagccggctggccagcaagggcacggagcctcaccccacaccggtaaccctctttscccctagctccagttttccctgtttgtgttcctcctgcacacatacaaacacttccatcagaatcctatacaatatggaaaaacaacttgctagaacaca

SEQ ID NO: 407666 - DNA, 201 bp, Homo sapiens
tggcgcaatcttggctcactgcaacctctgcctcccaggttcaagcaatttttctgcctcagcctcccgagtagctgagactacaggtgcgcaccactacrcccagctaatttttgtatttttagtagagacggggtttcgccatgttggccaggatggtctccatctcttgacctcgtgatcctcccaccttggcctccc

SEQ ID NO: 407667 - DNA, 201 bp, Homo sapiens
agggtaaagagcctgggaaaaaggaaatatgggaaaatctaggtcatggacagtgggaagtaggtctggaatgggttcagaaaagaaagcgtaggactccyaaggatgaggcctcattcagacccactctttttccagagaactaattatgggggaagaccctgcccagccccgcaagtataagaagaagaagaaggagct

SEQ ID NO: 407668 - DNA, 201 bp, Homo sapiens
ggcctcccctttccctcttggctttctgaatagaccagaagagacgtcagaggctgcttacattttacaactgaaatgaaaacccacctcccctctccccytgggcaatttttatctccctttcagccctccaagtcgaatgagtgacccagatacaccccctcagatgactttcggaggtaaaacttcgggaaattattt

SEQ ID NO: 407669 - DNA, 201 bp, Homo sapiens
ctcctagggagcattcagtaactggtgactgtcattagtaacgttgtctcacctaccttactgctgaacttggggcttttctcagcaccatggatcacccrtgtccgcacaagagttgagcaccccaccccagagcagaaccagcatggtctgactctttcacactccgtcctacggaagcccatcttcagggcccatgga

SEQ ID NO: 407670 - DNA, 201 bp, Homo sapiens
gctatttagagggaaagagagaagcctagaagtcagagccttcctctgctaaaagggaaagacataaggtagagtcattaggaactacccagaggccaggygggtttgcaggagatttaaactcttcggtggttgcacaggcatcctgtggacacccagggccattgcttagagtaggttttgcaggagaagcagaggggc

SEQ ID NO: 407671 - DNA, 201 bp, Homo sapiens
ccctgcttggggaacagcagggggacctccgcacccccgggcctctggctgccatgcggcacaaatgcaccaaacttcaaaacggccaactccgggctctytgtaaaactgtcatattgatccgtgtggcttctgtggcaaacgttcctgtctagccgagacgacctttgggggagcggggggtgctttcttgtgggtcgg

SEQ ID NO: 407672 - DNA, 201 bp, Homo sapiens
aatctgaggtggtaagtctgagatcaggggcaaggaacttgccgacctgttaattttcttctcttctggctcttagcaacttggagggcttcctggaggartttgctgacatatccaaagaggaccagatcaagaaactgcatgatttgctggggccacacatgctgcggagactcaaggcagatgtctttaagaacatgc

SEQ ID NO: 407673 - DNA, 201 bp, Homo sapiens
ctggagacaccggtgagggaatgagcttgtggattcaagggattctgacgatgagggcatgaaagccaaaactccagcataaaatgagggtacagtagggmctgattcaacctggagttcagggcaatggccacctgagctgggttgtttgagataggcttgctaaagaggtagtgtaaggaacagaaacaagatctggct

SEQ ID NO: 407674 - DNA, 201 bp, Homo sapiens
ggaggaagctgaaaaccaggaggaaaagccagagaagaacagcagaattggggagaagatggagacagaggtgtgtggctccctggattcccctgtggagygggaggggagggggcttggaggccaggtacctgggagccctctggctcatcctgaccccattgtcctcttccaggctgatgcccccagcccagccccatc

SEQ ID NO: 407675 - DNA, 201 bp, Homo sapiens
tgggttcagaaaagaaagcgtaggactcccaaggatgaggcctcattcagacccactctttttccagagaactaattatgggggaagaccctgcccagccmcgcaagtataagaagaagaagaaggagctacagggtgatgggcctcccagttctcccactaatgatgtgagtcctctcagttgtcatttcttgtttctgg

SEQ ID NO: 407676 - DNA, 201 bp, Homo sapiens
gacgggcatgaggaggggaggaatggagactggactggagaatggggcaagaagcaagaaagcccagggaagctagtgggtaggtagacaggcctgtgtgsggcctggaataggggctggaggagcacctacttcaccaaagcccctctcccgcagcaagtggaacagaagtcatcagcaactctgcttctgacctggggc

SEQ ID NO: 407677 - DNA, 201 bp, Homo sapiens
ggaggacgtccaggttggaagagggagagggccagagatttggggcctctgatcctgagtgaaatgggagctggggcagggaaaggctgatgctgtgggtyggtcacttgtcactaataagcccattttcctgccttgccttgccccatcttttagtttttcagggttctcaatggttacaagatagatcataagttgctg

SEQ ID NO: 407678 - DNA, 201 bp, Homo sapiens
cagtgttcctgagttctccaagagggcatgagggcaggaggttggaagttggtgcctggatcactgaaggtagaaaggacaagacctaagaaccctagacrtttgtcgccattgcctccttgctcccaccctcaggtgctgggcttcaacacccgtcagcggaaggctttcctcaatgctgtgatgcgctgggggatgcca

SEQ ID NO: 407679 - DNA, 201 bp, Homo sapiens
gaaacggaggcctctggtgttaattgtggctaattttccgttggctgttgagggaaggagaaaggattgtgtgtcctagagctaggggctgggccaagccsaggctttcccatcttgcatcggctgcctctctctgtactagacaggtctggctggttagtctagtgcttggtaggggagggacgtgaaccagagccccag

SEQ ID NO: 407680 - DNA, 201 bp, Homo sapiens
cacggtttatcacagccactggaggcaccctgcacatgtatcagttggaagggctgaactggctacgcttctcctgggcccagggcactgacaccattctmgctgatgagatggggctaggcaagaccatacaaaccatcgtcttcctctactcactctacaaggaggtgctggattctaggaccttgaaggggaccgcct

SEQ ID NO: 407681 - DNA, 201 bp, Homo sapiens
tgtcaggactatctctttcccttttttctgtgccctgctagctggaaatcttccatttggttatgtatcgaaactaccagcggaagaatgacatggatgascccccacccctggactatggctccggcgaggatgatgggaagagcgacaagcgtaaagtgaaagacccgcactatgctgagatggaggagaagtactatc

SEQ ID NO: 407682 - DNA, 201 bp, Homo sapiens
tatttaggtaattgtggagactttctcctgtgtgatgaaggcggcagacactgtgatcctgtgggcaagaagtaaaaatgaccagctgaggatttcttttyctccaggactgtgttggggtgacaggatgcctggtaattatccgaggaaatgtaaatagaggcctccctcttggcaaaaggatgtcagggccccagggtg

SEQ ID NO: 407683 - DNA, 201 bp, Homo sapiens
cagtggctggtgcgggacctgaggggcaagactgagaaggagtttaagtgagtgtgggtgatacagggctgagttggacgcaaggggaagagctttgggtrttcctttcttccttggggccgccatatgatgtgaccttactcaactgattatcaccctccctgtcatacaatacttcctggctcgatttcctggggggtg

SEQ ID NO: 407684 - DNA, 201 bp, Homo sapiens
tcctgaggtgtgagctttgacctgtctgtcctagcagaagatgtaaaaggtgaccgggagcttcgaccagggcctcgagatgagccacggtccaatgggckacgagaggaaaagacagagaagccccggttcatgttcaatatcgccgatggtggcttcacaggttggggagactctcgctgctttctgctcctcaagggg

SEQ ID NO: 407685 - DNA, 201 bp, Homo sapiens
cacagaagacatgactattggcttctggctgggattgtcctgtatcctttgatacacatgcaagaaggaaaaggttctctcaagctggcaaaaaaaaaaaagatgatttcacacccagggacagggctagtgccacactttggggagtcaagccaaaaggaagaagtgttcaaagccaagcccattcctgttaaattcctt

SEQ ID NO: 407686 - DNA, 201 bp, Homo sapiens
ctggaggcaccctgcacatgtatcagttggaagggctgaactggctacgcttctcctgggcccagggcactgacaccattctagctgatgagatggggctrggcaagaccatacaaaccatcgtcttcctctactcactctacaaggaggtgctggattctaggaccttgaaggggaccgcctggactggggaagtgggga

SEQ ID NO: 407687 - DNA, 201 bp, Homo sapiens
aagagctattcaaggatgaaaacgagggtgagaaccttttctgcagctctgtgaaagcaggcccctgctctctcaggagtacttatcagccccctggggaragaaaaacaactcttctctgcagcctttgaaggaaggagagccttcttttagtagcccttggaggaaggttggcctctttctttgcctgtagggttaaaa

SEQ ID NO: 407688 - DNA, 201 bp, Homo sapiens
aagccaggaaaaccccgaaaacgcaagaagcgtgtaagtgtcaagaattcctaactctgtggcaaggctcaagagacccattctcagagacctacattttytctggtcctgattactggtgtgggggtggggttctgaagccagggaggcttgatcccccgggccccccacttccctgccactgttggcctgtatctcagg

SEQ ID NO: 407689 - DNA, 201 bp, Homo sapiens
aaagctggccctaatcccacctttattcttaattctaacgaacctggttagaactgagtttgttccaaacctaacctttacccattcctcttcaggagccyttagttccctttcattattcagtttctccatctctacctgtctgttggactgagtgcagtctgcaaaaccctgttacctcttctgtctgctgccttcttt

SEQ ID NO: 407690 - DNA, 201 bp, Homo sapiens; identical to SEQ ID NO: 91559

SEQ ID NO: 407691 - DNA, 201 bp, Homo sapiens
tgggagagaattgggagcacctcaaacgtgacaggaatgttcctgtgttgtgtatcttgtgggaatggggtgctaaggaggactgaggcttagaggaggtrgtggctcagctaactgatgtcatccccaccctcagggcgtagacagtcaaagaggcagctccggaatgagaaagataagccactgcctccactgctggcc

SEQ ID NO: 407692 - DNA, 201 bp, Homo sapiens
tgacctctctgtgttgtttgtaaggctggcttcctaaacttcattctccccaaactgcttaactctcagctggtatctcagcctaaggagggacctagatkccaggaccatggctttaggaatgctgggaatcctttccttccggaggcctggacacccacacatcgtgatggccccagcaaagctccccagcataagttc

SEQ ID NO: 407693 - DNA, 201 bp, Homo sapiens
ggaccctaacttcattcactgcaacctagtgaagagcctcgttgtcagtgtgtcctcagcagcaaagagaagcagttgaaagcacaagctctggaagactkatgaattcaagagtccagcattcctctgtctaggataccaggccgtttatttggctctctgtgccttagtttcctcatctgtaaaaagtagataaaggcc

SEQ ID NO: 407694 - DNA, 201 bp, Homo sapiens
ggaaaaacaacttgctagaacacagtcatcacccttgagtgagtctccctgcctgtgtatcctacccttagcagttgtggagtgtggctcataatgtctcycctacagcttctttcctctcacagactatgaactaactccaacttctgcttcctctctgttccaggcctacccgccgggtccctacgctacacctccggg

SEQ ID NO: 407695 - DNA, 201 bp, Homo sapiens
agtaaaaaagtcttcgtgtgtgtgtggaaaaactcgattgcagatgagcagaaaggaagaaatattcatagtctctctgctagtaaacttcggtgtgtgtraccacataggctagatccagaaaggccatatcattttccattcccactggtaatctgggcctttgtcagatatcagctgttaattttaaaatatgactgg

SEQ ID NO: 407696 - DNA, 201 bp, Homo sapiens
agttgcttctactttatcggatagtgttggagatcatggagggaaggcaaatatactgaaacggaagaaaagagaacataatttcacgatcttcagatttkactctttcctctttatcctaaaaatttgttgtttaccccccaaattaatttctcaagtcagttgaattttacattctaacaattggaggaggggaaagcg

SEQ ID NO: 407697 - DNA, 201 bp, Homo sapiens
ggttcatggaggagggtgtcatgttccggggtcagaaataaatctcttctgggaggagagaaggcccttcttcagcagccttctttcctgaggcagctctrtgggcagcttctccccggccactcccctgacccacccgccactttctcttgcccctgcaggcctttagccgggctcatcggattggccaggccaacaaag

SEQ ID NO: 407698 - DNA, 201 bp, Homo sapiens
tgtcaagtgggtaggactatcctactggcactgctcctgggccaaggagcttcaggtactaggaccttttctttccctctcccccatgacctcatttcctrccatcctctccctctcttactcctctgtttgttgggttcccatactctttgttttctctcatttcaggcctgtggccttcataccctacttgcttagttt

SEQ ID NO: 407699 - DNA, 201 bp, Homo sapiens
gggagcagggagatgggaatagaattgaaggtaggttttaggctacttgggaggaggaatatttaggtaattgtggagactttctcctgtgtgatgaaggyggcagacactgtgatcctgtgggcaagaagtaaaaatgaccagctgaggatttcttttcctccaggactgtgttggggtgacaggatgcctggtaattat

SEQ ID NO: 407700 - DNA, 201 bp, Homo sapiens
caggggagaacaaggaggaggacagcagtgtgattcattatgacaatgaggccatcgctcggctgttggaccggaaccaggatgcaactgaggacactgaygtgcagaacatgaatgagtatctcagctccttcaaggtggcacagtacgtcgtgcgggaagaagacaaggtgagaggctttgggggccagacattatcta

SEQ ID NO: 407701 - DNA, 201 bp, Homo sapiens
cgctctttttctgcctgtatctgtccatctgatgcctctcttttcctggctccatctctgtatttccctgtctttctcttgcccttctttctctgtggccygggccccagttctgaaccagctggaggagttgctgagcgacatgaaggcggacgtgacccgcctgccagccacgctgtcccgaataccccccatcgcagc

SEQ ID NO: 407702 - DNA, 201 bp, Homo sapiens
tgctatggtagatacacagagcagggagctgatcgaacgcccattctcagaaaacatgggtggggagtagtggggaggtgggtattgagccacaggggtgsagctgggctggaaggccacggactgggtgtctgagaacaggaggaattgggaacatgtggaagctggatccgggcatctggccttctaggtgtggcaaga

SEQ ID NO: 407703 - DNA, 201 bp, Homo sapiens
atggcaccactgcactccagctagggcaacagaatgagactccatctcaaaaaaaaataaaaataaataaaaataagaaaagagagtgtgacaagaaggtrgaataatgaggagcttaagacagggcaggggttcaggtgtaaagattagggttgagtttgtgtaaaggagtagttagaataagcaagcatcccaccacct

SEQ ID NO: 407704 - DNA, 201 bp, Homo sapiens
acacccagggacagggctagtgccacactttggggagtcaagccaaaaggaagaagtgttcaaagccaagcccattcctgttaaattccttgatggttccytttccttcattggtagccatggctatgcacggtggcaggacatccagaatgatgctcaatttgccattatcaacgagccatttaaaactgaagccaataa

SEQ ID NO: 407705 - DNA, 201 bp, Homo sapiens
ggccatcgatcggtttaatggtgagggagatacactggtccctggtgggtgtgggaggcctgagaaacctgtgataggtccctgggatgggagggggactrgcttgggggacattggaaacttaggctttgagttgggggcatggttgtttgtcatcagagaacatctaggagcaggtggacagaactaccgggtacaaga

SEQ ID NO: 407706 - DNA, 201 bp, Homo sapiens
accagctgaggatttcttttcctccaggactgtgttggggtgacaggatgcctggtaattatccgaggaaatgtaaatagaggcctccctcttggcaaaasgatgtcagggccccagggtgttagtgtgagaacccaggtgtccacctttggctctccctccccagcatctggcttagggagctgccagcttgtgtctccc

SEQ ID NO: 407707 - DNA, 201 bp, Homo sapiens
attggcaggtgagggtgaagggcacagaccctttggaaatgtgatgaaagctctgggtctactcaccagaaaactgcacatacaatgacacaattttgtayggattttcagggggttcctggatttccctgaaaccttttcatgggtctcagagaacctctgccttaggagaaacaatcttaaatcaagagagtgtgacaa

SEQ ID NO: 407708 - DNA, 201 bp, Homo sapiens
aggactcggcggctgagcgcgcccgacagcagctagaggcgctgctcaacaagactatgcgcattcgcatgacagatggacggacactggtcggctgcttyctctgcactgaccgtgactgcaatgtcatcctgggctcggcgcaggagttcctcaagccgtcgggtcagtgcccggggaatgcacacccgcctggtaatg

SEQ ID NO: 407709 - DNA, 201 bp, Homo sapiens
gatggttcttcgggtctggtgcgctgctgctggggcgaagagcacaggttggtggagagcagagggaggggaaggaagcaggaacagaaggggcacacctkcacagtacctaggaggggttccagtggtgctgtctggctcctctgactcctcatcctcactctccttctcctcctgttcagccagagggtaggcaggcct

SEQ ID NO: 407710 - DNA, 201 bp, Homo sapiens
gcccagaggaggcctccgggcaaatggccggagctggaccgaccatgctgctacgagaagagaatggctgttgcagtcggcgtcagagcagctccagtgcyggggttagcacgggctctggttctgggactgaggggcagtcaagcagcaagatggagggggtggggaactgcagctcccggcagcctctgggctttgtgt

SEQ ID NO: 407711 - DNA, 201 bp, Homo sapiens
gtcgggagcgctcgcgagatctcggaccacccaacctgaaaggtgcttaggaagttgaaaggcccagaggaggcctccgggcaaatggccggagctggacygaccatgctgctacgagaagagaatggctgttgcagtcggcgtcagagcagctccagtgctggggttagcacgggctctggttctgggactgaggggcag

SEQ ID NO: 407712 - DNA, 201 bp, Homo sapiens; identical to SEQ ID NO: 91587

SEQ ID NO: 407713 - DNA, 201 bp, Homo sapiens; identical to SEQ ID NO: 91588

SEQ ID NO: 407714 - DNA, 201 bp, Homo sapiens
aggcaggggtgggggcagggcaggtcggaagatgccgggcttcaagtccttgggccgaataagagggagggcagccgtcagggttgttcttgactcgaggrtcattagacccagacctttcctgatgtgggaacggcctgggaccctggtgaggcccggatttgccgcggctgcggggcgcgccgacgccgataaagggct

SEQ ID NO: 407715 - DNA, 201 bp, Homo sapiens; identical to SEQ ID NO: 91591

SEQ ID NO: 407716 - DNA, 201 bp, Homo sapiens
cacgttctcatctcacctgcagagactcctggaaggatgaggcctggtactgtgcgtacttggcaatggtggtgtgggaacgggagctctcacaaggccakatctgccgagtgcctgtcagatcccagttctcatctgagggctgctgcacctgggtgcgaacttccacggtgtgttcgccactcgcttccaccagggtct

SEQ ID NO: 407717 - DNA, 201 bp, Homo sapiens
accccggggcgcacgctcacctgagagtggcagaggaagccgaagcccagcatggtgacagcgggtagcaagatggtccctagcaccagcaccagcaggaraagattgaaggcagccaccagcagattctgggctgttacaagaacagcgcaggcccaacagtccagggggtcccggggctctgggccgtcaccaggaacc

SEQ ID NO: 407718 - DNA, 201 bp, Homo sapiens
gcgaggactcggcggctgagcgcgcccgacagcagctagaggcgctgctcaacaagactatgcgcattcgcatgacagatggacggacactggtcggctgyttcctctgcactgaccgtgactgcaatgtcatcctgggctcggcgcaggagttcctcaagccgtcgggtcagtgcccggggaatgcacacccgcctggta

SEQ ID NO: 407719 - DNA, 201 bp, Homo sapiens
tggcccagtccgaacagggcagctgaggcggaacgtgcacaaagcggccccgcggggtgcagtacctcaggcagccggtcagcggatctatgtgcttgcgratctttaaaggagggtttggggcgagggtgtcagagcagccattaggctctggctagcctccgcctttccttcccatccccgctctccatttcctctacc

SEQ ID NO: 407720 - DNA, 201 bp, Homo sapiens
ccttcatgtacagctgcaccgtgttcatgcccaggatggtgtggcccacgtggctcagcatgttgcccgtggatgttacccgcatgaaggcgggcagcttyagcagctcctgcagctggggcttccacctgcggtgcggaagtgcgacgagaggctacaccccgcccccgccacgaggtcctagcagcactcctgccccaa

SEQ ID NO: 407721 - DNA, 201 bp, Homo sapiens
tgaggggcagtcaagcagcaagatggagggggtggggaactgcagctcccggcagcctctgggctttgtgtgagtgccccgcgggctgccgggagctgtgrttccgcgggcgggcagcctgggctgcgcggtctgagcgcttgttacaccccgcgcaggattcggacggagagcgcgaggactcggcggctgagcgcgccc

SEQ ID NO: 407722 - DNA, 201 bp, Homo sapiens; identical to SEQ ID NO: 91589

SEQ ID NO: 407723 - DNA, 201 bp, Homo sapiens
ccaggttccagcataactcacgtctctggtctttggatcaaaccagtggctgatatcctggcctgcaacttccacgatgggtttcagcagcaggttccctwgaaaagagcagcacagccactgtcaatgccagcccttcgagaaccaggcaaacgcgcgcgtgcacacacacacactccggccccggcccaacgtgtggcc

SEQ ID NO: 407724 - DNA, 201 bp, Homo sapiens
caggattttttttctccgtttatttttaatattaatattctcacacaaaaatcaccgaaaataggggtagggttgggaagacccctctgcccctggggcaragagacagtgcagtgcgagggtgcgggactgtaaaccccccacccctccgcagccccagcgtggagaaaaaacaaccaacaaaacgaaaataaagcccca

SEQ ID NO: 407725 - DNA, 201 bp, Homo sapiens
acgccgataaagggctcggctgtagggcacgaggcaatcggctaggcggaggcgcaggcagaggcggcggtagctggccagagcaagcacgagcagcggcmcgaggagcaggaatccggtgaccagtagggccgtgaaaccggggtcccgcaggtgcgcggtgcaagggggtgcctgggagcgcaggaactgtgggagaag

SEQ ID NO: 407726 - DNA, 201 bp, Homo sapiens; identical to SEQ ID NO: 91592

SEQ ID NO: 407727 - DNA, 201 bp, Homo sapiens
ggtagcaagatggtccctagcaccagcaccagcaggagaagattgaaggcagccaccagcagattctgggctgttacaagaacagcgcaggcccaacagtmcagggggtcccggggctctgggccgtcaccaggaaccgctcgctgtgccccggggacatccgccatggcccgcctggatcccgcccgcctgggccgctgc

SEQ ID NO: 407728 - DNA, 201 bp, Homo sapiens
ggtgcgctgctgctggggcgaagagcacaggttggtggagagcagagggaggggaaggaagcaggaacagaaggggcacacctgcacagtacctaggaggrgttccagtggtgctgtctggctcctctgactcctcatcctcactctccttctcctcctgttcagccagagggtaggcaggcctgggtcagagacctttcg

SEQ ID NO: 407729 - DNA, 201 bp, Homo sapiens
gttccagcataactcacgtctctggtctttggatcaaaccagtggctgatatcctggcctgcaacttccacgatgggtttcagcagcaggttcccttgaaragagcagcacagccactgtcaatgccagcccttcgagaaccaggcaaacgcgcgcgtgcacacacacacactccggccccggcccaacgtgtggccctta

SEQ ID NO: 407730 - DNA, 201 bp, Homo sapiens
ccacgaggtcctagcagcactcctgccccaacttccctggcctcagccccactgaccgcttagcatcagacaagtcgatgttggtgccaaacttgatgatrtgatggttcttcgggtctggtgcgctgctgctggggcgaagagcacaggttggtggagagcagagggaggggaaggaagcaggaacagaaggggcacacc

SEQ ID NO: 407731 - DNA, 201 bp, Homo sapiens; identical to SEQ ID NO: 91594

SEQ ID NO: 407732 - DNA, 201 bp, Homo sapiens
gagcaggaatccggtgaccagtagggccgtgaaaccggggtcccgcaggtgcgcggtgcaagggggtgcctgggagcgcaggaactgtgggagaagaggcrtcaggcccaagccgaccaggcgatactgtgcacggggtggaaacagcccaggcgggttgaagttgtggcccatagaccccaccgccagcatcaccacaca

SEQ ID NO: 407733 - DNA, 201 bp, Homo sapiens
gcacctggcagtgcttcatggactgcagcaggcagaacctggggagcagtggggttgtgttgagaccaccggcaaggaggaggcctgaggcagggctggakcaagggcagaggggtgggcagccccagggccctcccctaggggcctccccgcttcatgtctaggtcacatcctctgtcctgggcatctgttataggcgaa

SEQ ID NO: 407734 - DNA, 201 bp, Homo sapiens
cttacaacagatttggcattgtaaaaaaaaaaaaaaattatacagcctgggtgcggtggctcatgccggtaatcccagcactttgggaggctgaggcaggyggatcacgaggtcaggagatcgagatcatcctggctaacacggtgaaaccccgtatctactaaaaatacaaaaaattagctgggcgtggtggcaggcgcc

SEQ ID NO: 407735 - DNA, 201 bp, Homo sapiens
  misc_feature (1)...(201): n = A,T,C or G
gcaattttgcacaggaagcgttgggagatgttgtttattgtagtctccctgaagttgggacaaaattgaacaaacaagatgagtttggtgctttggaaagygtgaaagctgctagtgaactctattctcctttatcaggagaagtaactgaaattaatgaagctcttgcagaaannnnnnnnnnnnnnnnnnnntgcaaaa

SEQ ID NO: 407736 - DNA, 201 bp, Homo sapiens
cacttacaacagatttggcattgtaaaaaaaaaaaaaaattatacagcctgggtgcggtggctcatgccggtaatcccagcactttgggaggctgaggcargcggatcacgaggtcaggagatcgagatcatcctggctaacacggtgaaaccccgtatctactaaaaatacaaaaaattagctgggcgtggtggcaggcg

SEQ ID NO: 407737 - DNA, 201 bp, Homo sapiens
tcacttacaacagatttggcattgtaaaaaaaaaaaaaaattatacagcctgggtgcggtggctcatgccggtaatcccagcactttgggaggctgaggcrggcggatcacgaggtcaggagatcgagatcatcctggctaacacggtgaaaccccgtatctactaaaaatacaaaaaattagctgggcgtggtggcaggc

SEQ ID NO: 407738 - DNA, 201 bp, Homo sapiens
gtcaaatcacttacaacagatttggcattgtaaaaaaaaaaaaaaattatacagcctgggtgcggtggctcatgccggtaatcccagcactttgggaggcygaggcaggcggatcacgaggtcaggagatcgagatcatcctggctaacacggtgaaaccccgtatctactaaaaatacaaaaaattagctgggcgtggtg

SEQ ID NO: 407739 - DNA, 201 bp, Homo sapiens
gctaatggcttgttgggatggggtgatgggtatatggaaattcattatattttattttatggtcaaatttctccacaataaatagttttcaaaaagagtamcttgttcagaagtattcaagtttatgttaaagtgacacatttgctacctcatttgtagtaatattaattgaaggcttacaagcagccagctgctgttgaa

SEQ ID NO: 407740 - DNA, 201 bp, Homo sapiens
gggtttaagattttcagcaataatgcatctaaaatactgaatatatgtaaaataccacgatagttatgtctgaaatgatacaatgtctgagatgttcttcraaagtacacagggtggggagtgtatgggggtgaggatggggcaggattagccatgggctaatggcttgttgggatggggtgatgggtatatggaaattca

SEQ ID NO: 407741 - DNA, 201 bp, Homo sapiens
gtgagccgagatcagccattgcactccagcttgggcaacaagagtgagactccatctcaaaaaaaaaaaaagaggatggactagcttagtttctactgtgwtttttgggcaagttgagaaattctaattttgtccctaacagaaggacatcctggtcaaaatgtccagaaagtcacatgagctaccgatattcaagcttag

SEQ ID NO: 407742 - DNA, 201 bp, Homo sapiens
ctctattacttcccttttccatcctatcagggtttaagattttcagcaataatgcatctaaaatactgaatatatgtaaaataccacgatagttatgtctraaatgatacaatgtctgagatgttcttcaaaagtacacagggtggggagtgtatgggggtgaggatggggcaggattagccatgggctaatggcttgttg

SEQ ID NO: 407743 - DNA, 201 bp, Homo sapiens
  misc_feature (1)...(201): n = A,T,C or G
tcggtgttgccagtgggattgtcttctgtgggatcgttggacacactgtgagacacgagtacacaggtgtgctgggtcagctcatctccagctttctttcngcaaacacagcaccttgccactgggctttgcgggaggaagcacaaaaatgagtgagacatgagccctgccctcagaaactttagagtcttccagatggag

SEQ ID NO: 407744 - DNA, 201 bp, Homo sapiens
aacatagtgaaaccctgtctctactaaaaatgcaaaaattagctgggtgcggtggcacgtgcctgtaatctcagctactcaggaggctgaggcaggacaawggcttgaacctgagaggcggaggttgcagtgagccgagatcgcaccactgcgctccagcctgggctatagcgtgagactccgtctcaactaaacaaaaaa

SEQ ID NO: 407745 - DNA, 201 bp, Homo sapiens
ttgggaggccgaggcaggcagatcacttgaggtcaggagtttgagaacagcctggccaacatggtgaaacctcatctctacagaaattagccaggcatggyagtgggcggctgtaatcccagctacttgggaggctgaggcaggaatcgcttgaacctgggaggcggaggttgcagtgagcaaagatcacgccactgcact

SEQ ID NO: 407746 - DNA, 201 bp, Homo sapiens
agatcgcgccactgcactccagcctgagcaacagagcgagactccgtctcaaaaaaaaaaaaaaaaaaaaattaaaatgattgaactcatgggggtagagmatataaggatggttaccaaaggctgggaagggtagtgggggatgaggaggaattgggggtggtcaatgagtacaaaaaaagagaaagaatgagaaagacc

SEQ ID NO: 407747 - DNA, 201 bp, Homo sapiens
taactcatcttttacattaggtatatctcctaatgctatccctcccccttccccccagcccacgacaggccctggtgtgtgatgttccccaccctgtgtcyaagtgttctcattgttcaattcccacctatgagtgagaacatgtggtgtttggttttctatccttgtgatagtttgctcagaatgatggtttccaacttc

SEQ ID NO: 407748 - DNA, 201 bp, Homo sapiens
gctctcaggttggggctttgggaccactaggtttctggctggtggacttacagggcagggatggagagaggctggttgtgtgagctgaagcactgtctagmaggtgccgagattgtaaaggcacggcaagaaggagaattaagtctgaaggaacctgatggatatgagctgccagttaaactgtcagatcaatttgcacct

SEQ ID NO: 407749 - DNA, 201 bp, Homo sapiens
tacctggcccaaggtaagaatcacaggtgagtgtcttggaatgattgttctgtgtgaacccatagaatcctgatttattttgatgctcctctccttcctayaacttgccttatgtaaattatctataacctacaattattggatgccatgacccttgtgctaaatagataactaacaataaacacatagagctaagaaaaa

SEQ ID NO: 407750 - DNA, 201 bp, Homo sapiens
attagtttcattgatgagtttttttaatcttttatttttatatttatttatttatttttattatacttttaagttctagggtacatgtgcacaatgtgcargtttgttacgttatgtatacatgtcccatgttggtatgctgcacccattaactcatcttttacattaggtatatctcctaatgctatccctcccccttcc

SEQ ID NO: 407751 - DNA, 201 bp, Homo sapiens
atatgtgacctttcagacaggtaattcaaaaaagctgtttgaggaaactcaaagaaattcaagataacacagagaaagaatttagaaactttcagccatgytaactaagaacagaagagaaaagacccaaataaataaaatcagaaatgaaagaggagacattacaactgataatacagaaattcaaaggatcattggtgg

SEQ ID NO: 407752 - DNA, 201 bp, Homo sapiens
acagagatatgtgacctttcagacaggtaattcaaaaaagctgtttgaggaaactcaaagaaattcaagataacacagagaaagaatttagaaactttcarccatgttaactaagaacagaagagaaaagacccaaataaataaaatcagaaatgaaagaggagacattacaactgataatacagaaattcaaaggatcat

SEQ ID NO: 407753 - DNA, 201 bp, Homo sapiens
gaccatccaggaaaacatgacctcaccaaaggaactaaataaggcaccagggtggagagacagagatatgtgacctttcagacaggtaattcaaaaaagcygtttgaggaaactcaaagaaattcaagataacacagagaaagaatttagaaactttcagccatgttaactaagaacagaagagaaaagacccaaataaat

SEQ ID NO: 407754 - DNA, 201 bp, Homo sapiens
gccaggctcatgcctgtaatcccagcactttgggaggcccagacaggtggatcacttgagcccaggagttcaagaccagcctggacaacatggcaaaaccycatctccacaaaaatacaaaaattagttgggtgtggtggcacgtgcctgtagccccagctactagggaggctgaggtgagaggatcacttgagcaaggag

SEQ ID NO: 407755 - DNA, 201 bp, Homo sapiens
tcagaatacatagtctgacagaagttttttatttatttgtgaatgattttatttgaaaaatcaaggccaggctcatgcctgtaatcccagcactttgggargcccagacaggtggatcacttgagcccaggagttcaagaccagcctggacaacatggcaaaaccccatctccacaaaaatacaaaaattagttgggtgtg

SEQ ID NO: 407756 - DNA, 201 bp, Homo sapiens
ccctgccaccttcagcccattgtaaaaacattacccctagtgcctgcattgcttgactcttcatggcttttgaagcttaaaaaagtcaccccattctcccscagccattctcaagagatataatacattatgcttctttaattgcaaccagttgaaaacaaggtctttagcaatggaatataagatggactctgtgagtca

SEQ ID NO: 407757 - DNA, 201 bp, Homo sapiens
agcagctgctgctacagattgaatgcatctgggccatccgtgggttactgggttaaggatttttgataggaaggcctcagtgctttcgggatacgcccttrtttacactaacaacaaagtggtattagagtgttacagggttacggagaatacctttaattatcaattttaggttttaaatttaccttggcttttaaaggg

SEQ ID NO: 407758 - DNA, 201 bp, Homo sapiens
ctcacccttaattccacacccatatttccaattgcccattgaactattccacagattcccttaaacttaataaatctaaaacttcatgcattatcctcccrctcaaccacccctccttctgtacttcgtgtctctgtcacttctatcactgtcttgcttaggccccatttcctccatatctttagtatttgctttctcctt

SEQ ID NO: 407759 - DNA, 201 bp, Homo sapiens
ctgaggtgggaagatcatttgagccagggaggttgaggctgcagtgagctatgatggcgccactgcactccagcctgagcgacagaacaaggccctgtctmaaaaaaaaaaaaaaaaaatcattttattctcatttagttaggtaaaatgtcctgaacctggggagacagaagataaacccaagaggtagtctgacatctt

SEQ ID NO: 407760 - DNA, 201 bp, Homo sapiens
ccattttaagttcttcccagggtgcccttgggagggtaacaagacccttgggtgtggactgctagaatgagacagggataagggggacagactggagcacygagaagatgcgctgcctgaattaaggaagctttagtgaaggatcccacacagggccctattcaaagaaccaatgaaagtatcagtaggagatgaaatgat

SEQ ID NO: 407761 - DNA, 201 bp, Homo sapiens
gataagtactttttgtatattgagatcccacttttcaagtatttttctgtgtgtgtgcatgcacatttctctattttgtaatttgctattaaatatattaygaataatttcctgtcattaaattgtttttcacatcacgatttaaaaggaagcatggtactttatcttacagatatatgattgtatggcctaattattatt

SEQ ID NO: 407762 - DNA, 201 bp, Homo sapiens
ggtttcaccctgttggccaggctggtcttgaactcctgacctcaagtgacccacccacctcagcctcccaaagtgttgggattacaggcatgagccactgygccaggccttgtcttttttattttaaacagaattctttgccatgcatcatctctaatctggttgctctggccagtgatcagagggtagtcagacagtcat

SEQ ID NO: 407763 - DNA, 201 bp, Homo sapiens
ggcctgtccagtgggtagctgccttcatagagtgaattggagaggtatcagaatgcaccctgccaccttcagcccattgtaaaaacattacccctagtgcytgcattgcttgactcttcatggcttttgaagcttaaaaaagtcaccccattctcccccagccattctcaagagatataatacattatgcttctttaattg

SEQ ID NO: 407764 - DNA, 201 bp, Homo sapiens
acaataggcagtggggtggggagtggggagactgtacaaacattgatcaggaaaggccaagaacctcagaagctccagagatgaaggagaaagcctcatgwcattacccactccttgagctttactaatgccatctcctgggtcttaatggtaccttctataaagggtttcttcaggccttactttgagcaccataatact

SEQ ID NO: 407765 - DNA, 201 bp, Homo sapiens
gaagagagacttctcttcctgtggctctgcctagtagaaaacattgtggttaagttgcagattgactataagcagaactgtccctgggatatggacaattraaaaagctgtgctttgagggtatgaaagtggaagaaaggtgtgctgctagatgagccaaaggaatgggactacgcggcagaaagaaagaaaagacagaga

SEQ ID NO: 407766 - DNA, 201 bp, Homo sapiens
tctcaataatttgtctcctaatgatggatgctgaagcacttagagtgaactgaaaactttagtccccttgtcaacctctgcctgccatcttgtttgcattrttaattcaaactattcatgaagacaacggtttactctgttatggtgaactcctggcctagtgttttatcagactctgagttccttagtaatatcttgatg

SEQ ID NO: 407767 - DNA, 201 bp, Homo sapiens
ggttttaccatgttggccaggctggtctctaactcctgacctcaggtgatcctcccacctcagcctcccaaagtgctgggattataggcgtaagccaccaygcctggcctatccaagtatttttaaaagccagcatctataaaacccaaagatagtcattaagagattgttgtatgagtagataaatgatttataattagc

SEQ ID NO: 407768 - DNA, 201 bp, Homo sapiens
agttcctggcccttttaagggcttagagctgtgaggggttccacgtgaaagggtcataatagattgagatctgtagatagcacatgtggttagaatgggggttaatcttttaacctcagacctggtcatcagtggcgccggctggtcttgccactgacttcattcctgtgtttttcagcttttacttcctctttctcttca

SEQ ID NO: 407769 - DNA, 201 bp, Homo sapiens
ttagcccacgtccaccacttaccccacaactttcacagttcagcccaaatatttgaagacaactacaattttaaccaaaatgtcataattttctgacttayttccagtctctgccatcattcctcacattccagagtcaatgaattttaaagaggtcaatgaacttcagtcctctggattagatttgaacacttttatgta

SEQ ID NO: 407770 - DNA, 201 bp, Homo sapiens
cattacaccttgcatacacacccatgtcccccacttagcccacgtccaccacttaccccacaactttcacagttcagcccaaatatttgaagacaactacmattttaaccaaaatgtcataattttctgacttatttccagtctctgccatcattcctcacattccagagtcaatgaattttaaagaggtcaatgaacttc

SEQ ID NO: 407771 - DNA, 201 bp, Homo sapiens
aatgtttggaatatatttatactaaaaaattgtttatttaaaattcagatttaactgagcatcctctgttttcattagctcagtctttcaatcttacaagyttggtagctaaagaagtcaaagttgagccagtgaactgggggcaggagagggaagaatagagctacgccctgctcagttctgctcagtcctatcttagtt

SEQ ID NO: 407772 - DNA, 201 bp, Homo sapiens
aagcccatggcttcggccaaatgtccagctctattcccaaacttaataaacaaacatttactggcagacattgagtgatgttcctgagctttctgctttgygttctgcctcactcttcctccactctgccatttcagatcattaaggcttacctagactattcgctataccaccacctggctggctacaaaggtgtgtggt

SEQ ID NO: 407773 - DNA, 201 bp, Homo sapiens
aaagttatgaaaggtgttgcagattctggaccattgtatcagtattggggccgtactgagaaagtgtgagtgtggagcattaattttgaagtatattttartaaagaagcgggagaattatgatagcaaagcagtcacccatttaagatttggagccagttcaagaagttgaaatctatgctttccccagaccaaggccca

SEQ ID NO: 407774 - DNA, 201 bp, Homo sapiens
gcacaaaagtaagtacccaccatggaaaaatgcctttgcctctaccagtggtcagtagggtcttatatcaatgccgacagcttcattactggtgggtgggytcctcaacacagctcctggtccttaccagcacacaaaggggacctacttcccattctccgggacagcaattctaagtatgacactccccacaccatccac

SEQ ID NO: 407775 - DNA, 201 bp, Homo sapiens
aatctgtccaagttcattcacatcaccttaattaaaacaatagaatcttaacaatcatctaattcatctctacactgactaaaatcacctctgtttgaaaygcttgttctccaatgccataaagaaatagcacttgaacataaatttatttagtaagggcatttttacttcctgcagagagggtatactcgccagcagttt

SEQ ID NO: 407776 - DNA, 201 bp, Homo sapiens
ctccgcattcaggaatccttcttggtttatctttcgggcctcattcgcctgcttgccttttgactcaggtatcctcatttctcattccaaggtgcttccgygctttgtcagtacccatgctgttcatgctgtattcttgatgtgatagaattggctgaacagttgataagggtaccatcaacatgcattgaaagtgctctt

SEQ ID NO: 407777 - DNA, 201 bp, Homo sapiens
agcaactttcaatgtttagaaaggtggcctagggacatctcaaggtcctcagtcttcaaaagagtgccatttatgtttcgttagctgtgtctactaatgtragaaggcagtagctcacacctgtaatcccagcactttgggaggccgaggcaggtggatcacctgaggtcaggagttcgagaccagcctggtcaacatggt

SEQ ID NO: 407778 - DNA, 201 bp, Homo sapiens
cccactgcctggctgaaaaaccctttttgctctctccagatcacggtgaagaggaacagcttcgtgaactggagaatgaggtgatcgagtgccacaggatycgattctgtaaccctatgatgcagaaaacagcctacgagctgtggctcaaggaccagagaaaagccatgcacttgaaatgtgcccgctttttagaagaag

SEQ ID NO: 407779 - DNA, 201 bp, Homo sapiens
ttattgactgttagtgaagtctccaactactattatagaactgtctatttctacctttaattttgtcagtttttgcttcatatatattgacgatcttattrgatgcataaatgtttataattgttatatttttattttaaaaatataattataaaacaaatgtttataattgttatatatattttgctgtatttaaatttt

SEQ ID NO: 407780 - DNA, 201 bp, Homo sapiens
aggccataagcctgcatctttagtactcccagcacaagtgctatccacaaattaggtactaaacaaatacttcttttgacttagcttggctgagtttcttkcaacaagaactgtagagcaggatggttgtccacctgctctatattaaatacagcatattagataaagataaataactagttttctactgtgtggccttct

SEQ ID NO: 407781 - DNA, 201 bp, Homo sapiens
tcttgcaacaagaactgtagagcaggatggttgtccacctgctctatattaaatacagcatattagataaagataaataactagttttctactgtgtggcyttctacctgcagaaatctctctgatccagctggatagcatgagactttcccaccaaatgctggtgagatgtgctgccatcattggcctgaccttcaccac

SEQ ID NO: 407782 - DNA, 201 bp, Homo sapiens
gggggtagtggcttgctattgtggtagtatagggtggcagtaggactagaaaggagagaattagctaggttaaattaatcagggcttaggaacaggagaaragggagtatatcagaagcagcaataaagaaccattgcgagatagcttggaaaatctccatcattatagctgaatatgagaagacagagctttccttcaac

SEQ ID NO: 407783 - DNA, 201 bp, Homo sapiens
ccagctacttgggaggctgaggcaggaatcgcttgaacctgggaggcggaggttgcagtgagcaaagatcacgccactgcactccagcctgggcgacagtkagagactccacctcaaaaaaacaaaaaacaaaacaaaacaaaacaaaaaaaaggtttccagaatatttggtgagccaatatacatctctgcccagtcttc

SEQ ID NO: 407784 - DNA, 201 bp, Homo sapiens
tttcatttactcatctatttctcagccttcgtgtgtgtcgaaccctaacctcacccttaattccacacccatatttccaattgcccattgaactattccayagattcccttaaacttaataaatctaaaacttcatgcattatcctcccgctcaaccacccctccttctgtacttcgtgtctctgtcacttctatcactgt

SEQ ID NO: 407785 - DNA, 201 bp, Homo sapiens
gttgtctcaatgctaggtcctggaaggggaaataagcataaaatagcatggaccacgtcatatccttgagccccactctcctactcccaacacacacacayacacacacacacacacacacacacacacacacacacacacggccccctttttggtatgctatcctcccttggctttcctgaccccacactcctcctgttc

SEQ ID NO: 407786 - DNA, 201 bp, Homo sapiens
ctttgggagtctgaggcgggcggattgcttgagcccaggagtttgagaccttcctgggcaacatgacaaaaccccatctctactaaaaatacaaaaattasccgggtgtggtgtcgcacgcctgtagtcccagctacctgggaggctgaggtgggaggattgcttgagccagggaggttgaggctgcagcaagctatgatc

SEQ ID NO: 407787 - DNA, 201 bp, Homo sapiens
taaaggaaagcgatatgtaaatataaatactgcagagtaaatactatttctaaattttatacatttgtttactttgtttacttgttcaataaatgtttatrtagtatccgttatgagcttttttttttgagacagagtctcactctgtcgcccaggctggggtgcagtggaacgatctcggctcactgcaatctccgtctc

SEQ ID NO: 407788 - DNA, 201 bp, Homo sapiens
ctctctgtttaaattatatagaacatgtatatctttccaaagccaaaaaggtacatccttagtcttgcttccctcccttatcctataggtaaccattttgrttagtttttggcttatccttccaatgtctgttttaaaaactataaatcaagtgtgtgcacacttattgtgtacacacatgagtgaaataaaaagaaaaca

SEQ ID NO: 407789 - DNA, 201 bp, Homo sapiens
taagggggtctgcatgagagggtcgtgatcgattgagtaagccagggggtacgtgacaggggctgtgagcactggtggtcacagtgaaacagaacagaacragagatttcacaatgtccttccatacaatgtgtggaatctatagataacaacagttgctaggtcaggggtcgaattttaactaccaggcttaggtcaggc

SEQ ID NO: 407790 - DNA, 201 bp, Homo sapiens
atgccagacttcaggaatgggacaacttttacaaattttccaatagagctaaaaatcttttgccaagaagaaccatgacacttacttactatgacggaatwtctaggtacatggaggggcaagttcttcaccttcaaaaacaaatcaaagaacagtcagagaatgcccaagccagtggggaggagctactcaaggtgaggc

SEQ ID NO: 407791 - DNA, 201 bp, Homo sapiens
atggagtctcactctgtcacaaggctggagtgcagtggcacgatctcggctcactgcaacctctgcctccctggttcaagcgattctcctgcctcagcctyctgagtagctgggactacaggcgtgcacgaccatgcctggctaatttttgtatttttagtagagacggagtttcaccatgttggccaggatggtcttgat

SEQ ID NO: 407792 - DNA, 201 bp, Homo sapiens
ttatttatttatttttgagatggagtctcactctgtcacaaggctggagtgcagtggcacgatctcggctcactgcaacctctgcctccctggttcaagcrattctcctgcctcagcctcctgagtagctgggactacaggcgtgcacgaccatgcctggctaatttttgtatttttagtagagacggagtttcaccatgt

SEQ ID NO: 407793 - DNA, 201 bp, Homo sapiens
tttatttatttatttttgagatggagtctcactctgtcacaaggctggagtgcagtggcacgatctcggctcactgcaacctctgcctccctggttcaagygattctcctgcctcagcctcctgagtagctgggactacaggcgtgcacgaccatgcctggctaatttttgtatttttagtagagacggagtttcaccatg

SEQ ID NO: 407794 - DNA, 201 bp, Homo sapiens
tcagctttatttatttatttatttttgagatggagtctcactctgtcacaaggctggagtgcagtggcacgatctcggctcactgcaacctctgcctcccyggttcaagcgattctcctgcctcagcctcctgagtagctgggactacaggcgtgcacgaccatgcctggctaatttttgtatttttagtagagacggagt

SEQ ID NO: 407795 - DNA, 201 bp, Homo sapiens
atagttgttgatcttccagtctgttcagctttatttatttatttatttttgagatggagtctcactctgtcacaaggctggagtgcagtggcacgatctcrgctcactgcaacctctgcctccctggttcaagcgattctcctgcctcagcctcctgagtagctgggactacaggcgtgcacgaccatgcctggctaattt

SEQ ID NO: 407796 - DNA, 201 bp, Homo sapiens
gtgttctcacttctcttatggatccaagaatagttgttgatcttccagtctgttcagctttatttatttatttatttttgagatggagtctcactctgtcrcaaggctggagtgcagtggcacgatctcggctcactgcaacctctgcctccctggttcaagcgattctcctgcctcagcctcctgagtagctgggactac

SEQ ID NO: 407797 - DNA, 201 bp, Homo sapiens
ctggtatacccatgagccatcttgtgtctaagtggcaggcctatagtattgtataattttttaggtggtcattcatcatctttttaattatctatggctaygtttcgcttttcgcggaaagcatagacagggaagcccaggagttcgcctatttgtatgggcagtaggaagaaagatggtttaatagtgccaataacacaa

SEQ ID NO: 407798 - DNA, 201 bp, Homo sapiens
ttattgtgttgtctaagtcctctgtgtcttatcttttgtataattgttctatccattattgactgttagtgaagtctccaactactattatagaactgtctatttctacctttaattttgtcagtttttgcttcatatatattgacgatcttattagatgcataaatgtttataattgttatatttttattttaaaaatat

SEQ ID NO: 407799 - DNA, 201 bp, Homo sapiens
tttattgtgttgtctaagtcctctgtgtcttatcttttgtataattgttctatccattattgactgttagtgaagtctccaactactattatagaactgtctatttctacctttaattttgtcagtttttgcttcatatatattgacgatcttattagatgcataaatgtttataattgttatatttttattttaaaaata

SEQ ID NO: 407800 - DNA, 201 bp, Homo sapiens
ggtttattgtgttgtctaagtcctctgtgtcttatcttttgtataattgttctatccattattgactgttagtgaagtctccaactactattatagaactgtctatttctacctttaattttgtcagtttttgcttcatatatattgacgatcttattagatgcataaatgtttataattgttatatttttattttaaaaa

SEQ ID NO: 407801 - DNA, 201 bp, Homo sapiens
tgcaatggcgtgatctcggctcactgcaacctccgtctcctaggttcaagtgattctcgtgcctcagcctcccgagtagctgggattacaggcacccgccrtcatgcctggctaatttttgtatttttgtagagatggggtttcaccatgttggccaggctggtcctgaactcctgacctcaggtgatccgaccacctcgg

SEQ ID NO: 407802 - DNA, 201 bp, Homo sapiens
ttctctttctctttctgcatcttgtccagatagtgaaagaggaaaggattatttttatcattgatgaggcccagtttgtggattcgacctcctggagattyatggagaagcttatccggactcttcctatcttcatcattatgtccctgtgtcccttcgttaacattccctgtgcagctgccagggccgtaataaagaaca

SEQ ID NO: 407803 - DNA, 201 bp, Homo sapiens
ggcttacgtctgtatattaatgggagatgggcagaaatgtggcctcttcctgaacacagccttgcggctctctgaaacacaggggaatatactggagaaaygctggctgaacatgaacaaagtatgtatcatcagctagcaaaccggggtggcgatgctcacccatataaagaagcccagaagcctactgcctggttaggt

SEQ ID NO: 407804 - DNA, 201 bp, Homo sapiens
ggtaatgcaggtatgccagacttcaggaatgggacaacttttacaaattttccaatagagctaaaaatcttttgccaagaagaaccatgacacttacttaytatgacggaatatctaggtacatggaggggcaagttcttcaccttcaaaaacaaatcaaagaacagtcagagaatgcccaagccagtggggaggagctac

SEQ ID NO: 407805 - DNA, 201 bp, Homo sapiens
tgtcgcccaggctggagtgcaatggcgtgatctcggctcactgcaacctccgtctcctaggttcaagtgattctcgtgcctcagcctcccgagtagctggrattacaggcacccgccatcatgcctggctaatttttgtatttttgtagagatggggtttcaccatgttggccaggctggtcctgaactcctgacctcagg

SEQ ID NO: 407806 - DNA, 201 bp, Homo sapiens
gacagagtctcactctgtcgcccaggctggagtgcaatggcgtgatctcggctcactgcaacctccgtctcctaggttcaagtgattctcgtgcctcagcytcccgagtagctgggattacaggcacccgccatcatgcctggctaatttttgtatttttgtagagatggggtttcaccatgttggccaggctggtcctga

SEQ ID NO: 407807 - DNA, 201 bp, Homo sapiens
gagacagagtctcactctgtcgcccaggctggagtgcaatggcgtgatctcggctcactgcaacctccgtctcctaggttcaagtgattctcgtgcctcadcctcccgagtagctgggattacaggcacccgccatcatgcctggctaatttttgtatttttgtagagatggggtttcaccatgttggccaggctggtcct

SEQ ID NO: 407808 - DNA, 201 bp, Homo sapiens
gctcacctgaaggtgtttggggtttttttttgtctaatttttgttgttgttgttgttggagacagagtctcactctgtcgcccaggctggagtgcaatggygtgatctcggctcactgcaacctccgtctcctaggttcaagtgattctcgtgcctcagcctcccgagtagctgggattacaggcacccgccatcatgcct

SEQ ID NO: 407809 - DNA, 201 bp, Homo sapiens
tgggggctcacctgaaggtgtttggggtttttttttgtctaatttttgttgttgttgttgttggagacagagtctcactctgtcgcccaggctggagtgcratggcgtgatctcggctcactgcaacctccgtctcctaggttcaagtgattctcgtgcctcagcctcccgagtagctgggattacaggcacccgccatca

SEQ ID NO: 407810 - DNA, 201 bp, Homo sapiens
gagagattttttttcctccaatatttactgagagatcctggttgagcttctggaggtaaaacacacaaaactgtgggggctcacctgaaggtgtttggggkttttttttgtctaatttttgttgttgttgttgttggagacagagtctcactctgtcgcccaggctggagtgcaatggcgtgatctcggctcactgcaacc

SEQ ID NO: 407811 - DNA, 201 bp, Homo sapiens
tgccacagactcctgagtagctgggattacaggtgcccgccaacatgcctgactaatttttgtatttttagtaaagacagggtttcaccatgttggccagkctggtcttgaactcctgacctcaagtgacctgcccacctctgcctcccaaagtgctgggattacaggtgtgaaccaccgtgcctgacctaaaatttttta

SEQ ID NO: 407812 - DNA, 201 bp, Homo sapiens
gcagtggcgtgatcttgactcactgcaacctccacctcctgggttcaagcaattctcctgccacagactcctgagtagctgggattacaggtgcccgccamcatgcctgactaatttttgtatttttagtaaagacagggtttcaccatgttggccagtctggtcttgaactcctgacctcaagtgacctgcccacctctg

SEQ ID NO: 407813 - DNA, 201 bp, Homo sapiens
tggagtgcagtggcgcaatctcgactcactgcaacctccgcctcccgggttcaaacaattctcgtacctcagcctcccaagtagctgggattacaggcacrtgccaccatgcctggctaatttttgtatttttagtagagatggggatttcaccacattagccaggctggtcttgaactcttgacctcaagtgatccaccc

SEQ ID NO: 407814 - DNA, 201 bp, Homo sapiens
cctaggatatacttattttactaactgacagcaacagaatcctaaccttctttctacaagattgcagacccaacatgacagtcacattagaacacattatrtggatatttcttttttttttcttttgagacagagtctcactctgtcgcccaggctggagtgcagtggcgcgatctcagctcactacaacctctgcgtccc

SEQ ID NO: 407815 - DNA, 201 bp, Homo sapiens
ggctggagtgcagtggcgcaatctcgactcactgcaacctccgcctcccgggttcaaacaattctcgtacctcagcctcccaagtagctgggattacaggsacgtgccaccatgcctggctaatttttgtatttttagtagagatggggatttcaccacattagccaggctggtcttgaactcttgacctcaagtgatcca

SEQ ID NO: 407816 - DNA, 201 bp, Homo sapiens
  misc_feature (1)...(201): n = A,T,C or G
gacacgaacatccccaaaagtcttatcataagttaaatcttggtcctaactgtgtcaaggcaattaagaggaggctctgtctcacactttggagaaatatngggccacaatcttggtgtcagcagagcctgaaggagggcaacagttccagaactgcaaaaaaacacttgggccagcagaaatgcctcactttcactgctt

SEQ ID NO: 407817 - DNA, 201 bp, Homo sapiens
  misc_feature (1)...(201): n = A,T,C or G
acctgtggattctgaaggcagccacttctagtagcacttgtaatttccttctgtcagacacgaacatccccaaaagtcttatcataagttaaatcttggtnctaactgtgtcaaggcaattaagaggaggctctgtctcacactttggagaaatattgggccacaatcttggtgtcagcagagcctgaaggagggcaacag

SEQ ID NO: 407818 - DNA, 201 bp, Homo sapiens
tgtgccagatgctatggaaacagatgctacctgagttctttggattctccactaccaagtcagaccttctcgtttctccttcttttggcgtttgcgacccktgagtcaggggatagactcttgttagcaattgagaaggaaactttctgggaactaagaactaatcactcttgctctcaatatgtccctgttttgaatcta

SEQ ID NO: 407819 - DNA, 201 bp, Homo sapiens
ctggggccattaatgcaatcagtttactatgcaaacccaggactatctgatcccaaagcctgtactcttcatgatttttctgtaccacctctgcagataaragtggagaaatacacacacagtatgaacagggcctagttcctgcccagaaaactcacaatcaagtggggaagaccaacatacacaaacttagctgtatgt

SEQ ID NO: 407820 - DNA, 201 bp, Homo sapiens
gtttgtcctggcaatactggaggagcaagagagcaggcccaatgcaaaagcatttttcaagcctcttcctatgtcttatgtttgcagatagtccattgacraaagcattcacaaggctgagtccagaatgagaggactctgccaagttacacagcaaagggcacagatacaggtactggggccattaatgcaatcagttta

SEQ ID NO: 407821 - DNA, 201 bp, Homo sapiens
tgttaaatgacttgtctatggccatatctatagtgagcaatggagtcaagattcagtcacaataatgtgaccttacgggcaatcacaaaacttcagtggtrtgcaaaaataaacatttatttttctcacaaatgtggggttcaattgatcttggctggatttggttgatcttgtcttggcttattcacgtgcctggggttc

SEQ ID NO: 407822 - DNA, 201 bp, Homo sapiens
agcctccctttgtcacccaggctggagtgcagtggcgcaatctcgactcactgcaacctccgcctcccgggttcaaacaattctcgtacctcagcctcccragtagctgggattacaggcacgtgccaccatgcctggctaatttttgtatttttagtagagatggggatttcaccacattagccaggctggtcttgaact

SEQ ID NO: 407823 - DNA, 201 bp, Homo sapiens
tctgtcactcattaccacaaagtaaacagcttaaaacaacacccacttcttaacagagcctccctttgtcacccaggctggagtgcagtggcgcaatctcractcactgcaacctccgcctcccgggttcaaacaattctcgtacctcagcctcccaagtagctgggattacaggcacgtgccaccatgcctggctaattt

SEQ ID NO: 407824 - DNA, 201 bp, Homo sapiens
atctacttaaaatacaaaaaattagctgggcgtggtggtacacacctgtagtcccagctactcgggaggctgaggcaggagaatcacttgaacccaggagrcagaggttgcagtaagccaagattgtgccattgcactccagactgggggacaagagcaagacttcgtctcaaaaaaagaaaaaaagccaaagccaaagag

SEQ ID NO: 407825 - DNA, 201 bp, Homo sapiens
tgaaaccccgtatctacttaaaatacaaaaaattagctgggcgtggtggtacacacctgtagtcccagctactcgggaggctgaggcaggagaatcacttraacccaggaggcagaggttgcagtaagccaagattgtgccattgcactccagactgggggacaagagcaagacttcgtctcaaaaaaagaaaaaaagcca

SEQ ID NO: 407826 - DNA, 201 bp, Homo sapiens
tttaaaaagccaaagtggccgggcatggtggcacagcctgtaatcccagcactttgggaggccaaggcgggtggatcacctgaggtcaggagttcgagacyagcctagccaacatggtgaaaccccgtatctacttaaaatacaaaaaattagctgggcgtggtggtacacacctgtagtcccagctactcgggaggctga

SEQ ID NO: 407827 - DNA, 201 bp, Homo sapiens
ttctgtttctttcctctcaggaatcatggtactcaacctctgagttaaaagaagaccaatggcttcagacgatcttgagtctcccatcatgggaaaaaatygtagcaggcagggtaaacattcaggatcttcaaaaaaacaaattcctgatgagagctaataccgtggacaatcatttctaacatgtcaaagaaaaaagat

SEQ ID NO: 407828 - DNA, 201 bp, Homo sapiens
atttaaaaagccaaagtggccgggcatggtggcacagcctgtaatcccagcactttgggaggccaaggcgggtggatcacctgaggtcaggagttcgagaycagcctagccaacatggtgaaaccccgtatctacttaaaatacaaaaaattagctgggcgtggtggtacacacctgtagtcccagctactcgggaggctg

SEQ ID NO: 407829 - DNA, 201 bp, Homo sapiens
ttttaatttaaaaagccaaagtggccgggcatggtggcacagcctgtaatcccagcactttgggaggccaaggcgggtggatcacctgaggtcaggagttygagaccagcctagccaacatggtgaaaccccgtatctacttaaaatacaaaaaattagctgggcgtggtggtacacacctgtagtcccagctactcggga

SEQ ID NO: 407830 - DNA, 201 bp, Homo sapiens
gtctgatctccctcactttttaatttaaaaagccaaagtggccgggcatggtggcacagcctgtaatcccagcactttgggaggccaaggcgggtggatcmcctgaggtcaggagttcgagaccagcctagccaacatggtgaaaccccgtatctacttaaaatacaaaaaattagctgggcgtggtggtacacacctgta

SEQ ID NO: 407831 - DNA, 201 bp, Homo sapiens
gctccaagtgtctgatctccctcactttttaatttaaaaagccaaagtggccgggcatggtggcacagcctgtaatcccagcactttgggaggccaaggcrggtggatcacctgaggtcaggagttcgagaccagcctagccaacatggtgaaaccccgtatctacttaaaatacaaaaaattagctgggcgtggtggtac

SEQ ID NO: 407832 - DNA, 201 bp, Homo sapiens
cattagattagcaagctggaatcgaggtcttcaagagtcagataacagaaccagggctgcagttgggtcaaggtgtctttattattcccttcagtattccygaggcttagcactgtgcttggcatacataggccatcaataaagtgcagtttgaatacatgaatgaataataatttttagtgagtacttattaaacatcag

SEQ ID NO: 407833 - DNA, 201 bp, Homo sapiens
taaaaaataaaaaaatcataagcaggccaggagcagtggctcacgcctgtaatcgcagcactttgggaggctgaggtgggtggatcacctgaggtcaggarttcgagaccagcctggccaatatggtgaaaccgtgtctctactaaaaatataaaaaattaggcaggcgtgatggcaggcgcctgtaatcccagcgaggca

SEQ ID NO: 407834 - DNA, 201 bp, Homo sapiens
tcaaaggttgtacaaaccaaacaaaaaatcctctcatttgagtatctatttgcacccaaatgggcccaatcaccaaccatttaatattatttactaattawgtcaactgtatgccgaggcattgttagggttaaaagagtataagatattatttctcctctaagtctttagtgaaatacattccccaaaagctcagcatag

SEQ ID NO: 407835 - DNA, 201 bp, Homo sapiens
aagcagtcacccatttaagatttggagccagttcaagaagttgaaatctatgctttccccagaccaaggcccagacttcaaaatccttaatctttcctccrtctgactgacactatggcatggtggaaaatcccattctctcctcagatctgagaatatgagggtaattcttcaaaggttgtacaaaccaaacaaaaaatc

SEQ ID NO: 407836 - DNA, 201 bp, Homo sapiens
tgtgagtgtggagcattaattttgaagtatattttagtaaagaagcgggagaattatgatagcaaagcagtcacccatttaagatttggagccagttcaaraagttgaaatctatgctttccccagaccaaggcccagacttcaaaatccttaatctttcctccatctgactgacactatggcatggtggaaaatcccatt

SEQ ID NO: 407837 - DNA, 201 bp, Homo sapiens
tcagtattggggccgtactgagaaagtgtgagtgtggagcattaattttgaagtatattttagtaaagaagcgggagaattatgatagcaaagcagtcacycatttaagatttggagccagttcaagaagttgaaatctatgctttccccagaccaaggcccagacttcaaaatccttaatctttcctccatctgactgac

SEQ ID NO: 407838 - DNA, 201 bp, Homo sapiens
tccctgcacattttgtgaatagccattggctgaatatgggtcttgagactaggcttctgtgtcactcatgaacagcaaagggagtaaagggtaaaaatgcyatttggggacaatgtttcagattacattcagttcaatgcctgttatttccctgatctttgactttctctttcttgctatagtcattggtcaaaaagtcaa

SEQ ID NO: 407839 - DNA, 201 bp, Homo sapiens
ggcagaaactttgctaatggctaactaactccctgcacattttgtgaatagccattggctgaatatgggtcttgagactaggcttctgtgtcactcatgarcagcaaagggagtaaagggtaaaaatgctatttggggacaatgtttcagattacattcagttcaatgcctgttatttccctgatctttgactttctcttt

SEQ ID NO: 407840 - DNA, 201 bp, Homo sapiens
acctcccaagtgaggcagaaactttgctaatggctaactaactccctgcacattttgtgaatagccattggctgaatatgggtcttgagactaggcttctktgtcactcatgaacagcaaagggagtaaagggtaaaaatgctatttggggacaatgtttcagattacattcagttcaatgcctgttatttccctgatctt

SEQ ID NO: 407841 - DNA, 201 bp, Homo sapiens
catttactaaatcgagaaatcgccaaatgaaggtttattcataggagcatgcagacacaattttatgtctcatatggagatcagtaccccaggcccaagcwtgtgcttgtccaccttgtggcagaagaccaactgacaccttctctgagagccttcagtgctgtggccatcccacttacagagcctgctccatactcaagc

SEQ ID NO: 407842 - DNA, 201 bp, Homo sapiens
ttatgttaaagtgacacatttgctacctcatttgtagtaatattaattgaaggcttacaagcagccagctgctgttgaaagtgataaacgtgtattaactmattaatcttcataaaccaccctctcagagagttactattatcatccctattttataggttagagaatggaggcatgaggagttatttaaagtaattgtcc

SEQ ID NO: 407843 - DNA, 201 bp, Homo sapiens
tgaagaagtctgtcacctcacaagtggtgtcagactgaaaaacctgtcacctccaacgtcattaaaaggtaagaaaatctggccgggcgcagtggctcacscctgtaatcccagcactttgggaggccgaggcgggcggatcacaaggtcaggagtttgagaccagcctggccaatatggtgaaaccccgtatctactaaa

SEQ ID NO: 407844 - DNA, 201 bp, Homo sapiens
ttagaataaggtttccagcggcctggtgcagtgtggctcatacctgtaatcccagcactttgggaggccgaggcaggcagatcacttgaggtcaggagttygagaacagcctggccaacatggtgaaacctcatctctacagaaattagccaggcatggtagtgggcggctgtaatcccagctacttgggaggctgaggca

SEQ ID NO: 407845 - DNA, 201 bp, Homo sapiens
gattttcatgaatcagttttacttagaataaggtttccagcggcctggtgcagtgtggctcatacctgtaatcccagcactttgggaggccgaggcaggcrgatcacttgaggtcaggagtttgagaacagcctggccaacatggtgaaacctcatctctacagaaattagccaggcatggtagtgggcggctgtaatccc

SEQ ID NO: 407846 - DNA, 201 bp, Homo sapiens
ccatctctactaaaaatacaaaaaaattagccaggcatggtggcgcatgcctgtaaacccagctacctgggaggctgaggcaggagaattgcttgaacccrggaggcgaaggttgcggtgagccaagatcgcgccattgcactccagcctgggcaacaagagcaaaacttgggtctcaaaaaataaaaaaaaataaaaaat

SEQ ID NO: 407847 - DNA, 201 bp, Homo sapiens
gggagacaaaacatttttgagtacatctagattttcatgaatcagttttacttagaataaggtttccagcggcctggtgcagtgtggctcatacctgtaaycccagcactttgggaggccgaggcaggcagatcacttgaggtcaggagtttgagaacagcctggccaacatggtgaaacctcatctctacagaaattagc

SEQ ID NO: 407848 - DNA, 201 bp, Homo sapiens
acctgaggtcgggagttcaagaccagcctgaccaacatggagaaaccccatctctactaaaaatacaaaaaaattagccaggcatggtggcgcatgcctgyaaacccagctacctgggaggctgaggcaggagaattgcttgaacccaggaggcgaaggttgcggtgagccaagatcgcgccattgcactccagcctgggc

SEQ ID NO: 407849 - DNA, 201 bp, Homo sapiens
ctaagtactctgaggttcctgtgccttcgcgttggcctctcctccacttgccgcttagaatatctcttcatccttcaaggatcaaagtacttcctcccctrtcaagcctttctgaatccaccaagtctgatttaattgttattttctgttcccacaacatgttactctttgctctttagctcttaagtcacccatcctgat

SEQ ID NO: 407850 - DNA, 201 bp, Homo sapiens
atttggctattagaaaatcatgccgggcgcggtggctgacacctgtaatcccagcactttgggaggccgaggccggcagatcacctgaggtcgggagttcragaccagcctgaccaacatggagaaaccccatctctactaaaaatacaaaaaaattagccaggcatggtggcgcatgcctgtaaacccagctacctggga

SEQ ID NO: 407851 - DNA, 201 bp, Homo sapiens
tgggagtctgaggcgggcggattgcttgagcccaggagtttgagaccttcctgggcaacatgacaaaaccccatctctactaaaaatacaaaaattagccrggtgtggtgtcgcacgcctgtagtcccagctacctgggaggctgaggtgggaggattgcttgagccagggaggttgaggctgcagcaagctatgatcaca

SEQ ID NO: 407852 - DNA, 201 bp, Homo sapiens
aggcgcccgccaccatgcccagctaatttttgtatttttagtggagatggggtttcaccatgttggccaggctggtctcgaactcctgacctcgtgatccrcccacctcagcctcccaaagtgctgggattacaatatccaccactttttaatggccactaccttttcttttccatagatacccgcaattgatccaggtgc

SEQ ID NO: 407853 - DNA, 201 bp, Homo sapiens
gatatggacagtagactaaagtattgtatcaatgttaaatttcttttttttttttttgagacactctgtcgcccaggctggagtgcagtggcacgatcttrgctcactgcagcctccgcctcctgggttcaagcaattctctgcctcagcctcccgagtatctgggattacaggcaactgccaccatgcctgactaatttt

SEQ ID NO: 407854 - DNA, 201 bp, Homo sapiens
ttacaggcgcccgccaccatgcccagctaatttttgtatttttagtggagatggggtttcaccatgttggccaggctggtctcgaactcctgacctcgtgrtccacccacctcagcctcccaaagtgctgggattacaatatccaccactttttaatggccactaccttttcttttccatagatacccgcaattgatccag

SEQ ID NO: 407855 - DNA, 201 bp, Homo sapiens
tcccatgtagcaaggattacaggcatgcaccactaccgcccagctaattttcatatttttagtagagacagggttttgccatgttggccaggctggtcttraactcctgacctcaagtgatctgcccgcctcgggctcccaaaatgctgggtttacaggtgtgagccactgcacctggccctgttatgagctttttaaaac

SEQ ID NO: 407856 - DNA, 201 bp, Homo sapiens
ctcccaagtagctgggattacaggcgcccgccaccatgcccagctaatttttgtatttttagtggagatggggtttcaccatgttggccaggctggtctcraactcctgacctcgtgatccacccacctcagcctcccaaagtgctgggattacaatatccaccactttttaatggccactaccttttcttttccatagat

SEQ ID NO: 407857 - DNA, 201 bp, Homo sapiens
tgcctcagcctcccatgtagcaaggattacaggcatgcaccactaccgcccagctaattttcatatttttagtagagacagggttttgccatgttggccargctggtcttgaactcctgacctcaagtgatctgcccgcctcgggctcccaaaatgctgggtttacaggtgtgagccactgcacctggccctgttatgagc

SEQ ID NO: 407858 - DNA, 201 bp, Homo sapiens
tcagcctcccaagtagctgggattacaggcgcccgccaccatgcccagctaatttttgtatttttagtggagatggggtttcaccatgttggccaggctgdtctcgaactcctgacctcgtgatccacccacctcagcctcccaaagtgctgggattacaatatccaccactttttaatggccactaccttttcttttcca

SEQ ID NO: 407859 - DNA, 201 bp, Homo sapiens
ctgcctcagcctcccatgtagcaaggattacaggcatgcaccactaccgcccagctaattttcatatttttagtagagacagggttttgccatgttggccrggctggtcttgaactcctgacctcaagtgatctgcccgcctcgggctcccaaaatgctgggtttacaggtgtgagccactgcacctggccctgttatgag

SEQ ID NO: 407860 - DNA, 201 bp, Homo sapiens
cctcagcctcccaagtagctgggattacaggcgcccgccaccatgcccagctaatttttgtatttttagtggagatggggtttcaccatgttggccaggcwggtctcgaactcctgacctcgtgatccacccacctcagcctcccaaagtgctgggattacaatatccaccactttttaatggccactaccttttcttttc

SEQ ID NO: 407861 - DNA, 201 bp, Homo sapiens
gcctcagcctcccaagtagctgggattacaggcgcccgccaccatgcccagctaatttttgtatttttagtggagatggggtttcaccatgttggccaggytggtctcgaactcctgacctcgtgatccacccacctcagcctcccaaagtgctgggattacaatatccaccactttttaatggccactaccttttctttt

SEQ ID NO: 407862 - DNA, 201 bp, Homo sapiens
gggcaggattagccatgggctaatggcttgttgggatggggtgatgggtatatggaaattcattatattttattttatggtcaaatttctccacaataaayagttttcaaaaagagtaccttgttcagaagtattcaagtttatgttaaagtgacacatttgctacctcatttgtagtaatattaattgaaggcttacaag

SEQ ID NO: 407863 - DNA, 201 bp, Homo sapiens
ttctcctgcctcagcctcccaagtagctgggattacaggcgcccgccaccatgcccagctaatttttgtatttttagtggagatggggtttcaccatgttsgccaggctggtctcgaactcctgacctcgtgatccacccacctcagcctcccaaagtgctgggattacaatatccaccactttttaatggccactacctt

SEQ ID NO: 407864 - DNA, 201 bp, Homo sapiens
  misc_feature (1)...(201): n = A,T,C or G
ctgtatccatcggtgttgccagtgggattgtcttctgtgggatcgttggacacactgtgagacacgagtacacaggtgtgctgggtcagctcatctccagntttctttctgcaaacacagcaccttgccactgggctttgcgggaggaagcacaaaaatgagtgagacatgagccctgccctcagaaactttagagtcttc

SEQ ID NO: 407865 - DNA, 201 bp, Homo sapiens
cagacattatttcccacccttcccactttctctacgctcattatctttatttctttccccacaaatcttgtctcccctgcaccagaactgtatccatcggygttgccagtgggattgtcttctgtgggatcgttggacacactgtgagacacgagtacacaggtgtgctgggtcagctcatctccagctttctttctgcaa

SEQ ID NO: 407866 - DNA, 201 bp, Homo sapiens
ctgacgagctcactcatgctctggaatgtgctatggatatatttgacttctgctctcaagtccacaaaatccagtgagtattgaccctggtcccacccagyggtccctgacccttttgaggcataagtagggagggcatgcagggaacaggaaagaaagaagaattaattaagaacttagtcctgtgtctcaaactgttgt

SEQ ID NO: 407867 - DNA, 201 bp, Homo sapiens
caagcaattctcctgcctcagcctcccacatgcgccaccacacccagctaactttttgtatttttagtagagatggagcttcaccatgttggcctgactgrtctcaaattcctgacctcaagaaatctgcccgcctcaccctcccacagtgctgggattatgggcatgagccaccacactgagcctaaaaagacattctct

SEQ ID NO: 407868 - DNA, 201 bp, Homo sapiens
tgtctcccttattttttgactccctcaaactcattcctaccatctcttatcagtctatcctagagcataaaactatcaatctttatagtgaagggaaccayagagatcatgaagctcaactactcttttcccaggtgaggaaataggaggcaaccagggcagcaaagtgacttctccagggtcacacagtgaagcggtatc

SEQ ID NO: 407869 - DNA, 201 bp, Homo sapiens
tcctgcctcagcctcccatgtagcaaggattacaggcatgcaccactaccgcccagctaattttcatatttttagtagagacagggttttgccatgttggycaggctggtcttgaactcctgacctcaagtgatctgcccgcctcgggctcccaaaatgctgggtttacaggtgtgagccactgcacctggccctgttatg

SEQ ID NO: 407870 - DNA, 201 bp, Homo sapiens
agttctcctgcctcagcctcccatgtagcaaggattacaggcatgcaccactaccgcccagctaattttcatatttttagtagagacagggttttgccatkttggccaggctggtcttgaactcctgacctcaagtgatctgcccgcctcgggctcccaaaatgctgggtttacaggtgtgagccactgcacctggccctg

SEQ ID NO: 407871 - DNA, 201 bp, Homo sapiens
gcagttctcctgcctcagcctcccatgtagcaaggattacaggcatgcaccactaccgcccagctaattttcatatttttagtagagacagggttttgccrtgttggccaggctggtcttgaactcctgacctcaagtgatctgcccgcctcgggctcccaaaatgctgggtttacaggtgtgagccactgcacctggccc

SEQ ID NO: 407872 - DNA, 201 bp, Homo sapiens
cttctggtttcaagcgattctcctgcctcagcctcccaagtagctgggattacaggcgcccgccaccatgcccagctaatttttgtatttttagtggagayggggtttcaccatgttggccaggctggtctcgaactcctgacctcgtgatccacccacctcagcctcccaaagtgctgggattacaatatccaccacttt

SEQ ID NO: 407873 - DNA, 201 bp, Homo sapiens
tatccgttatgagcttttttttttgagacagagtctcactctgtcgcccaggctggggtgcagtggaacgatctcggctcactgcaatctccgtctcctgsgctcaagcagttctcctgcctcagcctcccatgtagcaaggattacaggcatgcaccactaccgcccagctaattttcatatttttagtagagacagggt

SEQ ID NO: 407874 - DNA, 201 bp, Homo sapiens
gtggtgcattattggctcaccacaacctccgccttctggtttcaagcgattctcctgcctcagcctcccaagtagctgggattacaggcgcccgccaccahgcccagctaatttttgtatttttagtggagatggggtttcaccatgttggccaggctggtctcgaactcctgacctcgtgatccacccacctcagcctcc

SEQ ID NO: 407875 - DNA, 201 bp, Homo sapiens
tgaggcaggagtatctcttgagcctgggaggtggaggttgaagtgagctgagattgcaccactgcactccagcctgggcaacagagtgagactctgtctcmaaaaaaaaaaaaaaaaaaagtaactatagtagaaatgaaagaacattgacaaatcttaaggcccagaactgaagggccgctttgatgttatcttcaaaaa

SEQ ID NO: 407876 - DNA, 201 bp, Homo sapiens
agtggtgcattattggctcaccacaacctccgccttctggtttcaagcgattctcctgcctcagcctcccaagtagctgggattacaggcgcccgccaccrtgcccagctaatttttgtatttttagtggagatggggtttcaccatgttggccaggctggtctcgaactcctgacctcgtgatccacccacctcagcctc

SEQ ID NO: 407877 - DNA, 201 bp, Homo sapiens
  misc_feature (1)...(201): n = A,T,C or G
ggaggctgaggcaggagtatctcttgagcctgggaggtggaggttgaagtgagctgagattgcaccactgcactccagcctgggcaacagagtgagactcngtctcaaaaaaaaaaaaaaaaaaaagtaactatagtagaaatgaaagaacattgacaaatcttaaggcccagaactgaagggccgctttgatgttatctt

SEQ ID NO: 407878 - DNA, 201 bp, Homo sapiens
gagtgcagtggtgcattattggctcaccacaacctccgccttctggtttcaagcgattctcctgcctcagcctcccaagtagctgggattacaggcgcccrccaccatgcccagctaatttttgtatttttagtggagatggggtttcaccatgttggccaggctggtctcgaactcctgacctcgtgatccacccacctc

SEQ ID NO: 407879 - DNA, 201 bp, Homo sapiens
ctactcgggaggctgaggcaggagtatctcttgagcctgggaggtggaggttgaagtgagctgagattgcaccactgcactccagcctgggcaacagagtragactctgtctcaaaaaaaaaaaaaaaaaaaagtaactatagtagaaatgaaagaacattgacaaatcttaaggcccagaactgaagggccgctttgatg

SEQ ID NO: 407880 - DNA, 201 bp, Homo sapiens
gctggagtgcagtggtgcattattggctcaccacaacctccgccttctggtttcaagcgattctcctgcctcagcctcccaagtagctgggattacaggcrcccgccaccatgcccagctaatttttgtatttttagtggagatggggtttcaccatgttggccaggctggtctcgaactcctgacctcgtgatccaccca

SEQ ID NO: 407881 - DNA, 201 bp, Homo sapiens
gtaatcccagctactcgggaggctgaggcaggagtatctcttgagcctgggaggtggaggttgaagtgagctgagattgcaccactgcactccagcctggkcaacagagtgagactctgtctcaaaaaaaaaaaaaaaaaaaagtaactatagtagaaatgaaagaacattgacaaatcttaaggcccagaactgaagggc

SEQ ID NO: 407882 - DNA, 201 bp, Homo sapiens
ccctccgaggccccaaagtccattatatccactgcttttttttttttttttttttgagatggagtttcgctcttttgcccaggctggagtgcagtggtgcrttattggctcaccacaacctccgccttctggtttcaagcgattctcctgcctcagcctcccaagtagctgggattacaggcgcccgccaccatgcccagc

SEQ ID NO: 407883 - DNA, 201 bp, Homo sapiens
gcttgtaatcccagctactcgggaggctgaggcaggagtatctcttgagcctgggaggtggaggttgaagtgagctgagattgcaccactgcactccagcytgggcaacagagtgagactctgtctcaaaaaaaaaaaaaaaaaaaagtaactatagtagaaatgaaagaacattgacaaatcttaaggcccagaactgaa

SEQ ID NO: 407884 - DNA, 201 bp, Homo sapiens
gtcttttattcctcacttccctcctcccctcccctccgaggccccaaagtccattatatccactgcttttttttttttttttttttgagatggagtttcgytcttttgcccaggctggagtgcagtggtgcattattggctcaccacaacctccgccttctggtttcaagcgattctcctgcctcagcctcccaagtagct

SEQ ID NO: 407885 - DNA, 201 bp, Homo sapiens
acttgaggtcaggagttcaagaccagcctggccaacatggtgaaaccccatctgtactaaaaatacaaaaattagccaggtgtggtggtgggtgcttgtartcccagctactcgggaggctgaggcaggagtatctcttgagcctgggaggtggaggttgaagtgagctgagattgcaccactgcactccagcctgggcaa

SEQ ID NO: 407886 - DNA, 201 bp, Homo sapiens
agaagagagggggtttcaccctgttggccaggctggtcttgaactcctgacctcaagtgacccacccacctcagcctcccaaagtgttgggattacaggcrtgagccactgcgccaggccttgtcttttttattttaaacagaattctttgccatgcatcatctctaatctggttgctctggccagtgatcagagggtagt

SEQ ID NO: 407887 - DNA, 201 bp, Homo sapiens
tttttgtattttttagaagagagggggtttcaccctgttggccaggctggtcttgaactcctgacctcaagtgacccacccacctcagcctcccaaagtgytgggattacaggcatgagccactgcgccaggccttgtcttttttattttaaacagaattctttgccatgcatcatctctaatctggttgctctggccagt

SEQ ID NO: 407888 - DNA, 201 bp, Homo sapiens
gtacaggtctggagtattttagatgttacaaatagaagactgtacttttacaaagccacaataggcagtggggtggggagtggggagactgtacaaacatkgatcaggaaaggccaagaacctcagaagctccagagatgaaggagaaagcctcatgacattacccactccttgagctttactaatgccatctcctgggtc

SEQ ID NO: 407889 - DNA, 201 bp, Homo sapiens
gtcacccttttttcttttttcagacagagtcttgctctgtctcccaggctggagtgcagtagtgcaatcttggctcactgcaacctctgccttccgggttyaggcaattctcctgcctcaacctcccacgtagctgggattacaggcaacgtgccaccacacccagctaatttttgtattttttagaagagagggggtttc

SEQ ID NO: 407890 - DNA, 201 bp, Homo sapiens
tcctagatggttgaccatagcttatgctcttttcttggacactaccttctcctttttccttgagttcaaaagtattattcttttctagttttgcctttacstctcaaatcacctattttcagtcctctttgcttagtttcctttccatgtcttaaatgttggtgacttcaggtatctgtctttgaccttctagtcttctct

SEQ ID NO: 407891 - DNA, 201 bp, Homo sapiens
acactgtaattggaaagattttttagattttcaatttaaaatttcaattttacaaatcaaatagtcttggtgtttaagtgtgccaatcactgttcagtcaraagcatactctctttctgctaagaaattacacttcaaaggattaaacagttctcagaataactgaaaacttctcatttgcttttatttaggttaacttct

SEQ ID NO: 407892 - DNA, 201 bp, Homo sapiens
taaaggttggagttgagcaagtgcggcgaagttcagtgatagaagagagacttctcttcctgtggctctgcctagtagaaaacattgtggttaagttgcasattgactataagcagaactgtccctgggatatggacaattaaaaaagctgtgctttgagggtatgaaagtggaagaaaggtgtgctgctagatgagccaa

SEQ ID NO: 407893 - DNA, 201 bp, Homo sapiens
cacccacccatgcttacacaagccccagcctataacatatattgatcaataaattaattaaaagcattccattatcgtgggaggagggcagctgtcttcakacctcatcagaaaccctagctgcctttctcctgtctttccccattcacagaaatggagcatagatgtaaactggttccacgtactcattctccacttgag

SEQ ID NO: 407894 - DNA, 201 bp, Homo sapiens
taataaacttgccacctcttcagaagtgtttgaaatgtgtgtgtttttgttaccacggaatgaaaattttattcccagttaaagaagttgcagttatcacygtacagttgagaatttggaagaaagaaatatctggagccttttcctgacccctaaaataatagctagaggaggctgcatgtctgacacttgaccagccac

SEQ ID NO: 407895 - DNA, 201 bp, Homo sapiens
tctttcccactaccttgacaaccagaatattccagtttgggtcccaaagtgaaggcaaaaacagaggagaaccccatacaacccacaagggacatgtagtrtgagcaagaaatgaacaagaaataagcctttgttatttcaagccattgagatttcaaagttatttgataatgaaacataacctgtattatctcaacaaat

SEQ ID NO: 407896 - DNA, 201 bp, Homo sapiens
gatgaacaattaggttggttccatatcttggctattgtgaatagtgctgaaataaacatgggagtgcagggatactgatttcaattcctttgggtatatayccagatgtgggattgttagatcatatggtagttctatttttaattttttaggaacctgcatattattttccataatggccgtactttcaattatatcttt

SEQ ID NO: 407897 - DNA, 201 bp, Homo sapiens
tttattaactgtattcaccttgctctaggttagatctccaggactttttcattgggtctaattgaaactttgtatccttcagccaccaacatctcattccmcccacccaaccccagcctcaggcatcaccattctactctgcttctatgattttgacttttttagattccatatataagtgagatcgttcaatatttttgt

SEQ ID NO: 407898 - DNA, 201 bp, Homo sapiens
aatctgattcagaagccaaaaattgccgccggctctctgttgagccttctggccagtccagtttaaagcacactgtccatcagctgtggttgctgtctctytccctcacagggctgctctttcctctgtgtctttggcttccctggggaaaaggtacctgacgagctcactcatgctctggaatgtgctatggatatattt

SEQ ID NO: 407899 - DNA, 201 bp, Homo sapiens
caggcagatcacttgaggtcaggagttcaagaccagcctggccaacatggtgaaaccccatctgtactaaaaatacaaaaattagccaggtgtggtggtgsgtgcttgtaatcccagctactcgggaggctgaggcaggagtatctcttgagcctgggaggtggaggttgaagtgagctgagattgcaccactgcactcca

SEQ ID NO: 407900 - DNA, 201 bp, Homo sapiens
ggtggctcacgcctaaatctcagcactttcggagcccgaggcaggcagatcacttgaggtcaggagttcaagaccagcctggccaacatggtgaaaccccrtctgtactaaaaatacaaaaattagccaggtgtggtggtgggtgcttgtaatcccagctactcgggaggctgaggcaggagtatctcttgagcctgggag

SEQ ID NO: 407901 - DNA, 201 bp, Homo sapiens
ggccgggcgcggtggctcacgcctaaatctcagcactttcggagcccgaggcaggcagatcacttgaggtcaggagttcaagaccagcctggccaacatgrtgaaaccccatctgtactaaaaatacaaaaattagccaggtgtggtggtgggtgcttgtaatcccagctactcgggaggctgaggcaggagtatctcttg

SEQ ID NO: 407902 - DNA, 201 bp, Homo sapiens
ctgcctcggcctccagaagtgctgggattatagatgtgagccactgcacctgacctccaaattaggtttaaaactagtccttatttaaaaaaaaaaaaaaagccaaacaaacaaaaccaacctttctttcttttttgttaaattacaaaaattatacatgcttgttataacaaacatcacagaggtgcataaagtaaaatc

SEQ ID NO: 407903 - DNA, 201 bp, Homo sapiens
tttgtttgtttgttttttgttttttagacctagtttcgctctcattgcccaggctggagtgcaatggcacgatctcggctcaccgcaacctccacctcccrggttcaagcgattcttctgcctcagcctcccgagtagctgggattgcaggcatgccccactacgcccagctaattttgtatttttagtagagatgaggtt

SEQ ID NO: 407904 - DNA, 201 bp, Homo sapiens
cctgcctcggcctccagaagtgctgggattatagatgtgagccactgcacctgacctccaaattaggtttaaaactagtccttatttaaaaaaaaaaaaaaagccaaacaaacaaaaccaacctttctttcttttttgttaaattacaaaaattatacatgcttgttataacaaacatcacagaggtgcataaagtaaaat

SEQ ID NO: 407905 - DNA, 201 bp, Homo sapiens
tttttgtttgtttgtttgtttgtttgttttttgttttttagacctagtttcgctctcattgcccaggctggagtgcaatggcacgatctcggctcaccgcracctccacctcccgggttcaagcgattcttctgcctcagcctcccgagtagctgggattgcaggcatgccccactacgcccagctaattttgtattttta

SEQ ID NO: 407906 - DNA, 201 bp, Homo sapiens
ttagagtaaccagtttctcttaaatctgcaaattagatttatttgtttgttcgtttttgagaagggtctcactcagtcacccaggctggagtgcagtggcrtgatcatggctcactgcagcctcaacctcccctgctcaagtgatcctcccaaacacctcagcttcctgagtagctaggattacaggcttgtgtcatcatg

SEQ ID NO: 407907 - DNA, 201 bp, Homo sapiens
tgttttttgtttgtttgtttgtttgtttgttttttgttttttagacctagtttcgctctcattgcccaggctggagtgcaatggcacgatctcggctcacygcaacctccacctcccgggttcaagcgattcttctgcctcagcctcccgagtagctgggattgcaggcatgccccactacgcccagctaattttgtattt

SEQ ID NO: 407908 - DNA, 201 bp, Homo sapiens
gaggctgaggcaggagaatggtgtgaacccaggaggtggagcttgcagtgagcagagatcactccactgcactccagcctgggcgacagagcaagactccrtctcaggaaaaaaaaaaaaagtacattaagtctgggtttcttcctcctggagtcattagttgtcaagaattaagggaaggggtcaagtagcaccaaggag

SEQ ID NO: 407909 - DNA, 201 bp, Homo sapiens
ttttctttgttttttgtttgtttgtttgtttgtttgttttttgttttttagacctagtttcgctctcattgcccaggctggagtgcaatggcacgatctcsgctcaccgcaacctccacctcccgggttcaagcgattcttctgcctcagcctcccgagtagctgggattgcaggcatgccccactacgcccagctaattt

SEQ ID NO: 407910 - DNA, 201 bp, Homo sapiens
ggtgggcggatcacaaggtaaggagatcaagaccacggtgaaaccctgtctctactgaaaatacaaaaaaaaaaaaaaaaaaattagccgggcgtggtggygggcgcctgtagtcccagctactcgggaggctgaggcaggagaatggtgtgaacccaggaggtggagcttgcagtgagcagagatcactccactgcactc

SEQ ID NO: 407911 - DNA, 201 bp, Homo sapiens
ctggggttttctttgttttttgtttgtttgtttgtttgtttgttttttgttttttagacctagtttcgctctcattgcccaggctggagtgcaatggcacratctcggctcaccgcaacctccacctcccgggttcaagcgattcttctgcctcagcctcccgagtagctgggattgcaggcatgccccactacgcccagc

SEQ ID NO: 407912 - DNA, 201 bp, Homo sapiens
gccgaggtgggcggatcacaaggtaaggagatcaagaccacggtgaaaccctgtctctactgaaaatacaaaaaaaaaaaaaaaaaaattagccgggcgtrgtggcgggcgcctgtagtcccagctactcgggaggctgaggcaggagaatggtgtgaacccaggaggtggagcttgcagtgagcagagatcactccactg

SEQ ID NO: 407913 - DNA, 201 bp, Homo sapiens
cctggggttttctttgttttttgtttgtttgtttgtttgtttgttttttgttttttagacctagtttcgctctcattgcccaggctggagtgcaatggcahgatctcggctcaccgcaacctccacctcccgggttcaagcgattcttctgcctcagcctcccgagtagctgggattgcaggcatgccccactacgcccag

SEQ ID NO: 407914 - DNA, 201 bp, Homo sapiens
ggccgaggtgggcggatcacaaggtaaggagatcaagaccacggtgaaaccctgtctctactgaaaatacaaaaaaaaaaaaaaaaaaattagccgggcgyggtggcgggcgcctgtagtcccagctactcgggaggctgaggcaggagaatggtgtgaacccaggaggtggagcttgcagtgagcagagatcactccact

SEQ ID NO: 407915 - DNA, 201 bp, Homo sapiens
tcctggggttttctttgttttttgtttgtttgtttgtttgtttgttttttgttttttagacctagtttcgctctcattgcccaggctggagtgcaatggcrcgatctcggctcaccgcaacctccacctcccgggttcaagcgattcttctgcctcagcctcccgagtagctgggattgcaggcatgccccactacgccca

SEQ ID NO: 407916 - DNA, 201 bp, Homo sapiens
aggccgaggtgggcggatcacaaggtaaggagatcaagaccacggtgaaaccctgtctctactgaaaatacaaaaaaaaaaaaaaaaaaattagccgggcrtggtggcgggcgcctgtagtcccagctactcgggaggctgaggcaggagaatggtgtgaacccaggaggtggagcttgcagtgagcagagatcactccac

SEQ ID NO: 407917 - DNA, 201 bp, Homo sapiens
gaggccgaggtgggcggatcacaaggtaaggagatcaagaccacggtgaaaccctgtctctactgaaaatacaaaaaaaaaaaaaaaaaaattagccgggsgtggtggcgggcgcctgtagtcccagctactcgggaggctgaggcaggagaatggtgtgaacccaggaggtggagcttgcagtgagcagagatcactcca

SEQ ID NO: 407918 - DNA, 201 bp, Homo sapiens
gtgaaagggtcataatagattgagatctgtagatagcacatgtggttagaatgggggttaatcttttaacctcagacctggtcatcagtggcgccggctgktcttgccactgacttcattcctgtgtttttcagcttttacttcctctttctcttcagagacaagagacagtaagagaaatggcctgtctcctcaccacca

SEQ ID NO: 407919 - DNA, 201 bp, Homo sapiens
gtctttcactatttttcctgtcacaaataatgcctggatattagcggggcatggtggctcacgcctgtaatcccagcactttgggaggctgaggtgggcgratcacgtgaggtcaggagttcgagactagcctggccaacatggggaaaacctatctttactaaaaatacaaaaattagctgagtgtggtggtgggtgcct

SEQ ID NO: 407920 - DNA, 201 bp, Homo sapiens
gaaggaggattcacatcattatacatctgttcaaacccatagaatgtgtaacagcagagtgactcttaatgtaaactatggactttgggtcaaaatgccgtgtcagtgtgggttcatcaattgtatcacatgaactgctgtagtggggaatgctgttagcaggtgaggttgtgagtatgtaggatcaggggctatatggga

SEQ ID NO: 407921 - DNA, 201 bp, Homo sapiens
tggagttgcaggcacataccaccacgcctggctaattttaatcttttgtagagatgggatgtcgtgatgttgcccaggctggtctccaactcctgggctcwggtcccgtctacctcagccttcccaaatgctgggattacaggcatgagccactgcacctggcaagaaatcccctcttattattaaaattaatgaggagaa

SEQ ID NO: 407922 - DNA, 201 bp, Homo sapiens
tcagatgatccaccagcttcggcctcccaaactgctggaattacaggcgtgagccaccgcgtctggcctaaagatattttaatatcaaaagtgatactgtrtaagttactattatttatttctgcatatggacagtcctgaagaaataagagaaaagatcttgaatttctttgaccacgttttaacaaaaatgaagacatc

SEQ ID NO: 407923 - DNA, 201 bp, Homo sapiens
tgacttctgctctcaagtccacaaaatccagtgagtattgaccctggtcccacccagcggtccctgacccttttgaggcataagtagggagggcatgcagsgaacaggaaagaaagaagaattaattaagaacttagtcctgtgtctcaaactgttgttcctccttcgcatctccgggccatgtagaaatgccataaacta

SEQ ID NO: 407924 - DNA, 201 bp, Homo sapiens
ttgacctcttagatgcaagtgggaaactttggggggtatgcatggtgagtttagtcagtagtatccacactaggttttattatcctgctcttttgtttttraagatattttattttatttatttattttttcaagatggagtctcgctctgtcacccaggctggagtgcaatgccacaatctcagctcactgcaacctccg

SEQ ID NO: 407925 - DNA, 201 bp, Homo sapiens
ttctttctacaagattgcagacccaacatgacagtcacattagaacacattatgtggatatttcttttttttttcttttgagacagagtctcactctgtcdcccaggctggagtgcagtggcgcgatctcagctcactacaacctctgcgtcccgggttcaagcgattcttctgcctcagcttcccaagtagctgggatta

SEQ ID NO: 407926 - DNA, 201 bp, Homo sapiens
agtggaggcagggtttcaccatgttggccagactggtcttgatctcctaacttcaagtgatccacttgccccagcctcccaaagtgctgggattacaggcrtgagccactgtgcccagcccagacatttttttaaagtacctgtacaatttttcacctatttttcaactgggttatattttgattatcttttggaattatt

SEQ ID NO: 407927 - DNA, 201 bp, Homo sapiens
tggaaagctgactcactggtgagtgctctctgagcttttcagtgattcctctcctggggttttctttgttttttgtttgtttgtttgtttgtttgttttttgttttttagacctagtttcgctctcattgcccaggctggagtgcaatggcacgatctcggctcaccgcaacctccacctcccgggttcaagcgattcttc

SEQ ID NO: 407928 - DNA, 201 bp, Homo sapiens
tcctgagtagctgggattacaggtgtccgccaccatgcccagctaatttttatattttagtggaggcagggtttcaccatgttggccagactggtcttgawctcctaacttcaagtgatccacttgccccagcctcccaaagtgctgggattacaggcgtgagccactgtgcccagcccagacatttttttaaagtacctg

SEQ ID NO: 407929 - DNA, 201 bp, Homo sapiens
caggtgtgcacctccggtaaattttttatttctgtagagatggggtctcacagtgttgcccaggctgatcatgaactcctgggctcaagcaatcctcccayctcagcctcccaaaatgctgggattacaggtgtgagccaccatgcttggtctggtccaccttttgaaggagccattcataatgcttggtaggatggatgt

SEQ ID NO: 407930 - DNA, 201 bp, Homo sapiens
gagtacaaaggagcaatcttggctcactacaacctctacctcctgggttcaagtgattctcaggactcagcctcctgagtagctgggattacaggtgtccrccaccatgcccagctaatttttatattttagtggaggcagggtttcaccatgttggccagactggtcttgatctcctaacttcaagtgatccacttgccc

SEQ ID NO: 407931 - DNA, 201 bp, Homo sapiens
tggagtacaaaggagcaatcttggctcactacaacctctacctcctgggttcaagtgattctcaggactcagcctcctgagtagctgggattacaggtgtrcgccaccatgcccagctaatttttatattttagtggaggcagggtttcaccatgttggccagactggtcttgatctcctaacttcaagtgatccacttgc

SEQ ID NO: 407932 - DNA, 201 bp, Homo sapiens
tttcaccatgttggccaggctggtcttgaactcctgacctcaagtgatctgcccacactggccttccaaagtgctgggattacaggcgtgaggcactgcayctggcctaaaatattattttaaaataaagataacaagcctattacatattaacataattaccattttcattttttaaaactctgttccgcaaacaaaaaa

SEQ ID NO: 407933 - DNA, 201 bp, Homo sapiens
tggatgttgtgaggattaagtgagttaattatgtaaagagcatcccgcagtacttggaacatagtaagtataatgtaagtgttggctttttttcactttaraaagaacccaatcctcattttagattagaagaaaccaggccaatgttttattattgaattcatgattttttgttcctgctttattctcttcaatttatga

SEQ ID NO: 407934 - DNA, 201 bp, Homo sapiens
attatggtttccatttgtatttccctgatgtggttgagctccttcttcataagtttattggccatttggatttatttatttatttatttattttgagacasagtctcactctgttgcccaggctggagtacaaaggagcaatcttggctcactacaacctctacctcctgggttcaagtgattctcaggactcagcctcct

SEQ ID NO: 407935 - DNA, 201 bp, Homo sapiens
ctggagtgcagtggcacaatatcggctcactgcaacctccacttcccgggttcaagagattctcttgcctcatcctcctgagtagctgggactacaggcaygcgccaccacacccagctaatttttgtatttttagtagagacggggtttcaccatgttggccaggctggtcttgaactcctgacctcaagtgatctgccc

SEQ ID NO: 407936 - DNA, 201 bp, Homo sapiens
tttagtagaaatggggtttcagtatgttggccaggctgttctcaaactcctgaccttgtgatccgcccatctcagcctcccaaagtgctgggattacaggygtgagccaccacacctggcctgtgagcttcttaagaacagagagtctcttaacatttccatatcactattgatgagaaatgtgcctcataattgtacata

SEQ ID NO: 407937 - DNA, 201 bp, Homo sapiens
gctggagtgcagtggcacaatatcggctcactgcaacctccacttcccgggttcaagagattctcttgcctcatcctcctgagtagctgggactacaggcrtgcgccaccacacccagctaatttttgtatttttagtagagacggggtttcaccatgttggccaggctggtcttgaactcctgacctcaagtgatctgcc

SEQ ID NO: 407938 - DNA, 201 bp, Homo sapiens
tatttttagtagaaatggggtttcagtatgttggccaggctgttctcaaactcctgaccttgtgatccgcccatctcagcctcccaaagtgctgggattayaggtgtgagccaccacacctggcctgtgagcttcttaagaacagagagtctcttaacatttccatatcactattgatgagaaatgtgcctcataattgta

SEQ ID NO: 407939 - DNA, 201 bp, Homo sapiens
caaaagtcgagaaaattctaaaatattattattattatttttgctggttttttttgagatggagtcttgctctgtcacccaggctggagtgcagtggcacratatcggctcactgcaacctccacttcccgggttcaagagattctcttgcctcatcctcctgagtagctgggactacaggcatgcgccaccacacccagc

SEQ ID NO: 407940 - DNA, 201 bp, Homo sapiens
ccatgcctggctaatttctttttgtatttttggtagagatggggtttcaccgtgttagccaggatggtctcgatctcctgacctcgtgatctgcccacctyggcctcccaaagggctgggattacaggcgtgagtcactgcgcccagccaagtagtacttcttaacagtgtttttgtcaggattaaagaaaatgatgcatg

SEQ ID NO: 407941 - DNA, 201 bp, Homo sapiens
tggtgcggtctcggctcactgagacctccacctcccaggttcaagcgattctcctgcctcagcctcccgactagctgggactacaggcacgcaccaccacrcctagctaatttttgtatttttagtagaaatggggtttcagtatgttggccaggctgttctcaaactcctgaccttgtgatccgcccatctcagcctccc

SEQ ID NO: 407942 - DNA, 201 bp, Homo sapiens
tactcagttttgttgaataagtgaatgaatgtatgagtatatgtgtgtatttaaagagggctgtgtcagtatcctagtttggacagcaagattcgtttttktctatgggttcacatggtttttaccaaagatgttttgccttgtttgatattggactaaccttgattacaaaagtcaagaagcactaatgatttctttgtt

SEQ ID NO: 407943 - DNA, 201 bp, Homo sapiens
aacaaaagtcgagaaaattctaaaatattattattattatttttgctggttttttttgagatggagtcttgctctgtcacccaggctggagtgcagtggcrcaatatcggctcactgcaacctccacttcccgggttcaagagattctcttgcctcatcctcctgagtagctgggactacaggcatgcgccaccacaccca

SEQ ID NO: 407944 - DNA, 201 bp, Homo sapiens
gcatattgccattcattacttatatatctgtttctctctccctcaggaaatcgtgagcctctttttttttttttttttttttttttgagacagagtctcgytctgtcgcccaggctggagtgcaatggtgcggtctcggctcactgagacctccacctcccaggttcaagcgattctcctgcctcagcctcccgactagct

SEQ ID NO: 407945 - DNA, 201 bp, Homo sapiens
atctattgatagcatataagaaacaaaagtcgagaaaattctaaaatattattattattatttttgctggttttttttgagatggagtcttgctctgtcamccaggctggagtgcagtggcacaatatcggctcactgcaacctccacttcccgggttcaagagattctcttgcctcatcctcctgagtagctgggactac

SEQ ID NO: 407946 - DNA, 201 bp, Homo sapiens
cctcttgtcagatcagcagcagcattagattctcataggagcctgaaccctattgtgaactgtgcatgcaagggacctaggttgcatgctccttatgagartctaatgcctgatgatctgtcactggcttccatcaccctcagatgggaccatctagttgcaaggaaacaagctcagggctcccactgattctatctacat

SEQ ID NO: 407947 - DNA, 201 bp, Homo sapiens
aagatattttcctttcaaaatgcaatagttaaaaatgctcattttttggccaggcgcagtggctcacgcttgcaatcccagcacttcgggaggctgaggcrggcggatcacctgaggtcaggggttcaggaccagcctggccaacatggcgaaaccccatctctaccaaaaacacaaaataattagccagacatggtggtg

SEQ ID NO: 407948 - DNA, 201 bp, Homo sapiens
tcctcctcttgtcagatcagcagcagcattagattctcataggagcctgaaccctattgtgaactgtgcatgcaagggacctaggttgcatgctccttatragaatctaatgcctgatgatctgtcactggcttccatcaccctcagatgggaccatctagttgcaaggaaacaagctcagggctcccactgattctatct

SEQ ID NO: 407949 - DNA, 201 bp, Homo sapiens
tgtggctcacgcctgtaataccaacgcttagggaggctgaggggggcggattgcctgaagttgggagttcgagaccagtctggccaacatggtgaaatccygtctctactaaaaatacagaaaaaatttagccaggcgtggtggcgtgcacctgtaatcccagctactcggaaggttgaggcaggggaattgcttgaacca

SEQ ID NO: 407950 - DNA, 201 bp, Homo sapiens
cctccaaagtagctgggattacaggcatgcgccaccacgcccagctaatttttgtattttagtagagatggggtttcaccatgttggccaggctggtctcraactcctgacctcaagtgatccgcccgccctgacctcccaaagtgctgggattacaggcgttagccaccgtgcccggcccaggttgacacctttatgaaa

SEQ ID NO: 407951 - DNA, 201 bp, Homo sapiens
tctcctgggttcaagtgattctcctgcctcagcctccaaagtagctgggattacaggcatgcgccaccacgcccagctaatttttgtattttagtagagayggggtttcaccatgttggccaggctggtctcaaactcctgacctcaagtgatccgcccgccctgacctcccaaagtgctgggattacaggcgttagccac

SEQ ID NO: 407952 - DNA, 201 bp, Homo sapiens
tttttgtatttttagtagagacggagtttcaccatgttggccaggatggtcttgatctcttgaccttgtgatccacccacctcggcctcccaaagtgctgrgattataggcatgagccactgcgcccagcctgttcagctttttacttgtttctaggaccaagtggttatttccaagctccttacatgcagaaatggccaa

SEQ ID NO: 407953 - DNA, 201 bp, Homo sapiens
caagcgattctcctgcctcagcctcctgagtagctgggactacaggcgtgcacgaccatgcctggctaatttttgtatttttagtagagacggagtttcaycatgttggccaggatggtcttgatctcttgaccttgtgatccacccacctcggcctcccaaagtgctgggattataggcatgagccactgcgcccagcct

SEQ ID NO: 407954 - DNA, 201 bp, Homo sapiens
cctactatactccagcctgggtgacaaagcaagaccccaactcttaaaaaaaaaaaaaaaaaaaaaggaaagcatatagtataagcgataaatcccatggrgaaaaacagaaaagaatgttgggtaggaggagcgcagagccatttgggtgacttcactgcaaagcaagattcatgtaaagacagaggaagtgagggattt

SEQ ID NO: 407955 - DNA, 201 bp, Homo sapiens
ccgccaccatgcctggctaatttctttttgtatttttggtagagatggggtttcaccgtgttagccaggatggtctcgatctcctgacctcgtgatctgcycacctcggcctcccaaagggctgggattacaggcgtgagtcactgcgcccagccaagtagtacttcttaacagtgtttttgtcaggattaaagaaaatga

SEQ ID NO: 407956 - DNA, 201 bp, Homo sapiens
agctgggactacaggcaaccgccaccatgcctggctaatttctttttgtatttttggtagagatggggtttcaccgtgttagccaggatggtctcgatctsctgacctcgtgatctgcccacctcggcctcccaaagggctgggattacaggcgtgagtcactgcgcccagccaagtagtacttcttaacagtgtttttgt

SEQ ID NO: 407957 - DNA, 201 bp, Homo sapiens
cgggttcacaccattctcctgcctcagccccctgagtagctgggactacaggcaaccgccaccatgcctggctaatttctttttgtatttttggtagagayggggtttcaccgtgttagccaggatggtctcgatctcctgacctcgtgatctgcccacctcggcctcccaaagggctgggattacaggcgtgagtcactg

SEQ ID NO: 407958 - DNA, 201 bp, Homo sapiens
gtatttttagtagagacaggttttcaccatgttggtcaggctggtctcaaactcctgacctcagatgatccacctgcctcggcctcccaaaatgctgggawtacaagcatgagccaccgtgcctggccagtagtccttttttttctttttgagatggagtctggctctgctgcccacgctggagtgcagtggtgcgatctc

SEQ ID NO: 407959 - DNA, 201 bp, Homo sapiens
tttataaagaaaagaggtttcattgactcacagttccacatggctagggaggcctcaggaaaattataatcatgacagaaggcaaaggggaagcaaggcaygtcttacatggtggcaggagagagcgagcaagggaggaagtgccaaacttttaaaccatcaaatctcatgagaactccctcactatcatgagaacagcat

SEQ ID NO: 407960 - DNA, 201 bp, Homo sapiens
ttgtatttttagtagagacaggttttcaccatgttggtcaggctggtctcaaactcctgacctcagatgatccacctgcctcggcctcccaaaatgctggrattacaagcatgagccaccgtgcctggccagtagtccttttttttctttttgagatggagtctggctctgctgcccacgctggagtgcagtggtgcgatc

SEQ ID NO: 407961 - DNA, 201 bp, Homo sapiens
atttataaagaaaagaggtttcattgactcacagttccacatggctagggaggcctcaggaaaattataatcatgacagaaggcaaaggggaagcaaggcrtgtcttacatggtggcaggagagagcgagcaagggaggaagtgccaaacttttaaaccatcaaatctcatgagaactccctcactatcatgagaacagca

SEQ ID NO: 407962 - DNA, 201 bp, Homo sapiens
gccaccacgcccagctaatttttgtatttttagtagagacaggttttcaccatgttggtcaggctggtctcaaactcctgacctcagatgatccacctgcytcggcctcccaaaatgctgggattacaagcatgagccaccgtgcctggccagtagtccttttttttctttttgagatggagtctggctctgctgcccacg

SEQ ID NO: 407963 - DNA, 201 bp, Homo sapiens
taagggggtccgcatgagagggtcgtgatcgattgagtaagccagggggtacgtgacaggggctgtgagcaccggtggtcacagtgaaacagaacagaacragagatttcacaatgtccttccatacaatgcccttccatacaatgtctggaatctatagataacaacagttgctaggtcaggggtcgaattttaactacc

SEQ ID NO: 407964 - DNA, 201 bp, Homo sapiens
cgcaagccaccacgcccagctaatttttgtatttttagtagagacaggttttcaccatgttggtcaggctggtctcaaactcctgacctcagatgatccamctgcctcggcctcccaaaatgctgggattacaagcatgagccaccgtgcctggccagtagtccttttttttctttttgagatggagtctggctctgctgc

SEQ ID NO: 407965 - DNA, 201 bp, Homo sapiens
tacagtggcgtgatatcggctctctgcaaattccgtctcctgggttcaagtgattctcctgcctcagcctccaaagtagctgggattacaggcatgcgccrccacgcccagctaatttttgtattttagtagagatggggtttcaccatgttggccaggctggtctcaaactcctgacctcaagtgatccgcccgccctga

SEQ ID NO: 407966 - DNA, 201 bp, Homo sapiens
aaaatccgagctcgtctgatgctcaacttctgtcccttttaagggctcacaactctaagggggtccgcatgagagggtcgtgatcgattgagtaagccagrgggtacgtgacaggggctgtgagcaccggtggtcacagtgaaacagaacagaacgagagatttcacaatgtccttccatacaatgcccttccatacaatg

SEQ ID NO: 407967 - DNA, 201 bp, Homo sapiens
tggaatacagtggcgtgatatcggctctctgcaaattccgtctcctgggttcaagtgattctcctgcctcagcctccaaagtagctgggattacaggcatrcgccaccacgcccagctaatttttgtattttagtagagatggggtttcaccatgttggccaggctggtctcaaactcctgacctcaagtgatccgcccgc

SEQ ID NO: 407968 - DNA, 201 bp, Homo sapiens
caagttttagttgtccggactccaagtgccaattccttcccggtgttcagccactctgttgatcctccacgggggcctgccacacactgctctggcgaggygtcccaccggggcaaatgcctacccaggagagctctcaggatccgcgtcactctggctggttggagtccccagcagggatgttccacagggcaggctaaa

SEQ ID NO: 407969 - DNA, 201 bp, Homo sapiens
gagtagctgggatggcaggcgcaagccaccacgcccagctaatttttgtatttttagtagagacaggttttcaccatgttggtcaggctggtctcaaactyctgacctcagatgatccacctgcctcggcctcccaaaatgctgggattacaagcatgagccaccgtgcctggccagtagtccttttttttctttttgaga

SEQ ID NO: 407970 - DNA, 201 bp, Homo sapiens
ctcctgacctcgtgatccacttgccttggcctcccaaagtgctgggattacaggcatgagccaccgcacccggcctaatttttatatttttagtagagatrgggtttcaccaggttggccaggctggtcttgaactcctgatctcagatgatccaccagcttcggcctcccaaactgctggaattacaggcgtgagccacc

SEQ ID NO: 407971 - DNA, 201 bp, Homo sapiens
ctccagagtagctgggatggcaggcgcaagccaccacgcccagctaatttttgtatttttagtagagacaggttttcaccatgttggtcaggctggtctcraactcctgacctcagatgatccacctgcctcggcctcccaaaatgctgggattacaagcatgagccaccgtgcctggccagtagtccttttttttctttt

SEQ ID NO: 407972 - DNA, 201 bp, Homo sapiens
agggcacgcacacacttttgcagtttacactaaaccaaaatcaaaaccaaaatcagagtattcagaaatccaagccaggtcaaaaccaaaaccaaagtatyaagcaatctaagtcaagtcaaaaacaaaaaccaaagtgccggaacaggcacaccgtgggtgatcagatcaggccatgcttccactcaaatggagtgggaa

SEQ ID NO: 407973 - DNA, 201 bp, Homo sapiens
ggaatgcaatggcgtgatcttggctcactgcaacctctgtctcttgggttcaagcgattctcctgcctcagcctccagagtagctgggatggcaggcgcamgccaccacgcccagctaatttttgtatttttagtagagacaggttttcaccatgttggtcaggctggtctcaaactcctgacctcagatgatccacctgc

SEQ ID NO: 407974 - DNA, 201 bp, Homo sapiens
taaaaccagctgtaattgtctacgtacagaaactggtctgtgtgccttggcttacaggttaccttgtgccatacatttgaaacaagggacctgtctaggcytccttctgatggccaacccacctctaatgttggccagtctattttacacaaagttctaagtttttctagtgtcatagtaacaccgtaatctcccttaaat

SEQ ID NO: 407975 - DNA, 201 bp, Homo sapiens
tcctgaataactgggactacaggcgcctgccaccacacccggctaattttttgtatttttagtagagacgggatttcaccgtgttagccaggatggtcttratctcctgacctcgtgatccacttgccttggcctcccaaagtgctgggattacaggcatgagccaccgcacccggcctaatttttatatttttagtagag

SEQ ID NO: 407976 - DNA, 201 bp, Homo sapiens
tttaaatttaccttggcttttaaagggaatagggtacactatttttttcttaactacttggatatttctctctatttttctttctctctttgactttctgkctctctctctccctctctctctctttgactttccttttgcctctgtttcttcctctctttctgcctctcttaactactgtgggggcgaagggggtctaaa

SEQ ID NO: 407977 - DNA, 201 bp, Homo sapiens
ttctgggttcaagtgattctcctgcctcagcctcctgaataactgggactacaggcgcctgccaccacacccggctaattttttgtatttttagtagagaygggatttcaccgtgttagccaggatggtcttgatctcctgacctcgtgatccacttgccttggcctcccaaagtgctgggattacaggcatgagccaccg

SEQ ID NO: 407978 - DNA, 201 bp, Homo sapiens
ctggaaaagagctaccatgcagcccacgcctggtggactggaggaccactttagtggaagggggacaatgagggcctctggcctgccatgtgcacaagcawaacaactgcttttgtttaatgtgcagatggaatatttgatccatttcaaccaggcatttgcatcttggtatgctgtcttaattgccaaagtttgttttaa

SEQ ID NO: 407979 - DNA, 201 bp, Homo sapiens
tgccacaatctcagctcactgcaacctccgccttctgggttcaagtgattctcctgcctcagcctcctgaataactgggactacaggcgcctgccaccacmcccggctaattttttgtatttttagtagagacgggatttcaccgtgttagccaggatggtcttgatctcctgacctcgtgatccacttgccttggcctcc

SEQ ID NO: 407980 - DNA, 201 bp, Homo sapiens
cccagtaaaggtccaccacaataccaccacacatccgcttggggatgaacaagggctgactgattgataagctcttgaaaattcttaagctcattgcatcmcttcaggtctccaaggaatcctaagtttcctctctgtggtgagagacatgaagtgaacttagtgttgggagacggaggctggatggccctcgggggctga

SEQ ID NO: 407981 - DNA, 201 bp, Homo sapiens
ttatttatttattttttcaagatggagtctcgctctgtcacccaggctggagtgcaatgccacaatctcagctcactgcaacctccgccttctgggttcargtgattctcctgcctcagcctcctgaataactgggactacaggcgcctgccaccacacccggctaattttttgtatttttagtagagacgggatttcacc

SEQ ID NO: 407982 - DNA, 201 bp, Homo sapiens
acagtgaaaccccatctccactaaaaatacaaaaaattagccaggcatggtgggacacgcctatagtcccagctacttgggaggctgaggcaggagaatckcttgaatccaggaggcagaggttgcagtgagctaagattgcaccactgcgctccagcctaggcaacagagtgaaactccatccaaaaaaaaaaatagtaa

SEQ ID NO: 407983 - DNA, 201 bp, Homo sapiens
ttgagaccatcctagctaacacagtgaaaccccatctccactaaaaatacaaaaaattagccaggcatggtgggacacgcctatagtcccagctacttggsaggctgaggcaggagaatcgcttgaatccaggaggcagaggttgcagtgagctaagattgcaccactgcgctccagcctaggcaacagagtgaaactcca

SEQ ID NO: 407984 - DNA, 201 bp, Homo sapiens
tcaaaaataatatgattctggttgggcacggttgctcatgcctgtaattgcagcactttgggaggccgaggcaggcagatcacaaggtcaggagattgagmccatcctagctaacacagtgaaaccccatctccactaaaaatacaaaaaattagccaggcatggtgggacacgcctatagtcccagctacttgggaggct

SEQ ID NO: 407985 - DNA, 201 bp, Homo sapiens
tctctctgtttaaattatatagaacatgtatatctttccaaagccaaaaaggtacatccttagtcttgcttccctcccttatcctataggtaaccattttkgttagtttttggcttatccttccaatgtctgttttaaaaactataaatcaagtgtgtgcacacttattgtgtacacacatgagtgaaataaaaagaaaac

SEQ ID NO: 407986 - DNA, 201 bp, Homo sapiens
gtagtacttttttttttttttttttgagatggagctttgcttttgttgcccaggatggaatgcaatggcgtgatcttggctcactgcaacctctgtctctygggttcaagcgattctcctgcctcagcctccagagtagctgggatggcaggcgcaagccaccacgcccagctaatttttgtatttttagtagagacaggt

SEQ ID NO: 407987 - DNA, 201 bp, Homo sapiens
ataagagtagtacttttttttttttttttttgagatggagctttgcttttgttgcccaggatggaatgcaatggcgtgatcttggctcactgcaacctctrtctcttgggttcaagcgattctcctgcctcagcctccagagtagctgggatggcaggcgcaagccaccacgcccagctaatttttgtatttttagtagag

SEQ ID NO: 407988 - DNA, 201 bp, Homo sapiens
agtagagatgaggtttcgccatgttggccaggtgggtctcgaattcctgacctcaagtgatccacctgcctcggcctcccaaagtgctgggattacaggcrtgagccactgcacctggtcttcactctgttcttaatcaattcagagaaaagtgatgtgatgaacaaatgaccacagatgcatatgtgagaattgatttcc

SEQ ID NO: 407989 - DNA, 201 bp, Homo sapiens
atttttagtagagatgaggtttcgccatgttggccaggtgggtctcgaattcctgacctcaagtgatccacctgcctcggcctcccaaagtgctgggattrcaggcatgagccactgcacctggtcttcactctgttcttaatcaattcagagaaaagtgatgtgatgaacaaatgaccacagatgcatatgtgagaattg

SEQ ID NO: 407990 - DNA, 201 bp, Homo sapiens
taaagtataagtgccactccagttattcggcagagtgcccagtaaaggtccaccacaataccaccacacatccgcttggggatgaacaagggctgactgaktgataagctcttgaaaattcttaagctcattgcatcacttcaggtctccaaggaatcctaagtttcctctctgtggtgagagacatgaagtgaacttagt

SEQ ID NO: 407991 - DNA, 201 bp, Homo sapiens
cacacctggctaatttttgtatttttagtagagatgaggtttcgccatgttggccaggtgggtctcgaattcctgacctcaagtgatccacctgcctcggyctcccaaagtgctgggattacaggcatgagccactgcacctggtcttcactctgttcttaatcaattcagagaaaagtgatgtgatgaacaaatgaccac

SEQ ID NO: 407992 - DNA, 201 bp, Homo sapiens
taaaatattgacttaaattttgtagctatttgatttcaagctttaaattgatctggtattcctcgtgggactccaattgcgtctaaatggacgtgagagtygaaagacctataagggggcttctctcgctttacgatgtcttatttttcctccctcttgttgatgaaatgccagggtgaaagggatagccaactggactaa

SEQ ID NO: 407993 - DNA, 201 bp, Homo sapiens
ctcacctgaaggtgtttggggtttttttttgtctaatttttgttgttgttgttgttggagacagagtctcactctgtcgcccaggctggagtgcaatggcrtgatctcggctcactgcaacctccgtctcctaggttcaagtgattctcgtgcctcagcctcccgagtagctgggattacaggcacccgccatcatgcctg

SEQ ID NO: 407994 - DNA, 201 bp, Homo sapiens
ccacacctggctaatttttgtatttttagtagagatgaggtttcgccatgttggccaggtgggtctcgaattcctgacctcaagtgatccacctgcctcgrcctcccaaagtgctgggattacaggcatgagccactgcacctggtcttcactctgttcttaatcaattcagagaaaagtgatgtgatgaacaaatgacca

SEQ ID NO: 407995 - DNA, 201 bp, Homo sapiens
tgttacactgttaacttttagcaaactttacttttgttgaaaaccttgtaagtttgggatttcaattatcctttgctatgagtaagaccttgtttagtctraattaacttagaattggtatagatggccctttttttttttttttttttttggcacatagagtgtgcactttcgtcaggtcaggtagccccagggctgggg

SEQ ID NO: 407996 - DNA, 201 bp, Homo sapiens
aaatgaaaaaaatgagaatcaaaaataatatgattctggttgggcacggttgctcatgcctgtaattgcagcactttgggaggccgaggcaggcagatcamaaggtcaggagattgagaccatcctagctaacacagtgaaaccccatctccactaaaaatacaaaaaattagccaggcatggtgggacacgcctatagtc

SEQ ID NO: 407997 - DNA, 201 bp, Homo sapiens
gagccctacagtctgggttaaaactccaactgccattttttttttttgaagataaccattcttttttttttttttttaagtgaactttctttatatctgtrgactagactgtctaaggccacaagattagaagttactataatacatgttacactgttaacttttagcaaactttacttttgttgaaaaccttgtaagttt

SEQ ID NO: 407998 - DNA, 201 bp, Homo sapiens
cttaatataatatctcctttgtaaatgaaaaaaatgagaatcaaaaataatatgattctggttgggcacggttgctcatgcctgtaattgcagcactttgkgaggccgaggcaggcagatcacaaggtcaggagattgagaccatcctagctaacacagtgaaaccccatctccactaaaaatacaaaaaattagccaggc

SEQ ID NO: 407999 - DNA, 201 bp, Homo sapiens
accacacctggctaatttttgtatttttagtagagatgaggtttcgccatgttggccaggtgggtctcgaattcctgacctcaagtgatccacctgcctcrgcctcccaaagtgctgggattacaggcatgagccactgcacctggtcttcactctgttcttaatcaattcagagaaaagtgatgtgatgaacaaatgacc

SEQ ID NO: 408000 - DNA, 201 bp, Homo sapiens
aggttttgcctaagagttagcttatctgcttcttgtgctaacagggccgttgctgccagggcccttagatatgggggccagcctttggaaaccccatctarttgttttgagagataggccactggccttggccagagccctacagtctgggttaaaactccaactgccattttttttttttgaagataaccattctttttt

SEQ ID NO: 408001 - DNA, 201 bp, Homo sapiens
gcatgcgccaccacacctggctaatttttgtatttttagtagagatgaggtttcgccatgttggccaggtgggtctcgaattcctgacctcaagtgatcckcctgcctcggcctcccaaagtgctgggattacaggcatgagccactgcacctggtcttcactctgttcttaatcaattcagagaaaagtgatgtgatgaa

SEQ ID NO: 408002 - DNA, 201 bp, Homo sapiens
taaagtcttagttttagttctttgaaaccataaggtgggcaggtgatatctttgcttttctcttttcatttgagaacctataggcatttgtatgtttttttcttttgatttttacagattctccttgtagtaggaaactcttaatataatatctcctttgtaaatgaaaaaaatgagaatcaaaaataatatgattctggt

SEQ ID NO: 408003 - DNA, 201 bp, Homo sapiens
ctgggctctctgataccaggagcaaggtggcggggtttagggtgttgcaaacttcaatggttatgtggggattttcacagagcaagctttggtatctagtyagtctagcattcattagctaatgatgtcctttggtactgattaaagtcaccacagcatgggggggactttatgtttaggttttgcctaagagttagctta

SEQ ID NO: 408004 - DNA, 201 bp, Homo sapiens
catgatctcggctcactgaaacctccgcctcccgggttcaagcgattctcttgactcagcctcctgagtagctgggattacaggcatgcgccaccacacckggctaatttttgtatttttagtagagatgaggtttcgccatgttggccaggtgggtctcgaattcctgacctcaagtgatccacctgcctcggcctccca

SEQ ID NO: 408005 - DNA, 201 bp, Homo sapiens
tgggtgtggtggcaggtgcctgtagccccagctactcaggaggctgaggtgggaagatcatttgagccagggaggttgaggctgcagtgagctatgatggygccactgcactccagcctgagcgacagaacaaggccctgtctcaaaaaaaaaaaaaaaaaatcattttattctcatttagttaggtaaaatgtcctgaac

SEQ ID NO: 408006 - DNA, 201 bp, Homo sapiens
gtgactggagcagggctttttctgagtcactttgcagaggttggtgaagctgctcccatccacgtacagctcccagtttactgatgtttaaggatggtttyggaggttgggcccactagaataaactgagtccaacacttctacacagttatgtttaactgggctctctgataccaggagcaaggtggcggggtttagggt

SEQ ID NO: 408007 - DNA, 201 bp, Homo sapiens
gcatgatctcggctcactgaaacctccgcctcccgggttcaagcgattctcttgactcagcctcctgagtagctgggattacaggcatgcgccaccacacytggctaatttttgtatttttagtagagatgaggtttcgccatgttggccaggtgggtctcgaattcctgacctcaagtgatccacctgcctcggcctccc

SEQ ID NO: 408008 - DNA, 201 bp, Homo sapiens
ctctggtactggcacatttagttaatcatagaaagtctgaaatactggttccggagagagtttacgaacctcctcttttactaaggtatttactctaggakctagtccttttttatcgacgcccagagatacgtgtacttctttttttctaccttgggtttaagggatttgtaattactaatttcaaggggttgcagcttc

SEQ ID NO: 408009 - DNA, 201 bp, Homo sapiens
aaattagccgggcatggtggtgggtgcctataatcccagctactcaagaggctgaggcaggagaatctcttgaacccaggaggcggaggttgcagtgagcygagatcagccattgcactccagcttgggcaacaagagtgagactccatctcaaaaaaaaaaaaagaggatggactagcttagtttctactgtgttttttg

SEQ ID NO: 408010 - DNA, 201 bp, Homo sapiens
ttctcgggcttcttatgccattgatctcttattacagtttctccacaaacgtaacatgaggtgacatttagagactgggctacatgctcggctaattgcamaaacaaatttctggtttttcctggagtctctggtactggcacatttagttaatcatagaaagtctgaaatactggttccggagagagtttacgaacctcc

SEQ ID NO: 408011 - DNA, 201 bp, Homo sapiens
acacataatccaagtcagcccccaaagcctggcctccagggggcacaaggactcctgtttggctctgaccattcactggggagggggcgagtgtgggaggygctcccataccagggttgccacaaagtactttacaggcagtttttgccaaagggaattttgatgactcaaacataagggacctcgttgtaaggtaagttc

SEQ ID NO: 408012 - DNA, 201 bp, Homo sapiens
cccatctctcctacaaacacaaaaaattagccgggcatggtggtgggtgcctataatcccagctactcaagaggctgaggcaggagaatctcttgaacccrggaggcggaggttgcagtgagccgagatcagccattgcactccagcttgggcaacaagagtgagactccatctcaaaaaaaaaaaaagaggatggactag

SEQ ID NO: 408013 - DNA, 201 bp, Homo sapiens
ctgggtctgtaggcactaattctcgggcttcttatgccattgatctcttattacagtttctccacaaacgtaacatgaggtgacatttagagactgggctrcatgctcggctaattgcaaaaacaaatttctggtttttcctggagtctctggtactggcacatttagttaatcatagaaagtctgaaatactggttccgg

SEQ ID NO: 408014 - DNA, 201 bp, Homo sapiens
tgggggtagtggcttgctattgtggtagtatagggtggcagtaggactagaaaggagagaattagctaggttaaattaatcagggcttaggaacaggagamgagggagtatatcagaagcagcaataaagaaccattgcgagatagcttggaaaatctccatcattatagctgaatatgagaagacagagctttccttcaa

SEQ ID NO: 408015 - DNA, 201 bp, Homo sapiens
ggtggatcacctgaggtcaggagttcgagaccagcctggtcaacatggtgaaatcccatctctcctacaaacacaaaaaattagccgggcatggtggtggrtgcctataatcccagctactcaagaggctgaggcaggagaatctcttgaacccaggaggcggaggttgcagtgagccgagatcagccattgcactccagc

SEQ ID NO: 408016 - DNA, 201 bp, Homo sapiens
gtaatcccagctactgaggagactgaggcaggagaattgcttgaacccaggaggcggaggttgcagtgagccgagatcacgccattgcactccagcctggscaacaagagaaaaactctgtctcaaaaaagaaagaaagaaagaaagaaagatgtattattattcttttaaagaaaaatgactttcaaggaatgttttagt

SEQ ID NO: 408017 - DNA, 201 bp, Homo sapiens
  misc_feature (1)...(201): n = A,T,C or G
ctaaaaatacaaaaaaaaattagccgggcatggtggcgcatgcatgtaatcccagctactgaggagactgaggcaggagaattgcttgaacccaggaggcngaggttgcagtgagccgagatcacgccattgcactccagcctgggcaacaagagaaaaactctgtctcaaaaaagaaagaaagaaagaaagaaagatgta

SEQ ID NO: 408018 - DNA, 201 bp, Homo sapiens
agtcttgattcattccaacggtttaccctcctgggggctgtccttcagcttcttccacctatttcatcagtgactactcttctcactcctttatcttctayagatatgttgaactttcattcagcatttcatttactcattccacaattatttatttatgtgccaggcattgcttactgctctaggcatctgaaatgcatc

SEQ ID NO: 408019 - DNA, 201 bp, Homo sapiens
cccgcttttgatgttgttaaaaatttccaaataaggccaggtgcagtggctcacacctgtaatcccagcactttgggaggccaaggtgggtggatcacctsaggtcaggagtttgagaccagcctgaccaacatggtgaaaccccgtctctactaaaatacaaaaattagccaggcgtgatggcgggtgcctgtaatctca

SEQ ID NO: 408020 - DNA, 201 bp, Homo sapiens
aggcccgcttttgatgttgttaaaaatttccaaataaggccaggtgcagtggctcacacctgtaatcccagcactttgggaggccaaggtgggtggatcayctgaggtcaggagtttgagaccagcctgaccaacatggtgaaaccccgtctctactaaaatacaaaaattagccaggcgtgatggcgggtgcctgtaatc

SEQ ID NO: 408021 - DNA, 201 bp, Homo sapiens
taggcccgcttttgatgttgttaaaaatttccaaataaggccaggtgcagtggctcacacctgtaatcccagcactttgggaggccaaggtgggtggatcmcctgaggtcaggagtttgagaccagcctgaccaacatggtgaaaccccgtctctactaaaatacaaaaattagccaggcgtgatggcgggtgcctgtaat

SEQ ID NO: 408022 - DNA, 201 bp, Homo sapiens
ggcatgatctcggctcactgaaacctccgcctcccgggttcaagcgattctcttgactcagcctcctgagtagctgggattacaggcatgcgccaccacayctggctaatttttgtatttttagtagagatgaggtttcgccatgttggccaggtgggtctcgaattcctgacctcaagtgatccacctgcctcggcctcc

SEQ ID NO: 408023 - DNA, 201 bp, Homo sapiens
ctaggcccgcttttgatgttgttaaaaatttccaaataaggccaggtgcagtggctcacacctgtaatcccagcactttgggaggccaaggtgggtggatyacctgaggtcaggagtttgagaccagcctgaccaacatggtgaaaccccgtctctactaaaatacaaaaattagccaggcgtgatggcgggtgcctgtaa

SEQ ID NO: 408024 - DNA, 201 bp, Homo sapiens
gcagtggcatgatctcggctcactgaaacctccgcctcccgggttcaagcgattctcttgactcagcctcctgagtagctgggattacaggcatgcgccamcacacctggctaatttttgtatttttagtagagatgaggtttcgccatgttggccaggtgggtctcgaattcctgacctcaagtgatccacctgcctcgg

SEQ ID NO: 408025 - DNA, 201 bp, Homo sapiens
ttaacctaggcccgcttttgatgttgttaaaaatttccaaataaggccaggtgcagtggctcacacctgtaatcccagcactttgggaggccaaggtgggyggatcacctgaggtcaggagtttgagaccagcctgaccaacatggtgaaaccccgtctctactaaaatacaaaaattagccaggcgtgatggcgggtgcc

SEQ ID NO: 408026 - DNA, 201 bp, Homo sapiens
gaatgcagtggcatgatctcggctcactgaaacctccgcctcccgggttcaagcgattctcttgactcagcctcctgagtagctgggattacaggcatgcrccaccacacctggctaatttttgtatttttagtagagatgaggtttcgccatgttggccaggtgggtctcgaattcctgacctcaagtgatccacctgcc

SEQ ID NO: 408027 - DNA, 201 bp, Homo sapiens
tcagcagttatacaattaactgtttctcagccttctttaacctaggcccgcttttgatgttgttaaaaatttccaaataaggccaggtgcagtggctcacrcctgtaatcccagcactttgggaggccaaggtgggtggatcacctgaggtcaggagtttgagaccagcctgaccaacatggtgaaaccccgtctctacta

SEQ ID NO: 408028 - DNA, 201 bp, Homo sapiens
gtgattcttttgggccgggaattcatcaggaactgggtctgtaggcactaattctcgggcttcttatgccattgatctcttattacagtttctccacaaaygtaacatgaggtgacatttagagactgggctacatgctcggctaattgcaaaaacaaatttctggtttttcctggagtctctggtactggcacatttagt

SEQ ID NO: 408029 - DNA, 201 bp, Homo sapiens
ctggaatgcagtggcatgatctcggctcactgaaacctccgcctcccgggttcaagcgattctcttgactcagcctcctgagtagctgggattacaggcamgcgccaccacacctggctaatttttgtatttttagtagagatgaggtttcgccatgttggccaggtgggtctcgaattcctgacctcaagtgatccacct

SEQ ID NO: 408030 - DNA, 201 bp, Homo sapiens
acacacgtagctggggttacaggcgtgcgccaccatgcccagcaattttgtatttttttcagtagagatagggttttaccatgttggccaggctggtctcraactcctgacctcaggtgatcctcccacctcagcctcccaaagtgctgggattataggcgtaagccaccatgcctggcctatccaagtatttttaaaagc

SEQ ID NO: 408031 - DNA, 201 bp, Homo sapiens
atgagtgaattctttccttttttcagctatgcaatattgtctaataattgagacttttagaacctagaaatgatcagggtgattcttttgggccgggaatycatcaggaactgggtctgtaggcactaattctcgggcttcttatgccattgatctcttattacagtttctccacaaacgtaacatgaggtgacatttaga

SEQ ID NO: 408032 - DNA, 201 bp, Homo sapiens
cctccagttccccttttattttcatccatggcagggaggggactgcctctggctcccaggtgttttcgctctgttcttttttttttttttttttttgagayggaatcttgctctattgcccaggctggaatgcagtggcatgatctcggctcactgaaacctccgcctcccgggttcaagcgattctcttgactcagcctc

SEQ ID NO: 408033 - DNA, 201 bp, Homo sapiens
atagtgccaataacacaactacctgtccactggtcaggcagcttagcgtaggttctatgtccacgtatccagtatagcctagtggggggctgtctagtccyggtggaattctgggtgggcttaaacggtctgcaactttggaaatttactgaatggatttttatctgtgtggtttgaactccaccatgtaactgtttttgt

SEQ ID NO: 408034 - DNA, 201 bp, Homo sapiens
gctatttttatttattaatttttttttttgagtcagagtctcactctgtctcccaggctggagtgcagtggcacgatctcagctcactgcagcctctgccycccaggttcaagcgattctcctgcctcagccacacacgtagctggggttacaggcgtgcgccaccatgcccagcaattttgtatttttttcagtagagat

SEQ ID NO: 408035 - DNA, 201 bp, Homo sapiens
aaccccgtctctactaaaaatacaaaaaaaaattagccgggcatggtggcgcatgcatgtaatcccagctactgaggagactgaggcaggagaattgcttraacccaggaggcggaggttgcagtgagccgagatcacgccattgcactccagcctgggcaacaagagaaaaactctgtctcaaaaaagaaagaaagaaag

SEQ ID NO: 408036 - DNA, 201 bp, Homo sapiens
ggaggctgaggcaggacaatggcttgaacctgagaggcggaggttgcagtgagccgagatcgcaccactgcgctccagcctgggctatagcgtgagactcygtctcaactaaacaaaaaaagaaatttaacctagaaggccagtctttgtttataattataacttctatggtggatatggcacttactatgtgccaggcac

SEQ ID NO: 408037 - DNA, 201 bp, Homo sapiens
ggtgcccggctatttttatttattaatttttttttttgagtcagagtctcactctgtctcccaggctggagtgcagtggcacgatctcagctcactgcagsctctgcctcccaggttcaagcgattctcctgcctcagccacacacgtagctggggttacaggcgtgcgccaccatgcccagcaattttgtatttttttca

SEQ ID NO: 408038 - DNA, 201 bp, Homo sapiens
ttcgggtctggttcttaggcgccgggctacctgcctttagtttcgcttctctgtccttttctgagtataaaacaatataaaacaatatgagagggtctctstcttccctcatttcccccgtttgagactctcactttttattagtgggagttctcactcttatttttgccacttatgccttcttgtgcaatagattgatag

SEQ ID NO: 408039 - DNA, 201 bp, Homo sapiens
aaattagctgggtgcggtggcacgtgcctgtaatctcagctactcaggaggctgaggcaggacaatggcttgaacctgagaggcggaggttgcagtgagcygagatcgcaccactgcgctccagcctgggctatagcgtgagactccgtctcaactaaacaaaaaaagaaatttaacctagaaggccagtctttgtttata

SEQ ID NO: 408040 - DNA, 201 bp, Homo sapiens
gggtgcccggctatttttatttattaatttttttttttgagtcagagtctcactctgtctcccaggctggagtgcagtggcacgatctcagctcactgcarcctctgcctcccaggttcaagcgattctcctgcctcagccacacacgtagctggggttacaggcgtgcgccaccatgcccagcaattttgtatttttttc

SEQ ID NO: 408041 - DNA, 201 bp, Homo sapiens
aaaccccgtctctactaaaaatacaaaaaaaaattagccgggcatggtggcgcatgcatgtaatcccagctactgaggagactgaggcaggagaattgctygaacccaggaggcggaggttgcagtgagccgagatcacgccattgcactccagcctgggcaacaagagaaaaactctgtctcaaaaaagaaagaaagaaa

SEQ ID NO: 408042 - DNA, 201 bp, Homo sapiens
acgagagatttcacaatgtccttccatacaatgtgtggaatctatagataacaacagttgctaggtcaggggtcgaattttaactaccaggcttaggtcargcaggcccaggcctggtttcgggtctggttcttaggcgccgggctacctgcctttagtttcgcttctctgtccttttctgagtataaaacaatataaaac

SEQ ID NO: 408043 - DNA, 201 bp, Homo sapiens
atcaggtagttctttataacagtgggagaacggactaatacaaccatacattttaaaaataactaaaagagtataattggattgtttgtaacacaaaggawaaatgcttgaggggatgaataatccatttaccctgatgtgattattacgcattgcatgcctgtatcaaaatatctcatgtaacacaaaaatatatacatc

SEQ ID NO: 408044 - DNA, 201 bp, Homo sapiens
attttgggaggccaagtcgggtggatcacttgaggtcagaagttctagagaccagcctgaccaacatggagaaaccccgtctctactaaaaatacaaaaaraaattagccgggcatggtggcgcatgcatgtaatcccagctactgaggagactgaggcaggagaattgcttgaacccaggaggcggaggttgcagtgagc

SEQ ID NO: 408045 - DNA, 201 bp, Homo sapiens
acagaacagaacgagagatttcacaatgtccttccatacaatgtgtggaatctatagataacaacagttgctaggtcaggggtcgaattttaactaccaggcttaggtcaggcaggcccaggcctggtttcgggtctggttcttaggcgccgggctacctgcctttagtttcgcttctctgtccttttctgagtataaaac

SEQ ID NO: 408046 - DNA, 201 bp, Homo sapiens
tggaagctgaggcaggagaatcgcttgaacccaggaggcagaggttgcagtgagccgagatcgcgccactgcactccagcctgagcaacagagcgagactycgtctcaaaaaaaaaaaaaaaaaaaaattaaaatgattgaactcatgggggtagagaatataaggatggttaccaaaggctgggaagggtagtgggggat

SEQ ID NO: 408047 - DNA, 201 bp, Homo sapiens
aacagaacagaacgagagatttcacaatgtccttccatacaatgtgtggaatctatagataacaacagttgctaggtcaggggtcgaattttaactaccargcttaggtcaggcaggcccaggcctggtttcgggtctggttcttaggcgccgggctacctgcctttagtttcgcttctctgtccttttctgagtataaaa

SEQ ID NO: 408048 - DNA, 201 bp, Homo sapiens
gcctgcaatcccagctactctggaagctgaggcaggagaatcgcttgaacccaggaggcagaggttgcagtgagccgagatcgcgccactgcactccagcytgagcaacagagcgagactccgtctcaaaaaaaaaaaaaaaaaaaaattaaaatgattgaactcatgggggtagagaatataaggatggttaccaaaggc

SEQ ID NO: 408049 - DNA, 201 bp, Homo sapiens
tgtaatcccagctactcgggaagctgaggcaggagaattgcttgaacctgggaggcggaggttgcagtgagccactgcactccagcctgggtgacagagtragactccatctcaaaaaaaaaaagaaaagaaaatctgacctggtatttattttctagtccctaaactccactttggctttctctaggatgtctgttttta

SEQ ID NO: 408050 - DNA, 201 bp, Homo sapiens
aaacagaacagaacgagagatttcacaatgtccttccatacaatgtgtggaatctatagataacaacagttgctaggtcaggggtcgaattttaactaccrggcttaggtcaggcaggcccaggcctggtttcgggtctggttcttaggcgccgggctacctgcctttagtttcgcttctctgtccttttctgagtataaa

SEQ ID NO: 408051 - DNA, 201 bp, Homo sapiens
ctgtaatcccagctactcgggaagctgaggcaggagaattgcttgaacctgggaggcggaggttgcagtgagccactgcactccagcctgggtgacagagygagactccatctcaaaaaaaaaaagaaaagaaaatctgacctggtatttattttctagtccctaaactccactttggctttctctaggatgtctgttttt

SEQ ID NO: 408052 - DNA, 201 bp, Homo sapiens
ctggagtgcaatggcaggatcccggctcgctgcaacctccgcctcctgggttcaagcaattctcttacctcagcctcctgagtagctgggactacaggcayccgccaccaagtctggctaatttttttttttttttttttttgtattttcagtagaggcagggtttcatcatgttggccaggctggtcacgaactcctgac

SEQ ID NO: 408053 - DNA, 201 bp, Homo sapiens
acacacctgtaatcccagctactcgggaagctgaggcaggagaattgcttgaacctgggaggcggaggttgcagtgagccactgcactccagcctgggtgrcagagtgagactccatctcaaaaaaaaaaagaaaagaaaatctgacctggtatttattttctagtccctaaactccactttggctttctctaggatgtct

SEQ ID NO: 408054 - DNA, 201 bp, Homo sapiens
attacaggcatgcaccaccacgcccggctaattttgtatttttaatagagacggggtttctccatgttgaggctggtctcgaactcctgacctcaggggayccacccgcctcggcctcccaaagtgctgggattacaggcgtgagccaccgctcccagcctggaaactttattattttttatttatttattttttattatt

SEQ ID NO: 408055 - DNA, 201 bp, Homo sapiens
tctggccgggcgcagtggctcacgcctgtaatcccagcactttgggaggccgaggcgggcggatcacaaggtcaggagtttgagaccagcctggccaatayggtgaaaccccgtatctactaaaaatacaaaaaaattagccaggcacacacctgtaatcccagctactcgggaagctgaggcaggagaattgcttgaacc

SEQ ID NO: 408056 - DNA, 201 bp, Homo sapiens
gaaaaacctgtcacctccaacgtcattaaaaggtaagaaaatctggccgggcgcagtggctcacgcctgtaatcccagcactttgggaggccgaggcgggyggatcacaaggtcaggagtttgagaccagcctggccaatatggtgaaaccccgtatctactaaaaatacaaaaaaattagccaggcacacacctgtaatc

SEQ ID NO: 408057 - DNA, 201 bp, Homo sapiens
ctgaaaaacctgtcacctccaacgtcattaaaaggtaagaaaatctggccgggcgcagtggctcacgcctgtaatcccagcactttgggaggccgaggcgsgcggatcacaaggtcaggagtttgagaccagcctggccaatatggtgaaaccccgtatctactaaaaatacaaaaaaattagccaggcacacacctgtaa

SEQ ID NO: 408058 - DNA, 201 bp, Homo sapiens
cagccccccaaagtgctgggattacaggtgagagccagggtgcccggctatttttatttattaatttttttttttgagtcagagtctcactctgtctcccrggctggagtgcagtggcacgatctcagctcactgcagcctctgcctcccaggttcaagcgattctcctgcctcagccacacacgtagctggggttacagg

SEQ ID NO: 408059 - DNA, 201 bp, Homo sapiens
tacaggcgcccgcccccacacctgtctaattgttgtatttttagtagagatggggtctcaccatgttggccaggctggtctcaaactcctgacctcaagtsatccacctgcctcagccccccaaagtgctgggattacaggtgagagccagggtgcccggctatttttatttattaatttttttttttgagtcagagtctc

SEQ ID NO: 408060 - DNA, 201 bp, Homo sapiens
gtagctaggattacaggcgcccgcccccacacctgtctaattgttgtatttttagtagagatggggtctcaccatgttggccaggctggtctcaaactccwgacctcaagtgatccacctgcctcagccccccaaagtgctgggattacaggtgagagccagggtgcccggctatttttatttattaatttttttttttga

SEQ ID NO: 408061 - DNA, 201 bp, Homo sapiens
ggtgcatgcctgcaatcccagctactctggaagctgaggcaggagaatcgcttgaacccaggaggcagaggttgcagtgagccgagatcgcgccactgcaytccagcctgagcaacagagcgagactccgtctcaaaaaaaaaaaaaaaaaaaaattaaaatgattgaactcatgggggtagagaatataaggatggttac

SEQ ID NO: 408062 - DNA, 201 bp, Homo sapiens
gcctcccgagtagctaggattacaggcgcccgcccccacacctgtctaattgttgtatttttagtagagatggggtctcaccatgttggccaggctggtcycaaactcctgacctcaagtgatccacctgcctcagccccccaaagtgctgggattacaggtgagagccagggtgcccggctatttttatttattaatttt

SEQ ID NO: 408063 - DNA, 201 bp, Homo sapiens
gccaggcatggtggtgcatgcctgcaatcccagctactctggaagctgaggcaggagaatcgcttgaacccaggaggcagaggttgcagtgagccgagatygcgccactgcactccagcctgagcaacagagcgagactccgtctcaaaaaaaaaaaaaaaaaaaaattaaaatgattgaactcatgggggtagagaatat

SEQ ID NO: 408064 - DNA, 201 bp, Homo sapiens
atctgtactaaaaatacaaaaacgagcctggcatggtggcgcacgcttatagtcccagctgctcggaaggctgaggcaggagaattgcttgaacccgggargcggaggttgcagtgagctgagatcacaccattgccctccagcctgggctacaaagcaagactctgtctcaaaaaaaaaaaaaaaaaaaaaaagctgagg

SEQ ID NO: 408065 - DNA, 201 bp, Homo sapiens
atacaaaaattagccaggcatggtggtgcatgcctgcaatcccagctactctggaagctgaggcaggagaatcgcttgaacccaggaggcagaggttgcartgagccgagatcgcgccactgcactccagcctgagcaacagagcgagactccgtctcaaaaaaaaaaaaaaaaaaaaattaaaatgattgaactcatggg

SEQ ID NO: 408066 - DNA, 201 bp, Homo sapiens
ccccatctgtactaaaaatacaaaaacgagcctggcatggtggcgcacgcttatagtcccagctgctcggaaggctgaggcaggagaattgcttgaacccrggaggcggaggttgcagtgagctgagatcacaccattgccctccagcctgggctacaaagcaagactctgtctcaaaaaaaaaaaaaaaaaaaaaaagct

SEQ ID NO: 408067 - DNA, 201 bp, Homo sapiens
gggattacaggcatgcaccaccacgcccggctaattttgtatttttaatagagacggggtttctccatgttgaggctggtctcgaactcctgacctcaggkgatccacccgcctcggcctcccaaagtgctgggattacaggcgtgagccaccgctcccagcctggaaactttattattttttatttatttattttttatt

SEQ ID NO: 408068 - DNA, 201 bp, Homo sapiens
acctccgcctcccaggttcaagcaattctcctgcctcagcctcctgagtagctgggattacaggcatgcaccaccacgcccggctaattttgtatttttartagagacggggtttctccatgttgaggctggtctcgaactcctgacctcaggggatccacccgcctcggcctcccaaagtgctgggattacaggcgtgag

SEQ ID NO: 408069 - DNA, 201 bp, Homo sapiens
accccatctgtactaaaaatacaaaaacgagcctggcatggtggcgcacgcttatagtcccagctgctcggaaggctgaggcaggagaattgcttgaaccygggaggcggaggttgcagtgagctgagatcacaccattgccctccagcctgggctacaaagcaagactctgtctcaaaaaaaaaaaaaaaaaaaaaaagc

SEQ ID NO: 408070 - DNA, 201 bp, Homo sapiens
gacccctaaaataatagctagaggaggctgcatgtctgacacttgaccagccacaaagatccttaagaagaaactctgcctgtttttaaaagctgaggccrccgggttcggtggctcacgcctgcaatcccaacacttttggaggccgaggagggcggatcacaaggtcaggagttcgagaccatcctggctaacatggtg

SEQ ID NO: 408071 - DNA, 201 bp, Homo sapiens
tcggcttactgtaacctccgcctcccaggttcaagcaattctcctgcctcagcctcctgagtagctgggattacaggcatgcaccaccacgcccggctaawtttgtatttttaatagagacggggtttctccatgttgaggctggtctcgaactcctgacctcaggggatccacccgcctcggcctcccaaagtgctggga

SEQ ID NO: 408072 - DNA, 201 bp, Homo sapiens
aggtgggcaagtcacgagatcaggagttcaagaccagcctggccaacatggtgaaaccccgtctctactaaaaatacaaaaaattagctgggcgtagtggygggcgcctgtaatcccagctactcaggggctgaggcaacagaatcacttgaacccaggaggcggaggttgcagtgagatgagatgtgccactgcactcca

SEQ ID NO: 408073 - DNA, 201 bp, Homo sapiens
acacataaaataatactaacaataatgatagctgatgagctaagaaaaaaaaatcacaaaaaaatctcataatgttttaagaaagtttacaaatttgtgtkgggctgcattcaaagccatcctggaccgcatgtggcccacaggacatagcttggacaagcctgtactaaagtttaacatgtgtataccctatgacccagc

SEQ ID NO: 408074 - DNA, 201 bp, Homo sapiens
catcttgggccacacataaaataatactaacaataatgatagctgatgagctaagaaaaaaaaatcacaaaaaaatctcataatgttttaagaaagtttasaaatttgtgttgggctgcattcaaagccatcctggaccgcatgtggcccacaggacatagcttggacaagcctgtactaaagtttaacatgtgtataccc

SEQ ID NO: 408075 - DNA, 201 bp, Homo sapiens
agtgcaatggcgccatctcggcttactgtaacctccgcctcccaggttcaagcaattctcctgcctcagcctcctgagtagctgggattacaggcatgcascaccacgcccggctaattttgtatttttaatagagacggggtttctccatgttgaggctggtctcgaactcctgacctcaggggatccacccgcctcggc

SEQ ID NO: 408076 - DNA, 201 bp, Homo sapiens
agatgggtagattgtaaaaattttctcccattctgtaggatgcctgttcactctgatgatttcttttgctgttcagaagctctttagtttaattggatcckgtttgtcaattttggtttttgttgccattgcttttggtgtttcagtcatgaagtccttgcccatgcctatgtactgaatggtattgcctaggtttcttct

SEQ ID NO: 408077 - DNA, 201 bp, Homo sapiens
caggctggagtgcaatggcgccatctcggcttactgtaacctccgcctcccaggttcaagcaattctcctgcctcagcctcctgagtagctgggattacargcatgcaccaccacgcccggctaattttgtatttttaatagagacggggtttctccatgttgaggctggtctcgaactcctgacctcaggggatccaccc

SEQ ID NO: 408078 - DNA, 201 bp, Homo sapiens
ttcctatttctccacatcctctccagcacctgttgtttcctgactttttaatgattgccattctaactggtgtgagatggtatctcattgtggttttgatytgcatgtctctgatggccagtgatgatgaacattttttcatctgtctgttggctgcataaatgtcttcttttgagaagtgtctgttcatatcctttgccc

SEQ ID NO: 408079 - DNA, 201 bp, Homo sapiens
cccaggctggagtgcaatggcgccatctcggcttactgtaacctccgcctcccaggttcaagcaattctcctgcctcagcctcctgagtagctgggattayaggcatgcaccaccacgcccggctaattttgtatttttaatagagacggggtttctccatgttgaggctggtctcgaactcctgacctcaggggatccac

SEQ ID NO: 408080 - DNA, 201 bp, Homo sapiens
aagtgttcctatttctccacatcctctccagcacctgttgtttcctgactttttaatgattgccattctaactggtgtgagatggtatctcattgtggttytgatttgcatgtctctgatggccagtgatgatgaacattttttcatctgtctgttggctgcataaatgtcttcttttgagaagtgtctgttcatatcctt

SEQ ID NO: 408081 - DNA, 201 bp, Homo sapiens
gcccaggctggagtgcaatggcgccatctcggcttactgtaacctccgcctcccaggttcaagcaattctcctgcctcagcctcctgagtagctgggattmcaggcatgcaccaccacgcccggctaattttgtatttttaatagagacggggtttctccatgttgaggctggtctcgaactcctgacctcaggggatcca

SEQ ID NO: 408082 - DNA, 201 bp, Homo sapiens
agttttgctcttgttgcccaggctggagtgcaatggcgccatctcggcttactgtaacctccgcctcccaggttcaagcaattctcctgcctcagcctccygagtagctgggattacaggcatgcaccaccacgcccggctaattttgtatttttaatagagacggggtttctccatgttgaggctggtctcgaactcctg

SEQ ID NO: 408083 - DNA, 201 bp, Homo sapiens
ggaaactttattttttttgagatggagttttgctcttgttgcccaggctggagtgcaatggcgccatctcggcttactgtaacctccgcctcccaggttcmagcaattctcctgcctcagcctcctgagtagctgggattacaggcatgcaccaccacgcccggctaattttgtatttttaatagagacggggtttctcca

SEQ ID NO: 408084 - DNA, 201 bp, Homo sapiens
gggtttcaccatgttggccagtctggtcttgaactcctgacctcaagtgacctgcccacctctgcctcccaaagtgctgggattacaggtgtgaaccaccrtgcctgacctaaaattttttatctttgattttctgtagtttacaaattatatgcctatgtgttggggttttggggcatatatcctacatggtgttctgcg

SEQ ID NO: 408085 - DNA, 201 bp, Homo sapiens
cactccaggttcctacataatctcttctgttccagacacagaaacagacatgttgatttcttctctttctggagggcctacaagggtcaggagtgtcatgrtttacttcttcctaatgttacaaaaaattgcttttaccattcatgttgttttagcttgacctgtttatttcagcccatgcaaaactgtatcatattacaa

SEQ ID NO: 408086 - DNA, 201 bp, Homo sapiens; identical to SEQ ID NO: 91604

SEQ ID NO: 408087 - DNA, 201 bp, Homo sapiens
ggagtttcaccatgttggccaggatggtcttgatctcttgaccttgtgatccacccacctcggcctcccaaagtgctgggattataggcatgagccactgygcccagcctgttcagctttttacttgtttctaggaccaagtggttatttccaagctccttacatgcagaaatggccaattttttttcctaatttttcaac

SEQ ID NO: 408088 - DNA, 201 bp, Homo sapiens
attggaagaggaagaatcatcttgggccacacataaaataatactaacaataatgatagctgatgagctaagaaaaaaaaatcacaaaaaaatctcataaygttttaagaaagtttacaaatttgtgttgggctgcattcaaagccatcctggaccgcatgtggcccacaggacatagcttggacaagcctgtactaaagt

SEQ ID NO: 408089 - DNA, 201 bp, Homo sapiens
tgatttctttattatggctagcagatatttaagaatgttagcacaggtctttgaataaattttgcttttaagataagttactatttattcctaattagacrgggaggaaagtctttgaagaggaacctctactttactttttatacctctaccctcacaggtagatagctattcaacacttcctaaaactgcccagtttga

SEQ ID NO: 408090 - DNA, 201 bp, Homo sapiens
tgtgggagccaagaacataaagtacattgatttctttattatggctagcagatatttaagaatgttagcacaggtctttgaataaattttgcttttaagakaagttactatttattcctaattagacggggaggaaagtctttgaagaggaacctctactttactttttatacctctaccctcacaggtagatagctattc

SEQ ID NO: 408091 - DNA, 201 bp, Homo sapiens
aatagtgccacaataaacatacatgtgcatgtgtctttatagcagcatgatttataatcctttgggtacatacccagtaatgggatggctgggtcaaatgrtatttctagttctagatccttgaggaatcgccacactgtcttccacaatggttgaactagtttacagtcccaccaacagtgtaaaagtgttcctatttct

SEQ ID NO: 408092 - DNA, 201 bp, Homo sapiens
atggttgcttggaccagtataagcatgccagggcaaatatttaggctacattgtgggagccaagaacataaagtacattgatttctttattatggctagcrgatatttaagaatgttagcacaggtctttgaataaattttgcttttaagataagttactatttattcctaattagacggggaggaaagtctttgaagagg

SEQ ID NO: 408093 - DNA, 201 bp, Homo sapiens
cgacaggccctggtgtgtgatgttccccaccctgtgtctaagtgttctcattgttcaattcccacctatgagtgagaacatgtggtgtttggttttctatmcttgtgatagtttgctcagaatgatggtttccaacttcatccatgtccctacaaaggacgtgaactcatcctttttatgggtgcataatattccactgtg

SEQ ID NO: 408094 - DNA, 201 bp, Homo sapiens
ctaatggttgcttggaccagtataagcatgccagggcaaatatttaggctacattgtgggagccaagaacataaagtacattgatttctttattatggctrgcagatatttaagaatgttagcacaggtctttgaataaattttgcttttaagataagttactatttattcctaattagacggggaggaaagtctttgaag

SEQ ID NO: 408095 - DNA, 201 bp, Homo sapiens
catcaaaccatgaaactactacaagaaaacattggggagactctcaaggacattggagtgggcaaagatttcttgagtaataccccacaagcacaggcaaycaaagcaaaaatggacagatgggataacatcaagtgttttttttttttagaattattttatcagataaaaaattagtttcattgatgagtttttttaatc

SEQ ID NO: 408096 - DNA, 201 bp, Homo sapiens
aatagaacacagggagctggaagagtcagctatgcaggcttttttttttttttaagcttccttaggaaactttattttttttgagatggagttttgctctygttgcccaggctggagtgcaatggcgccatctcggcttactgtaacctccgcctcccaggttcaagcaattctcctgcctcagcctcctgagtagctggg

SEQ ID NO: 408097 - DNA, 201 bp, Homo sapiens
atgacctaatggttgcttggaccagtataagcatgccagggcaaatatttaggctacattgtgggagccaagaacataaagtacattgatttctttattayggctagcagatatttaagaatgttagcacaggtctttgaataaattttgcttttaagataagttactatttattcctaattagacggggaggaaagtctt

SEQ ID NO: 408098 - DNA, 201 bp, Homo sapiens
cttcaaattataccacagctatagcaacccaaatagcatagtactggcatgaaaacagacacatagaccagtggaacagaatagagaaacaagaaataaaytcatacatctacagtgaactaatttttgacaaaagagccaagaatataaaggaaaagacaatcccttcaataaattgtgctgggaaaactggatatccat

SEQ ID NO: 408099 - DNA, 201 bp, Homo sapiens
atgaatagaacacagggagctggaagagtcagctatgcaggcttttttttttttttaagcttccttaggaaactttattttttttgagatggagttttgcycttgttgcccaggctggagtgcaatggcgccatctcggcttactgtaacctccgcctcccaggttcaagcaattctcctgcctcagcctcctgagtagct

SEQ ID NO: 408100 - DNA, 201 bp, Homo sapiens
tttacatggaaccacaaaagacccagagtagccaaagctatctgaagcaaaaagaataaatcaggaggaatcatattatctgacttcaaattataccacasctatagcaacccaaatagcatagtactggcatgaaaacagacacatagaccagtggaacagaatagagaaacaagaaataaactcatacatctacagtga

SEQ ID NO: 408101 - DNA, 201 bp, Homo sapiens
tgtatgaatagaacacagggagctggaagagtcagctatgcaggcttttttttttttttaagcttccttaggaaactttattttttttgagatggagtttwgctcttgttgcccaggctggagtgcaatggcgccatctcggcttactgtaacctccgcctcccaggttcaagcaattctcctgcctcagcctcctgagta

SEQ ID NO: 408102 - DNA, 201 bp, Homo sapiens
tcagcctcctgagtagctgggaccacaggcgcccgccaccacgccccgctaattttttgtgtttttaatagagacgaggtttcaccgtgttagccaggatkgtctcgatctcctgacctcgtgatccgcccgcctcggcctcccaaagtgctgggattacaggcgtgagccaccgcgcccggcccaaaaatcagcatttct

SEQ ID NO: 408103 - DNA, 201 bp, Homo sapiens
aggtgggacaacttgaagcaaaggcaggaagttgggagggagcttccaggtcacagataggtgagacaaaagttgcattcttttgagtttctgattcgccyttccaaaggaggcaaatcagatatgcatctatgtcaaagggcagaggagtgactttgaatagaatgggaggcaggtttgccctaagcagtttccagcttg

SEQ ID NO: 408104 - DNA, 201 bp, Homo sapiens
atccagctaaagatactccataaggttctaccggtaggtgttctgtatgaatagaacacagggagctggaagagtcagctatgcaggcttttttttttttttaagcttccttaggaaactttattttttttgagatggagttttgctcttgttgcccaggctggagtgcaatggcgccatctcggcttactgtaacctccg

SEQ ID NO: 408105 - DNA, 201 bp, Homo sapiens
gactccaccaaaaaaccattagaactgatacacaaattcaacaaggtcacagtatacaaaatcatcatacaaaaatcagcatttctttttctttctttttytttttttttttttttgagacggagtctccctctttcgcccaggctggactgcagttgcgctgtctcggctcactgcacgctccgcctcccgggttcactc

SEQ ID NO: 408106 - DNA, 201 bp, Homo sapiens
taatcccagctactcggaaggttgaggcaggggaattgcttgaaccagggaggtggaggttaaagtgagccaagatcgcgccactgcactctagcctgggygataaagcgagactccgtctcaaaaaaaaaagagagagagattttaccctgtccatgtttcctaagaacctttaaaaaaaatcatttccacatcataatt

SEQ ID NO: 408107 - DNA, 201 bp, Homo sapiens
aaatctaaaacctgaacagataaataacaagtaacaagatctgggacccgaagtattcactgctgaattctaccaaagacttgaagaactaataccaaccrtactcaaactactctgaaacatagaagaggagggaatacttccaaactcattctacaaggccagtattaccctgataccaaaaccagacaaaagtacatc

SEQ ID NO: 408108 - DNA, 201 bp, Homo sapiens
aaagaatttagaaactttcagccatgttaactaagaacagaagagaaaagacccaaataaataaaatcagaaatgaaagaggagacattacaactgataayacagaaattcaaaggatcattggtggctactatgagcaattatatgccaataaattggaaaatctagaagaaatgtataaactcctatacacatacatcc

SEQ ID NO: 408109 - DNA, 201 bp, Homo sapiens
acacctgtaatcccagctactcaggaggctgagacaggagaatcgcttgaacccaggaggcggaggttgcagtgagccgagattgcgccactgcactccarcctgggtgacagagcgagactctgtctcaaaaaataactaactaactaaataaataaataaatgttggatgaggagtctggagatttggattctagttta

SEQ ID NO: 408110 - DNA, 201 bp, Homo sapiens
aattaacttagaattggtatagatggccctttttttttttttttttttttggcacatagagtgtgcactttcgtcaggtcaggtagccccagggctggggscgacctgagtttttctttcaactcatgaaaagcttgttgctgttgtttgtaatagatataatttatctaatttacatttttattaacatcactcactaaa

SEQ ID NO: 408111 - DNA, 201 bp, Homo sapiens
aaattaacttagaattggtatagatggccctttttttttttttttttttttggcacatagagtgtgcactttcgtcaggtcaggtagccccagggctgggsccgacctgagtttttctttcaactcatgaaaagcttgttgctgttgtttgtaatagatataatttatctaatttacatttttattaacatcactcactaa

SEQ ID NO: 408112 - DNA, 201 bp, Homo sapiens
caaggatcagcctgaggtgcaaacttaaggtcttcccagatcttttctgagcctgtgcctttccctaggcatgcacagtcactttctaattttccttttakaggcagttgcttttgaatgtcctagtatttaatgtctggctgtcaaggtggtggagggtgggtggagaaaaaaataaagttgggggaggaaagggcaata

SEQ ID NO: 408113 - DNA, 201 bp, Homo sapiens
gctgtctctatgccaaggatcagcctgaggtgcaaacttaaggtcttcccagatcttttctgagcctgtgcctttccctaggcatgcacagtcactttctrattttccttttataggcagttgcttttgaatgtcctagtatttaatgtctggctgtcaaggtggtggagggtgggtggagaaaaaaataaagttggggga

SEQ ID NO: 408114 - DNA, 201 bp, Homo sapiens
caggcgcggtggcacacacctgtaatcccagctactcaggaggctgagacaggagaatcgcttgaacccaggaggcggaggttgcagtgagccgagattgygccactgcactccagcctgggtgacagagcgagactctgtctcaaaaaataactaactaactaaataaataaataaatgttggatgaggagtctggagat

SEQ ID NO: 408115 - DNA, 201 bp, Homo sapiens
aattagccaggcgcggtggcacacacctgtaatcccagctactcaggaggctgagacaggagaatcgcttgaacccaggaggcggaggttgcagtgagccragattgcgccactgcactccagcctgggtgacagagcgagactctgtctcaaaaaataactaactaactaaataaataaataaatgttggatgaggagtc

SEQ ID NO: 408116 - DNA, 201 bp, Homo sapiens
aaattagccaggcgcggtggcacacacctgtaatcccagctactcaggaggctgagacaggagaatcgcttgaacccaggaggcggaggttgcagtgagcygagattgcgccactgcactccagcctgggtgacagagcgagactctgtctcaaaaaataactaactaactaaataaataaataaatgttggatgaggagt

SEQ ID NO: 408117 - DNA, 201 bp, Homo sapiens
catggtgaaaccttgtctctactaaaaatacaaaaattagccaggcgcggtggcacacacctgtaatcccagctactcaggaggctgagacaggagaatcrcttgaacccaggaggcggaggttgcagtgagccgagattgcgccactgcactccagcctgggtgacagagcgagactctgtctcaaaaaataactaacta

SEQ ID NO: 408118 - DNA, 201 bp, Homo sapiens
tctgtggcccaggctggagtgcagtggcacaatctcggctcactgcaaaccctacctcctgggctcaagtgatcctcctgcctcagcctcccgagcagctrggactacaggcacacaccaccacacccagctaatttttgtatttttgtagaggtagggttttgtcatgttgcccaggctggtctcgaactcctgggctca

SEQ ID NO: 408119 - DNA, 201 bp, Homo sapiens
cttcccaagtagctgggattacaggtgcacaccaccacacccagctaatttttgtatttttagtagagacggggtttcaccatattggccaggctggtctygaactcctgatctcgtgatctgcccgccttggcctcccaaagtgctgggattacagacgtgagccactgcgtgcagcctatgtgtatatttctcagtctg

SEQ ID NO: 408120 - DNA, 201 bp, Homo sapiens
agttcaagaccagcctgaccaacatggtgaaaccttgtctctactaaaaatacaaaaattagccaggcgcggtggcacacacctgtaatcccagctactcrggaggctgagacaggagaatcgcttgaacccaggaggcggaggttgcagtgagccgagattgcgccactgcactccagcctgggtgacagagcgagactc

SEQ ID NO: 408121 - DNA, 201 bp, Homo sapiens
ttcaagcgattcttctgcctcagcttcccaagtagctgggattacaggtgcacaccaccacacccagctaatttttgtatttttagtagagacggggtttyaccatattggccaggctggtcttgaactcctgatctcgtgatctgcccgccttggcctcccaaagtgctgggattacagacgtgagccactgcgtgcagc

SEQ ID NO: 408122 - DNA, 201 bp, Homo sapiens
gaggccgaggtgggtggatcaccaggtcaggagttcaagaccagcctgaccaacatggtgaaaccttgtctctactaaaaatacaaaaattagccaggcgyggtggcacacacctgtaatcccagctactcaggaggctgagacaggagaatcgcttgaacccaggaggcggaggttgcagtgagccgagattgcgccact

SEQ ID NO: 408123 - DNA, 201 bp, Homo sapiens
tcccgggttcaagcgattcttctgcctcagcttcccaagtagctgggattacaggtgcacaccaccacacccagctaatttttgtatttttagtagagacrgggtttcaccatattggccaggctggtcttgaactcctgatctcgtgatctgcccgccttggcctcccaaagtgctgggattacagacgtgagccactgc

SEQ ID NO: 408124 - DNA, 201 bp, Homo sapiens
cgtgatggctcacgcctgtaatcccagcactttgggaggccgaggtgggtggatcaccaggtcaggagttcaagaccagcctgaccaacatggtgaaaccytgtctctactaaaaatacaaaaattagccaggcgcggtggcacacacctgtaatcccagctactcaggaggctgagacaggagaatcgcttgaacccagg

SEQ ID NO: 408125 - DNA, 201 bp, Homo sapiens
gcgtcccgggttcaagcgattcttctgcctcagcttcccaagtagctgggattacaggtgcacaccaccacacccagctaatttttgtatttttagtagadacggggtttcaccatattggccaggctggtcttgaactcctgatctcgtgatctgcccgccttggcctcccaaagtgctgggattacagacgtgagccac

SEQ ID NO: 408126 - DNA, 201 bp, Homo sapiens
ctcctgagtagctgggactacaggcgcccgccaccacgcccggctacgtttttgtatttttagtagagacagggtttcaccgtgttagccaggatggtctygatctcctgacctcgtgatcttcccgcctcagcctcccaaagtgctgggattacagatgtgagccactgcgcccgacccaacactctcctttattttccc

SEQ ID NO: 408127 - DNA, 201 bp, Homo sapiens
ctgcgtcccgggttcaagcgattcttctgcctcagcttcccaagtagctgggattacaggtgcacaccaccacacccagctaatttttgtatttttagtaragacggggtttcaccatattggccaggctggtcttgaactcctgatctcgtgatctgcccgccttggcctcccaaagtgctgggattacagacgtgagcc

SEQ ID NO: 408128 - DNA, 201 bp, Homo sapiens
cccaggctggagtgcagtggcgcaatcttggctcactgcaagctccgcctcccgggttcatgccattctcctgcctcagcctcctgagtagctgggactayaggcgcccgccaccacgcccggctacgtttttgtatttttagtagagacagggtttcaccgtgttagccaggatggtctcgatctcctgacctcgtgatc

SEQ ID NO: 408129 - DNA, 201 bp, Homo sapiens
acctctgcgtcccgggttcaagcgattcttctgcctcagcttcccaagtagctgggattacaggtgcacaccaccacacccagctaatttttgtatttttmgtagagacggggtttcaccatattggccaggctggtcttgaactcctgatctcgtgatctgcccgccttggcctcccaaagtgctgggattacagacgtg

SEQ ID NO: 408130 - DNA, 201 bp, Homo sapiens
cgcccaggctggagtgcagtggcgcaatcttggctcactgcaagctccgcctcccgggttcatgccattctcctgcctcagcctcctgagtagctgggacwacaggcgcccgccaccacgcccggctacgtttttgtatttttagtagagacagggtttcaccgtgttagccaggatggtctcgatctcctgacctcgtga

SEQ ID NO: 408131 - DNA, 201 bp, Homo sapiens
gatctcagctcactacaacctctgcgtcccgggttcaagcgattcttctgcctcagcttcccaagtagctgggattacaggtgcacaccaccacacccagytaatttttgtatttttagtagagacggggtttcaccatattggccaggctggtcttgaactcctgatctcgtgatctgcccgccttggcctcccaaagtg

SEQ ID NO: 408132 - DNA, 201 bp, Homo sapiens
cagagtctcactctgtcgcccaggctggagtgcagtggcgcgatctcagctcactacaacctctgcgtcccgggttcaagcgattcttctgcctcagcttyccaagtagctgggattacaggtgcacaccaccacacccagctaatttttgtatttttagtagagacggggtttcaccatattggccaggctggtcttgaa

SEQ ID NO: 408133 - DNA, 201 bp, Homo sapiens
ggcaaactgtctgcctttccttgctgtggcgcatctatagctacagttatctttttcactgcaagtattatgcccacctggcagttatgatgcaaatgaayactgcactggaaactcaaaattgtttccaggtaggggatttttgtagctgctcctttaagtttctgaatttcatttgggaagaaaagcctagtgaaagcc

SEQ ID NO: 408134 - DNA, 201 bp, Homo sapiens
taagtttatcttacttggagtttgttgagcttcttggatgtttatattcatgtcttttatcaaatttggaaagtttttaaccattatttcttcaaatattmtttctagtcctttctctctctcttcttcttcagggacttccacaatgcatttattggttcacttcttggtgttccacaagtcccttaggctctgttaact

SEQ ID NO: 408135 - DNA, 201 bp, Homo sapiens
agaaggggagctttggaaggcccgagcccaaaagaggtatgccataattcctatgtaaagttttagaagtgagattttgctctgagatagtatagtcccaycaagattatggtttttccaaaaacctgtgctgctgggaaataatccagaacttcttgtgcaaacctattccttgccttcttgccaggactggctgctggc

SEQ ID NO: 408136 - DNA, 201 bp, Homo sapiens
tcaattatgtagaaaacaaactgtggagttacaacccaaagttacaatactactagcttttgggctactaaattttaaaaacgtattaatctcttaaaaaygtagaaaacaaaacaagttacaaactgttattacaataacacttaattgtccatgtatttacctttgttgagatctttatttcttcttagagctttgact

SEQ ID NO: 408137 - DNA, 201 bp, Homo sapiens
caggctggagtgcagtggcgtgatcttgactcactgcaacctccacctcctgggttcaagcaattctcctgccacagactcctgagtagctgggattacargtgcccgccaacatgcctgactaatttttgtatttttagtaaagacagggtttcaccatgttggccagtctggtcttgaactcctgacctcaagtgacct

SEQ ID NO: 408138 - DNA, 201 bp, Homo sapiens
gttcgagaccagcctagccaacatggtgaaaccccgtatctacttaaaatacaaaaaattagctgggcgtggtggtacacacctgtagtcccagctactcrggaggctgaggcaggagaatcacttgaacccaggaggcagaggttgcagtaagccaagattgtgccattgcactccagactgggggacaagagcaagact

SEQ ID NO: 408139 - DNA, 201 bp, Homo sapiens
ccatctaaaaaaaaaaaaaaaaaaaaatcggattttctacacagaaaatattcaaaggattgtaccatatactctgaaggtagttccaaatgcaggtagamtattaaagaggtatttcatgcaatgtaagaattgttggaataaatgtcttatttttaattactttgaagggttaaaaaaaaaatcacctggagagcttgt

SEQ ID NO: 408140 - DNA, 201 bp, Homo sapiens
aacaagggtgaaactccatctaaaaaaaaaaaaaaaaaaaaatcggattttctacacagaaaatattcaaaggattgtaccatatactctgaaggtagttycaaatgcaggtagaatattaaagaggtatttcatgcaatgtaagaattgttggaataaatgtcttatttttaattactttgaagggttaaaaaaaaaatc

SEQ ID NO: 408141 - DNA, 201 bp, Homo sapiens
aaccagggaagcagaggttgcagtgggctgagatcgtgccattgtactccagcctggtcaacaagggtgaaactccatctaaaaaaaaaaaaaaaaaaaaatcggattttctacacagaaaatattcaaaggattgtaccatatactctgaaggtagttccaaatgcaggtagaatattaaagaggtatttcatgcaatgt

SEQ ID NO: 408142 - DNA, 201 bp, Homo sapiens
ggcgaggcgcgggctggccccgcccctctggccggccccgcccctcaaggccggctagtccccttcccagagacttggctaggcggccggcgctgcggcgycagcagccctgtggtggcgacgacgatggaccaggagccagtgggccctgtggaacgaggagaagccgtcgcagcctcgggagctgcggccgccgcggca

SEQ ID NO: 408143 - DNA, 201 bp, Homo sapiens
tcgcccaggctggagtgcagtggcgcaatcttggctcactgcaagctccgcctcccgggttcatgccattctcctgcctcagcctcctgagtagctgggaytacaggcgcccgccaccacgcccggctacgtttttgtatttttagtagagacagggtttcaccgtgttagccaggatggtctcgatctcctgacctcgtg

SEQ ID NO: 408144 - DNA, 201 bp, Homo sapiens
cgagaccatcctggctaacacggtgaaacaccatctctactaaaaatacaaaaaattagccagaagtggtggcgggcgcctgtagtcccagctactcgggrggctgaggcaggagaatggcgtgaacccgggaggcagagcttgcagcgagccgagatcacaccactacactccagcctgggcgacagagtgagactccat

SEQ ID NO: 408145 - DNA, 201 bp, Homo sapiens
tcttttttttttttttttgagacagagtctcattctgtcgcccaggctggagtgcagtggcgcaatcttggctcactgcaagctccgcctcccgggttcaygccattctcctgcctcagcctcctgagtagctgggactacaggcgcccgccaccacgcccggctacgtttttgtatttttagtagagacagggtttcacc

SEQ ID NO: 408146 - DNA, 201 bp, Homo sapiens
tacttttgcacaggaaactatatgtcagctaagctgttaaaagtttttggcaggccgggcatggtggctcactcctgtaatcccagcactttgggaggccraggcaggcagaccacaaggtcaggagatcgagaccatcctggctaacacggtgaaacaccatctctactaaaaatacaaaaaattagccagaagtggtgg

SEQ ID NO: 408147 - DNA, 201 bp, Homo sapiens
aacactctcctttctttcttttttttttttttttgagacagagtctcattctgtcgcccaggctggagtgcagtggcgcaatcttggctcactgcaagctycgcctcccgggttcatgccattctcctgcctcagcctcctgagtagctgggactacaggcgcccgccaccacgcccggctacgtttttgtatttttagta

SEQ ID NO: 408148 - DNA, 201 bp, Homo sapiens
gattggcagggataatttgggaacactctcctttctttcttttttttttttttttgagacagagtctcattctgtcgcccaggctggagtgcagtggcgcratcttggctcactgcaagctccgcctcccgggttcatgccattctcctgcctcagcctcctgagtagctgggactacaggcgcccgccaccacgcccggc

SEQ ID NO: 408149 - DNA, 201 bp, Homo sapiens
tcctttttttttttttttttttttttgagacagagtctcactctgtcacccaggctgaagtgcagcagcatgatcttggctcactgcaacctccgcctccygggttcaagcaattctcctgcctcagcctcccacatgcgccaccacacccagctaactttttgtatttttagtagagatggagcttcaccatgttggcct

SEQ ID NO: 408150 - DNA, 201 bp, Homo sapiens
aagacttcctttttttttttttttttttttttgagacagagtctcactctgtcacccaggctgaagtgcagcagcatgatcttggctcactgcaacctccrcctcccgggttcaagcaattctcctgcctcagcctcccacatgcgccaccacacccagctaactttttgtatttttagtagagatggagcttcaccatgt

SEQ ID NO: 408151 - DNA, 201 bp, Homo sapiens
aaagacttcctttttttttttttttttttttttgagacagagtctcactctgtcacccaggctgaagtgcagcagcatgatcttggctcactgcaacctcygcctcccgggttcaagcaattctcctgcctcagcctcccacatgcgccaccacacccagctaactttttgtatttttagtagagatggagcttcaccatg

SEQ ID NO: 408152 - DNA, 201 bp, Homo sapiens
gcagcttagcgtaggttctatgtccacgtatccagtatagcctagtggggggctgtctagtcccggtggaattctgggtgggcttaaacggtctgcaactytggaaatttactgaatggatttttatctgtgtggtttgaactccaccatgtaactgtttttgtggtaccattatacagtttttgtcctaggcaactaagt

SEQ ID NO: 408153 - DNA, 201 bp, Homo sapiens
ttttaagatttaagaaaaaaaaaacagcagctactagtaaatagtaaaatgttccattaaaataaaaagacttcctttttttttttttttttttttttgaracagagtctcactctgtcacccaggctgaagtgcagcagcatgatcttggctcactgcaacctccgcctcccgggttcaagcaattctcctgcctcagcc

SEQ ID NO: 408154 - DNA, 201 bp, Homo sapiens
tccagtatagcctagtggggggctgtctagtcccggtggaattctgggtgggcttaaacggtctgcaactttggaaatttactgaatggatttttatctgygtggtttgaactccaccatgtaactgtttttgtggtaccattatacagtttttgtcctaggcaactaagtcatcctacaggatgagtgaattctttcctt

SEQ ID NO: 408155 - DNA, 201 bp, Homo sapiens
gaattttaagatttaagaaaaaaaaaacagcagctactagtaaatagtaaaatgttccattaaaataaaaagacttccttttttttttttttttttttttkgagacagagtctcactctgtcacccaggctgaagtgcagcagcatgatcttggctcactgcaacctccgcctcccgggttcaagcaattctcctgcctca

SEQ ID NO: 408156 - DNA, 201 bp, Homo sapiens
aggcgtgccaccacacccagctaatttttgtatttttagtagagacagggtttcccatgttggccaggatggtctccatctcttgacctcatgatccgccygccttggcctcccaaagtgctgggattacaggtgtgagccaccgtgctcggcctgcagtgcaattctgatgttataaccacctggagttagtgcaggatt

SEQ ID NO: 408157 - DNA, 201 bp, Homo sapiens
gtgcgatcgcggatcactgcagcctcgccttcccaggctcaagtgatcctcccaaacacctcagcttcctgagtagctggagttgcaggcacataccaccwcgcctggctaattttaatcttttgtagagatgggatgtcgtgatgttgcccaggctggtctccaactcctgggctcaggtcccgtctacctcagccttcc

SEQ ID NO: 408158 - DNA, 201 bp, Homo sapiens
ttggcttcactggctctcaagatagagagagacacggactgagttatacttgcccaattcatctcccaaatcaccagcaagatctctccttatcattgaargggcaagtaaagcggggaaagagttctggtgctttgcaccaaatagaggccccttacatggaaggaaatttcaggagtgaggaagcagcattctccccgc

SEQ ID NO: 408159 - DNA, 201 bp, Homo sapiens
ggtttctggctggtggacttacagggcagggatggagagaggctggttgtgtgagctgaagcactgtctagaaggtgccgagattgtaaaggcacggcaaraaggagaattaagtctgaaggaacctgatggatatgagctgccagttaaactgtcagatcaatttgcacctaagtgatagtggctgactgtcttactatg

SEQ ID NO: 408160 - DNA, 201 bp, Homo sapiens
ttcagtctttcttgcttcaagtatttctgatgttactttcctctttcttctccttctgatatttctattatgcatctagtataccttttgtacttatcccrcaatccttggatattctgttatggtttttcttttctagtctttgctctcttagcttgtcagttttgtaggtttctattgatatgctcttgaactcagaga

SEQ ID NO: 408161 - DNA, 201 bp, Homo sapiens
gtgaattctgagattttagtgcacctgtcacccgagcagtgtacacatacccaacatgtagtcttttattcctcacttccctcctcccctcccctccgagsccccaaagtccattatatccactgcttttttttttttttttttttgagatggagtttcgctcttttgcccaggctggagtgcagtggtgcattattggct

SEQ ID NO: 408162 - DNA, 201 bp, Homo sapiens
gtagctgctcctttaagtttctgaatttcatttgggaagaaaagcctagtgaaagccaattaggattcaaaattctgaggatataataatagaaggctttytgattggcttgttttgacaaggccagcagttctcaaacactttggctctaggatcacttcacactcttaaaaattattgaagatcccgaatagcttttat

SEQ ID NO: 408163 - DNA, 201 bp, Homo sapiens
aaagagccaatttgagattgaggttttagtcctggataggggtgtgtttgaaatctgtttaagaggtatatttggttccgaattactgagaaggaccaagrctagaccaggaagggactttactgaacctcatcctatccactgctttttttattcaatagctttgggggtataaatggttttcggtcacatagatgaatt

SEQ ID NO: 408164 - DNA, 201 bp, Homo sapiens
acccttttttcttttttcagacagagtcttgctctgtctcccaggctggagtgcagtagtgcaatcttggctcactgcaacctctgccttccgggtttagrcaattctcctgcctcaacctcccacgtagctgggattacaggcaacgtgccaccacacccagctaatttttgtattttttagaagagagggggtttcacc

SEQ ID NO: 408165 - DNA, 201 bp, Homo sapiens
gactgggagatactgcctcaccttattatattcttcaagtctgatcttaccttggtgtgcacacgtgctaagatttgcctaatgatgttgggaggtgaagmtgaagtgatgagagttgtgcagggacttacttcctcatccacctcccaaaatgaccctggcaaaggaagtgggggtgattcataattcatttaaaaactg

SEQ ID NO: 408166 - DNA, 201 bp, Homo sapiens
caagtgacccacccacctcagcctcccaaagtgttgggattacaggcatgagccactgcgccaggccttgtcttttttattttaaacagaattctttgccwtgcatcatctctaatctggttgctctggccagtgatcagagggtagtcagacagtcatcccagctgtgggaatcaggcctccacttctgtcaggtggaga

SEQ ID NO: 408167 - DNA, 201 bp, Homo sapiens
caaccgacattatcagtccctctgcagacttagcagatgtctccttctgaacagcaggtatttatcttaaagcattttccaaaattagggggaggaggccrtattattgagtattctgggttcaactttagcctagtcctagggtggggaagggagtagagtttgcagtaagaaaatgtaactgatagtagtcaccctttt

SEQ ID NO: 408168 - DNA, 201 bp, Homo sapiens
tgatcacccacacctactaataactctcacccattcctctctctcttaggttttgtttatagaacatttgaagaatgtttggaattcatacaccaatacgraaacaacagaatcctcaagttccacagtggactcctcctgggactttattcctctgtagctatctggtaacaatgtgtggcatatcactaaattcccaaa

SEQ ID NO: 408169 - DNA, 201 bp, Homo sapiens
acatgcttgttataacaaacatcacagaggtgcataaagtaaaatctctcctcccacccccaacaaatatataactactgtttacactttggagtgtatcyttgcagcctttttgctctgcaattatacatctaatatgtaagctattgcttttatttttcacagaaattaaaatttttatatttcatttaaggactacat

SEQ ID NO: 408170 - DNA, 201 bp, Homo sapiens
tgacctccaaattaggtttaaaactagtccttatttaaaaaaaaaaaaaaagccaaacaaacaaaaccaacctttctttcttttttgttaaattacaaaarttatacatgcttgttataacaaacatcacagaggtgcataaagtaaaatctctcctcccacccccaacaaatatataactactgtttacactttggagtg

SEQ ID NO: 408171 - DNA, 201 bp, Homo sapiens
agtgtatattcatgagagaatgagggtgaaagagaaaaatgttaaaggataattcttttttaaaaagatagaattataactgataacaaatatggaaagtrcacatcaaagattttatttaactcactgagttgactcaatcaaaattagtaagattggaaccaagtggttccaaggagaatctgtttaccaatggataca

SEQ ID NO: 408172 - DNA, 201 bp, Homo sapiens
cagcctcaacctcccctgctcaagtgatcctcccaaacacctcagcttcctgagtagctaggattacaggcttgtgtcatcatgctggctacttttttttwaaatcttttgtagagatcaggtctcactatattgcccaggctgggctcaaactcctgtgctcaagtgacctctcgtctcagcctcctgagtaggtaggac

SEQ ID NO: 408173 - DNA, 201 bp, Homo sapiens
cttctgatctaattctattgtgagaactcatcatgtggcttcacctaagatgcaatggggactaggcaatgtggtttctggctgggcagcaacaactccgwaaagggaacaagagtcttgggtagacagcagatatctccactgcagagaacatttcaatgacccatacaactcatttgtttattttctagctgaagaaaa

SEQ ID NO: 408174 - DNA, 201 bp, Homo sapiens
tgctaatttttttttcttttcttttttttttttttatagacaggtcttgccatgttgcccaagctagtctcaaactcctggactcaaacgatcctcccacytcagcctcccaaagtgttgggattatagggatgagccactgtgcctggccaccattacaactttaaacataaaaaatacatagaatgttgaagaaggaat

SEQ ID NO: 408175 - DNA, 201 bp, Homo sapiens
tcttagctattactttacttgtgtcacctagaaaaggaccagtccttaatttattttaaaaaactgtgatcattggaggcttaaaatgggtcataacacasatcaggttggttatttcctaggctacataccttggatagaatagcattatacaaacaagtttcttttagagtcctcgtacacttataataaccatgaaat

SEQ ID NO: 408176 - DNA, 201 bp, Homo sapiens
ttttttttttttgagatggagtctcactctgccaccaggttggagtgcactggcgcgatatgggctcactgcaacctctgcctcccgggttcaagcgattmtcctgcctcagcctcctgagtagctgggaatacagaggcgtgccaccacacccagctaatttttgtatttttagtagagacagggtttcccatgttggcc

SEQ ID NO: 408177 - DNA, 201 bp, Homo sapiens
tttttttttttttttttgagatggagtctcactctgccaccaggttggagtgcactggcgcgatatgggctcactgcaacctctgcctcccgggttcaagygattctcctgcctcagcctcctgagtagctgggaatacagaggcgtgccaccacacccagctaatttttgtatttttagtagagacagggtttcccatgt

SEQ ID NO: 408178 - DNA, 201 bp, Homo sapiens
tgcaattcctttttttttttttttttgagatggagtctcactctgccaccaggttggagtgcactggcgcgatatgggctcactgcaacctctgcctcccrggttcaagcgattctcctgcctcagcctcctgagtagctgggaatacagaggcgtgccaccacacccagctaatttttgtatttttagtagagacagggt

SEQ ID NO: 408179 - DNA, 201 bp, Homo sapiens
ttttttttgagacagagtctctctctgtcgccccaggcttggagtgcagtggcgcgatctcggctcactgcaagctccgcctcccgggtttacgccattcycctgcctcagcctcccaagtagctgggactacaggcgcccgccagtacgcccggctaattttttgtatttttagtagagacggggtttcaccgttttagc

SEQ ID NO: 408180 - DNA, 201 bp, Homo sapiens
ttttttttttttttttttgagacagagtctctctctgtcgccccaggcttggagtgcagtggcgcgatctcggctcactgcaagctccgcctcccgggttyacgccattcccctgcctcagcctcccaagtagctgggactacaggcgcccgccagtacgcccggctaattttttgtatttttagtagagacggggtttca

SEQ ID NO: 408181 - DNA, 201 bp, Homo sapiens
cccactgtggtccacttagtggaatgttccaggactgtatgcatgatctcacattgcattttgttgattttttttttttttttttttttttttttgagacrgagtctctctctgtcgccccaggcttggagtgcagtggcgcgatctcggctcactgcaagctccgcctcccgggtttacgccattcccctgcctcagcct

SEQ ID NO: 408182 - DNA, 201 bp, Homo sapiens
ccagctaattttttgtatttttagtagagacggggtttcaccatcttggccaggctggtcttgaactcctgacttcgtgatccacccacctcagcctcccraagtgctgggattataggtgtaagccaccacgcccagcctctcttcaatcattcttgatacctttaaaaattgttttaactttgaattcatgttagactt

SEQ ID NO: 408183 - DNA, 201 bp, Homo sapiens
ggctcactgcaacctccgcctcccgggttcaagcaattccctgcctcaaccttccgagtcgctggaattacaggtgcccgctaccacgcccagctaatttyttgtatttttagtagagacggggtttcaccatcttggccaggctggtcttgaactcctgacttcgtgatccacccacctcagcctcccaaagtgctggga

SEQ ID NO: 408184 - DNA, 201 bp, Homo sapiens
cttcaatcattctttttttaaaaaaaaaaaacggagtctcgctctgttgaccaggctagagtgcaatggcgtgatctcggctcactgcaacctccgcctcycgggttcaagcaattccctgcctcaaccttccgagtcgctggaattacaggtgcccgctaccacgcccagctaattttttgtatttttagtagagacggg

SEQ ID NO: 408185 - DNA, 201 bp, Homo sapiens
caaaaattagccaggcgtgatggcgggtgcctgtaatctcagctacttgggaggctgaggcaggagaattgcttgaacccaggaggcggaggttgcagtgrgccgagatggcgccattgcactccagcctgggcaacaagcgtgaaactccatctcaaaaaaaaaagcccaaataagttaaatattttgttgaaaaaaaaa

SEQ ID NO: 408186 - DNA, 201 bp, Homo sapiens
gttctcagaataactgaaaacttctcatttgcttttatttaggttaacttcttaaaaccaccccccaattttaattttgatgaatttttcacaaagtgtaygaccttcatgcattattatccttctggtgagcacaaaagtaagtacccaccatggaaaaatgcctttgcctctaccagtggtcagtagggtcttatatca

SEQ ID NO: 408187 - DNA, 201 bp, Homo sapiens
tatagctccttacatagtcttccctgtcctagtctctcgccttttccatatgctgcttccagtggtaccttcctaaatacgactagttggattactactawctcctcttcagaaatctgtgacctttccctcttgtctataaagtccagtcttcatattatggtgtttaatgccctccatgctctgctcccaaactagctc

SEQ ID NO: 408188 - DNA, 201 bp, Homo sapiens
gaagcaactttatctttttaaagagttgtttagagtaaccagtttctcttaaatctgcaaattagatttatttgtttgttcgtttttgagaagggtctcastcagtcacccaggctggagtgcagtggcgtgatcatggctcactgcagcctcaacctcccctgctcaagtgatcctcccaaacacctcagcttcctgagt

SEQ ID NO: 408189 - DNA, 201 bp, Homo sapiens
tgaggcaggagaatggtgtgaacccaggaggtggagcttgcagtgagcagagatcactccactgcactccagcctgggcgacagagcaagactccatctcrggaaaaaaaaaaaaagtacattaagtctgggtttcttcctcctggagtcattagttgtcaagaattaagggaaggggtcaagtagcaccaaggagctact

SEQ ID NO: 408190 - DNA, 201 bp, Homo sapiens
acccaggaggcagaggttgcagtgagatgagatcacaccattgcactccagcctggatgacaagagcgagactccaactcaaaaaaaaaaattttttttttaaatttaaaatgcctagatattatggaactagctttgacctcatgtggtctctgaaaaggtgccacggatccctagggctcccaggatgaattgggagaa

SEQ ID NO: 408191 - DNA, 201 bp, Homo sapiens
attgaggctttgcttagatagaaacaaggtgcatgcatttcaagttaaggagacaatctcattttagaatccagctaaagatactccataaggttctaccrgtaggtgttctgtatgaatagaacacagggagctggaagagtcagctatgcaggcttttttttttttttaagcttccttaggaaactttattttttttga

SEQ ID NO: 408192 - DNA, 201 bp, Homo sapiens
ctctagaaactcaaatccctgggctccaacctcctcaccatggcttaccagcaagatcttccctgtcttccaggtttacatctttttttttttttttttttgagagggagtcttgctgtgttgcccagcctggaatacagtggcgtgatatcggctctctgcaaattccgtctcctgggttcaagtgattctcctgcctca

SEQ ID NO: 408193 - DNA, 201 bp, Homo sapiens
tcctcatccacctcccaaaatgaccctggcaaaggaagtgggggtgattcataattcatttaaaaactgaagaccaacttctcacagatgtggggatgctrttcaagggaagtggatgtgttgttgggaatagggaggttggggatagaattattgagaggaagaaactggcttgagggaaacttcgggtaaggcaaccta

SEQ ID NO: 408194 - DNA, 201 bp, Homo sapiens
actggggctggtggccaactcatcatgtctccctctttttttgcctcccacacatacccaacaggatgcatgagactgggagatactgcctcaccttattwtattcttcaagtctgatcttaccttggtgtgcacacgtgctaagatttgcctaatgatgttgggaggtgaagctgaagtgatgagagttgtgcagggact

SEQ ID NO: 408195 - DNA, 201 bp, Homo sapiens
ttccaattgcccattgaactattccacagattcccttaaacttaataaatctaaaacttcatgcattatcctcccgctcaaccacccctccttctgtactycgtgtctctgtcacttctatcactgtcttgcttaggccccatttcctccatatctttagtatttgctttctccttgctgaaccacttgcctggttctatc

SEQ ID NO: 408196 - DNA, 201 bp, Homo sapiens
catggtgaaaccccgtctctactaaaatacaaaaattagccaggcgtgatggcgggtgcctgtaatctcagctacttgggaggctgaggcaggagaattgsttgaacccaggaggcggaggttgcagtgagccgagatggcgccattgcactccagcctgggcaacaagcgtgaaactccatctcaaaaaaaaaagcccaa

SEQ ID NO: 408197 - DNA, 201 bp, Homo sapiens
gaccaacatggtgaaaccccgtctctactaaaatacaaaaattagccaggcgtgatggcgggtgcctgtaatctcagctacttgggaggctgaggcaggaraattgcttgaacccaggaggcggaggttgcagtgagccgagatggcgccattgcactccagcctgggcaacaagcgtgaaactccatctcaaaaaaaaaa

SEQ ID NO: 408198 - DNA, 201 bp, Homo sapiens
cgtgggaggagggcagctgtcttcagacctcatcagaaaccctagctgcctttctcctgtctttccccattcacagaaatggagcatagatgtaaactggytccacgtactcattctccacttgaggaaacagactcaaatgggttaagtggcttgtctgggatgagatctttagtataagcctattctctgaatcactgt

SEQ ID NO: 408199 - DNA, 201 bp, Homo sapiens
tttgagaccagcctgaccaacatggtgaaaccccgtctctactaaaatacaaaaattagccaggcgtgatggcgggtgcctgtaatctcagctacttgggmggctgaggcaggagaattgcttgaacccaggaggcggaggttgcagtgagccgagatggcgccattgcactccagcctgggcaacaagcgtgaaactcca

SEQ ID NO: 408200 - DNA, 201 bp, Homo sapiens
ggagtttgagaccagcctgaccaacatggtgaaaccccgtctctactaaaatacaaaaattagccaggcgtgatggcgggtgcctgtaatctcagctactygggaggctgaggcaggagaattgcttgaacccaggaggcggaggttgcagtgagccgagatggcgccattgcactccagcctgggcaacaagcgtgaaac

SEQ ID NO: 408201 - DNA, 201 bp, Homo sapiens
ttgggaggccaaggtgggtggatcacctgaggtcaggagtttgagaccagcctgaccaacatggtgaaaccccgtctctactaaaatacaaaaattagccrggcgtgatggcgggtgcctgtaatctcagctacttgggaggctgaggcaggagaattgcttgaacccaggaggcggaggttgcagtgagccgagatggcg

SEQ ID NO: 408202 - DNA, 201 bp, Homo sapiens
aggtgcagtggctcacacctgtaatcccagcactttgggaggccaaggtgggtggatcacctgaggtcaggagtttgagaccagcctgaccaacatggtgraaccccgtctctactaaaatacaaaaattagccaggcgtgatggcgggtgcctgtaatctcagctacttgggaggctgaggcaggagaattgcttgaacc

SEQ ID NO: 408203 - DNA, 201 bp, Homo sapiens
tcttatttttcctccctcttgttgatgaaatgccagggtgaaagggatagccaactggactaaagtataagtgccactccagttattcggcagagtgcccrgtaaaggtccaccacaataccaccacacatccgcttggggatgaacaagggctgactgattgataagctcttgaaaattcttaagctcattgcatcactt

SEQ ID NO: 408204 - DNA, 201 bp, Homo sapiens
gccaggtgcagtggctcacacctgtaatcccagcactttgggaggccaaggtgggtggatcacctgaggtcaggagtttgagaccagcctgaccaacatgrtgaaaccccgtctctactaaaatacaaaaattagccaggcgtgatggcgggtgcctgtaatctcagctacttgggaggctgaggcaggagaattgcttga

SEQ ID NO: 408205 - DNA, 201 bp, Homo sapiens
caaataaggccaggtgcagtggctcacacctgtaatcccagcactttgggaggccaaggtgggtggatcacctgaggtcaggagtttgagaccagcctgamcaacatggtgaaaccccgtctctactaaaatacaaaaattagccaggcgtgatggcgggtgcctgtaatctcagctacttgggaggctgaggcaggagaa

SEQ ID NO: 408206 - DNA, 201 bp, Homo sapiens
aatttccaaataaggccaggtgcagtggctcacacctgtaatcccagcactttgggaggccaaggtgggtggatcacctgaggtcaggagtttgagaccarcctgaccaacatggtgaaaccccgtctctactaaaatacaaaaattagccaggcgtgatggcgggtgcctgtaatctcagctacttgggaggctgaggca

SEQ ID NO: 408207 - DNA, 201 bp, Homo sapiens
cgcttttgatgttgttaaaaatttccaaataaggccaggtgcagtggctcacacctgtaatcccagcactttgggaggccaaggtgggtggatcacctgargtcaggagtttgagaccagcctgaccaacatggtgaaaccccgtctctactaaaatacaaaaattagccaggcgtgatggcgggtgcctgtaatctcagc

SEQ ID NO: 408208 - DNA, 201 bp, Homo sapiens
gtctctgtcacttctatcactgtcttgcttaggccccatttcctccatatctttagtatttgctttctccttgctgaaccacttgcctggttctatccatsctcacttcttgacattccattgttatagctccttacatagtcttccctgtcctagtctctcgccttttccatatgctgcttccagtggtaccttcctaaa

SEQ ID NO: 408209 - DNA, 201 bp, Homo sapiens
aaactgctaccaaagctgtgtttgattatgtactgacaagtctttggaccattaactatctgtgtgaccctgggcaagttacttaacttctctgtgcccarattttctcagcaaatagattcaatagtaccactttatatggatgttgtgaggattaagtgagttaattatgtaaagagcatcccgcagtacttggaacat

SEQ ID NO: 408210 - DNA, 201 bp, Homo sapiens
aagagcttcatagaccttccataatttacagttgctactggtcacagcagcctaatcaaccctcctaccttagatttatataaaattataaaattaaactrttaaaaatgtcactaagttcctgtccttgaaacatttatgttaagaatgaaagtctcctgcatatttcatgcacatattcgaggtgatgatggggatgta

SEQ ID NO: 408211 - DNA, 201 bp, Homo sapiens
ggttttaatattgtgatccccaaagaggctctccctgcctttgtcatcatgcaatgtgtgctagattattacacataccattagaccaccaaagcactagygaatgtttctctagggtaattataaataaggttccagggcactatgcccatagaaatgaggggatttgatacacatgatgaaataaacagaattcattgt

SEQ ID NO: 408212 - DNA, 201 bp, Homo sapiens
tctacctgtatgggaggtaagggggcacatctcattcccaaaatgatgcagagaggactctcagcatagtcttcctcaagtggcatttaccctctgttaascctaaaatacctgtgagcacaaaatacctgtaggtctttggataagtgcaattctggttttttgttttgtttttgagatgaagtctttgtcacccaggct

SEQ ID NO: 408213 - DNA, 201 bp, Homo sapiens
gatctaattctattgtgagaactcatcatgtggcttcacctaagatgcaatggggactaggcaatgtggtttctggctgggcagcaacaactccgtaaagsgaacaagagtcttgggtagacagcagatatctccactgcagagaacatttcaatgacccatacaactcatttgtttattttctagctgaagaaaagctta

SEQ ID NO: 408214 - DNA, 201 bp, Homo sapiens
aaggcagagaagacacataaccatcttagcctagaggtgacatatattacttctgatctaattctattgtgagaactcatcatgtggcttcacctaagatrcaatggggactaggcaatgtggtttctggctgggcagcaacaactccgtaaagggaacaagagtcttgggtagacagcagatatctccactgcagagaac

SEQ ID NO: 408215 - DNA, 201 bp, Homo sapiens
gctttcttgtggaaagagaaggcagagaagacacataaccatcttagcctagaggtgacatatattacttctgatctaattctattgtgagaactcatcaygtggcttcacctaagatgcaatggggactaggcaatgtggtttctggctgggcagcaacaactccgtaaagggaacaagagtcttgggtagacagcagat

SEQ ID NO: 408216 - DNA, 201 bp, Homo sapiens
ttcatagtttttattgcagaataaatgagttaggataatgttattagctatcacaaaccccagcatttctgtggattaacacaagagagtgattatttccmccttatgaaataatccaatgcaagtgttgaccaatggctttgcatgcagttagcaagggacccaggctcctcccaacttgtgggtttgctatccttcagg

SEQ ID NO: 408217 - DNA, 201 bp, Homo sapiens
attagcatatgaatgtaattaaaagtcatgggcagatgaaactgcctagggagaaattgtgaaaggagaacggagcccaggaccaaactgaggtttaccamcatttagaatgttggtagacgaatagtagccaattaagtaggcaaccaattcccttataacacacaaaacaatgtgtgctaaaagaatcagtgaaaaggg

SEQ ID NO: 408218 - DNA, 201 bp, Homo sapiens
gacgatgaattcagatatgtttttgggtatggtcaacgggactttctgatggactgaatagggaagggggtaagaaaaagaaaataatcaaggatcttgcrcaggtttttgtcttgagaaaatggatatatgacagtgatgcttactatgttaggaaaagttgtaagtgggtataagtttctggaggagagattcgagagt

SEQ ID NO: 408219 - DNA, 201 bp, Homo sapiens
ccgcccctcaaggccggctagtccccttcccagagacttggctaggcggccggcgctgcggcgccagcagccctgtggtggcgacgacgatggaccaggasccagtgggccctgtggaacgaggagaagccgtcgcagcctcgggagctgcggccgccgcggcattcggggaatctgcggggcaggaaattaagggatcca

SEQ ID NO: 408220 - DNA, 201 bp, Homo sapiens
ccaatgttaagtttcttgaaggtgataactatattctagttatatgagagagtgttggccaggtgcagtggcccacacctataatcccagtactttgggastctgaggcgggcggattgcttgagcccaggagtttgagaccttcctgggcaacatgacaaaaccccatctctactaaaaatacaaaaattagccgggtgt

SEQ ID NO: 408221 - DNA, 201 bp, Homo sapiens
gccaggctaggctgaagcatactgtgtttctcaaacttatttgcccttagatctcttttcatggagcagctggctgggctaaccttccatgaactcacttraggaaatgtctttctgggcccttgcttcatctgacttcagccagcttcaggaagagcttcatagaccttccataatttacagttgctactggtcacagca

SEQ ID NO: 408222 - DNA, 201 bp, Homo sapiens
catgtgaggcaaaaagaaagccctgccatgggacccactgccacgtttttccttgggtcctaaggtccctagctggtctgacttctttccaccttcaatgwcatcttctgtttgttttacacataacgtctaggggttttaactatatttagcaggaggaatagggaaaaacataccaactctctcttcctggaattggaa

SEQ ID NO: 408223 - DNA, 201 bp, Homo sapiens
gaaagaaaagattgaacttagttctttcgctgcatcataagcaaaccaggaagctcaatggatacatatgcatacccatacatgtgtaaaaaaacctgacrtcctatggtgtttctctttctctttctgcatcttgtccagatagtgaaagaggaaaggattatttttatcattgatgaggcccagtttgtggattcgacc

SEQ ID NO: 408224 - DNA, 201 bp, Homo sapiens
aaaacagctgctgaggctccagccagcatgtttaatgccagaaggagaaaagaagccaaaacatgaaaggatatcccctcccttttaaaggatcttctaaragtcctacccagtatttcctcttacatcccattgatcagaacctactcacatgactatatccagttgcaagggaagctgaagaatgtcgctgtctattac

SEQ ID NO: 408225 - DNA, 201 bp, Homo sapiens
aggcacagtggctcacctgtaatcccagcactttgggaggctgagacaggtggattgcttgagctcaagagttcaagacaaaccagagaagcatgatgaamtctccctctacaaaaaatacaaaaaaattagctgggtgtggtggcaggtgcctgtagccccagctactcaggaggctgaggtgggaagatcatttgagcc

SEQ ID NO: 408226 - DNA, 201 bp, Homo sapiens
ctggggatggaagtggaggtggtaactgaaatggctcctgcatctcttacttcagtagagtctggggcaatggcccttctgtgggctcaatccctgctgawtcaacacttttctactccttgggctggttacaggcatacatgtatttgaatgaaggacagaagttgctaaaaactctcaagaaggacaaatcttggagcc

SEQ ID NO: 408227 - DNA, 201 bp, Homo sapiens
taagccaatgaagtgtttacattattaagactatgtaaatgttgtccattacaaaccaagtaatatactgtgaatagatttcttaacaaatgtttattttycctagggttactaggaaacgttttttttttgcagtgtcttccttaaaatatcctgctttaatctatcctagacagatagatactctgtctatcctttatc

SEQ ID NO: 408228 - DNA, 201 bp, Homo sapiens
tttaattatctatatttctccactggaaattgatgtcactttcttcaggtttaattcatagtttttattgcagaataaatgagttaggataatgttattarctatcacaaaccccagcatttctgtggattaacacaagagagtgattatttccaccttatgaaataatccaatgcaagtgttgaccaatggctttgcatg

SEQ ID NO: 408229 - DNA, 201 bp, Homo sapiens
aaattccctaaatgtcgtatcacaaaacagtaatcccatggccgaccgtcccacacaccttcagtaattccagtcaggggcaaacatttttaatttagctrttctttctagtcattacctccatatactaaatggtatattaacattgcttttactgatttttaagaaaatcaaattctgacatctgttttctggctatgg

SEQ ID NO: 408230 - DNA, 201 bp, Homo sapiens
gaatatctaggtacatggaggggcaagttcttcaccttcaaaaacaaatcaaagaacagtcagagaatgcccaagccagtggggaggagctactcaaggtraggcctattctccagtttccagtataaaatatgccttaaatggatctctgtctacttcctgtgctaattattttctcattatagaattcatatattttta

SEQ ID NO: 408231 - DNA, 201 bp, Homo sapiens
gctggtatcccttccatcagcacctccacctgagtgaggccacagctctactatttctcttatcagaatttttcacctgttcagaaggctatcgactcgayaaactttagagactttgtaaattccctaaatgtcgtatcacaaaacagtaatcccatggccgaccgtcccacacaccttcagtaattccagtcaggggca

SEQ ID NO: 408232 - DNA, 201 bp, Homo sapiens
gactagtgtcatcaaagcaaacaatttcagttatttgcagattttccaatcaactggcagttcagctctggaacatatatgaccaaatgtctctgaataaygtctgctggtatcccttccatcagcacctccacctgagtgaggccacagctctactatttctcttatcagaatttttcacctgttcagaaggctatcgac

SEQ ID NO: 408233 - DNA, 201 bp, Homo sapiens
atgtacacacacatacatatacatagatgcattttttggtagattgatgttttattttgggggataaaataagctaaaatacactgacagctagaatatasgtcagtttgagcagctggccttgagcaggttgactagtgtcatcaaagcaaacaatttcagttatttgcagattttccaatcaactggcagttcagctct

SEQ ID NO: 408234 - DNA, 201 bp, Homo sapiens
taggggctctggcaaaatgggatgtgaccagaactcaaactaaaatatcccacttaattcacaccaaaggatggaatccaaaggggggtacaatctgacaygatgacatggtgtttcttggcagataagaatattattgctttgttggtctagtttgaaacaggttccagtgggtaaagaacatgactgagagagaattag

SEQ ID NO: 408235 - DNA, 201 bp, Homo sapiens
cttgtagaagcgtcaccctaatctctgccttcatgtcacatggcattctccctgtgtgttgtttgtgtccaaatttctcctttttataagggcatcagttwtattggattagaggcctaccctactctagcatgatctcatcttaactaattgtatctgcaacgactctcttttcaaataaggtcacactttgaggcccta

SEQ ID NO: 408236 - DNA, 201 bp, Homo sapiens
ttggtctatatttctgttttggtaccagtaccatgctgttttggttactgtagccttgtagtatagtttgaagtcaggtagcatgatgcctccagctttgytctttttgcttaggattatcttgacaatgcaggctcttttttggttccatatgaactttaaagtagatttttccaattctgtgaagaaagtcattggtag

SEQ ID NO: 408237 - DNA, 201 bp, Homo sapiens
ggaataacctgttcagtaagtcctgcggtgatggttctttcttactctgttctgcctaacttaagtcttcattcagagaaggtagcaaaaatgggctattycacaggctgcttcctgtagagtcagaaggttctggggagccaggaattactggatccgatattccagattgtaagcgaacttaacattgcctgggactca

SEQ ID NO: 408238 - DNA, 201 bp, Homo sapiens
tcttcctatcttcatcattatgtccctgtgtcccttcgttaacattccctgtgcagctgccagggccgtaataaagaacaggaacaccacctacattgtcrttggtgcagtacagcctaacgacatctccaacaagatctgtcttgacctcaatgtgagctgcatctccaaagaactggactcgtaagtaacctctttcta

SEQ ID NO: 408239 - DNA, 201 bp, Homo sapiens
agaagaggctggcacaactttaccggcaaactgtctgcctttccttgctgtggcgcatctatagctacagttatctttttcactgcaagtattatgcccayctggcagttatgatgcaaatgaatactgcactggaaactcaaaattgtttccaggtaggggatttttgtagctgctcctttaagtttctgaatttcattt

SEQ ID NO: 408240 - DNA, 201 bp, Homo sapiens
aggacctggaataacctgttcagtaagtcctgcggtgatggttctttcttactctgttctgcctaacttaagtcttcattcagagaaggtagcaaaaatgrgctattccacaggctgcttcctgtagagtcagaaggttctggggagccaggaattactggatccgatattccagattgtaagcgaacttaacattgcctg

SEQ ID NO: 408241 - DNA, 201 bp, Homo sapiens
tgtaaagtgaagcagttggacctccattctcttggtccaaatccaagaggtcctaggctttattacagccttggatttctcgtgcccaacacttctctctycccccaccaccatttctggctatccttaccttctggtagcattatctggaacatgttccaaaccagaaagaaaggaattctctaagactgatgtggttta

SEQ ID NO: 408242 - DNA, 201 bp, Homo sapiens
aatacattctgatatacattatgtatatacataatacatatataatacattctgataatctgactgtgaatcaaacgtttgtaaagccttatatcctatggaagacatcaatagtgccaattcttttggttgggcagggttggcagagggagacaaaacatttttgagtacatctagattttcatgaatcagttttactta

SEQ ID NO: 408243 - DNA, 201 bp, Homo sapiens
ttccgaattactgagaaggaccaagactagaccaggaagggactttactgaacctcatcctatccactgctttttttattcaatagctttgggggtataartggttttcggtcacatagatgaattttatagaggtgaattctgagattttagtgcacctgtcacccgagcagtgtacacatacccaacatgtagtctttt

SEQ ID NO: 408244 - DNA, 201 bp, Homo sapiens
aggtgcactatcgttccttgtctctgaagcccagtgaagggatgggtgagtagcacctggagtgacccaatttcctcttaaggacccatctagatcaaagrattgacctatgttaggtagaaggggctgatctgttgcccactgcctggctgaaaaaccctttttgctctctccagatcacggtgaagaggaacagcttcg

SEQ ID NO: 408245 - DNA, 201 bp, Homo sapiens
gtttattgtgttgtctaagtcctctgtgtcttatcttttgtataattgttctatccattattgactgttagtgaagtctccaactactattatagaactgtctatttctacctttaattttgtcagtttttgcttcatatatattgacgatcttattagatgcataaatgtttataattgttatatttttattttaaaaat

SEQ ID NO: 408246 - DNA, 201 bp, Homo sapiens
gagaaaggggaggcagagaagaagatacaaaaggaccagctgaggaagtcaacaaagcacaggaatggcagggcctgctccttctgacaatagtgattacmatgtcctctcctctcctcacacacacttgtcacactttagcacaaaatcagaacaccatgaaatagatcttaattttgtcaggtcattgtgctgtgtgtc

SEQ ID NO: 408247 - DNA, 201 bp, Homo sapiens
ttcttggtagagatggggttacactatgttgcccaggctggtcttgaacacctgagctcaagggatctgccctccttggccttccaaagtgctaggattayaagtgtgagccactgtgcccagccaattctggttttaatattgtgatccccaaagaggctctccctgcctttgtcatcatgcaatgtgtgctagattatt

SEQ ID NO: 408248 - DNA, 201 bp, Homo sapiens
cgtgggactccaattgcgtctaaatggacgtgagagtcgaaagacctataagggggcttctctcgctttacgatgtcttatttttcctccctcttgttgaygaaatgccagggtgaaagggatagccaactggactaaagtataagtgccactccagttattcggcagagtgcccagtaaaggtccaccacaataccacca

SEQ ID NO: 408249 - DNA, 201 bp, Homo sapiens
aggctggtcctgaactcctgacctcaggtgatccgaccacctcggcctcccaaagtgctgggattacaggcatgagcccacgtgtggcctaatttttttttattgtgatccaaatacacatagcataaaacttaacattttaatcatgtttaagtatgcagttcagtggtatgaaatacatttctaatgttgtgtatccat

SEQ ID NO: 408250 - DNA, 201 bp, Homo sapiens
attagataatacctggatatttatttgttctatcagtgaataacaaaatgggcctccacattcatctgcccagcacagaaggaatagttagctctcaatgagtctccaacttttttgacagaaattgctcactgcttagaaattacaattcttacagctccttacagcagggtttcagatttcacccagggctgttacagt

SEQ ID NO: 408251 - DNA, 201 bp, Homo sapiens
tcctcagtcttcaaaagagtgccatttatgtttcgttagctgtgtctactaatgtaagaaggcagtagctcacacctgtaatcccagcactttgggaggcygaggcaggtggatcacctgaggtcaggagttcgagaccagcctggtcaacatggtgaaatcccatctctcctacaaacacaaaaaattagccgggcatgg

SEQ ID NO: 408252 - DNA, 201 bp, Homo sapiens
ccccgtatctactaaaaatacaaaaaaattagccaggcacacacctgtaatcccagctactcgggaagctgaggcaggagaattgcttgaacctgggaggyggaggttgcagtgagccactgcactccagcctgggtgacagagtgagactccatctcaaaaaaaaaaagaaaagaaaatctgacctggtatttattttct

SEQ ID NO: 408253 - DNA, 201 bp, Homo sapiens
ttgagaccagcctggccaatatggtgaaaccccgtatctactaaaaatacaaaaaaattagccaggcacacacctgtaatcccagctactcgggaagctgmggcaggagaattgcttgaacctgggaggcggaggttgcagtgagccactgcactccagcctgggtgacagagtgagactccatctcaaaaaaaaaaagaa

SEQ ID NO: 408254 - DNA, 201 bp, Homo sapiens
atacccctgtagagtattccattaagctaacagagaagttaaacatggttactctccatagtgataaggaaagtgaagaagtctgtcacctcacaagtggygtcagactgaaaaacctgtcacctccaacgtcattaaaaggtaagaaaatctggccgggcgcagtggctcacgcctgtaatcccagcactttgggaggcc

SEQ ID NO: 408255 - DNA, 201 bp, Homo sapiens
aactagctagtattatacttctgcacaaatagccatgggcaggcacagcaactcctctctggtgcattgtgacttagcatctctttggtctgtatatctgsagtatccagatggtgagtaaatggctcccaatcctctctggatgtgcatcaacattcttgacatattagaggtatcttgaaatatcatactcaagaaaat

SEQ ID NO: 408256 - DNA, 201 bp, Homo sapiens
tagggaaaaacataccaactctctcttcctggaattggaagcctcttcatttttttgtgactcaaattaagtaatacgatgatttaacagctataagcackacgtgtattaatattactaaacctagagggtcaaaacgtattcctctgcgactaaatttaaagacaagaatataggtgtgagatcagtgtcatgatgagg

SEQ ID NO: 408257 - DNA, 201 bp, Homo sapiens
tgacagcagtcaccttaacaacatagagaatgttttttctttagctggctgtttacagcccatcttagtatctgcaatgaggttgccctgcttctggaagraagatgtcttgaacaaaggctcatttaagataactccaggcaccaatttggcactcattctttctgtcggtctctctctctctctccccctctctctgtt

SEQ ID NO: 408258 - DNA, 201 bp, Homo sapiens
acctagtttcgctctcattgcccaggctggagtgcaatggcacgatctcggctcaccgcaacctccacctcccgggttcaagcgattcttctgcctcagcytcccgagtagctgggattgcaggcatgccccactacgcccagctaattttgtatttttagtagagatgaggtttctccatattggtcaggctggtcttga

SEQ ID NO: 408259 - DNA, 201 bp, Homo sapiens
cttatggtgctgctgtctctatgtagcaggatagaaaatcaccacctaaaggtgacaatgagggaaatttcataaaaaagattcctcttgcttcctaaaarcccctgcctcctgggtgaatgaatgatgctcagatgtccctatccatgtttcagtctgtgctgcatctgttgcctctcacttcttgttcaatagcatgac

SEQ ID NO: 408260 - DNA, 201 bp, Homo sapiens
gataatgtgttagtcgttttcacgctgctataaagaactacctgagactgggtaatttataaagaaaagaggtttcattgactcacagttccacatggctrgggaggcctcaggaaaattataatcatgacagaaggcaaaggggaagcaaggcatgtcttacatggtggcaggagagagcgagcaagggaggaagtgcca

SEQ ID NO: 408261 - DNA, 201 bp, Homo sapiens
gagatttcacaatgtccttccatacaatgcccttccatacaatgtctggaatctatagataacaacagttgctaggtcaggggtcgaattttaactaccgrgcttaggtcaggcaggcccaggcctggtttcgggtctggttcctaggcgccgggctatctgcctttaatttcacttttctttccttttctgagtataaaa

SEQ ID NO: 408262 - DNA, 201 bp, Homo sapiens
aggttttcaccatgttggtcaggctggtctcaaactcctgacctcagatgatccacctgcctcggcctcccaaaatgctgggattacaagcatgagccacygtgcctggccagtagtccttttttttctttttgagatggagtctggctctgctgcccacgctggagtgcagtggtgcgatctcggctcactgcaagctcc

SEQ ID NO: 408263 - DNA, 201 bp, Homo sapiens
cccatttactaaatcgagaaatcgccaaatgaaggtttattcataggagcatgcagacacaattttatgtctcatatggagatcagtaccccaggcccaarcatgtgcttgtccaccttgtggcagaagaccaactgacaccttctctgagagccttcagtgctgtggccatcccacttacagagcctgctccatactcaa

SEQ ID NO: 408264 - DNA, 201 bp, Homo sapiens
agggagggcgtgataataatccacatgttgcaagagaataggagcagctaggggaatagtcaattatgtattgtctcacactcagtaaataggcacttaasgtaggataaggcagacatagagtagctacccgtgcagatacttaactttttatctgtagctgtctgctaaggaacaaaaggaaaggcaacttcttgcatg

SEQ ID NO: 408265 - DNA, 201 bp, Homo sapiens
gtaaactaaaaagtacccaagacaggtatcaatcaatctgtaagtttattttgccaaggttaaggacatgcccagaagaaaaaaaaacacaaaaccacagraacagtccctgtttgagactgcagtatttaaaggggaaaagtgggctggaggaaaatgagggagggcgtgataataatccacatgttgcaagagaatagg

SEQ ID NO: 408266 - DNA, 201 bp, Homo sapiens
caagtgctgataaaggcacgccgtgggtgatcaggccatgcttccactcaaatggagtgggcaagttccaaagactagtcttaccaagttttagttgtccrgactccaagtgccaattccttcccggtgttcagccactctgttgatcctccacgggggcctgccacacactgctctggcgaggtgtcccaccggggcaaa

SEQ ID NO: 408267 - DNA, 201 bp, Homo sapiens
ttaatcagctgggagaatcggcaggctagcgtctcaaaatccgagctcgtcaaggtgctcaacttctgcccttttaagggctcacaactctaagggggtcygcatgagagggtcgtgatcgattgagtaagccagggggtacgtgacaggggctgtgagcactggtggtcacagtgaaacagaacagaacgagagatttca

SEQ ID NO: 408268 - DNA, 201 bp, Homo sapiens
ggctgacccatggatatcctgatttaatgccaggaagggcttggttatttaaagtttcctaagtaatcccaatattcagacagatcgagaacaattggcakagatgttgagatcaaggctagatttggtctgcagaacaaacacttaagtttatccagctagctgacagtgtagcaggaccagctgcagacaaaacccctc

SEQ ID NO: 408269 - DNA, 201 bp, Homo sapiens
tttgctcttttttaaaactaaaaataacaggacgtaataaagagatcaactacttcatgtatactatgaagaaatttttgatatctaacagcagccaagtyttaatgtatgagggattaccaggatatggaaaaagccagatacttatgaaaattgagtacctggcccaaggtaagaatcacaggtgagtgtcttggaatg

SEQ ID NO: 408270 - DNA, 201 bp, Homo sapiens
gacattagataatacctggatatttatttgttctatcagtgaataacaaaatgggcctccacattcatctgcccagcacagaaggaatagttagctctcaatgagtctccaacttttttgacagaaattgctcactgcttagaaattacaattcttacagctccttacagcagggtttcagatttcacccagggctgttac

SEQ ID NO: 408271 - DNA, 201 bp, Homo sapiens
atgtgccatgttggtgtgcagctatgcagcctttgaagcctcatcttctaagttcctatgtgagcttcattcaggccaaagaaaaacacaaaacatctcaygaaattgaggttcaaatgcattttcagaaagggaatatttcacccaaaagaagcaatacagtctgctaagtagttctcactaagccatactcagaaatgt

SEQ ID NO: 408272 - DNA, 201 bp, Homo sapiens
agtagagatggggtttcaccaggttggccaggctggtcttgaactcctgatctcagatgatccaccagcttcggcctcccaaactgctggaattacaggcrtgagccaccgcgtctggcctaaagatattttaatatcaaaagtgatactgtataagttactattatttatttctgcatatggacagtcctgaagaaataa

SEQ ID NO: 408273 - DNA, 201 bp, Homo sapiens
ggcatgcaccaccacgcccggctaattttgtatttttaatagagacggggtttctccatgttgaggctggtctcgaactcctgacctcaggggatccaccygcctcggcctcccaaagtgctgggattacaggcgtgagccaccgctcccagcctggaaactttattattttttatttatttattttttattattatactt

SEQ ID NO: 408274 - DNA, 201 bp, Homo sapiens
cacagagatctgaatcatgctttttaaatggtactgccttctctacagaaagagattgaaaaggataggaatagaagggagattagttttttgcagttgtmcaggtaaaattttggtaatggactgaggtggtgctgtagtgaagatggacagaagacgatgaattcagatatgtttttgggtatggtcaacgggactttc

SEQ ID NO: 408275 - DNA, 201 bp, Homo sapiens
ttaaaaagatggctatgtctcatggatttaaaagtaacctacttcattttaaaattatcctaactgttcttgggaaatctagagactaagatctagaaggmgtgggtgtggatcttgagggcttcaagtctcataagcggcttgggcacaaagaatgatgagacttcagcagcctaggccaatggggaagagaaaagtaag

SEQ ID NO: 408276 - DNA, 201 bp, Homo sapiens
gagggattttgattatatttccatctgctccacttcaggcatgctggctctgtcatgttgtacctcacccattctgaggtagacattccctagatgatttygggtatgaggtgggggcggtgttgggggagggatccactgccaaggacacctacagaaagctgctctctactttgcagattgataacaaacagcttcagg

SEQ ID NO: 408277 - DNA, 201 bp, Homo sapiens
tctgggatgagatctttagtataagcctattctctgaatcactgttcttttgacctagtttctattccactaagaaagaatgatgtttttttactaccttyaaggaatcagggtttgatttaattttttttttttttctcagaagtgttgatttttggaggagacatcctgaaatttgcaggtatgggggcttactaagat

SEQ ID NO: 408278 - DNA, 201 bp, Homo sapiens
ctatgtaaatgttgtccattacaaaccaagtaatatactgtgaatagatttcttaacaaatgtttatttttcctagggttactaggaaacgttttttttttgcagtgtcttccttaaaatatcctgctttaatctatcctagacagatagatactctgtctatcctttatccctgaacctcccaaagtgtggagtataacc

SEQ ID NO: 408279 - DNA, 201 bp, Homo sapiens
tttccttcttcctttccccaaagtcttctaacaccctcgattacttatgcctgtttaaaaaattgatacagatggaatcatacattgtataattatatacrgcttatatatactttctcttactcaatggtatgttatataattcatccatattgttgggtgtagctgtaatttattctatgtcattactatgtagtattc

SEQ ID NO: 408280 - DNA, 201 bp, Homo sapiens
tgcagactcaacaagcatttattgaacaatgtgccagatgctatggaaacagatgctacctgagttctttggattctccactaccaagtcagaccttctcstttctccttcttttggcgtttgcgacccttgagtcaggggatagactcttgttagcaattgagaaggaaactttctgggaactaagaactaatcactctt

SEQ ID NO: 408281 - DNA, 201 bp, Homo sapiens
caggatggtctcgatctcctgacctcgtgatctgcccacctcggcctcccaaagggctgggattacaggcgtgagtcactgcgcccagccaagtagtactwcttaacagtgtttttgtcaggattaaagaaaatgatgcatgtaaagcacttggaactgcgccagacacatagcatgtgctccaataaaaggcgcgctatt

SEQ ID NO: 408282 - DNA, 201 bp, Homo sapiens
aacaaatcaaagaacagtcagagaatgcccaagccagtggggaggagctactcaaggtgaggcctattctccagtttccagtataaaatatgccttaaatrgatctctgtctacttcctgtgctaattattttctcattatagaattcatatatttttataatagaagtttttgaaggcacttccccaaagtaagaaagaa

SEQ ID NO: 408283 - DNA, 201 bp, Homo sapiens
ttccttcttcctcttccttttttcctcctatagcatatgcttctattagaacactccttgccctatatcacaattattcacttcctacagttttcacttgytacactgtgaactctttgaagatactaattatttctttattcttatatccccagtgcttggtatacagtaggtcctcaataatgatgaataaatgaatgg

SEQ ID NO: 408284 - DNA, 201 bp, Homo sapiens
gtgacatacaaggtaccacctgcctttccaacctcatctcctcctgttccccctcctctgggttgtttaagtagattgtcctcatcagcacccacctaatmctggtctattgggaaaaccgcagtcaatttttgaaacccagctcgagggattcatagacattcctctatgaattccccatcccagctagacagttaagct

SEQ ID NO: 408285 - DNA, 201 bp, Homo sapiens
ggggtgatgggtatatggaaattcattatattttattttatggtcaaatttctccacaataaatagttttcaaaaagagtaccttgttcagaagtattcamgtttatgttaaagtgacacatttgctacctcatttgtagtaatattaattgaaggcttacaagcagccagctgctgttgaaagtgataaacgtgtattaa

SEQ ID NO: 408286 - DNA, 201 bp, Homo sapiens; identical to SEQ ID NO: 91659

SEQ ID NO: 408287 - DNA, 201 bp, Homo sapiens
atctctttaaaaaaaaaaaaaaaaaaaaaaagctggcagccaagatggccaaataggaacagctccggtctacagctcccagcatgagcaacgcagaagaygggtgatttctgcattttccatctgaggtactgggttcatctcactagggagtgccagacagtgggcacaggacagtgggtgcagcgcaccgtgcgcaag

SEQ ID NO: 408288 - DNA, 201 bp, Homo sapiens; identical to SEQ ID NO: 91661

SEQ ID NO: 408289 - DNA, 201 bp, Homo sapiens
aaactgcatctgaactgagaaaaccataactacctggtgagaagtcttcctcagggcctccttgagtgcagtgactcctcctggtcctgcctcctacctamtaagttgttacaggagatacttttgtagggcatatgaggttttgaagccagggtcattcttttgtctgtatgatgtggatctcaactctttttttttttt

SEQ ID NO: 408290 - DNA, 201 bp, Homo sapiens
agtctcctttatgagcttatttccatacagccatagttttgttcctttgtaccttatatgcaaagggtgtatacaagaaccaaagtttgtcagaagtcatmtttgtggtgctgcgtatgatggccaggttacttttcctgcatttgggcactgagggtgttcttgttttttttgtttgtttgttttctttgttttgttttg

SEQ ID NO: 408291 - DNA, 201 bp, Homo sapiens
tacttatcctcttagcaagcttaaatgcagaatcagacctgtcttgccgctctgctgagtgatcacttaaatagacatacttggaaccaacagaggttgcrcgcacgtgaggactcattctccaggctgctgtgtggactggccagctctttcgttcttgcccagacatcatctcatttggctttaatagtgtctaagggc

SEQ ID NO: 408292 - DNA, 201 bp, Homo sapiens
atcctcttagcaagcttaaatgcagaatcagacctgtcttgccgctctgctgagtgatcacttaaatagacatacttggaaccaacagaggttgcacgcaygtgaggactcattctccaggctgctgtgtggactggccagctctttcgttcttgcccagacatcatctcatttggctttaatagtgtctaagggcaataa

SEQ ID NO: 408293 - DNA, 201 bp, Homo sapiens
taggtactgatatgattcccacttcacaaccgaggaaaccaaatcttgcagtggttaaataacttggtcagggctggcagagctgggatctgaaccaagcsagtctggctccagatgctggattctcaaccactggctgaacctgctttttttaaggaacaatcgccctcttgatgtttatagacaccatcagacatgata

SEQ ID NO: 408294 - DNA, 201 bp, Homo sapiens
agcaacgcagaagatgggtgatttctgcattttccatctgaggtactgggttcatctcactagggagtgccagacagtgggcacaggacagtgggtgcagygcaccgtgcgcaagccgaagcagggcgaggcattgcctcactcgagaagtgcaaggggtcagggagttccctttcctagtcaaagaaaggggtgacagat

SEQ ID NO: 408295 - DNA, 201 bp, Homo sapiens
ggtgacagatggcacctggaaaatcgggtcactctcaccctaatactgcgcttttccgacaggcttaaaaaacggcgcaccaggagattatatcccgcacmtggctcagagggtcctacgcccacggagtcttgctgattgctagcacagcagtctgagatcaaactgcaaggcggcagccaggctgggggaggggcgcct

SEQ ID NO: 408296 - DNA, 201 bp, Homo sapiens; identical to SEQ ID NO: 91671

SEQ ID NO: 408297 - DNA, 201 bp, Homo sapiens
gcagtgttaaatatccctgtctgacagctttgaagagagcagtggttctcccagcacacctctggagatctgagaatgggcagactgcctcctcaagtggktccctgacccctgacccccgagcagcctacctgggaggcaccccccagtaggggcagattgacagcccacacggccgggtactcctctgagacaaaactt

SEQ ID NO: 408298 - DNA, 201 bp, Homo sapiens; identical to SEQ ID NO: 91672

SEQ ID NO: 408299 - DNA, 201 bp, Homo sapiens
agatgaatgtataactagaataaccaatacagagaagtgcttaaaggagctgatggagctgaaagccaaggctcgagaactatgtgaagaatgcagaagcytcaggagccgatgcgatcagctggaagaaagggtatcagtgatggaagatgaaatgaatgaaatgaagtgagaagggaagtttagagaaaaaagaataaa

SEQ ID NO: 408300 - DNA, 201 bp, Homo sapiens
agtctctgataaaacagactttaaaccaacaaagatcaaaagagacaaagaaggccattacataatggtaaagggatcagttcaacaagaagagctaactrtcctaaatatatatgcacccaatacaggagcacccagattcataaagcaagtcctgagtgacctacaaagagacttagactcccacacaataataatggg

SEQ ID NO: 408301 - DNA, 201 bp, Homo sapiens
gggcttaaaatgttaaaatatttctaaagaggactattttgggactctacagtgtacctctttaatgagaacacccacagtttaggcctattaaggcatamttcctttattttactaaagaattaaaataataaagatttgataattttctttcttttttttttttattgatcattcttgggtgtttctcgcagaggggga

SEQ ID NO: 408302 - DNA, 201 bp, Homo sapiens
aatcaacagaatatacatttttttcagcaccacaccacacctattccaaaattgaccacatacttggaagtaaagctctcctcagcaaacgtaaaagaacrgaaattataacaaactgtctctcagaccacagtgcaatcaaactagaactcaggattaagaaactcactcaaaaccgctcagctgcatggaaactgaaca

SEQ ID NO: 408303 - DNA, 201 bp, Homo sapiens
ctcctcagcaaacgtaaaagaacggaaattataacaaactgtctctcagaccacagtgcaatcaaactagaactcaggattaagaaactcactcaaaaccrctcagctgcatggaaactgaacaacctgctcctgaatgactactgggtacataacgaaatgaaggcagaaataaagatgttctttgaaaccaacaagaac

SEQ ID NO: 408304 - DNA, 201 bp, Homo sapiens
gaaactattccaatcaatagaaaaagagggaatcctccctaactcattttataaggccagcagcatcctgataccaaagccgggcagagacagaaacaaaraagagaattttagaccaatatccttgatgagcattgatgcaaaaaccctcaataaaatactggcaaaccaaatccagcagcacatccaaaagcttatcca

SEQ ID NO: 408305 - DNA, 201 bp, Homo sapiens
acccacagccaatatcatactgaatgggcaaaaactagaagcattccccttgaaaactggcacaagacagggatgccctctctcaccactcctattcaacrtagtgttggaagttctggccagggcaattaggcaggagaaggaaataaagggtactcagttaggaaaagaggaagtcaaattgtccctgtttgcagatga

SEQ ID NO: 408306 - DNA, 201 bp, Homo sapiens
aatcaatatcacgaaaatggccatactgcccaaggtaatttatagattcaatgccatccccatcaagctaccaatgactttcttcacagaattggaaaatrctactttaaagttcatatggaaccaaaaaagagcccgcatcgccaagtcaatcctaagccaaaagaacaaagctggaggcatcatgctacctgacttcaa

SEQ ID NO: 408307 - DNA, 201 bp, Homo sapiens
gacaagggggccaacaggccaccctggggaggttaaatctcctgtgagcggtggcctatgctcagccaaggtcagctttcttgaggaggtagtgctgcaarccattagtagccagtactcacagcagctggggcaggatgcacaatggtccagtgagggggatctgggtcggcatcagtggcatctactacaatatctctg

SEQ ID NO: 408308 - DNA, 201 bp, Homo sapiens
gtcaggcaggaatacacccaggctggagtacagtggtgtgatcacggctcattgcagccttgaattcctgggctcaagcaatcctcccacttcaacctccygagtagctgggaccacaggcatgcatcaccgtttccagctaatttttgtattttttgtagggacagaatctttgttgtccaggttggtctcaaattcctg

SEQ ID NO: 408309 - DNA, 201 bp, Homo sapiens
ccttatacaaaaatcaattcaagatggattaaagacttaaatgttagacctaaaaccataaaaaccctagaggaaaacctaggcattaccattcaggacakaggcatgggcaaggacttcatgtctaaaacaccaaaagcaatggcaacagaagccaaaattgacaaatgggatctaattaaactaaagagcttctgcaca

SEQ ID NO: 408310 - DNA, 201 bp, Homo sapiens
catggcacctgacctgcactcctgtttctacttcatgggtttattggtcttgttcttggggcagaaaaactgttgtattattgtggctttgtagtatgtcwgtattagttggctagggctgccataagaatgtgccacagaatgggtggcttaagcaacagaaatttattttctcacagttctggaggctaaaagtctgcg

SEQ ID NO: 408311 - DNA, 201 bp, Homo sapiens
gggactcagggcagtgcagaggaagaaggataagtgaggatatggtcttgtctggagtctacttcagctccatcctggtggggaggtggggctctggaacrtgaattataccacagagctgattttaccttgggacaagggggccaacaggccaccctggggaggttaaatctcctgtgagcggtggcctatgctcagcca

SEQ ID NO: 408312 - DNA, 201 bp, Homo sapiens
ctcaaacaaatttacaagaaaaaaacaaccccatcaaaaagtgggtgaaggacatgaacagacacttctcaaaagaagacatttatgcagccaaaagacayatgaaaaaatgctcatcatcactggccatcagagaaatgcaaatcaaaaccacaatgagataccatctcacaccagttagaatggcaatcattaaaaagt

SEQ ID NO: 408313 - DNA, 201 bp, Homo sapiens
tcccccaagttctttccatgtgaactcctcttagtacaggtcctccatttgaaatgtatgcaatttatttgtgaacctaaatgggaaacttcaccattatscccatgaaacatgctcttgttagcttgggtttgtttgggcttgttaatgttagtctaatacccagctgtctccagccctaggtcagtgccatttgctaaa

SEQ ID NO: 408314 - DNA, 201 bp, Homo sapiens
agaaaaaaacaaccccatcaaaaagtgggtgaaggacatgaacagacacttctcaaaagaagacatttatgcagccaaaagacatatgaaaaaatgctcaycatcactggccatcagagaaatgcaaatcaaaaccacaatgagataccatctcacaccagttagaatggcaatcattaaaaagtcaggaaacaacaggtg

SEQ ID NO: 408315 - DNA, 201 bp, Homo sapiens
catttttctagctcccagcaggtgagaaccaacccatactctctgttcctttattctttgcttaaagtggagaaaaagaggctgggtcctaactgaatgakgtctggtcagagttaaggtcagcacagggacatgggaaaagaacacagggcatggttgagagcacgtgggcatgagtctggacagctagagggcaggaga

SEQ ID NO: 408316 - DNA, 201 bp, Homo sapiens
aatgagataccatctcacaccagttagaatggcaatcattaaaaagtcaggaaacaacaggtgctggagaggatgtggagaaataggaacacttttacackgttggtgggactgtaaactagttcaaccattgtggaagtcagtgtggtgattcctcaaggatctagaactagaaataccatttgacccagccatcccatt

SEQ ID NO: 408317 - DNA, 201 bp, Homo sapiens
tggtcctgcctcctacctactaagttgttacaggagatacttttgtagggcatatgaggttttgaagccagggtcattcttttgtctgtatgatgtggatctcaactcttttttttttttttcttttttttgagacagagtcttgctctgtcacccaggctggagtgcagtggtgcaatcttggctcactgcaacccccgg

SEQ ID NO: 408318 - DNA, 201 bp, Homo sapiens
ggagatatcttctccccatctgggtctggggatgactgtcttgtgtagccagtctgcgagtatgagtggagatggaaccagagtcttttgattagtttctytgctgtccaccccaccaccattccagtccctcatccattctgctctgagctgggattttctagcatttggttaggaaaactggtcctcacatcttcagag

SEQ ID NO: 408319 - DNA, 201 bp, Homo sapiens
cctcctacctactaagttgttacaggagatacttttgtagggcatatgaggttttgaagccagggtcattcttttgtctgtatgatgtggatctcaactcttttttttttttttcttttttttgagacagagtcttgctctgtcacccaggctggagtgcagtggtgcaatcttggctcactgcaacccccggctcccagg

SEQ ID NO: 408320 - DNA, 201 bp, Homo sapiens; identical to SEQ ID NO: 91643

SEQ ID NO: 408321 - DNA, 201 bp, Homo sapiens
ttaaaaaatcttaaactgtaggtttgagaactgctagcatttcctcttttgtgaattgatgctttctttcgcccagaaaaaaagttaaattgcaagtaaacgggatttaaaaattttaaattgcaaagtgcaaccagatgtaagaggcattttccccctctgttctaaactgctttttctgcccttctaggtctacgaggc

SEQ ID NO: 408322 - DNA, 201 bp, Homo sapiens
tcatccatgttaatgtgcatagatagctattagctgttaattttcattgtactgtgatattccatcacatgattatacaaccatttatccatttgctatgrcctgactgtgtctccccaaattcacatgttaaaaacttaatccccaatgtgacagtgttgggagatgggcctgatggaaggtgtttaggtcatgagggct

SEQ ID NO: 408323 - DNA, 201 bp, Homo sapiens
gtctggagtttgagaccagcctggccaacatggtgaaaccctgtttctactaaaaatacaaaaaaattagctggacgtggtggcaggcatggtgacaggcmccgtgtatgctgcacgcctgtaatcctagctagctgggaggctgaggcaggagaattgcttgaactgtggagagggaggtttcggtgagccaagatcgcg

SEQ ID NO: 408324 - DNA, 201 bp, Homo sapiens
aaggacatgagtcatactggattaaggcccattctaatgacttcattttaacttaattgcctttttaaaggccctgtctccaaataatcacaatccaaggmcctcggggttaggatttcagcatatgagttttaggggcagagggggcacaattcagtccgtaacactgtggacttgctggttttgaggcaccctcgtgag

SEQ ID NO: 408325 - DNA, 201 bp, Homo sapiens
gtgtatgctgcacgcctgtaatcctagctagctgggaggctgaggcaggagaattgcttgaactgtggagagggaggtttcggtgagccaagatcgcgccmctgcactccagcctggacaacagagggagagcctgtctcaaaaaaaaaaaaaaaaaaaaaaaaaaaaggaagtctggaagtgtgttgtttaatctccaga

SEQ ID NO: 408326 - DNA, 201 bp, Homo sapiens
catctcccaacctcgtgatctgcctgcctcagcctcccaaagtgctgagattacaggcgtgagccaccacacctggccaagttgtcgctattattgccacrcacagatatttatgtcattgaatttcccagtctcttttattgcttctagattttgagtcatagttcaaaaggccttcctcactccaaaattatgaaggaa

SEQ ID NO: 408327 - DNA, 201 bp, Homo sapiens
aagggtggggctgtaaggctgtccttggcttctgctctgagcagaacatcaggccatagctatgtcttctgtccccaccaagcccctggtgacagcatcaragagggcagcctctaccctggtgcatccccgttcacagcctctgccccaggcacaaggaaaagtccccagtgtctgggcaggcctgagcagggagggtct

SEQ ID NO: 408328 - DNA, 201 bp, Homo sapiens
cctctgaggaatggctcaccacagtagaacctctgtgtccttttcaggtgcttgcagatgtgtttgatgccccggtgtatgttatagacactgccaactcsgcctgtgtgggttctgcataccgagcttttcatggtaggttgatggagggagacagctatctctggaagtggccaggacatggggtgggctgaggagggt

SEQ ID NO: 408329 - DNA, 201 bp, Homo sapiens
catttgctaaacatacttcctaaatcttctgccttgtctttggtgaaatggctaaaaagtacagggacagcctggggagctgtggctctccactacggacytcccccagctcatcctgactctattatcaccagggtagcatgaccaagcatactcctcttaaggcagtcgaggtggaatggaaggggtcagaagacatat

SEQ ID NO: 408330 - DNA, 201 bp, Homo sapiens
tcttctcttcctcctcctctcctctgggtagccctgaagccactcctggaggggcccttggatctctgaaggaaggccaggtgggctacactgaataacamcctaactactacccctcaacctcacccccaccccaggaaaagtaagtctttttctaacgatccaccagattagggttacatttaacagtaactagaaagg

SEQ ID NO: 408331 - DNA, 201 bp, Homo sapiens
tctggacagagccaaggggctggatggaaagcagcaggtcttaaaaacaactatttgttttaaaatacataacgaatggatgtctttttatcacaaaagaktcatgcaaaacagaaatatggaataagaagcaaatgcccccttcatatgcctcccagactcctttccagactgtgacttccttcctgtgagtttctgtgt

SEQ ID NO: 408332 - DNA, 201 bp, Homo sapiens
gtggactttaccctgtgaccgcccttcgttgacaccagcttgcctggtctgtgcacccaggactgctggccagaggagcagtgtgctgctgccaacgcccygcagacaggcaagcaaatcaaaatttgccttcaaagagggcatggggtgaccgggggcaccttttcctttaaagtacttgggaaatatacacagttgcag

SEQ ID NO: 408333 - DNA, 201 bp, Homo sapiens
gtggcccagtgcccattaatagtagacagaaaaaatgcattgtggtgcatttgtacaacaggatactacacacaaatgaaaatgaaccagcctcagtgatmcacaatgaaatgggtgaatctcaccaaatgtaacactgagcaaaagaggccaaacatggacatacatatggcaggggtctctgtacatcaaattcaaaag

SEQ ID NO: 408334 - DNA, 201 bp, Homo sapiens
tggtggcccttgctccccagagcctgctgtctaggagggagagggacagtagacgactgaatgagcacgtacatgaatgcagcaggtgctaaggctaggtkgcagaagaacagagtgccgcaaaggaaagcagctggtgggcgggttggagacttaccctgggtggggtgatcaagcctgggcgtctctgagaaggtggcc

SEQ ID NO: 408335 - DNA, 201 bp, Homo sapiens
cagggaagcactgtagcgcacacacacacacacacacacacacacacacacacacacactctgcacacacccttatttgttcactcacccacaggcatacmcatgcagggtcttcagtttagcctaagatgtaagtcagtgtctggatcagtgccttgcacacagtaggtgctcaggtacatgccttatggtcagcgggac

SEQ ID NO: 408336 - DNA, 201 bp, Homo sapiens
attagaatagggataaaaatggcaggtgattgcatagctaaagaaaaagtgcacagagtgctgaaattctagggactactgatgaagcttgaaggaggcasccttggggaaaatagaaataccagcggggctggcacagcacaggccctggcactggacagcatgggactgaattctggttctatcagctttgtgactttg

SEQ ID NO: 408337 - DNA, 201 bp, Homo sapiens
gagctggagaccagcctgggcaaacatgagacctcatctctttaaaaaaaaaaaaaaaaaaaaaaagctggcagccaagatggccaaataggaacagctcsggtctacagctcccagcatgagcaacgcagaagatgggtgatttctgcattttccatctgaggtactgggttcatctcactagggagtgccagacagtgg

SEQ ID NO: 408338 - DNA, 201 bp, Homo sapiens
ggctctggaacatgaattataccacagagctgattttaccttgggacaagggggccaacaggccaccctggggaggttaaatctcctgtgagcggtggccyatgctcagccaaggtcagctttcttgaggaggtagtgctgcaagccattagtagccagtactcacagcagctggggcaggatgcacaatggtccagtgag

SEQ ID NO: 408339 - DNA, 201 bp, Homo sapiens
ttgctcttttttccctagtttcctcaagtggaaacttagaggattgatttaagaccttcttttctaatatatgcatttaatgctataaatttctctgtaarcacaaatgctttttatgggatgccttagcagcatcccatacattttgataagttatagtttcatttttttcgttcaaaatattttttagttctcttgaga

SEQ ID NO: 408340 - DNA, 201 bp, Homo sapiens
ttttgtagcttctttaaaatttctacattacaaaataaatatttcattcttaaaaatgtatgtgcataccatttttaatgactgtataatattctatctgrgtagaccaggcacggtggctcatacctataatcccagcactttgggaggctgaggcgggaggatcacttgaggccaggagctggagaccagcctgggcaa

SEQ ID NO: 408341 - DNA, 201 bp, Homo sapiens
ctggttctatcagctttgtgactttgtgtctcggtttcctcatctggaacaaggggaatgatgctattcatcttacagggctgttgtgcaaattagatgarttaatacttttaaagcacttaaaaaatagtgcctggtcccacaggtaatgggaaaaacatttacccatcacagcggccccacccatttgcagtggacact

SEQ ID NO: 408342 - DNA, 201 bp, Homo sapiens
gattggtctcctctgggacctctctccttggcttgcaggtgaccactctcttgctgtgtcttcacatggtggtcactcggtgcaggagtgcttggtgtctstgtcatctgtatcctaatcttcttataaggacatgagtcatactggattaaggcccattctaatgacttcattttaacttaattgcctttttaaaggccc

SEQ ID NO: 408343 - DNA, 201 bp, Homo sapiens
ctcggtttcctcatctggaacaaggggaatgatgctattcatcttacagggctgttgtgcaaattagatgagttaatacttttaaagcacttaaaaaatartgcctggtcccacaggtaatgggaaaaacatttacccatcacagcggccccacccatttgcagtggacactggctgtgaatgccctggggtgttctactt

SEQ ID NO: 408344 - DNA, 201 bp, Homo sapiens
tcaagggaggcaggcctctggccagtccttgggggaacgtcctgtgggactctggatgactcgagttgccttgctggacctcagttttcccatctgtccargaaaggagttatactcccaagcttggagattgcttcagtgggacattaatgtctctggaccacaatcatggcctgtgagaatagcccatggccttgcctg

SEQ ID NO: 408345 - DNA, 201 bp, Homo sapiens
ctggaacaaggggaatgatgctattcatcttacagggctgttgtgcaaattagatgagttaatacttttaaagcacttaaaaaatagtgcctggtcccacmggtaatgggaaaaacatttacccatcacagcggccccacccatttgcagtggacactggctgtgaatgccctggggtgttctacttggccagccctgttc

SEQ ID NO: 408346 - DNA, 201 bp, Homo sapiens
aacaaggggaatgatgctattcatcttacagggctgttgtgcaaattagatgagttaatacttttaaagcacttaaaaaatagtgcctggtcccacaggtwatgggaaaaacatttacccatcacagcggccccacccatttgcagtggacactggctgtgaatgccctggggtgttctacttggccagccctgttctcca

SEQ ID NO: 408347 - DNA, 201 bp, Homo sapiens
aatacttttaaagcacttaaaaaatagtgcctggtcccacaggtaatgggaaaaacatttacccatcacagcggccccacccatttgcagtggacactggytgtgaatgccctggggtgttctacttggccagccctgttctccattgtcctgtggggacagtggagtagagagagagagaaaaagatctgggtgctgccc

SEQ ID NO: 408348 - DNA, 201 bp, Homo sapiens
acagaggttggttaaatgttcctgtttgattgaaagtcacagttgaattcttttcataatatgttagaatagatacatcttacgtgcagtgactgaaaacrttgataagcagacattaacaaatgatatatttgatttgcttttttctcattgtcaggacatttccaaagaggagggaaagaatggaatgtgggaaagaga

SEQ ID NO: 408349 - DNA, 201 bp, Homo sapiens
cgtggcctgaagggtgggtggctgtgctgggcaggcgggatttacctcaacagagcacctttgctttgtccccgtccctcagggagccatttcttcctacwacgtccagcgctacggatttcctccaggatgcaaagtggtggccttcactggggacaacccaggtgagtatctcggggagtttcactctccagtgagcct

SEQ ID NO: 408350 - DNA, 201 bp, Homo sapiens
cctagggtgtgggtgggggttggaggtgggggctctgcgcctgcctggagagccctgtggtttgctttgtggttcccatgtggccgccagctaaccagaakctcccctcccattctcagcgtcgctggcaggcatgagactggaggaaggtgacattgcggtaaggcgacttcccacacccataggctctttctgtttcca

SEQ ID NO: 408351 - DNA, 201 bp, Homo sapiens
ataggccatggtatagagtttgtctttattctaaaagctatggtcagccactaagggccataaggggtaggggtatgggtgaggtatgaatgacaggttgyatttttgttttgaaaatatctctctgggggcattgggagaacagattcggagcattgctggaatggacgtggggaactattaaagaggtttttgctggtc

SEQ ID NO: 408352 - DNA, 201 bp, Homo sapiens
cacgaggtcaggagatcgagaccatcctggctaatgcagtgaaaccccgtctctactaaaaatacaaaaatttagccaggcttggtgccgggcgcctgtartcccagctgctcgggaggctgaggcaggagaatggggtgaacctgggaggcagagtttgtagtgagccgagataatgccactgcactccagcctgggtga

SEQ ID NO: 408353 - DNA, 201 bp, Homo sapiens
gatcgagaccatcctggctaatgcagtgaaaccccgtctctactaaaaatacaaaaatttagccaggcttggtgccgggcgcctgtagtcccagctgctcrggaggctgaggcaggagaatggggtgaacctgggaggcagagtttgtagtgagccgagataatgccactgcactccagcctgggtgacagagcaagactc

SEQ ID NO: 408354 - DNA, 201 bp, Homo sapiens
ggctaatgcagtgaaaccccgtctctactaaaaatacaaaaatttagccaggcttggtgccgggcgcctgtagtcccagctgctcgggaggctgaggcagragaatggggtgaacctgggaggcagagtttgtagtgagccgagataatgccactgcactccagcctgggtgacagagcaagactctgtctcaaaaaaaaa

SEQ ID NO: 408355 - DNA, 201 bp, Homo sapiens
tttcatttctattgggtatattacctaaaagtggaattgcggggtcacatggtaactctgtgttcaacattttgaagaattgccaaactgttttccaaagkggctgtactattttccattcccaccagtggtagatggtgcctctagtttctctacatcctttttttttttttgagatggagtcttgctctgtcacccagg

SEQ ID NO: 408356 - DNA, 201 bp, Homo sapiens
ttcaggtgctctagaacaatttaaatagtattagaaatatttgctatttaaaggtttggtcccagcactttgggaggccgaggcgggtggatcatgaggtyaggagatcgagaccatcctggctaacaaggtgaaaccccgtctctactaaaaatacaaaaaattagctgggcgcggtggcgggcgcctgtagtcccagct

SEQ ID NO: 408357 - DNA, 201 bp, Homo sapiens
gaccatcctggctaacaaggtgaaaccccgtctctactaaaaatacaaaaaattagctgggcgcggtggcgggcgcctgtagtcccagctactcgggaggytgaggcaggagaatggcgtgaacccgggaagcggagcttgcagtgagccgagattgcgccactgcagtccgcagaccgacctgggcgacagagcaagact

SEQ ID NO: 408358 - DNA, 201 bp, Homo sapiens
tctcccaagtagctgggattacaggtgccctccaccatgcctggctaatttttgtatttttgtagagatggggtttcaccatattggccaggttggtcttkaactcccgacttcaggtgatctgcctgccttggcctcccaaagcactgggattataggtatgagccaccgtgcccagctgaaatgccagttttaagttgt

SEQ ID NO: 408359 - DNA, 201 bp, Homo sapiens
aacatctgcagtcaggccctgtggcctcccttgtaccatgaaatatacaaacatagactgggcatggtggctcatgcctgtaatcccagcactttgggagrccgaggcaggtggatcacctgaggtcaggagttcaagaccagcctggccaacatggtgaaaccttgtctctactaaaaatacaaaaaattagccgggcgt

SEQ ID NO: 408360 - DNA, 201 bp, Homo sapiens
ttgtaccatgaaatatacaaacatagactgggcatggtggctcatgcctgtaatcccagcactttgggagaccgaggcaggtggatcacctgaggtcaggrgttcaagaccagcctggccaacatggtgaaaccttgtctctactaaaaatacaaaaaattagccgggcgtggtggcccatgcttgtaatcccagctactc

SEQ ID NO: 408361 - DNA, 201 bp, Homo sapiens
ttgcttactggtgtcctgttacctttttttttttaatgctatatccagaatttggagcttataaagcaagcacaagttaggggttggtttgttctctctaycttaaatctcaagatcagcagtttttgaaatgacctcatgctcgtggtttccaaacctgcactggacttctctggcgatttgtgaacaggagggacatgc

SEQ ID NO: 408362 - DNA, 201 bp, Homo sapiens
ggcttttagttggatgtgaaattcagagcaggctttgtttgccttatgcgagaacacatgcctccaagaaggagcctgtgcagacaagcagcttgaggatygggaaagaactgactctgaaaaggcattttcatttgtcacgtaggtgtcacatgtgggggaaccactcaagacccatgtttttcgtcatccctctttttg

SEQ ID NO: 408363 - DNA, 201 bp, Homo sapiens
gctcctaagccctaagaaccattggagaatgtggctagttaatctagccctccctgcctcattgtgcccatggtagaatgtgcagaaacccaagctccctstctctacctggggctcctctgcgtcagcctcctgtgtaaacagcccaagacaagggcgtttccggcacctcccagggacattcaggggcctgaatctgag

SEQ ID NO: 408364 - DNA, 201 bp, Homo sapiens
tggagaatgtggctagttaatctagccctccctgcctcattgtgcccatggtagaatgtgcagaaacccaagctccctctctctacctggggctcctctgygtcagcctcctgtgtaaacagcccaagacaagggcgtttccggcacctcccagggacattcaggggcctgaatctgaggaagagcctccgatacctaagt

SEQ ID NO: 408365 - DNA, 201 bp, Homo sapiens
aggctgcaatgagctgtgattgcaccacttcactctagcctgggcgacagagcgagaccatgtctcaaaaaaataaaggaaaatgactcataatcccatcycctctctccaaccactggtatcatttagggacattttctcccagtctcctttatgagcttatttccatacagccatagttttgttcctttgtaccttata

SEQ ID NO: 408366 - DNA, 201 bp, Homo sapiens
ggaggtctctaggttgaactgctcctagggtgtggggcctcatctggtgacgttagtaccccctggaccagtgtagaagctgaggaaaattctacacttcmttttttaaaatgcctttcaggtaaaggttgttgctgttgatgcagagttgaatgtcttctatgaggaaagtgtgcattttgacagagatcttccagaatt

SEQ ID NO: 408367 - DNA, 201 bp, Homo sapiens
tatacaagaaccaaagtttgtcagaagtcatctttgtggtgctgcgtatgatggccaggttacttttcctgcatttgggcactgagggtgttcttgttttytttgtttgtttgttttctttgttttgttttgttttgtttttctggagacagggtttcactcctgttgcccagactggagtgcagtggtgtgatcttggct

SEQ ID NO: 408368 - DNA, 201 bp, Homo sapiens
gggacagaatctttgttgtccaggttggtctcaaattcctgagctcaagcaatcctcctcctgccttggcctactgaagtgctaggattagtaggcataakccactatgctcagtcagtttattgtgaaaaatatcatgtatacagtagagtatatgtatcttacagcaagttataaaacatattaatcaaacatctgatg

SEQ ID NO: 408369 - DNA, 201 bp, Homo sapiens
tctgtttccacactcacacccacactctgataagtagcagaggtgctgctgagacccagatcccagggtcccagggtctgggtcccagcaggatctctgckacttatcagagtgtctgccggttccaaaagacagtggagggaggggatgggggcgcacatctttctcagaaagtcattgttctttgctagatgggcagga

SEQ ID NO: 408370 - DNA, 201 bp, Homo sapiens
ggttaatttcttcttaggcctctttccttagcttgtagatggtcaccttcttcctgtgtctccacatggtctcctcctgtgtgtccctgtgtcttcatttkctcttctcataaggacatcagtcatactggattagggcccacccctaatgactttatttttaacttaattacctctttaaagaggtaatatctgtcttta

SEQ ID NO: 408371 - DNA, 201 bp, Homo sapiens
cttcaaatacactcacattctgagatactggggtttaggacttccacatataaatttagggtagacacacttcagcccataataatgttttaatatgtagkatagcaattatcccctccttgcttttctttttaaaatattgtctgagctgtttataggtcttcatttttccacaaatattttataagaaattggtctagt

SEQ ID NO: 408372 - DNA, 201 bp, Homo sapiens
accttgtctctactaaaaatacaaaaaattagccgggcgtggtggcccatgcttgtaatcccagctactcaggaggctgaggtaggagaatcacttgaacytgggaggtggaggttgcagtgagctgagaccgcaccattgcactccagcctggataacaagagtgaaactccatctcaaaaaaaaagaaaaaaaagaaat

SEQ ID NO: 408373 - DNA, 201 bp, Homo sapiens
gccgggcgtggtggcccatgcttgtaatcccagctactcaggaggctgaggtaggagaatcacttgaacctgggaggtggaggttgcagtgagctgagacygcaccattgcactccagcctggataacaagagtgaaactccatctcaaaaaaaaagaaaaaaaagaaatacaaacatagcccttagggtcttagtgctca

SEQ ID NO: 408374 - DNA, 201 bp, Homo sapiens
tcttgaactcctgagctcaagtgatcctcctgccttggcctccaaaagtgctgggattacaggtgtgaggtgatggcatgcacccgtagttccagccactygggaggctgagatggaaggatcacttgggcctgggaggttgaggctgcagtgagctgagattgcaccactccatttcagtctgggaaccagagcgagacc

SEQ ID NO: 408375 - DNA, 201 bp, Homo sapiens
tgaggtgatggcatgcacccgtagttccagccactcgggaggctgagatggaaggatcacttgggcctgggaggttgaggctgcagtgagctgagattgcrccactccatttcagtctgggaaccagagcgagaccctgtctcgaagaaaaaaaaatggagaagtaaaatttgaggattggtggtttatgattccatttat

SEQ ID NO: 408376 - DNA, 201 bp, Homo sapiens
actcacttctctatcctgtgggtgcagagccattgtttactgcctgagtatttgattactaaggacattttaaggattcaaaggccaagatcacattgttwagtagatatcaaacagatttaatgcttatttttaaaatatttaattattagaaacgaggtctcactgtgttgcccaggctggactcctgggctccagagc

SEQ ID NO: 408377 - DNA, 201 bp, Homo sapiens
tagtcccagctacttgggaggctgaggcaggagaatcgcttgaacccgggaggttgaggttgcagcgagctgagatctcgccactgcactccagcttgggyaacagagtgagacttcatctcaaaaaaaaaaaaaaaaaagtatatatatcaggccgggcgtggtgtctcatgtctgtaatcctagaactttaggaaaccg

SEQ ID NO: 408378 - DNA, 201 bp, Homo sapiens
accagtaccatcatgctcagttgtggtaggtctcctttctggtgatgtggctcatttaagagctggcagctaccagggaagcactgtagcgcacacacacrcacacacacacacacacacacacacacacactctgcacacacccttatttgttcactcacccacaggcatacacatgcagggtcttcagtttagcctaag

SEQ ID NO: 408379 - DNA, 201 bp, Homo sapiens
gattgtgattaggccagcttgggttacatgacctcgctggagtagaagttttggggatagggccaactctacttgggccacctgaaataacaatatgtggrtggggaaaataccccgatccctcacctggtgccttggtcagaacagtcaccgtgctgtgtgaagagcaagggttattcactcagggttgtccagtcctga

SEQ ID NO: 408380 - DNA, 201 bp, Homo sapiens
cagagaaagggcagacagaaaacagccaagccaccgggactggtaatccacacacggcttttagttggatgtgaaattcagagcaggctttgtttgccttrtgcgagaacacatgcctccaagaaggagcctgtgcagacaagcagcttgaggattgggaaagaactgactctgaaaaggcattttcatttgtcacgtagg

SEQ ID NO: 408381 - DNA, 201 bp, Homo sapiens
cagtaccatcatgctcagttgtggtaggtctcctttctggtgatgtggctcatttaagagctggcagctaccagggaagcactgtagcgcacacacacacrcacacacacacacacacacacacacacactctgcacacacccttatttgttcactcacccacaggcatacacatgcagggtcttcagtttagcctaagat

SEQ ID NO: 408382 - DNA, 201 bp, Homo sapiens
tatttgtaacccggggattacaacaggacttacgttttgggtaggtttgaagctgaaagaagtcagtgcatgtaaggcacttagtgtagtgcctggcaatrttaaaaaaaaaaaaaaaaggaaaaaaaataatagtgtctctgttccacaggttcaaccttgtccccaggggtgattgtgattaggccagcttgggttaca

SEQ ID NO: 408383 - DNA, 201 bp, Homo sapiens
cgttgggagtctcagccacagaagcacttttgttttcttttcagagacagagtctcaccttgtcacccaagttggagtgcagtggcatgatcatagctackgcagccaccaactcctgggctcaagtgatcctcctgcctcagcttcctgagtagctgggaccataggcttgctccaccatgcacagctaatttttttttt

SEQ ID NO: 408384 - DNA, 201 bp, Homo sapiens
tagctgggaccataggcttgctccaccatgcacagctaattttttttttttttgagacagagtctcgcttttgtcacccaggctggagtgcagtggcgcartctcggctcactgcaagctccgcctcctgggttcacgccattctcctgcctcagcctcccgagtagctgggactataggtgcccgccaccacgcctggct

SEQ ID NO: 408385 - DNA, 201 bp, Homo sapiens
ctcctgggttcacgccattctcctgcctcagcctcccgagtagctgggactataggtgcccgccaccacgcctggctaatttttttatatttttagtagaracggggtttcaccgtgttagccaggatggtctcgatctcctgacctcgtgatctgcccgcctcggccttccaaagtgctgggattacaggcgtgagccac

SEQ ID NO: 408386 - DNA, 201 bp, Homo sapiens
cttgggtttcccaacagcaacacggaagtatatactggaaggctggagcccagcaggcactgacaagcttatcaccagacctccggctacaccagcagctkcaggtaactgtggctacgtggtgtgagtgtgagaaacttctgcagagtcccaagtcctgtgggtcctgaagcctgctcatctcagtgttgcagctgtgct

SEQ ID NO: 408387 - DNA, 201 bp, Homo sapiens
tgatgagctctgtgactaagaagtggcaggggcaggtgtggagcccagttctttggcatgtggtctggggtctttctgtgtcttcaggaggctgtgacacyggtgtgtggtcatgtgaccatgtgcttgggtttcccaacagcaacacggaagtatatactggaaggctggagcccagcaggcactgacaagcttatcacc

SEQ ID NO: 408388 - DNA, 201 bp, Homo sapiens
cttgaaggaggcagccttggggaaaatagaaataccagcggggctggcacagcacaggccctggcactggacagcatgggactgaattctggttctatcasctttgtgactttgtgtctcggtttcctcatctggaacaaggggaatgatgctattcatcttacagggctgttgtgcaaattagatgagttaatactttta

SEQ ID NO: 408389 - DNA, 201 bp, Homo sapiens
taggacttccacatataaatttagggtagacacacttcagcccataataatgttttaatatgtagtatagcaattatcccctccttgcttttctttttaaratattgtctgagctgtttataggtcttcatttttccacaaatattttataagaaattggtctagttccttaaaagagtccagctggaatttttatttagg

SEQ ID NO: 408390 - DNA, 201 bp, Homo sapiens
gacttccacatataaatttagggtagacacacttcagcccataataatgttttaatatgtagtatagcaattatcccctccttgcttttctttttaaaatmttgtctgagctgtttataggtcttcatttttccacaaatattttataagaaattggtctagttccttaaaagagtccagctggaatttttatttaggttg

SEQ ID NO: 408391 - DNA, 201 bp, Homo sapiens
ttataacacagttgccagactgttactgtccttctggtccttcattatgccagaaacatatgaccaaaagtagaatcaacctgcagatgtctgacactcaractgtcacctgtggggctgtcagagcctgttatggagacattgtgcatttttgggtgtagcctggggctgccttaactgttagagtaactgtattagctg

SEQ ID NO: 408392 - DNA, 201 bp, Homo sapiens
ctctccactacggacctcccccagctcatcctgactctattatcaccagggtagcatgaccaagcatactcctcttaaggcagtcgaggtggaatggaagrggtcagaagacatatgagggagagagcctggaaagtgcatcccacaatgtctgtgttccctctgaggaatggctcaccacagtagaacctctgtgtcctt

SEQ ID NO: 408393 - DNA, 201 bp, Homo sapiens
ggtccatttttgggcttttgtttttgttccatggtttggtagatctgttcataagccagtaacacattgtttcaattatcccagctctgtaatatgtttgyttgtttgtttatttacttttgagttggagtctcgctctgtcgcccaggctggagtgcagtggcatgatctcggctcactgcaacctctgcctcctgggtt

SEQ ID NO: 408394 - DNA, 201 bp, Homo sapiens
gtggactttacagctcagcaaaagagggatcttaaaccaataatcactgaaatatatgggcacaagttgggaaaagtgctctgaggaaaagcagatggtgytgagcgctaaggagggcctcctgagcaagtgatggtcttaggtgcatcttagctgaggagaagggaacaggcatgtgaagagtggaaagaacattccata

SEQ ID NO: 408395 - DNA, 201 bp, Homo sapiens
accaataatcactgaaatatatgggcacaagttgggaaaagtgctctgaggaaaagcagatggtgctgagcgctaaggagggcctcctgagcaagtgatgktcttaggtgcatcttagctgaggagaagggaacaggcatgtgaagagtggaaagaacattccatacagtgaaaaggctctgaggcagaatgagtggagag

SEQ ID NO: 408396 - DNA, 201 bp, Homo sapiens
caataatcactgaaatatatgggcacaagttgggaaaagtgctctgaggaaaagcagatggtgctgagcgctaaggagggcctcctgagcaagtgatggtyttaggtgcatcttagctgaggagaagggaacaggcatgtgaagagtggaaagaacattccatacagtgaaaaggctctgaggcagaatgagtggagagaa

SEQ ID NO: 408397 - DNA, 201 bp, Homo sapiens
atctttgttttgtttgtagttgtattagttatctattgccatgtaacaaattatctcaaaatttagcagcttaaaacagtaataaatgtttattctcttayacagtttctttgggtcaagaatttggtttcagcatggttgggtgattctgattgaggatatctcctgaggttgcagtcacaatgtcatctggggctgcag

SEQ ID NO: 408398 - DNA, 201 bp, Homo sapiens
catattggccaggttggtctttaactcccgacttcaggtgatctgcctgccttggcctcccaaagcactgggattataggtatgagccaccgtgcccagcygaaatgccagttttaagttgttaaatacatggcagaatgtctggttacagtttttatctgttttgtgaaggcaacattttttggtgagcttttattgtct

SEQ ID NO: 408399 - DNA, 201 bp, Homo sapiens
tattgttttggttcttgttaaacacaacagagattccctgggtgatcttgtccacttctctctcccgaatcccaggcctggacacccatctccctcctagstaatccccgacccccatggctggatatcccacagatgcctcaggcttagcatgtcccagactgagttctgtctcccttcagacctcctcctttctgggtt

SEQ ID NO: 408400 - DNA, 201 bp, Homo sapiens
aataaatgaatttcaggtaatattacaagcaatgtctttaaatgcagttttacaaaaggcatcaaaatccagaccaataattagttcttggaccttttctrtaagttgtagggtagacagggcagagttcctccccattttcttgaagtggaaaccaagtcccaggagggtgatgagctctgtgactaagaagtggcaggg

SEQ ID NO: 408401 - DNA, 201 bp, Homo sapiens
gaatgaatgaatgaatgaatgaatggggtgagtgaataaataaatgaatttcaggtaatattacaagcaatgtctttaaatgcagttttacaaaaggcatyaaaatccagaccaataattagttcttggaccttttctgtaagttgtagggtagacagggcagagttcctccccattttcttgaagtggaaaccaagtccc

SEQ ID NO: 408402 - DNA, 201 bp, Homo sapiens
gttaggtgcctctgttcccacgaccctgtcactgcagctccatagttgtacatttgtgtccttttccctgactcaactccagtagcctgaagaatagggaygaaagtatcctattcatctgtcgcaagcctggcatgatctatgtgcttaataaatgttcattgaatgaatgaatgaatgaatgaatggggtgagtgaata

SEQ ID NO: 408403 - DNA, 201 bp, Homo sapiens
cacaactcaagtgtcatccctgcctcctccaccttcccaccccacatccaagggtcctcacgtcccactgatttgtctgtgactcttgactctaccatctyttctccagcgctatctgcttgtcattcttctccaggtctctaccgcagcctccttgcctccagcctaccttccccgtgactcccacaagcctttaataca

SEQ ID NO: 408404 - DNA, 201 bp, Homo sapiens
aggtctttgagcagcagatttccaagctaactgtagtgtttgagttgatgaggaatatttggaggaggtgtggtgccgtgtgtttccaagggcccctcttrtctctggttctctggttctagaacaacacaagcatatataccttccatgaagaaagagctccaggtacaagttgtggcaagagaattatctgctctgtgc

SEQ ID NO: 408405 - DNA, 201 bp, Homo sapiens
atcttgtccacttctctctcccgaatcccaggcctggacacccatctccctcctagctaatccccgacccccatggctggatatcccacagatgcctcagrcttagcatgtcccagactgagttctgtctcccttcagacctcctcctttctgggttctctttctcagggaattctccccatccacccagggcacaactca

SEQ ID NO: 408406 - DNA, 201 bp, Homo sapiens
cccaagatcacacagtgctgggagtgggagtcaggacctgagtctatctcatccagtcccttggctgtgctgggatcacttttctccatgctggattactrtattttcaaatcctcactaggatgtaactaatttttctgaagatgcttcttcctccatgacctaacaggaatttattgttttggttcttgttaaacacaa

SEQ ID NO: 408407 - DNA, 201 bp, Homo sapiens
ttattatcgttgatatttacatgaggcacggagaggtgatgtcacttacccaagatcacacagtgctgggagtgggagtcaggacctgagtctatctcatycagtcccttggctgtgctgggatcacttttctccatgctggattactatattttcaaatcctcactaggatgtaactaatttttctgaagatgcttcttc

SEQ ID NO: 408408 - DNA, 201 bp, Homo sapiens
catgaagcttttgaaatttggtgtgcatttaacacttatagttctgggcatgcttcaagtatgcaaaggtatacatggcttgcagctactgtattggataktgcagctctggatgtgctccacatggtgacaggacagctatagctgccccaaacatcatgtcttcacagctgtattcgaaggcagggatcagaaggtgac

SEQ ID NO: 408409 - DNA, 201 bp, Homo sapiens
aatggagaagtaaaatttgaggattggtggtttatgattccatttatttaaaatatttttagcatagttgacctttttatttgattgatgcctacttgttwaattaatgtactctagtgcttacaaatcccaagtcatgagtttcttcatcatctgcccagagtactctgctgtaatggcaggcacttgcgtttcaattct

SEQ ID NO: 408410 - DNA, 201 bp, Homo sapiens
aggatgggctgacggtcacttctccagtactaatgtgggtccaggtaagcgcagggattcctgttctccttctatccccaggctgtctcactggcagactyggtgatttgctaggaagtccaaaggtggcagccaatgagagcatctgttgacaccaggtcctcatgggaaagtggagttggcatgactcctgggatcagg

SEQ ID NO: 408411 - DNA, 201 bp, Homo sapiens
tcaacagttcccacttggggttggggaaggttctccttcatctggacatttccagagtcatccaccatagggtttctcctggctttgcaatggtctgcctkccctgaggctctggtctacattctctgttgttcttgcaggactcagggcggtgttcatgtgcacaaggatgggctgacggtcacttctccagtactaatg

SEQ ID NO: 408412 - DNA, 201 bp, Homo sapiens
tctatccactccctccagcctctggctcctggacacagggagtctgggcctgatgctttgctctcatgggagctctctcctttgctcttcacttccctgtkgcagtgaagtcagatcactaatatagagggttgaaaatgcaaataaaagaaggcaaaagttggctgccttactttgttagtttttgagacaaggtctcac

SEQ ID NO: 408413 - DNA, 201 bp, Homo sapiens
ctggaataggggcctggaacaggtggccatcatctctatccactccctccagcctctggctcctggacacagggagtctgggcctgatgctttgctctcaygggagctctctcctttgctcttcacttccctgtggcagtgaagtcagatcactaatatagagggttgaaaatgcaaataaaagaaggcaaaagttggctg

SEQ ID NO: 408414 - DNA, 201 bp, Homo sapiens
gtggagggatgtttggaccccttcagggaagagacttcacagctcaaatcagcggccctgctaacagagacttcaccccgtgacccctatgaccttctcckcttagggcctcctgagcgctcagctcccctgctcctgcctccaccctagggtgtgggtgggggttggaggtgggggctctgcgcctgcctggagagccct

SEQ ID NO: 408415 - DNA, 201 bp, Homo sapiens
ggtgatttctgatctgatgcagcctccaggaccaaacttgatcctagctctgccagcccctgctccggctgcaccccactgcctgcccaaggtttgatggrcacagatagagatggcagccacagccagggctgaaagaagccctcccagcaaaggctgggggtggtggagtcaggcaaaagtgagagagtcttctctgcc

SEQ ID NO: 408416 - DNA, 201 bp, Homo sapiens
gatgtcgagggcatctcataggccaaggccttcacctggggaggtgagcagtgggtgagaaccaggcttgggggccgggccaaggtgatttctgatctgaygcagcctccaggaccaaacttgatcctagctctgccagcccctgctccggctgcaccccactgcctgcccaaggtttgatggacacagatagagatggca

SEQ ID NO: 408417 - DNA, 201 bp, Homo sapiens
tgatgatgtcgagggcatctcataggccaaggccttcacctggggaggtgagcagtgggtgagaaccaggcttgggggccgggccaaggtgatttctgatytgatgcagcctccaggaccaaacttgatcctagctctgccagcccctgctccggctgcaccccactgcctgcccaaggtttgatggacacagatagagat

SEQ ID NO: 408418 - DNA, 201 bp, Homo sapiens
gtcttccttcttagctggaaatgccagttttgttttgtgtgtgtgtgtgtgtgtgtgtgtgtgtgtgtgtgtgtgtgtgtgtgtgtgtttttgagacagarccttgctctgttgcgcccaggctggagtgcagtggcaagatctcagctcattgcatcctccgcctcctgggttcaaacaattctcccaccttagtctccc

SEQ ID NO: 408419 - DNA, 201 bp, Homo sapiens
ttgaacctgggaggtggaggttgcagtgagctgagaccgcaccattgcactccagcctggataacaagagtgaaactccatctcaaaaaaaaagaaaaaaragaaatacaaacatagcccttagggtcttagtgctcagcctctaagatcccttagctccctaatcacctagaatggcaagttatggcctggccagtcaga

SEQ ID NO: 408420 - DNA, 201 bp, Homo sapiens
cttagctccctaatcacctagaatggcaagttatggcctggccagtcagactcatatcaatgccaagccaggcctgcctgctgaggatcaacaggaaaggmgaatgcctgtagcaggatctggtgacctagggggccacaggagcagggatgtggacagcatagacaggcgtggtagctccaggggctacctcatcatatg

SEQ ID NO: 408421 - DNA, 201 bp, Homo sapiens
tcaaggcctctgccttccaatgtaaccatcgctgattctccaaccagtcctcttataacacagttgccagactgttactgtccttctggtccttcattatrccagaaacatatgaccaaaagtagaatcaacctgcagatgtctgacactcagactgtcacctgtggggctgtcagagcctgttatggagacattgtgcat

SEQ ID NO: 408422 - DNA, 201 bp, Homo sapiens
gggggtgcgcttcgaaggaaagcgggctgcgtgggggcaccgtcgattgcacaggacgcggtcccggctcgcgtagccccgcaggcggcgccagagcgcargcccgcctcgtgactccggtccacagtccggccgggcggagctaggggcgggcccctgcgtctctgggcgctggagcgcggcgactatcacgccgcgtgg

SEQ ID NO: 408423 - DNA, 201 bp, Homo sapiens
cagtgagatccttcgtggtgtttttggttaacgtcttcacttgcaacatgcactaatgtgaagtgacctttcccttctaggtcttgcaggtggaacagatrtgcccttttcagaggttgtgaagttagctccaaatcccagactagctgctaccccaagcccgggagcttctcaggtgagagaccatcagaatttgtttgt

SEQ ID NO: 408424 - DNA, 201 bp, Homo sapiens
gtcagtgtcaggaggtcccagtgatgatgtcgagggcatctcataggccaaggccttcacctggggaggtgagcagtgggtgagaaccaggcttgggggcmgggccaaggtgatttctgatctgatgcagcctccaggaccaaacttgatcctagctctgccagcccctgctccggctgcaccccactgcctgcccaaggt

SEQ ID NO: 408425 - DNA, 201 bp, Homo sapiens
taactggtatgatttcttttttattggtgtaaccctgattcatacactggagaattggggtaaaggatggattttatccagataaactggctagaatgtamttcagagggggctgagccagaccaaggggcagagtgggagggtcgggggttagagacaatggtcagtgtcaggaggtcccagtgatgatgtcgagggcat

SEQ ID NO: 408426 - DNA, 201 bp, Homo sapiens
ttgttaaaaataactggtatgatttcttttttattggtgtaaccctgattcatacactggagaattggggtaaaggatggattttatccagataaactggstagaatgtacttcagagggggctgagccagaccaaggggcagagtgggagggtcgggggttagagacaatggtcagtgtcaggaggtcccagtgatgatg

SEQ ID NO: 408427 - DNA, 201 bp, Homo sapiens
tccctgaaactggaggccagctaagtgtgtgtcttccaaaagcttttttcagtcctccaatacctatctaaccaattccctatattacattctttttgttmaaaataactggtatgatttcttttttattggtgtaaccctgattcatacactggagaattggggtaaaggatggattttatccagataaactggctagaa

SEQ ID NO: 408428 - DNA, 201 bp, Homo sapiens
tgcagggtccccgagtccctgaaactggaggccagctaagtgtgtgtcttccaaaagcttttttcagtcctccaatacctatctaaccaattccctatatwacattctttttgttaaaaataactggtatgatttcttttttattggtgtaaccctgattcatacactggagaattggggtaaaggatggattttatccag

SEQ ID NO: 408429 - DNA, 201 bp, Homo sapiens
attgcactccagcctggataacaagagtgaaactccatctcaaaaaaaaagaaaaaaaagaaatacaaacatagcccttagggtcttagtgctcagcctcyaagatcccttagctccctaatcacctagaatggcaagttatggcctggccagtcagactcatatcaatgccaagccaggcctgcctgctgaggatcaaca

SEQ ID NO: 408430 - DNA, 201 bp, Homo sapiens
tagacactgccaactcggcctgtgtgggttctgcataccgagcttttcatggtaggttgatggagggagacagctatctctggaagtggccaggacatggrgtgggctgaggagggtggaaaggggagagtgaggtgtacccagtctttggggacattggagtcttggggacttcagcttcatttttctagctcccagcag

SEQ ID NO: 408431 - DNA, 201 bp, Homo sapiens
ctggattagggcccacccctaatgactttatttttaacttaattacctctttaaagaggtaatatctgtctttatcttcaaatacactcacattctgagawactggggtttaggacttccacatataaatttagggtagacacacttcagcccataataatgttttaatatgtagtatagcaattatcccctccttgcttt

SEQ ID NO: 408432 - DNA, 201 bp, Homo sapiens
gtcctccaatacctatctaaccaattccctatattacattctttttgttaaaaataactggtatgatttcttttttattggtgtaaccctgattcatacamtggagaattggggtaaaggatggattttatccagataaactggctagaatgtacttcagagggggctgagccagaccaaggggcagagtgggagggtcgg

SEQ ID NO: 408433 - DNA, 201 bp, Homo sapiens
gcgtgtctgattcagtggttctgtacagtcatggtgggttctgtttttcttcttaggcactggatatcatcttggagaagatgaaggcttcgggcttcgamttctctcaagtcctagccttgtccggggcgggccaggttcgtttgcagcagactctgtctgccatgtgagggtgactgtcctgggcaatggtgtgggtgt

SEQ ID NO: 408434 - DNA, 201 bp, Homo sapiens
ctatccccaggctgtctcactggcagactcggtgatttgctaggaagtccaaaggtggcagccaatgagagcatctgttgacaccaggtcctcatgggaargtggagttggcatgactcctgggatcaggctcagcctcagctggtgtcaacactcccaggctcagaggacttacaaaaaacttccaggtactggagctac

SEQ ID NO: 408435 - DNA, 201 bp, Homo sapiens
cagggattcctgttctccttctatccccaggctgtctcactggcagactcggtgatttgctaggaagtccaaaggtggcagccaatgagagcatctgttgwcaccaggtcctcatgggaaagtggagttggcatgactcctgggatcaggctcagcctcagctggtgtcaacactcccaggctcagaggacttacaaaaaa

SEQ ID NO: 408436 - DNA, 201 bp, Homo sapiens
ccctctgaggaatggctcaccacagtagaacctctgtgtccttttcaggtgcttgcagatgtgtttgatgccccggtgtatgttatagacactgccaactyggcctgtgtgggttctgcataccgagcttttcatggtaggttgatggagggagacagctatctctggaagtggccaggacatggggtgggctgaggaggg

SEQ ID NO: 408437 - DNA, 201 bp, Homo sapiens
gcgttagtagtgggccttacaccatggcctctcccatatctgttatgtctaagagccagagactggataggaaggacagcctccattcccactcctgcagraatggggagctcttagctcacactccaggaagcagctctgttgccttacagctcacactgtgagtgggatctgtctcacatgcaggtgaattctatggct

SEQ ID NO: 408438 - DNA, 201 bp, Homo sapiens
ctggggcagatctccaagtcagcggatggagcttaagcctgtgcctttgccctccttcccaggactgtttctccatcagcgactgcccggtgtggatggamtccagcaccacagcccagtgccgccagctggaggctgctgtgggtggtgctcaggctctcagctgcctcacggggtcccgtgcctatgaggtaggctgag

SEQ ID NO: 408439 - DNA, 201 bp, Homo sapiens
ttgtaacccggggattacaacaggacttacgttttgggtaggtttgaagctgaaagaagtcagtgcatgtaaggcacttagtgtagtgcctggcaatattwaaaaaaaaaaaaaaaggaaaaaaaataatagtgtctctgttccacaggttcaaccttgtccccaggggtgattgtgattaggccagcttgggttacatga

SEQ ID NO: 408440 - DNA, 201 bp, Homo sapiens
cacggaagtatatactggaaggctggagcccagcaggcactgacaagcttatcaccagacctccggctacaccagcagcttcaggtaactgtggctacgtkgtgtgagtgtgagaaacttctgcagagtcccaagtcctgtgggtcctgaagcctgctcatctcagtgttgcagctgtgctcacgcgccctcaccagaaga

SEQ ID NO: 408441 - DNA, 201 bp, Homo sapiens
ttgggttcctaagaatttatattccttttccagcgttttacagggaaccaaattgcaaaaatttaccagcagaaccccgaggcctactcacatacagaggytggttaaatgttcctgtttgattgaaagtcacagttgaattcttttcataatatgttagaatagatacatcttacgtgcagtgactgaaaacgttgataa

SEQ ID NO: 408442 - DNA, 201 bp, Homo sapiens
ttcagtcctccaatacctatctaaccaattccctatattacattctttttgttaaaaataactggtatgatttcttttttattggtgtaaccctgattcawacactggagaattggggtaaaggatggattttatccagataaactggctagaatgtacttcagagggggctgagccagaccaaggggcagagtgggaggg

SEQ ID NO: 408443 - DNA, 201 bp, Homo sapiens
gaggatgcggggggtgcagggggtggtctggttgcaagctccggaggcatagtgggtgacctgcctctggggggatcacatgaggtcatggaggtgttgtrgagccagcaacaggcactctggcccctgggtcctgatccaggccacctgctgccctgtgtgttcccaggccaggctgggtgtgcacatggctgtgctcct

SEQ ID NO: 408444 - DNA, 201 bp, Homo sapiens
ctgagtgtctgagcaggctgtgtctgctcactttcctatgtggttaacgcaggagggctaccaggcacatgattggcatagagtcagtattttctttggawatgtataggactgggcatttgtgtccccagctgtggcccttcagccagagcctctgtcacaggaacccaggttcattcctggctccacagttgctgaagc

SEQ ID NO: 408445 - DNA, 201 bp, Homo sapiens
gcacctttttaatcttagaaattaacatgtggtttattatttaatgatttgaggttccagattattctgcagcattagccattaatgtaggctttgggtaraggggtgaaaaccctccctaaattctgtgtgtggaacgaagtttgcctgacagaggacaggaggtgataacattctctccacagttccaaaggcccatga

SEQ ID NO: 408446 - DNA, 201 bp, Homo sapiens
tccggatggaaatgcagcttccctaagccctttctcatagggcttttggtttttgtctcttttgaacttggcagttttatggcccatcagaaactgtagaraatgaatgctctcccgaggagtctgctcatggtattccagctgctcctatctgagatgcacagtctccaccattacttgggccttttgttcaaagtttcc

SEQ ID NO: 408447 - DNA, 201 bp, Homo sapiens
cagctgggccctccactctgccccccttcactcacctgagatgtcacctcctcatttcacctgggcaggtgacaccatcagcatcccagcccacctctgtytgcctccaccttggcccagtggaggaggagttctctccacccatgctctgggttccctgtcctttcccatcctcagggaagccttgggagaaggaggatg

SEQ ID NO: 408448 - DNA, 201 bp, Homo sapiens
agacctttccttgaaaagttagatgagattgagaaatccctgggggctgacctggaaacctaagggacatggagagtggttcctggtcagtgtgttgctgstagttccaggccccctgggaggtctttgagcagcagatttccaagctaactgtagtgtttgagttgatgaggaatatttggaggaggtgtggtgccgtgt

SEQ ID NO: 408449 - DNA, 201 bp, Homo sapiens
gcagcagatttccaagctaactgtagtgtttgagttgatgaggaatatttggaggaggtgtggtgccgtgtgtttccaagggcccctcttatctctggttytctggttctagaacaacacaagcatatataccttccatgaagaaagagctccaggtacaagttgtggcaagagaattatctgctctgtgccagatttgtg

SEQ ID NO: 408450 - DNA, 201 bp, Homo sapiens
tttccaagctaactgtagtgtttgagttgatgaggaatatttggaggaggtgtggtgccgtgtgtttccaagggcccctcttatctctggttctctggttstagaacaacacaagcatatataccttccatgaagaaagagctccaggtacaagttgtggcaagagaattatctgctctgtgccagatttgtgcattttca

SEQ ID NO: 408451 - DNA, 201 bp, Homo sapiens
atgcctgccctggaaggccacatcttctgcaacccggttgactcccagcactacatggcactcctgtggtgagcttgggtgttggttggcaccattccctrggtgaggaggtgtgggcaggtctggcaccatcttgaggaccccaagtcattccactaagctctggaatgactccctccactttcccgggctctgctgggc

SEQ ID NO: 408452 - DNA, 201 bp, Homo sapiens
ttgttcttgcaggactcagggcggtgttcatgtgcacaaggatgggctgacggtcacttctccagtactaatgtgggtccaggtaagcgcagggattcctrttctccttctatccccaggctgtctcactggcagactcggtgatttgctaggaagtccaaaggtggcagccaatgagagcatctgttgacaccaggtcct

SEQ ID NO: 408453 - DNA, 201 bp, Homo sapiens
ttccagagtcatccaccatagggtttctcctggctttgcaatggtctgcctgccctgaggctctggtctacattctctgttgttcttgcaggactcagggyggtgttcatgtgcacaaggatgggctgacggtcacttctccagtactaatgtgggtccaggtaagcgcagggattcctgttctccttctatccccaggct

SEQ ID NO: 408454 - DNA, 201 bp, Homo sapiens
tcttatctagaaggcttctttagaagatgcttctgagaattgccacatctgggccactctgggcaatttgcctgtcttctctttccatctttgcagccctygtgcctgttcaatcaacagttcccacttggggttggggaaggttctccttcatctggacatttccagagtcatccaccatagggtttctcctggctttgc

SEQ ID NO: 408455 - DNA, 201 bp, Homo sapiens
taggaaagagctagtaggttgatctcagtgaccagaaggaagtttagaggactctgagacctttccttgaaaagttagatgagattgagaaatccctgggrgctgacctggaaacctaagggacatggagagtggttcctggtcagtgtgttgctgctagttccaggccccctgggaggtctttgagcagcagatttccaa

SEQ ID NO: 408456 - DNA, 201 bp, Homo sapiens
tttctatgggcttagactttcatttctcttggctggatacttaggaattgaatggctagatcacatggttatctaatagcatcttggtgtggattctgagmctggttttctctttcctaacacatagttaaaagggttggattttatcagatcagctctttgcactagagtcttctaggggtgaggtgggtggggagaggg

SEQ ID NO: 408457 - DNA, 201 bp, Homo sapiens
cagcatcccagcccacctctgtctgcctccaccttggcccagtggaggaggagttctctccacccatgctctgggttccctgtcctttcccatcctcaggraagccttgggagaaggaggatgttttaggaaagagctagtaggttgatctcagtgaccagaaggaagtttagaggactctgagacctttccttgaaaagt

SEQ ID NO: 408458 - DNA, 201 bp, Homo sapiens
cggtaaaccagcaacctccagtgtgagtgtcatagccatcgggaacatgtcacattgctgcagaaatcctgtttatggccagtttctttaaggcctgtttrtgacaggcttagggcctgttcccagcacccactagacttagacaaccactgatctccttttctcagtatagatgaatttgcgtcttctagtctgttccta

SEQ ID NO: 408459 - DNA, 201 bp, Homo sapiens
aagagtgtggacagaacgggggtagagaatgcagggcaggagcccagagccatggatatggcttcagaatggagcctgggatgctctgagcctcgtgggarttcatgggaagttttcgagggctgttgtatgccaggctttattctggtttcaggagagagagtgactaaggagtgctgttaagcttccctcacaatctgg

SEQ ID NO: 408460 - DNA, 201 bp, Homo sapiens
agcattcttttcaagaagcagagaaacaggctgtggctgattatctgcagcaggaacatgtccgtaaggcacagatcgcttatgccattgtttttggtttwggaatgccttgagtggttttccgccctggatgggccaggtgttccttgccctcattccggtaaaccagcaacctccagtgtgagtgtcatagccatcggg

SEQ ID NO: 408461 - DNA, 201 bp, Homo sapiens
agctgggaggaggttgctgcaggaacccttggatgagcctaagtgtgagaagagtgtggacagaacgggggtagagaatgcagggcaggagcccagagccrtggatatggcttcagaatggagcctgggatgctctgagcctcgtgggagttcatgggaagttttcgagggctgttgtatgccaggctttattctggtttc

SEQ ID NO: 408462 - DNA, 201 bp, Homo sapiens
gaaacaaagcattcttttcaagaagcagagaaacaggctgtggctgattatctgcagcaggaacatgtccgtaaggcacagatcgcttatgccattgtttktggttttggaatgccttgagtggttttccgccctggatgggccaggtgttccttgccctcattccggtaaaccagcaacctccagtgtgagtgtcatagc

SEQ ID NO: 408463 - DNA, 201 bp, Homo sapiens
aaaataaattgcagttgatgccagtgaggagggaaagctgggaggaggttgctgcaggaacccttggatgagcctaagtgtgagaagagtgtggacagaaygggggtagagaatgcagggcaggagcccagagccatggatatggcttcagaatggagcctgggatgctctgagcctcgtgggagttcatgggaagttttc

SEQ ID NO: 408464 - DNA, 201 bp, Homo sapiens
tagagctgagagccacaaacagagttttgcccacatatttattgacagtaagcctgtgataaacattgtttctaaagattatagattagctgaaagcattycttatgggaaacaaagcattcttttcaagaagcagagaaacaggctgtggctgattatctgcagcaggaacatgtccgtaaggcacagatcgcttatgcc

SEQ ID NO: 408465 - DNA, 201 bp, Homo sapiens
tcatgagatttgtgagcttctagaatcaaaaccccgaaaaaaataaattgcagttgatgccagtgaggagggaaagctgggaggaggttgctgcaggaacycttggatgagcctaagtgtgagaagagtgtggacagaacgggggtagagaatgcagggcaggagcccagagccatggatatggcttcagaatggagcctg

SEQ ID NO: 408466 - DNA, 201 bp, Homo sapiens
ccatccattaaaaatgtataattaaaggtactttgccagatatagacctatagctgtgaaactaccaccacaatcaagatacagaatgtttatatcacccyccaaaagatcgcttttttccctgcttaccgagacaagctcggttgtggagactccaacgcaccagcactagaggaatgaagacaaagacccagaaataaa

SEQ ID NO: 408467 - DNA, 201 bp, Homo sapiens
atggtattccagctgctcctatctgagatgcacagtctccaccattacttgggccttttgttcaaagtttccacttccctctccaattttttttcatgctktgtgtgtgtcagaagcattcagtagcgtagggtatgtggaagtgaggcacctctcactgtttctttcctttacagagaatttctttggtcagtagctttg

SEQ ID NO: 408468 - DNA, 201 bp, Homo sapiens
tctgtggcttctgaggagccagctttcctgacgccctgagagtgtcctggttggttctgaggccacacatccacttcccttgtaaccagaaggaaatgccmaggagatagaggaaggaaatcagggcacacattccccagcatgtggattccggatggaaatgcagcttccctaagccctttctcatagggcttttggttt

SEQ ID NO: 408469 - DNA, 201 bp, Homo sapiens; identical to SEQ ID NO: 91655

SEQ ID NO: 408470 - DNA, 201 bp, Homo sapiens
gtacagacccttagggtggcattgaaaatccatcatctatttctctggctagtgctcagggtctgtggcttctgaggagccagctttcctgacgccctgaragtgtcctggttggttctgaggccacacatccacttcccttgtaaccagaaggaaatgccaaggagatagaggaaggaaatcagggcacacattccccag

SEQ ID NO: 408471 - DNA, 201 bp, Homo sapiens
ggcagcatgtgtcccggggtgggggctcagggccagctcactcgcaggggccagggctagtggggcaatatctactaaagttttcttacagggggacttgygcaggagggaggtggagcctgacctcagggatggggtgagaaagtgtcaattggcacttgtaggcaagcatagaatagcagacaggttgttcccgcttct

SEQ ID NO: 408472 - DNA, 201 bp, Homo sapiens
tgaatggaagatctgagtgtctgagcaggctgtgtctgctcactttcctatgtggttaacgcaggagggctaccaggcacatgattggcatagagtcagtrttttctttggaaatgtataggactgggcatttgtgtccccagctgtggcccttcagccagagcctctgtcacaggaacccaggttcattcctggctccac

SEQ ID NO: 408473 - DNA, 201 bp, Homo sapiens
gttaaagagcccagctatgagtttcaaatctgggctgttgtttaaaaagatcacacacagacacacacatacacacacgaatggacaatgagagttccttmctctgtgcccaccttttcctggagacaggttgcagcattccctggggatgtggaggttcgagcactaattgaaggacaattcatggccaagaggattcac

SEQ ID NO: 408474 - DNA, 201 bp, Homo sapiens
ttctggacatttcgtagacatgaatatatataatatgtgacagccttcttttacttagcataatgttttctttttaaaaatttttcatagctttttgcttrtttcaaataccaacttgaaccagatacctggcataatgttttcaaagttcatccatgtcatagcgtgtgtcagtacttcattcctttttgtggttcagta

SEQ ID NO: 408475 - DNA, 201 bp, Homo sapiens
aaactcatgggtccagtcagcaagcaccagctccctccctcagagctatgccctcttctgcagctttaaaaatggctccctcatgagagagaagatccgcracgagtctgtatcccgttcctggagcgatttctctaaggcactgcagtccacagagatgggcaacggtggaaacctgggtaggccagttggtggtgccca

SEQ ID NO: 408476 - DNA, 201 bp, Homo sapiens
tgattctggacatttcgtagacatgaatatatataatatgtgacagccttcttttacttagcataatgttttctttttaaaaatttttcatagctttttgyttgtttcaaataccaacttgaaccagatacctggcataatgttttcaaagttcatccatgtcatagcgtgtgtcagtacttcattcctttttgtggttca

SEQ ID NO: 408477 - DNA, 201 bp, Homo sapiens
ttaaaatgcctttcaggtaaaggttgttgctgttgatgcagagttgaatgtcttctatgaggaaagtgtgcattttgacagagatcttccagaatttgggyatgtacttgatgtgcatgtgtgtgtgatgggggtgttggttttggggtcctcccgcaaacttttgtattcgcagaccgcactgttgaggctttgccaaat

SEQ ID NO: 408478 - DNA, 201 bp, Homo sapiens
aggctgctgtgggtggtgctcaggctctcagctgcctcacggggtcccgtgcctatgaggtaggctgaggatgcggggggtgcagggggtggtctggttgyaagctccggaggcatagtgggtgacctgcctctggggggatcacatgaggtcatggaggtgttgtggagccagcaacaggcactctggcccctgggtcct

SEQ ID NO: 408479 - DNA, 201 bp, Homo sapiens
ggactgtttctccatcagcgactgcccggtgtggatggactccagcaccacagcccagtgccgccagctggaggctgctgtgggtggtgctcaggctctcmgctgcctcacggggtcccgtgcctatgaggtaggctgaggatgcggggggtgcagggggtggtctggttgcaagctccggaggcatagtgggtgacctgc

SEQ ID NO: 408480 - DNA, 201 bp, Homo sapiens
gggcagtgtgaccgccagccctggggcagatctccaagtcagcggatggagcttaagcctgtgcctttgccctccttcccaggactgtttctccatcagcractgcccggtgtggatggactccagcaccacagcccagtgccgccagctggaggctgctgtgggtggtgctcaggctctcagctgcctcacggggtcccg

SEQ ID NO: 408481 - DNA, 201 bp, Homo sapiens
attttatattgttaacaggcattacattgcacttaatatgtaactcaaatgaaaagtatacagtgaaaagtctttttttttctttttttctttcttttttwgagacagagtctggctctgtcgcgcaggctggagtgcagtggcacgatctcggctcactgcaagttccgcctcccgggttgtcctccattaggaaatggt

SEQ ID NO: 408482 - DNA, 201 bp, Homo sapiens
ggaaacaagtcccttgttagatatgtgatctcaaaatttttgtcccattctgtgggttgtcttttcactttcttgatgatcctttgaagcaatgtttttarttttgataaagtctaatcttcctacttttttccttttgctatttgtgctttggtgcagtattggttaggttttggtatcaattttatatttacttcacta

SEQ ID NO: 408483 - DNA, 201 bp, Homo sapiens
tggacttctagcctccagaactgtgagaaaataaatgcctgttgtttaaaccatctagtttatggtattttgttatagcaacctgagcaaactaatacaaygtatacgtttttgtgtggacatatattttcatttctattgggtatattacctaaaagtggaattgcggggtcacatggtaactctgtgttcaacattttg

SEQ ID NO: 408484 - DNA, 201 bp, Homo sapiens
ttgataagcagacattaacaaatgatatatttgatttgcttttttctcattgtcaggacatttccaaagaggagggaaagaatggaatgtgggaaagagawgtcaggggttctcctgaccagaagggtgagggtgagggtccaggtgggagcactggggactgacgtgttcctgaggccacctgaatggaagatctgagtg

SEQ ID NO: 408485 - DNA, 201 bp, Homo sapiens
tctatctctggatttgctgattctggacatttcgtagacatgaatatatataatatgtgacagccttcttttacttagcataatgttttctttttaaaaawttttcatagctttttgcttgtttcaaataccaacttgaaccagatacctggcataatgttttcaaagttcatccatgtcatagcgtgtgtcagtacttca

SEQ ID NO: 408486 - DNA, 201 bp, Homo sapiens
aaccacaatcaactctctatctctggatttgctgattctggacatttcgtagacatgaatatatataatatgtgacagccttcttttacttagcataatgytttctttttaaaaatttttcatagctttttgcttgtttcaaataccaacttgaaccagatacctggcataatgttttcaaagttcatccatgtcatagcg

SEQ ID NO: 408487 - DNA, 201 bp, Homo sapiens
tcttacgtgcagtgactgaaaacgttgataagcagacattaacaaatgatatatttgatttgcttttttctcattgtcaggacatttccaaagaggagggraagaatggaatgtgggaaagagatgtcaggggttctcctgaccagaagggtgagggtgagggtccaggtgggagcactggggactgacgtgttcctgagg

SEQ ID NO: 408488 - DNA, 201 bp, Homo sapiens
taatatgtttaacatacagcttttgctcactttggtagattgcacaaatgaccacaatactccacccatccctgtacccacaccctttgcaatgtgactgyaattcctcccatcaaggagtcgtttccctacctgttgatttgctttatccagtagaacaggggaagtggcattgtgccagttctaagcctaagcctcaag

SEQ ID NO: 408489 - DNA, 201 bp, Homo sapiens
aggatttgggttcctaagaatttatattccttttccagcgttttacagggaaccaaattgcaaaaatttaccagcagaaccccgaggcctactcacatacrgaggttggttaaatgttcctgtttgattgaaagtcacagttgaattcttttcataatatgttagaatagatacatcttacgtgcagtgactgaaaacgtt

SEQ ID NO: 408490 - DNA, 201 bp, Homo sapiens
atttaatttattttttttatttgagacaggagctggctgtcacccaagctggagtgcagtggtgtgattcagctcactgctatctatgcctcccgggctcragcaatcctccctccttagcctcccaagtagctggaaccacaggtgcgcccctaccatgaccagctaatttttttgtattttttttgtagagatggggtc

SEQ ID NO: 408491 - DNA, 201 bp, Homo sapiens
gcacactactgtgcctggttggggcttacttttaaaagcttttatggtacctactcctatccagagcatgctacattaaactcactttgtggaggtaattrttcattctgtgtaggatttgggttcctaagaatttatattccttttccagcgttttacagggaaccaaattgcaaaaatttaccagcagaaccccgaggc

SEQ ID NO: 408492 - DNA, 201 bp, Homo sapiens
cagtagatatcaaacagatttaatgcttatttttaaaatatttaattattagaaacgaggtctcactgtgttgcccaggctggactcctgggctccagagytcctctcgcttcagcctcctgagtagctgggattacaagcgcacactactgtgcctggttggggcttacttttaaaagcttttatggtacctactcctat

SEQ ID NO: 408493 - DNA, 201 bp, Homo sapiens
ctcgctggagtagaagttttggggatagggccaactctacttgggccacctgaaataacaatatgtggatggggaaaataccccgatccctcacctggtgscttggtcagaacagtcaccgtgctgtgtgaagagcaagggttattcactcagggttgtccagtcctgatgtgggagaggccctccaggaaggcccagaag

SEQ ID NO: 408494 - DNA, 201 bp, Homo sapiens
ttggctatttggggaacaaagattccttgagacatgtgggtgttcctacttagcctcagtttcttcattttactaaatctttgagtgttaccccagatgartcctctgttaccacgattacggtgaggcagccctgccttcaaggaggtctctaggttgaactgctcctagggtgtggggcctcatctggtgacgttagta

SEQ ID NO: 408495 - DNA, 201 bp, Homo sapiens
gtcgtggtccagcctgacctgcagttcctctgcctgagtctcttcactgaaactcatgggtccagtcagcaagcaccagctccctccctcagagctatgcyctcttctgcagctttaaaaatggctccctcatgagagagaagatccgcaacgagtctgtatcccgttcctggagcgatttctctaaggcactgcagtcca

SEQ ID NO: 408496 - DNA, 201 bp, Homo sapiens
gtgaacatcttcctctagagggtcttggctttggctatttggggaacaaagattccttgagacatgtgggtgttcctacttagcctcagtttcttcatttkactaaatctttgagtgttaccccagatgagtcctctgttaccacgattacggtgaggcagccctgccttcaaggaggtctctaggttgaactgctcctag

SEQ ID NO: 408497 - DNA, 201 bp, Homo sapiens
tttgtgaacaggagggacatgcccagtttgtgacaggaagtgatgtgactccaggctctgcaaaagattccttcaggtctggtgacctggagactgtagcrttttcgtggcctgaagggtgggtggctgtgctgggcaggcgggatttacctcaacagagcacctttgctttgtccccgtccctcagggagccatttcttc

SEQ ID NO: 408498 - DNA, 201 bp, Homo sapiens
tgcttccctgttccttggctcttactcccctattgactacagtgatggtgagcctcggggtatggggtgggtgcctgggcagtgtgcatgtggcatgtggstgtgcaagcagtgggagccccacctaccccgagtgggtgccaatcttgtagccctgtcatctgttgccaggaaggaagtgtattcattatcttttaccac

SEQ ID NO: 408499 - DNA, 201 bp, Homo sapiens
gcccagcaggcactgacaagcttatcaccagacctccggctacaccagcagcttcaggtaactgtggctacgtggtgtgagtgtgagaaacttctgcagartcccaagtcctgtgggtcctgaagcctgctcatctcagtgttgcagctgtgctcacgcgccctcaccagaagagctttcaacctcaggcttttggggaga

SEQ ID NO: 408500 - DNA, 201 bp, Homo sapiens
gaagtcagctactgtaaggcaggggaacagacaggcgggtagccctgcgcacatgcacaaccagtgacctggaagcagattatagcccaaaaccttttttwaaaaattgaaatggcccaggcctggtggctcttgccggtaatcccagcactttgggaggccgaggcgagtggatcgcttgagcccaggagttcgagacca

SEQ ID NO: 408501 - DNA, 201 bp, Homo sapiens
caacacggaagtatatactggaaggctggagcccagcaggcactgacaagcttatcaccagacctccggctacaccagcagcttcaggtaactgtggctaygtggtgtgagtgtgagaaacttctgcagagtcccaagtcctgtgggtcctgaagcctgctcatctcagtgttgcagctgtgctcacgcgccctcaccaga

SEQ ID NO: 408502 - DNA, 201 bp, Homo sapiens
cccggggcccccgcgcccctgccctgcgcgcggccgtggggcgccggtgccctcgcccggagatgccctgccaatgccacccgctcgcaagatgcggcctsgaccccgcctggacccagctaccccaggaaactgcaggcgctcctcggcaggacccccggtgcccagaggggccggaggactcggcgggttcctgcgctg

SEQ ID NO: 408503 - DNA, 201 bp, Homo sapiens
ccaggagggtgatgagctctgtgactaagaagtggcaggggcaggtgtggagcccagttctttggcatgtggtctggggtctttctgtgtcttcaggaggstgtgacaccggtgtgtggtcatgtgaccatgtgcttgggtttcccaacagcaacacggaagtatatactggaaggctggagcccagcaggcactgacaag

SEQ ID NO: 408504 - DNA, 201 bp, Homo sapiens
ctacctctcgggcttcccggggcccccgcgcccctgccctgcgcgcggccgtggggcgccggtgccctcgcccggagatgccctgccaatgccacccgctygcaagatgcggcctcgaccccgcctggacccagctaccccaggaaactgcaggcgctcctcggcaggacccccggtgcccagaggggccggaggactcgg

SEQ ID NO: 408505 - DNA, 201 bp, Homo sapiens
cccagatgattcttcagttgttgtaacaccaaccatgtttttatttaatttattttttttatttgagacaggagctggctgtcacccaagctggagtgcaktggtgtgattcagctcactgctatctatgcctcccgggctcaagcaatcctccctccttagcctcccaagtagctggaaccacaggtgcgcccctaccat

SEQ ID NO: 408506 - DNA, 201 bp, Homo sapiens
acatttgtatccaactttaatttttcccagatgattcttcagttgttgtaacaccaaccatgtttttatttaatttattttttttatttgagacaggagckggctgtcacccaagctggagtgcagtggtgtgattcagctcactgctatctatgcctcccgggctcaagcaatcctccctccttagcctcccaagtagct

SEQ ID NO: 408507 - DNA, 201 bp, Homo sapiens
aaaaatatttggagtttatccaggtacgtagtatgacatttgtatccaactttaatttttcccagatgattcttcagttgttgtaacaccaaccatgtttktatttaatttattttttttatttgagacaggagctggctgtcacccaagctggagtgcagtggtgtgattcagctcactgctatctatgcctcccgggct

SEQ ID NO: 408508 - DNA, 201 bp, Homo sapiens
attatgaaggaactcacctatgtttttatctagttcttgtaagatttcagctttcttacataaaaatatttggagtttatccaggtacgtagtatgacatwtgtatccaactttaatttttcccagatgattcttcagttgttgtaacaccaaccatgtttttatttaatttattttttttatttgagacaggagctggct

SEQ ID NO: 408509 - DNA, 201 bp, Homo sapiens
tgctctcccgaggagtctgctcatggtattccagctgctcctatctgagatgcacagtctccaccattacttgggccttttgttcaaagtttccacttccytctccaattttttttcatgctgtgtgtgtgtcagaagcattcagtagcgtagggtatgtggaagtgaggcacctctcactgtttctttcctttacagaga

SEQ ID NO: 408510 - DNA, 201 bp, Homo sapiens
tcacatacagaggttggttaaatgttcctgtttgattgaaagtcacagttgaattcttttcataatatgttagaatagatacatcttacgtgcagtgactraaaacgttgataagcagacattaacaaatgatatatttgatttgcttttttctcattgtcaggacatttccaaagaggagggaaagaatggaatgtggga

SEQ ID NO: 408511 - DNA, 201 bp, Homo sapiens
caaaaatttaccagcagaaccccgaggcctactcacatacagaggttggttaaatgttcctgtttgattgaaagtcacagttgaattcttttcataatatrttagaatagatacatcttacgtgcagtgactgaaaacgttgataagcagacattaacaaatgatatatttgatttgcttttttctcattgtcaggacatt

SEQ ID NO: 408512 - DNA, 201 bp, Homo sapiens
aggtgacattgcggtaaggcgacttcccacacccataggctctttctgtttccacactcacacccacactctgataagtagcagaggtgctgctgagaccsagatcccagggtcccagggtctgggtcccagcaggatctctgctacttatcagagtgtctgccggttccaaaagacagtggagggaggggatgggggcgc

SEQ ID NO: 408513 - DNA, 201 bp, Homo sapiens
ccgaaggaagtcagctactgtaaggcaggggaacagacaggcgggtagccctgcgcacatgcacaaccagtgacctggaagcagattatagcccaaaaccytttttaaaaaattgaaatggcccaggcctggtggctcttgccggtaatcccagcactttgggaggccgaggcgagtggatcgcttgagcccaggagttcg

SEQ ID NO: 408514 - DNA, 201 bp, Homo sapiens
gttttacagggaaccaaattgcaaaaatttaccagcagaaccccgaggcctactcacatacagaggttggttaaatgttcctgtttgattgaaagtcacakttgaattcttttcataatatgttagaatagatacatcttacgtgcagtgactgaaaacgttgataagcagacattaacaaatgatatatttgatttgctt

SEQ ID NO: 408515 - DNA, 201 bp, Homo sapiens
ctcctgcctcagcctcccgagtagctgggactataggtgcccgccaccacgcctggctaatttttttatatttttagtagagacggggtttcaccgtgttwgccaggatggtctcgatctcctgacctcgtgatctgcccgcctcggccttccaaagtgctgggattacaggcgtgagccaccgcacccggcctaattttt

SEQ ID NO: 408516 - DNA, 201 bp, Homo sapiens
gcctcagcctcccgagtagctgggactataggtgcccgccaccacgcctggctaatttttttatatttttagtagagacggggtttcaccgtgttagccargatggtctcgatctcctgacctcgtgatctgcccgcctcggccttccaaagtgctgggattacaggcgtgagccaccgcacccggcctaattttttttta

SEQ ID NO: 408517 - DNA, 201 bp, Homo sapiens
tgaaagagctgctgagcccaggaggtactaacgtttattgagcccatttggtgccaggcattgtgctcatggttttctataccttcctcatttacttttcttttttttttttttttaattttttgagatggagtctcactctgttgcccaggcttgagtgcagcgggacgatctcggctcactgcaacccccacctcgtgg

SEQ ID NO: 408518 - DNA, 201 bp, Homo sapiens
tctataccttcctcatttacttttcttttttttttttttttaattttttgagatggagtctcactctgttgcccaggcttgagtgcagcgggacgatctcrgctcactgcaacccccacctcgtgggttcaaacgatcctcctgcctcagcctcctgagtagctgggattatagatgcaagccaccacacctggctaattt

SEQ ID NO: 408519 - DNA, 201 bp, Homo sapiens
ctccaacctccacctgctgggctcaagcgcttctcctgcctcagcctcctgagttgctgggactacaggcaagcgccaccacatctggctaattttttgtrtttttagtagagatggggtttcaccatgttaggcaggctggtcttgaactcctgacctcaggtgatccgcctgcctcagcctcccaaagtgctgggatta

SEQ ID NO: 408520 - DNA, 201 bp, Homo sapiens
ttcacatgcagttgttaaataaatagctaatgtttacctgcagaaaaggcttgcccttctatcaggaagtgcgggtgaggtggtggtttttttttgttttkttttttttttttttttacttttatcatttaatttttatttttaaaaatgtatatagtaaaaaagctgggttgcggagatgtcggtcagtggattaaaaat

SEQ ID NO: 408521 - DNA, 201 bp, Homo sapiens
tcacatgcagttgttaaataaatagctaatgtttacctgcagaaaaggcttgcccttctatcaggaagtgcgggtgaggtggtggtttttttttgttttgttttttttttttttttacttttatcatttaatttttatttttaaaaatgtatatagtaaaaaagctgggttgcggagatgtcggtcagtggattaaaaatt

SEQ ID NO: 408522 - DNA, 201 bp, Homo sapiens
tgaaatatgtactttattcttttaattagggcttaaaatgttaaaatatttctaaagaggactattttgggactctacagtgtacctctttaatgagaacrcccacagtttaggcctattaaggcataattcctttattttactaaagaattaaaataataaagatttgataattttctttcttttttttttttattgatc

SEQ ID NO: 408523 - DNA, 201 bp, Homo sapiens
tccaaagtgggctgtcagctgagggctctctgccaacagcactcccatcagttgggagaataagttcttcattcccgaggtgaatctggatggcacaccayagcatccgccacaccactgcacctatttacagaagggtctggcagcccagcagcaggggtgggtgcatcttgtaaggaactgtgaagggtctgagattta

SEQ ID NO: 408524 - DNA, 201 bp, Homo sapiens
gtggagtgcttggtacacactcagggcatactgtctgggtttgatccctggctctgccatttacaggcagtgacctgggatacgtcatctggctttctggkgcccccgtattctcatctgtcatagggtcattgtgagtgtaagtacatagcacagtgcctcctattaatacgcagtaaacattattaaagcttgggcttc

SEQ ID NO: 408525 - DNA, 201 bp, Homo sapiens
caactatttgttttaaaatacataacgaatggatgtctttttatcacaaaagattcatgcaaaacagaaatatggaataagaagcaaatgcccccttcatwtgcctcccagactcctttccagactgtgacttccttcctgtgagtttctgtgttagattgaatcatacggaattgccaatattgaagaagttttgattta

SEQ ID NO: 408526 - DNA, 201 bp, Homo sapiens
tttctagatggagaggttgagactcagaggctcaggctaaataatctgcccagagtcaagcaaggtcatagatggtggagggggctcaaacccattcctctctggctctgaagctgctgttttctttctcctccacaatgtgacctttctcgggaaggatttagttggttcttgctcctcaaaattgacattgctgctgga

SEQ ID NO: 408527 - DNA, 201 bp, Homo sapiens
ggtctctggttttcctaggcagaggaccctgcggccttccgcagtgtttgtgtccctgggtacttgagattagggagtggtgatgactcttaacgagcatkctgccttcaagcatctgtttaacaaagcacatcttgcaccgcccttaatccatttaaccctgagtggacacagcacatgtttcagagagcacagggttgg

SEQ ID NO: 408528 - DNA, 201 bp, Homo sapiens
gtcatcaccacattttgggttgtacctgagagatgtttctgaccccagtaaatggggggtttatgtaagacactctgtctggaaactgtaactgtcagagytggcgttggattcagtggcagatgatggcactacatgttggattatgaatggaaagctttgtataaagtaggaagttcatctcaatcttctgatggagga

SEQ ID NO: 408529 - DNA, 201 bp, Homo sapiens
gctgttgggtacacctcccagatggggtggtggccgggcagaggggctcctcacttcccagaaggggcggccgggcagaggcaccccccacctccctcccrgacggggcggctggccgggtttttttttgtttaatcaggggttggatcagtactagttagttttagttcaccagtagttgcagtgtcttgggatcaggat

SEQ ID NO: 408530 - DNA, 201 bp, Homo sapiens
caggcaccggggacacaaaggagaacaaaacattggtggcccttgctccccagagcctgctgtctaggagggagagggacagtagacgactgaatgagcaygtacatgaatgcagcaggtgctaaggctaggtggcagaagaacagagtgccgcaaaggaaagcagctggtgggcgggttggagacttaccctgggtgggg

SEQ ID NO: 408531 - DNA, 201 bp, Homo sapiens
gtatgagccactgtgcccagcctattatatttttttggagacaaagtctggctttgtcaggcaggaatacacccaggctggagtacagtggtgtgatcacrgctcattgcagccttgaattcctgggctcaagcaatcctcccacttcaacctcccgagtagctgggaccacaggcatgcatcaccgtttccagctaattt

SEQ ID NO: 408532 - DNA, 201 bp, Homo sapiens
ctgcctccctttaacttgctaattgtgaggcttaaaaagaatccttgaccaaaatggctttataatctaataggaaatctgggggtagaattggttcagtrgttcaacatgagaactctggtcatgttccctgcaattccttaggtcagcagtggacaatgggaacataatgtgagccacatatgtcatttaaaatattcg

SEQ ID NO: 408533 - DNA, 201 bp, Homo sapiens
attggcacttgtaggcaagcatagaatagcagacaggttgttcccgcttctcagctgtgtccacaatagcctgaccttttggccaggacctgtaagacttsggaatggtctttctgaaaccctaagctccaagctgcagatgagctgtcctgagctctggactgcaaagacataggcagtgcaaggtctggggacatgaat

SEQ ID NO: 408534 - DNA, 201 bp, Homo sapiens
tgaggcttaaaaagaatccttgaccaaaatggctttataatctaataggaaatctgggggtagaattggttcagtagttcaacatgagaactctggtcatsttccctgcaattccttaggtcagcagtggacaatgggaacataatgtgagccacatatgtcatttaaaatattcggttgcctcattttttaaagtaaaag

SEQ ID NO: 408535 - DNA, 201 bp, Homo sapiens
taaagcttcaacatgagttttggaggggacacatattcaaaccatagcaactggcatggagagggcagacccagggccgggggaggcaaaaggaggagaargggatttctgacaacttgagctgtagaataatcagcattaggatgtcagtgagttccccttacaggtggcgttggaatggtctaagggtctgtaaggagg

SEQ ID NO: 408536 - DNA, 201 bp, Homo sapiens
acccaggaggcggaggttgcagtgagccaagatcaccccattgcactccagcctgggagacagagcgagacttcatctcaaaaacaacaacaacaacaacmacaacaaaaagaagaaatagaacactagaaccttggagtcttgctgtgctcctcttccactgtatcctcatcttcccctcatccctgcagagatcatttc

SEQ ID NO: 408537 - DNA, 201 bp, Homo sapiens
aaagtaaaagtaaaaataaaaataaatgattaaaattaattttaatacattttatttaatccactatatctgaaatattgtcatgtcaacgtgataaattwgaagttactaatgtggggccggatgcagtggctcacacctgtaatcccagcactttgggaagccaaggtgggcagattgcttgagcccaggagttcgaga

SEQ ID NO: 408538 - DNA, 201 bp, Homo sapiens
ttgatcctgtcagctgaggaggatatatcgcctcaggaccctgtaataattgcattaactgcacaaattgtacagcatgtgtgtttgagcaatgtgaagtrtgggcaccttgaaaaaagaacaggataacagcaattgttcagggaataagagagataaccttaaactctgactgctggtgagctgggcagaacagaacca

SEQ ID NO: 408539 - DNA, 201 bp, Homo sapiens
agctgttaattttcattgtactgtgatattccatcacatgattatacaaccatttatccatttgctatggcctgactgtgtctccccaaattcacatgttaaaaacttaatccccaatgtgacagtgttgggagatgggcctgatggaaggtgtttaggtcatgagggctcttgtgtattaatgccactataaaagtgctt

SEQ ID NO: 408540 - DNA, 201 bp, Homo sapiens
tgctcatcagggagaaaaatactggcctatccctcccctatcccacacacgcccaacaggctaccacttggtcatatggtcaattctggttgtaggaaagkctagggtagggtctggctctttcattctatctagaaggaggccagcaaggaggaagataattggggaaagttttagggcagcacagcagcgtctgcctca

SEQ ID NO: 408541 - DNA, 201 bp, Homo sapiens
taccacttggtcatatggtcaattctggttgtaggaaaggctagggtagggtctggctctttcattctatctagaaggaggccagcaaggaggaagataaytggggaaagttttagggcagcacagcagcgtctgcctcatctagagtacggagtggccaatcctctgagctgtatgtgcctcatcactctccctggcctg

SEQ ID NO: 408542 - DNA, 201 bp, Homo sapiens
cgtagcctgtctcttatggttgaggctgcagagatgaaataaactccagtctcccatagtgctcccaggcttattaggaagaggaaattcccacctaatamattttggtcagactggttgatcccaaaaccctgtctcctgataagatgttaccaatgacaatggtgcccgaaacttcattagcaattttaatttcacctc

SEQ ID NO: 408543 - DNA, 201 bp, Homo sapiens
gcaccaagagtaggccccagttgcataatcagttgttaaaatacttggcttccagctgggcgtggtgactcactcctgtaatcccagcactttcggaggcygaggcggatggatcacatgaggtcaggagttagagaccagcctggccaacatggtgaaaccccatctctactaaaaaagaaaaaaacacaaaaattagct

SEQ ID NO: 408544 - DNA, 201 bp, Homo sapiens
actaggattacaggcatgaatcctagtgctaggattaccgcacccaggctgtatggtagttttgttggaatatacaacctaaataaatattttaagagagaaattcaataggtgatggttttgaggcctgacatgtccaacaaggcctttgtttcatcctcccaaatactggctgggtaaaagactctatgttcaaaatac

SEQ ID NO: 408545 - DNA, 201 bp, Homo sapiens
taaaggtctgcaaagacttccaagttccctgaaaatgagactgggtgagcagggcagggttggtgctggagttggtggagtgcctggcaggggtcctccgrctgtcagaagagaaccccagggaacggaacagcccagcatacagggagaagcagttagggcaaaaggcccccatgggctcaggaggagctgatgggattg

SEQ ID NO: 408546 - DNA, 201 bp, Homo sapiens
tgagaggttcaggcacgagaatcacttgaaaccaggaggtggaagcttcagttaatcaagattgcaccactgcacctccagcctgggtaacagagtgagamcctgtctcaaaaaataaaaaaacaaaacttaactttggagcaaattaaaccaaattaagaaggaatggggttggcatgagctcctacttgtgtttacttg

SEQ ID NO: 408547 - DNA, 201 bp, Homo sapiens
gaagctgagatgacctttagagttttacccagttggtctaaggggctgggcctttataccccatgtcaatcagtcatcacatgtgggccaccccaggatgsggtgaggcagctctttatagctaaagcagtctccaaagtgggctgtcagctgagggctctctgccaacagcactcccatcagttgggagaataagttctt

SEQ ID NO: 408548 - DNA, 201 bp, Homo sapiens
gaatagctcaattcctccaacccttcctctaggacatggttttaagtctctgccctgtcatctgatctgcagcaatgacttgtttctcgtccagacacctyatctccttccctagcctcttctcttcctcctcctctcctctgggtagccctgaagccactcctggaggggcccttggatctctgaaggaaggccaggtgg

SEQ ID NO: 408549 - DNA, 201 bp, Homo sapiens
aggctgaggtgggaggattacttgagcccagaaggtggaggttgcagtaagccaagatcacaccactgcactccagcctgggcgacagagaccctgtctcaaaaaaaaaaaaaaaaaagttactaatatgatattttacatttccttttttgcatgaagcttttgaaatttggtgtgcatttaacacttatagttctgggc

SEQ ID NO: 408550 - DNA, 201 bp, Homo sapiens; identical to SEQ ID NO: 91676

SEQ ID NO: 408551 - DNA, 201 bp, Homo sapiens
accttccctcccagcctggctcaccacaaggcacagcctgtggcaagaacactgacttctctcatgcatgtcttaccacaggggctggagttattcaggcraagggttcgggtaactgtgtctcctccggagacctgggtgccgaacctggagggggacagactggactcagtacagccacagccagcgtacaccttgcag

SEQ ID NO: 408552 - DNA, 201 bp, Homo sapiens
ttaccacttgttgggaggttatctggacaaaagaaactgcccttgaaggccccgagggatggggagcagagggcagatgcttctggtgcacatggatgtgkccttatgtcccatgacactcagagctccccagtcagccacgggcaggagcagcaccacaactgggctccaacagctacctgggccagtcatgggctatgt

SEQ ID NO: 408553 - DNA, 201 bp, Homo sapiens
cctctcttgaagaaagtctctttggtgtatgagcttctcaggatctggccagcattgctgacttccctatctgtgcctttatatccactttcagggcaggytgtaccatatcctgagtcatcactactgtctgtggcatggactggcccttacatcctgtcctgcctacagccttgggaacccaaagttccaagcacagct

SEQ ID NO: 408554 - DNA, 201 bp, Homo sapiens
cctgagcggtgccccgcaggcctcggccgcggacgtggtggtggtgcacgggcggcgcacggccatctgccgggcgggccgcggcggcttcaaggtgaggyccgagggtctgggcgccgagtgtgggaagacgccggcgcgggctggggtccggttcgtatgtttggttatcctggacgccggaggcagctccgcacccag

SEQ ID NO: 408555 - DNA, 201 bp, Homo sapiens
cattgctttgggtgtgtctgtgacggtgtttgcagaggaggttagtgtgtgcatctgagtggaccaggtggggaagatccgccctcagtgttggcaggcaycagctaattgcctggggccctggagagaacaaatacagaaggtgaactgtctctctcagagccgggacacactttttttctgccttggacatcagaaatt

SEQ ID NO: 408556 - DNA, 201 bp, Homo sapiens
ccaggtggggaagatccgccctcagtgttggcaggcatcagctaattgcctggggccctggagagaacaaatacagaaggtgaactgtctctctcagagcygggacacactttttttctgccttggacatcagaaatttgattccatgaaagtgcattatcacattgactttgtaagccttgtgcatgtacataaaaatgt

SEQ ID NO: 408557 - DNA, 201 bp, Homo sapiens
gcccctaggaaactctagccaggtgagtgatggggcagctgccatcctgctggcccggaggtccaaggcagaagagttgggccttcccatccttggggtcmtgaggtcttatgcagtggttggggtcccacctgacatcatgggcattggacctgcctatgccatcccagtagctttgcaaaaagcaggtaaggtggctcc

SEQ ID NO: 408558 - DNA, 201 bp, Homo sapiens
gcttgtgacgacagaacatgctggtgaggggaattgggccctgtcaggtgcaacaagaaaagtatgtggcatttggccgggtgcgatggctcatgcctgtwatcccagcactttgggaggccgagatgggtggatcacaaggtcaggagatcgagaccatcctggctaacacagtgaaaccctgtctctactgaaaataca

SEQ ID NO: 408559 - DNA, 201 bp, Homo sapiens
ctgaaagtggagcaaagatatgcattttctattggatttagggtcctagggtctgtcctggggcacagacacctaagaccatggcaccttctccccagagkacagcctgagggtaaagtataaattgctctgggaaggagagagggagagaacagctgtgtctgcagttcattgttgtgtgagtttaagcagctctcttcc

SEQ ID NO: 408560 - DNA, 201 bp, Homo sapiens
tagaaagttgagaaggcagtgggaagcttgtgacgacagaacatgctggtgaggggaattgggccctgtcaggtgcaacaagaaaagtatgtggcatttgsccgggtgcgatggctcatgcctgtaatcccagcactttgggaggccgagatgggtggatcacaaggtcaggagatcgagaccatcctggctaacacagtg

SEQ ID NO: 408561 - DNA, 201 bp, Homo sapiens
ctccttcctctcagctcgtagcacttccttgtctatgcaggtctgaatgccctttgagctcagctttgtggttacttttatttttattttatttatttatktttttgagacagagtctcgctctgtcgcccaggctggagtgcagtgacacgatctcatctcactgcaagttccgcctcctgggtttacgccattctcctg

SEQ ID NO: 408562 - DNA, 201 bp, Homo sapiens
cacatccaggcacagcacctttccttaaacttacttatgacactgagtcctttgctcacattttttcctgttgaccccctccccaccattaccttatagtwatggtatataatgccacatccctcttgccaagatagtagagatagtgatcaataaatactgagggaactcagagaccagtgctggtgtaggtcctcaatt

SEQ ID NO: 408563 - DNA, 201 bp, Homo sapiens
atcccttgaggggggcagttagaagcataggactgctttccatgagagcctggcatggaattgggggctgattctactttctcaccttctgtttcagtgayatcccggagactgtgcctttgtccactgtcaatagacagtgttcgtcggggctacaggcagtggccagcatagcaggtaagttatgactgggtgggtgcc

SEQ ID NO: 408564 - DNA, 201 bp, Homo sapiens
gatggggcaccccagctgactcactgtgcaggcctcacgtagctatgcaggtccagtttcaggggtcccaccgcaaagtcctgcaggcgatgcctcttccstggaatctccctttccacctactgagcccaagtctgatcacagctgatccctgggctgagtaggcagcatgctacccaggagggagcagtggctgcggcc

SEQ ID NO: 408565 - DNA, 201 bp, Homo sapiens; identical to SEQ ID NO: 91715

SEQ ID NO: 408566 - DNA, 201 bp, Homo sapiens
ttgtctgagatatggcctagtgggaagggaaagaccttacagtcccccagcccgacacccgtaaagggtctgtgctgaggagtattagtaaaagaggaagrcctctttgcagacacccgtaaagggtcggtgctgaggagtattagtaaaagaggaaggcctctttgcagttgagataagaggaaagcatctgtctcctgc

SEQ ID NO: 408567 - DNA, 201 bp, Homo sapiens
caagctcatgaaacccagggcgtagccagtacactccaccttgtgcaggatctcagggctgagcaccataggggtgaaggagatgtagatggtactgctgmccccagcagggaccacctggcatagacacagcagccttagcactgtcccatgcccactggccggccaatgcagacagctcccagcccataccccaactca

SEQ ID NO: 408568 - DNA, 201 bp, Homo sapiens
ctcccacagctgcttctccttccggcctgtttgtgggcaggctgggctctctaacccccacatgcccttccttctccccatctatccatcagcctatgtcmgctttcacgtccttccccaggcagactagtctttgggggccgccatgtccacctctgtcttgccagcatcctcgtatctccctttgcacccacctggcaa

SEQ ID NO: 408569 - DNA, 201 bp, Homo sapiens
cttcccggtcactcaggccctacattgccttactcacctgggtatgagcagtcaactccaacttgagctggcactcctcacttgggcccagcaggccatgwttgggggagactgtcaccatgcagaattctgcttggtgtccgaggagctggcagacacatgagtgagcctgttgtcacttactgggctcccagaatggac

SEQ ID NO: 408570 - DNA, 201 bp, Homo sapiens
gggcaaatcagaaagctgggcccacctgcggccacagagaatggcctggggagggcaaaaactcatgccaaaggccaggcatggccagtgggtctcagggsacatccccaggcctactccaggctctctgaccatgtgtccctagggagcagacccagcaggaatggggaccccagacccaaatgcaagaaatctcttccc

SEQ ID NO: 408571 - DNA, 201 bp, Homo sapiens
catctccagcccccaagcagtaagcggtcctggctgcccagccttccgtttggctgcgggcaggagacagggatttgggggtcaggtctcgggtttggctrcaaaaggtggaaagacttccggtctgcatttctgggcggggattcgtaaagatacaccttctggttggctgcggtaggccaaggtaggcggggcattgag

SEQ ID NO: 408572 - DNA, 201 bp, Homo sapiens
tgcagggacggcgcacaggggccccttcctggggggtcttctcttggcacagccctgtaggggaacggtgggtaggtggcagggtaggacatacccatcarcatagtccagtagcttcggcacccgctcaggttcatcaggtagacctcccggactcgctgctggctcacaaagcaggtcccaaagtccacccagctggtg

SEQ ID NO: 408573 - DNA, 201 bp, Homo sapiens
ggtcccagctccagcagcacgtcgtcgcggcccagcttggtaagcagctcgagcagtcggcctacagaggcgccagggcgtccctgccaggcgtccagcakcctgccagtggggtccgcttgtgtctccagttgccggatctccaagtactcaaagtccatctcctccgccagcgcggtccagtcggccgccacctgtgtc

SEQ ID NO: 408574 - DNA, 201 bp, Homo sapiens
cgccagggcgtccctgccaggcgtccagcagcctgccagtggggtccgcttgtgtctccagttgccggatctccaagtactcaaagtccatctcctccgcmagcgcggtccagtcggccgccacctgtgtccgcacgttcaagaacagagacaggcggcgccgcactcgcatgttgagagcagccaggggaagggaggatg

SEQ ID NO: 408575 - DNA, 201 bp, Homo sapiens
ttgtgtctccagttgccggatctccaagtactcaaagtccatctcctccgccagcgcggtccagtcggccgccacctgtgtccgcacgttcaagaacagakacaggcggcgccgcactcgcatgttgagagcagccaggggaagggaggatgtggaggagaccggggccgcagaccccgcgccgggacctcctgcagccat

SEQ ID NO: 408576 - DNA, 201 bp, Homo sapiens
tggagacttcaacagcccatttttaataatggaaaaacaactaaccagaagataaacattgaaatagaagatttaaacagcactataaaccaaacagaacmggcaacactctacacaataacagcagaatacattatttttctcgagtgcacaaggaatattctccagaatagcccataaaacaagtctcaataagtttta

SEQ ID NO: 408577 - DNA, 201 bp, Homo sapiens
cgccgggacctcctgcagccatggcgggcggtcctggagcctcagcgcggtcgggtcgcattgtctgccagcgcttcctctttctcctgcggcacccgccscgccccgccggctttcgctttccgagaagcgccgccctgccctacaatctggagccccgagcaaaagtgcggaggcgggggtgcccacctctacccttga

SEQ ID NO: 408578 - DNA, 201 bp, Homo sapiens
gctgtgcaggatgtggcttgttaaccatttgtttgcaggcagtatgcttggtaaaagtcatcgccattctccattctcgattaaccaggtacacagtgcamtgcgaaaggccgcagggacctctgcccaagaaagcctgggtattgtccaggtttccccccactgagattgtctgagatatggcctagtgggaagggaaag

SEQ ID NO: 408579 - DNA, 201 bp, Homo sapiens
attgtcaggtggagcgccttggccatctgagagcagtctctggtcctggtcccgctccctggcagctgccagcccacatccacagaaggctgtggctctgkccgtggcctgggccccgaagccccaccctggtggcgcttacccagctgctctcgcttggccaggtgctcttgcatccgcactgtctttagcagggcagga

SEQ ID NO: 408580 - DNA, 201 bp, Homo sapiens
tatgatgcccatcagagtgcttcgtctaggtgggatcaggctttcaagagtccatgggaacatgcagggttagctatatgattactggtaaggccgagtgktccctggcctcagactttaggcatttcttttgctctggtgctctgtcccagcagcagttccttttctctgttttttgggggaaacagagatacacagttt

SEQ ID NO: 408581 - DNA, 201 bp, Homo sapiens
catcagagtgcttcgtctaggtgggatcaggctttcaagagtccatgggaacatgcagggttagctatatgattactggtaaggccgagtggtccctggcytcagactttaggcatttcttttgctctggtgctctgtcccagcagcagttccttttctctgttttttgggggaaacagagatacacagttttcatttctg

SEQ ID NO: 408582 - DNA, 201 bp, Homo sapiens
gcttcgtctaggtgggatcaggctttcaagagtccatgggaacatgcagggttagctatatgattactggtaaggccgagtggtccctggcctcagacttwaggcatttcttttgctctggtgctctgtcccagcagcagttccttttctctgttttttgggggaaacagagatacacagttttcatttctgaatcttcaa

SEQ ID NO: 408583 - DNA, 201 bp, Homo sapiens
ggcctttgcaagccaggtgagcccttgtttctcaatgttgcctttgccctggacagccgaggtggagtgagcgggcaggtggtgcaggggaggggtaagarggctataggtgatgatctgcctccttccaggctgcctactgtgtggagaagctacgactcccccctgagaaggtgaaccccctggggggtgcagtggcct

SEQ ID NO: 408584 - DNA, 201 bp, Homo sapiens
gagtaaggtctttggcaggctgggggaggtgagcagccccagggttctgacatgcctccgctgcctttcacatcctctttagggtatttcttgagaggacscattgctggcccctgtcccagggctgtggcagctgtcactgagttgtaatgacctatgtctacagttgtaaataaagccaaagaccactctgcaaggact

SEQ ID NO: 408585 - DNA, 201 bp, Homo sapiens
gggctcaactggtaaatgctgtgtgcattttgactgctctacttactggtcatttccgtctctctccctctcctcaggcctccctattccttgagacacarcaatattgaaattagaccaactgataaccctacaatagcctctaagtcttcaagtgaaaagaagagtcgtacgtatctcactttaaatcaaaatgattaa

SEQ ID NO: 408586 - DNA, 201 bp, Homo sapiens
aatattctccagaatagcccataaaacaagtctcaataagttttaaacgactataattatataaagtgggttctccaacaacaatagaatcaaattagaamtcaacaacagaaagaaatttgtgaaacaaaatatgtgcaaattaaataacacattcataaacaagtcaaataagaaaccacaagaaaaattagaaaatac

SEQ ID NO: 408587 - DNA, 201 bp, Homo sapiens
tgagagcctggcatggaattgggggctgattctactttctcaccttctgtttcagtgacatcccggagactgtgcctttgtccactgtcaatagacagtgytcgtcggggctacaggcagtggccagcatagcaggtaagttatgactgggtgggtgccttggtcctggacctgtgggtttgggtcagcaaagtcgctgtc

SEQ ID NO: 408588 - DNA, 201 bp, Homo sapiens
cacaaggaatattctccagaatagcccataaaacaagtctcaataagttttaaacgactataattatataaagtgggttctccaacaacaatagaatcaarttagaaatcaacaacagaaagaaatttgtgaaacaaaatatgtgcaaattaaataacacattcataaacaagtcaaataagaaaccacaagaaaaattag

SEQ ID NO: 408589 - DNA, 201 bp, Homo sapiens
atgttagataaaataggctttaagacaaaaatggttattagagacaatgaaggatattttataattataaaaagataaattagaaagatataacaattatmaacatgtatgtatctaacaacagcaccacaaaatacatgaagcaaaaactgacagaattgaaggagagatcagcaattcaacaataatggttggagactt

SEQ ID NO: 408590 - DNA, 201 bp, Homo sapiens
aagtcaaacataaatctggcctatgtgcacatccaggcacagcacctttccttaaacttacttatgacactgagtcctttgctcacattttttcctgttgmccccctccccaccattaccttatagtaatggtatataatgccacatccctcttgccaagatagtagagatagtgatcaataaatactgagggaactcaga

SEQ ID NO: 408591 - DNA, 201 bp, Homo sapiens
atatgaatgttagataaaataggctttaagacaaaaatggttattagagacaatgaaggatattttataattataaaaagataaattagaaagatataacmattataaacatgtatgtatctaacaacagcaccacaaaatacatgaagcaaaaactgacagaattgaaggagagatcagcaattcaacaataatggttgg

SEQ ID NO: 408592 - DNA, 201 bp, Homo sapiens
ggagtgcagtggcatgatctcggctgactgcaacctctaactcctgggcacaagtgatcctcccacctcagcctcctgaatagctgggaccagagacataygccatcacgcccagctaatttttgtattttttgtagagaaggggttttgccatgttgcccaggctgctctcaaactcctgagctcaagacatccacccac

SEQ ID NO: 408593 - DNA, 201 bp, Homo sapiens
gcttgtgtctccagttgccggatctccaagtactcaaagtccatctcctccgccagcgcggtccagtcggccgccacctgtgtccgcacgttcaagaacasagacaggcggcgccgcactcgcatgttgagagcagccaggggaagggaggatgtggaggagaccggggccgcagaccccgcgccgggacctcctgcagcc

SEQ ID NO: 408594 - DNA, 201 bp, Homo sapiens
ccatacattctatttactgagataggagaaaaccgccttatggctgcaggtgagacatgctggcggcaatactgctctttactgcactgagatgtttgtgwaaagtcaaacataaatctggcctatgtgcacatccaggcacagcacctttccttaaacttacttatgacactgagtcctttgctcacattttttcctgtt

SEQ ID NO: 408595 - DNA, 201 bp, Homo sapiens
gtttcaaagaaaaaggatggaaaaatatatatcatgcaaacagtacccaaaagagagctccaggagatatatgaatgttagataaaataggctttaagacmaaaatggttattagagacaatgaaggatattttataattataaaaagataaattagaaagatataacaattataaacatgtatgtatctaacaacagcac

SEQ ID NO: 408596 - DNA, 201 bp, Homo sapiens
acaatccaatcaaaaggcagagattagcaaaatggattttaaaaaaatgatccaagtatatgctgtttacaagagacactttagattcaaagacacaaatmgtttcaaagaaaaaggatggaaaaatatatatcatgcaaacagtacccaaaagagagctccaggagatatatgaatgttagataaaataggctttaagac

SEQ ID NO: 408597 - DNA, 201 bp, Homo sapiens
cactcccatcccaaatggagtccaggccctgtgcatgagcctgtgccctagaagggaagtggcctcaacaggaagaggcattgtcaggtggagcgccttgsccatctgagagcagtctctggtcctggtcccgctccctggcagctgccagcccacatccacagaaggctgtggctctggccgtggcctgggccccgaagc

SEQ ID NO: 408598 - DNA, 201 bp, Homo sapiens
cactgcactccagcctgggtgacagagggagactctgtctcaaaaaagaaaaaaagaaaagtatgtggcatttgtatggaacactttagcttctctgagcytctgggccatccccagggtctttgggccaggagtcctggatccactagacatatgaggagactgaggcttggagaggggcagtgccatggcttctttcac

SEQ ID NO: 408599 - DNA, 201 bp, Homo sapiens
acagggctcagtactcgtggctgggccttgctggccaagtgccctgcctgtgactcccagaggcccactggtcttcctagggctccctggctatttcctascacttgccaagtgttcagctatctctggaggagtcctgctagggcccagttcaccttaccttctcctcctcttcctcctccccagggtggagtccatgtc

SEQ ID NO: 408600 - DNA, 201 bp, Homo sapiens
tgagaggctgggtccccatgggagccctccctcatgagccactcccatcccaaatggagtccaggccctgtgcatgagcctgtgccctagaagggaagtgscctcaacaggaagaggcattgtcaggtggagcgccttggccatctgagagcagtctctggtcctggtcccgctccctggcagctgccagcccacatccac

SEQ ID NO: 408601 - DNA, 201 bp, Homo sapiens
ctgtcttctctcccacttcccgccatctccactctccctcccagccaggcagcctgcacaaagctcccagcctgaggacttttttttttttttttttttttagtagacacagggtcttactatgttgctcaggctggtctcaaactactggcctcaagcaatcttcctgcctcagcctcctaaagtgttggatctacaagt

SEQ ID NO: 408602 - DNA, 201 bp, Homo sapiens
aggctacatgtgccctcctcctgggagcctggaatccagaggcaagctactcagggtcctgcgtggtcagcctctctactccctgagaggctgggtccccwtgggagccctccctcatgagccactcccatcccaaatggagtccaggccctgtgcatgagcctgtgccctagaagggaagtggcctcaacaggaagaggc

SEQ ID NO: 408603 - DNA, 201 bp, Homo sapiens
taattttgccatactggtcttcgctatgcactgagtagtgatctcaatgtggtggtctctgctgtggtgtggcctgtcctttatgttagctctgaggacawatcatgagggcctaggctgagaccattgtggaagggggttcttccattccaggagctgcccagaggtccccaggtccccaagtctgtgtctttgtgctga

SEQ ID NO: 408604 - DNA, 201 bp, Homo sapiens
gggctgaggttaggaggcacctgggcagggggtccaggctctgtgggcagtttggggaaggttggaaggggctgcacctggcagtgaagaaaacctgcaasgcgatggaggttgggggtgcattggcggatcgtgcttctagcagcccactgtttggggagaccctgaaggccacagcggccttggctggctcctgctggc

SEQ ID NO: 408605 - DNA, 201 bp, Homo sapiens
tgtgcaggttggggaggataaggttggacaccagaatgaggcaacgagagtccttggctccctgctcttgtggactcaacctctcccctactttgaagtgmtgagccacgatacacaaaacctttgggactggagcagaagttctctgtagcttgatttttagccaaagccaggttgtcatttgccttttgtgagtgtgga

SEQ ID NO: 408606 - DNA, 201 bp, Homo sapiens
ttgttgggaggttatctggacaaaagaaactgcccttgaaggccccgagggatggggagcagagggcagatgcttctggtgcacatggatgtggccttatrtcccatgacactcagagctccccagtcagccacgggcaggagcagcaccacaactgggctccaacagctacctgggccagtcatgggctatgttggctgg

SEQ ID NO: 408607 - DNA, 201 bp, Homo sapiens
acctttgggactggagcagaagttctctgtagcttgatttttagccaaagccaggttgtcatttgccttttgtgagtgtggactctgtcctcatttgtcasgtgagtaatcaagtaagaatgctgaaaagtgactttcagcctttttactagttgagctgagaactccagtcatatcccactagcagagactttgggatag

SEQ ID NO: 408608 - DNA, 201 bp, Homo sapiens
gaatcttcaaagggagagagagagaaggatccctgtggcccaaacaggcttcccttgcctttgggctgtgcttggtctttgattgaagattctcataggartagaagggaatgtgcttgtggggccctggggagcaagtgcctgcagagatggggtctgcccagtagctgctcacccccattccatggatctggcctggca

SEQ ID NO: 408609 - DNA, 201 bp, Homo sapiens
cttaccttctcctcctcttcctcctccccagggtggagtccatgtccctggctgacagagggaaccctggaaatattacttcgcgcttgatggagaaggasaaggccagagattgcctgattcctatggggtgagtgctcccatagctctgtgtgcttgtgccctctctgcctggggcagggagccaaggaacttttatca

SEQ ID NO: 408610 - DNA, 201 bp, Homo sapiens
ttcttttggcctggctgtcaacgtgtttcccttccttgattaaatggtgttcaggcttcatgtccttcctcccgcagggagccttccctgatttcccacastctggcccctcacctggttttgagctcatgaggcaggtgaggttggatggccctcatctctctgcacacagggcctcttctaggggagactgagccccag

SEQ ID NO: 408611 - DNA, 201 bp, Homo sapiens
gcagggtatggcagggtcaggcatgcagtttgcgtctgggtacaagcacctgagggtggcgtgcaggggtgctgtctgtacacatgtgagggtgtgccatygaggcaagggctgcagactcccccactgaccagcatgttctcctgtgcttggagcaccagctgcttgtccgctgaggctgtctcctcctcacactcctgc

SEQ ID NO: 408612 - DNA, 201 bp, Homo sapiens
  misc_feature (1)...(201): n = A,T,C or G
tgtcacttactgggctcccagaatggaccagtatccagagagtgctcagcactgctgcatgcaatgctggagactggcagactggggcccacagcaaaacngacagggctgggtgctcacttctggggataaaccacgggtcccttctcctctcctccccaaccctggatggactttaccacttgttgggaggttatctgg

SEQ ID NO: 408613 - DNA, 201 bp, Homo sapiens
aacagggtacaccccatccagcttcatctgccctgggaagtgaaagaagcaagacttacaggctggtctttttgctcaggctgttttgggggctcccgaartactcaaacttgagggagaaacgggtccgtattggggagcgattggtgagaatgagctggcgagtcacacgggtcctcagtggcaccgctgagccaaagt

SEQ ID NO: 408614 - DNA, 201 bp, Homo sapiens
agcaattaaatggacccctgggtgagccccaccaagggcggggcaaggacctggctctgggaggctgctactgtccctccactccacactccctactccargtcttgggtcctggcccaggcagcagcctactgtctcctcttccctcctcgatatggccccagccctgcatctcctgggaaaaggtgtggaaagttctac

SEQ ID NO: 408615 - DNA, 201 bp, Homo sapiens
cggcatgctggcatggctcccagttgctgggcctcatgtgggcaagcccagggtacctacagccctgtcccctgccatctcctgcctgccagggcaccacrcctccaagtgtgtgtggggagaccacacagagggcagggatggggtaaagggagctgtccccacaggagtggtgagtggccgcaataacactgtggcgtt

SEQ ID NO: 408616 - DNA, 201 bp, Homo sapiens; identical to SEQ ID NO: 91709

SEQ ID NO: 408617 - DNA, 201 bp, Homo sapiens
ctatttaacaacttaacggtaggataacgtatgcaggtttcatccctccagactaaactaggggtgccttgctggttaccttattcatccctgtatcctcsacactacagcggcccacacaggaacccacacacagtagatactccatttatgctgagtgctggagcaattaaatggacccctgggtgagccccaccaagg

SEQ ID NO: 408618 - DNA, 201 bp, Homo sapiens
ttgcaggtagggaggagggctgggactgggggctcaggcagggggaaataccacagtggtctggcctcactcgagaattaatgagacctggggctggtgcyttccccaggcggcaccaggtgagctgggctctggggctgccctgtgccctggcaacccacccacctgccctgagcagactatgctgattccagttcaact

SEQ ID NO: 408619 - DNA, 201 bp, Homo sapiens
tgtggtggtttggtcactgtcaccttcacctagactgtggctccatcattggctgcagcaaatggagctgcagaagttgtatttggcagtgcctccagggraggtcagggcacaggtgcccaggcttgggtgggcatctggtgctgggagggcaggggagtaaggtctttggcaggctgggggaggtgagcagccccaggg

SEQ ID NO: 408620 - DNA, 201 bp, Homo sapiens
ggagtctgaagctggctgtccatggtgctggcagggcagcaagagcccagagcaagggctgtttccaagctgagattgtgcctgtgaccaccacggtccakgatgacaagggcaccaagaggagcatcactgtgacccaggatgagggtatccgccccagcaccaccatggagggcctggccaaactgaagcctgccttca

SEQ ID NO: 408621 - DNA, 201 bp, Homo sapiens
ctgctcttcccaggggagagctggtcagttctttcctttacctccttctctggtctttgctcccactgtacccctaccattcaaacatccccagctgcggrccacccgccagctgcagggattacctccccagaaacccaggcgggctctgaagcaggactccctgcccacaggctctgtgccatggttactcctggacac

SEQ ID NO: 408622 - DNA, 201 bp, Homo sapiens
tgacttccctatctgtgcctttatatccactttcagggcaggctgtaccatatcctgagtcatcactactgtctgtggcatggactggcccttacatcctrtcctgcctacagccttgggaacccaaagttccaagcacagctctacagcctggtcccttcctctaggctgtcagaccaatgcccacactatctgctgttt

SEQ ID NO: 408623 - DNA, 201 bp, Homo sapiens
cacgaatgcccatcccaagctcggtgggcatcgcgtttcaacctggtgaggtttgagagtctgagggccaggtgttggaggggagagaggctgaaggcgarggctgggcagactctccaccccccaggccactgccctcttgtgtacccttaccgtgcagatgaggttgtcccagtactcgccccacatgttggcacagcc

SEQ ID NO: 408624 - DNA, 201 bp, Homo sapiens; identical to SEQ ID NO: 91712

SEQ ID NO: 408625 - DNA, 201 bp, Homo sapiens
ggctgcctcagacacgaatgcccatcccaagctcggtgggcatcgcgtttcaacctggtgaggtttgagagtctgagggccaggtgttggaggggagagargctgaaggcgagggctgggcagactctccaccccccaggccactgccctcttgtgtacccttaccgtgcagatgaggttgtcccagtactcgccccacat

SEQ ID NO: 408626 - DNA, 201 bp, Homo sapiens
aaatgcctcagccagaaccccagaggctgcctcagacacgaatgcccatcccaagctcggtgggcatcgcgtttcaacctggtgaggtttgagagtctgarggccaggtgttggaggggagagaggctgaaggcgagggctgggcagactctccaccccccaggccactgccctcttgtgtacccttaccgtgcagatgag

SEQ ID NO: 408627 - DNA, 201 bp, Homo sapiens
tgggcaggctgcaggtcctgtggcaacttagttcagcatatcccctgggaatagcttcaggaagggcccactgtgcccaggctggacagtgcacagctagsaggagatgcccagtatctggaccccagggcagggcttcatgcatccacgcacccaccccgtggccttctagccaacctcttttcgatgagctcactagca

SEQ ID NO: 408628 - DNA, 201 bp, Homo sapiens
cccctcttcagtgtcaccagcttcctctcctaaccctttctcaggcccagagcactctttgcccccacatgctcccctggcccacatcggcttacccttcctcttagactcagcctacactctgcctcccctccacaggggagcctggcccttcaacacgttcccccagcactccggccttcccttcagttgtatgccaca

SEQ ID NO: 408629 - DNA, 201 bp, Homo sapiens; identical to SEQ ID NO: 91742

SEQ ID NO: 408630 - DNA, 201 bp, Homo sapiens
ccaaaaaaaaaaaaaaaagccaggcgtggtggtgcggtgcacacctgtagtgggaggatcacttgagcctgagaggtctaggctgcaatgagctgtgattktgccactgcactctaatctgggcgacagagtgagatcttgtcaaaaaaaaaaaaaaaagaaaaggaaaaccagaaggatatactttggaatgttgatagt

SEQ ID NO: 408631 - DNA, 201 bp, Homo sapiens
gttgttcccggcgcaggcccccgttgatcgtggcgctggtgctgctgacggagctgctggttctgctgccagccgacttggggcttcgcaccagatcattmtctgagctgtcctgggagcccttgagggcctgcagggccacggcacctgccctgccattgcccggccatctggatagccgcaagttgttgacttcctgtc

SEQ ID NO: 408632 - DNA, 201 bp, Homo sapiens
gggatgaggcacgggctggcacctccatggtcctggtgttgtggctgtcagtgccttgcacttggaaaagccttgtggtggatgctgactgcccctttccrtggtgcccagctctctcctataggagagcaaggcctcaggctgggcaagggctcccaggggcgccttcctgtcccagtgtgggacatattgcctcagagc

SEQ ID NO: 408633 - DNA, 201 bp, Homo sapiens
tgttcccggcgcaggcccccgttgatcgtggcgctggtgctgctgacggagctgctggttctgctgccagccgacttggggcttcgcaccagatcattctmtgagctgtcctgggagcccttgagggcctgcagggccacggcacctgccctgccattgcccggccatctggatagccgcaagttgttgacttcctgtcca

SEQ ID NO: 408634 - DNA, 201 bp, Homo sapiens
caaaaaaaaaaaaaaaagccaggcgtggtggtgcggtgcacacctgtagtgggaggatcacttgagcctgagaggtctaggctgcaatgagctgtgattgkgccactgcactctaatctgggcgacagagtgagatcttgtcaaaaaaaaaaaaaaaagaaaaggaaaaccagaaggatatactttggaatgttgatagta

SEQ ID NO: 408635 - DNA, 201 bp, Homo sapiens
agctcaacatccaggtggacgacagctatgcccggaagatcttcagggtgaggcaggaagtgggggctggggctgcctgtccatggggcccttgaccccgscccaaggcctgctctgagcccactcggctgtcctggctctgcaggagtgtgaccactcccagacagactccctggaggacgaggagattgaggccttcta

SEQ ID NO: 408636 - DNA, 201 bp, Homo sapiens
ggcttcgcaccagatcattctctgagctgtcctgggagcccttgagggcctgcagggccacggcacctgccctgccattgcccggccatctggatagccgsaagttgttgacttcctgtccagagaggagcctcaggctggggaagatggggaatcagtagcccacagggaggctgcactgaacccacaggcctcttacct

SEQ ID NO: 408637 - DNA, 201 bp, Homo sapiens
atcctgccccactcagtagtgtcagtcatccagggcttgggactcccgcatctgtttgcccaccaccccagctagaagacacatctcccggggcagttgcmcactgcccgccaccagtggatcctgccttgggctcctccagctcagtgtcagatgcactagtgctggggcagtgagggggtgcccacctccctgcgggca

SEQ ID NO: 408638 - DNA, 201 bp, Homo sapiens
acatgatgtcatacttgtccaggtcctcctggctgaagaaccccacttctgcgaggaccaggcagcccatgtggctggagcactcaaacagtcgtggctgsaagctggggacctcctcagggagcctggccagcacggacagcaaggctgtgagccacccagaggggcaccccagcccatggcacaagtgccccaccccag

SEQ ID NO: 408639 - DNA, 201 bp, Homo sapiens
cccgtgccatctcacgctgatcaccattacagccctagcaggcaaagagatggctcaggccctgcatgaggaggggccttcacctccggccccacgtcccrttcacagggtgtatggggtggggctgggcccaagtcacaggaggcctaagctgacagcaggacaccagtgaacaaggcatcttcctcaccctacaggcct

SEQ ID NO: 408640 - DNA, 201 bp, Homo sapiens
ctggaggggagggtggccctgaggccactgtggtgtcagacgaagacgaggctgctgagatggaggatgaggcagtgaggagccgtgtgcagcacaagccmaaggtttgagggggagctgtggggtggggcagcccgggccttccccatcccctcacccgtgggaggtctgccttgtctcagttctctgtggctgccactc

SEQ ID NO: 408641 - DNA, 201 bp, Homo sapiens; identical to SEQ ID NO: 91753

SEQ ID NO: 408642 - DNA, 201 bp, Homo sapiens
tctcagcccgcggctccctgggtgggactgccgggcacgaccctgggcgtttccaggcttgtccgagatctagcccggggggtgggtgggcgggcggtackggtctaaagacttccctccgcctcgcggacccccttgtcctggtcatgaaagtctgggctccacgatcccgctcgcacggaggggcggcgaaggaaggaa

SEQ ID NO: 408643 - DNA, 201 bp, Homo sapiens
ccccctccccgcagagctgggtccactagctttgcctgaactctcacattggccttatcagcccaggaggcctggtggcttcctgggaggccctctggggkcctctgacaccaagagcccagttttcccaagggactctccaaaggggtggtgggcaacaggatctagggaccctcccaggttgttggtgggaggggtctc

SEQ ID NO: 408644 - DNA, 201 bp, Homo sapiens
ctcagcccgcggctccctgggtgggactgccgggcacgaccctgggcgtttccaggcttgtccgagatctagcccggggggtgggtgggcgggcggtacgrgtctaaagacttccctccgcctcgcggacccccttgtcctggtcatgaaagtctgggctccacgatcccgctcgcacggaggggcggcgaaggaaggaaa

SEQ ID NO: 408645 - DNA, 201 bp, Homo sapiens
aggggcggcgaaggaaggaaacagcatccaagaacgaccaaaattctccttgccccatccgggccgccccagaggctccccaaagcctgggcgtgcctggrccgcgtcaggccgcgcgggtgtggcggagcaggggctaagcgggtggggagaggaggtgtgcaaggttaaccgtggtcgggccgtgcagccttaactgcc

SEQ ID NO: 408646 - DNA, 201 bp, Homo sapiens
ggggcggcgaaggaaggaaacagcatccaagaacgaccaaaattctccttgccccatccgggccgccccagaggctccccaaagcctgggcgtgcctggamcgcgtcaggccgcgcgggtgtggcggagcaggggctaagcgggtggggagaggaggtgtgcaaggttaaccgtggtcgggccgtgcagccttaactgccc

SEQ ID NO: 408647 - DNA, 201 bp, Homo sapiens
ggcggcgaaggaaggaaacagcatccaagaacgaccaaaattctccttgccccatccgggccgccccagaggctccccaaagcctgggcgtgcctggaccscgtcaggccgcgcgggtgtggcggagcaggggctaagcgggtggggagaggaggtgtgcaaggttaaccgtggtcgggccgtgcagccttaactgcccag

SEQ ID NO: 408648 - DNA, 201 bp, Homo sapiens
aggagctcaacatccaggtggacgacagctatgcccggaagatcttcagggtgaggcaggaagtgggggctggggctgcctgtccatggggcccttgaccmcggcccaaggcctgctctgagcccactcggctgtcctggctctgcaggagtgtgaccactcccagacagactccctggaggacgaggagattgaggcctt

SEQ ID NO: 408649 - DNA, 201 bp, Homo sapiens
gagctcaacatccaggtggacgacagctatgcccggaagatcttcagggtgaggcaggaagtgggggctggggctgcctgtccatggggcccttgaccccsgcccaaggcctgctctgagcccactcggctgtcctggctctgcaggagtgtgaccactcccagacagactccctggaggacgaggagattgaggccttct

SEQ ID NO: 408650 - DNA, 201 bp, Homo sapiens
cctccagtttgcctcttgggactggggaaggcagagtcttcctgtaccccctgccaaggggctccctgaagtcaggacacacacagctgcacacagggcaygaccctgtctcctctcccatgcagggcttctccctctgtcttcggccctctgcccatagaccccagggctggggctaactgagggtggttccagtctctt

SEQ ID NO: 408651 - DNA, 201 bp, Homo sapiens
agggcttgggcctcaccaggaggcctccactgctgaccgaaccacacctcccctcaggaaacggctttgtccgccacaacgtggggcacctgagcagaatmtacccggctggatggagaacagactcctccaactacagccccgtggagatgtggaatgggggctgccagatcggtatgggctggctggggctggaggagg

SEQ ID NO: 408652 - DNA, 201 bp, Homo sapiens
ggggagggtggggagcctagccggggcgctaggtgtgtcttgaccagttgcccctccccacctagcaactgaaggggaagatcctgctgaaggggaagaarctcggggggctcctgccccctggaggggagggtggccctgaggccactgtggtgtcagacgaagacgaggctgctgagatggaggatgaggcagtgagga

SEQ ID NO: 408653 - DNA, 201 bp, Homo sapiens
ggaatctgctcagggctgggtaaatacaaaggtcagtcatggatcaaaaccacagatggggaaactgaggcctggcctggtggggcataggtcatttatayaacctgggctggcagtggggaaactgaggctggctggggttggggagcagggccagttaaattgccatcgggaaattgaagcctagtctggactggagag

SEQ ID NO: 408654 - DNA, 201 bp, Homo sapiens
tagaacttccctttgaggtggttgctgttattatctccatttcatagacaggaaagcagaggcccagcagcatgaagtcccttgcccaggtcacacagctygttgggaagggcacctgaacctaggcacaaatgattctggagctattggagttgggacgttgttggctccatgacgctctggggtccatctgtgtctgtc

SEQ ID NO: 408655 - DNA, 201 bp, Homo sapiens
gagaagtgaagtggccgattggctctcaatagagctggctgctggactatgtacgtggctagggtgatacacgcacacatacgcccttatagatgtttctrtattacaccagtgggttactaagggttggggtcacttttatcaactttatcagttggtacagaacctgctgggtggtgaaggctctggcgtccttttggt

SEQ ID NO: 408656 - DNA, 201 bp, Homo sapiens
ggaaggataaagagtgtgtgagcaactgaagcctggggaagtggtccagagggttctgtgagccctgaagatatgtgggacaggctggctgggggaggggrtatggataaaatgggagaggccatctgttgttggggatctgggctcagaaaagaaaaggcctgtggcttcatgagggcttccccacataggcttaggctc

SEQ ID NO: 408657 - DNA, 201 bp, Homo sapiens
gggatgcctcccctacactgttcttagcccagtgctgatgggggaacaaaagcagagagagggaagggagttgcctaaagctatagggggtggatgttagyactgacctctatcctgattggaagcaggagactggggaaggataaagagtgtgtgagcaactgaagcctggggaagtggtccagagggttctgtgagccc

SEQ ID NO: 408658 - DNA, 201 bp, Homo sapiens
ctagggccccagggccagcccacagcctgtgactgctctgtcctgcctgtagtggccctgaatttccagacacctgggccagagatggacgtgtaccaggrccgcttccaggacaacggggcctgtgggtacgtgctgaagcccgccttcctgcgagaccccaacggcacctttaacccccgcgccctggctcaggggccc

SEQ ID NO: 408659 - DNA, 201 bp, Homo sapiens
cctaacatagtgtctgctgctgcctccctggggaccaggagctagcccagtccctggagctgtccttcattccgttaggaataacactgcagccctctccmccctccggccagcgagtggtcaaggatttttataaaaatcacgataagattaagccttgtggtctctttacctggatgccagaaaaatcccctgtgaagc

SEQ ID NO: 408660 - DNA, 201 bp, Homo sapiens
gggtccaggcctggcttgtggacactggctgtggttatccccagggcaacttgggtatggaagctggtttaggtactttgggctgccataacaaaatatcrtaggtggcttaaacagcataatttattttctcacagtgtggaggctggaagtccaaggtcagggagccagtatggtcagagcctggtgagggctctctcc

SEQ ID NO: 408661 - DNA, 201 bp, Homo sapiens
gtccaggggataggggcagtcgagagggcttgggttcagaagaagcccagctgctttttctcctgccgctgcctccacgtggccatgctgtagaattcctycttggatttcccaaagatatcttggaagtcagagtctgagagatagaactgggcaggggagagagggggaggtacagggtagggtgtcatctgagcccag

SEQ ID NO: 408662 - DNA, 201 bp, Homo sapiens
gggagggtggggagcctagccggggcgctaggtgtgtcttgaccagttgcccctccccacctagcaactgaaggggaagatcctgctgaaggggaagaagstcggggggctcctgccccctggaggggagggtggccctgaggccactgtggtgtcagacgaagacgaggctgctgagatggaggatgaggcagtgaggag

SEQ ID NO: 408663 - DNA, 201 bp, Homo sapiens
ggagggtggggagcctagccggggcgctaggtgtgtcttgaccagttgcccctccccacctagcaactgaaggggaagatcctgctgaaggggaagaagcycggggggctcctgccccctggaggggagggtggccctgaggccactgtggtgtcagacgaagacgaggctgctgagatggaggatgaggcagtgaggagc

SEQ ID NO: 408664 - DNA, 201 bp, Homo sapiens
agggtggggagcctagccggggcgctaggtgtgtcttgaccagttgcccctccccacctagcaactgaaggggaagatcctgctgaaggggaagaagctckgggggctcctgccccctggaggggagggtggccctgaggccactgtggtgtcagacgaagacgaggctgctgagatggaggatgaggcagtgaggagccg

SEQ ID NO: 408665 - DNA, 201 bp, Homo sapiens
ccaggccactgtggggaaggctaggggccccaggactcactgctgttatctcagagatggttgatgctgctgccgggctgccatccaccacttccttgtgrgacgggtggctctggagcaagaatcggggcaagtatcagggccagggcaggagaagggggcaccaatgggacacatgaggggcctgaggacaagaccagg

SEQ ID NO: 408666 - DNA, 201 bp, Homo sapiens
ggtgtgtcttgaccagttgcccctccccacctagcaactgaaggggaagatcctgctgaaggggaagaagctcggggggctcctgccccctggaggggagrgtggccctgaggccactgtggtgtcagacgaagacgaggctgctgagatggaggatgaggcagtgaggagccgtgtgcagcacaagcccaaggtttgagg

SEQ ID NO: 408667 - DNA, 201 bp, Homo sapiens
tgtgtcttgaccagttgcccctccccacctagcaactgaaggggaagatcctgctgaaggggaagaagctcggggggctcctgccccctggaggggagggkggccctgaggccactgtggtgtcagacgaagacgaggctgctgagatggaggatgaggcagtgaggagccgtgtgcagcacaagcccaaggtttgagggg

SEQ ID NO: 408668 - DNA, 201 bp, Homo sapiens
tgcccagcttgtggggtggggtgctggcagagggtaaggagatgtccctctcagctttagagggacatcagccttagaagggatagtggaattccccgccrgaggccggaggtggccctgtcctctggcagcctgggaactcccttctgcctcctcttgtctcaggctcctcagacacagccagtagttgggaatattcta

SEQ ID NO: 408669 - DNA, 201 bp, Homo sapiens
gacactgtgcaactccctgtgacagtgtgtaattttggggggcagtgtgtcattgtgtgtggctcattgtctctttgaggttgtgtgagtggtggtctagkgtgtgactgtgtatttgtgtggccatatctgtgtagctgtgtatcgctgtgggtcccaggcccagtgtgtctttattatgcatcacccttggtataggaa

SEQ ID NO: 408670 - DNA, 201 bp, Homo sapiens
atgaccaaaagcctctgaggggagtggaagcagggcctccccagcattgtaggtatgttggggtccaggggataggggcagtcgagagggcttgggttcaraagaagcccagctgctttttctcctgccgctgcctccacgtggccatgctgtagaattcctccttggatttcccaaagatatcttggaagtcagagtctg

SEQ ID NO: 408671 - DNA, 201 bp, Homo sapiens
tgagcctcagtttcctcttgtgtaaaacaggaataatgacagtgccttcctcagagggttattgagagaattaagtgcatgtgctaagaacagtatcttayttaaatattaactattattatgggagcctctatcatcatcatcatgatgctctggcactatatgttgtgtggctatgcatgactaagtgtgacactgtgc

SEQ ID NO: 408672 - DNA, 201 bp, Homo sapiens
ggttcaagggattgtcttgcctcagcctcccaagtagctgggattacaggtgccggccgccacgcccggctaatttttgtatttttagcagagacggggtktctccatgttggccaggctggtctcgaactcctgaccttaagtgatcctcctaccttggcctcccaaagtgctgggattacaggtgtgagccactgcgcc

SEQ ID NO: 408673 - DNA, 201 bp, Homo sapiens
cattacctcccagggccctcccctcactgaacaccccccacatacacactaacttttcctacacccaatcccttttgcccccacccctgcaagaggtgccrtttgtaaaaacagaaaatagaggggcctcatcttggccccagtagacctgggctccagtcctagctttggttctacttactgtgggtctgagaatcatcc

SEQ ID NO: 408674 - DNA, 201 bp, Homo sapiens
gatgcgacagcatccatcctccttccttcaccttacttcttccactctttattctggctatgcctggactggcttctctagcaggtcccccgatgtgcccmaaaggacattacctcccagggccctcccctcactgaacaccccccacatacacactaacttttcctacacccaatcccttttgcccccacccctgcaaga

SEQ ID NO: 408675 - DNA, 201 bp, Homo sapiens
accaaaagcctctgaggggagtggaagcagggcctccccagcattgtaggtatgttggggtccaggggataggggcagtcgagagggcttgggttcagaaraagcccagctgctttttctcctgccgctgcctccacgtggccatgctgtagaattcctccttggatttcccaaagatatcttggaagtcagagtctgaga

SEQ ID NO: 408676 - DNA, 201 bp, Homo sapiens
tatctacacagcagttagaacagtgcctggtacccagtgagtactatgttcctgcaggaggccccctccccaaatttctatgccctatgagttgccatctrtagttctttgggagatgatgggggcatcataaggtagttcctagtcatggaaaatagggccagaactagattcaagagcgagccagccagctctttctag

SEQ ID NO: 408677 - DNA, 201 bp, Homo sapiens
tttcacagtgtgggtgccccagcactggatgtgctgcaggaccacactctctggcctagggctccacactctctggaaggagcccagagggactccttctrttggcctggggagctatgcggctcacctagatgtgacatgtcccttctgtcctcaccccagatgcatgcagaagtaatgtagtttactggcatagattct

SEQ ID NO: 408678 - DNA, 201 bp, Homo sapiens
cccgcggctccctgggtgggactgccgggcacgaccctgggcgtttccaggcttgtccgagatctagcccggggggtgggtgggcgggcggtacgggtctwaagacttccctccgcctcgcggacccccttgtcctggtcatgaaagtctgggctccacgatcccgctcgcacggaggggcggcgaaggaaggaaacagca

SEQ ID NO: 408679 - DNA, 201 bp, Homo sapiens
atgagtcatggagtccctgccccttccagtgctccctcttctttcttcaggccagaggtgtctttcgtgcgcctgccagactagcaagaagggaggctggscagctgagaggacacagtggacatctctgctttctctctgacacagcgtcattccttggctcctgttggaacaggcttcatcctcagtgtctgtgccttt

SEQ ID NO: 408680 - DNA, 201 bp, Homo sapiens
agaggtgggggggacagcaagggtaagggtggcagagatgggcataggggtcccacagcaaccacaatgttgacaccaagaaccccaactgccattatctyggggcctgcacagattcaggcatcatctcattgaacctagaacttccctttgaggtggttgctgttattatctccatttcatagacaggaaagcagaggc

SEQ ID NO: 408681 - DNA, 201 bp, Homo sapiens
agggtgaggcaggaagtgggggctggggctgcctgtccatggggcccttgaccccggcccaaggcctgctctgagcccactcggctgtcctggctctgcargagtgtgaccactcccagacagactccctggaggacgaggagattgaggccttctacaagatgctgacccagcgggtggagatcgaccgcaccttcgccg

SEQ ID NO: 408682 - DNA, 201 bp, Homo sapiens
tgagggtggcaggagggcagcaggcattggagtgatgctgggccctgctaactcaccatgtgaccctaggccttagtgtaccctgagcaggctgtgctctwgggccccagggccagcccacagcctgtgactgctctgtcctgcctgtagtggccctgaatttccagacacctgggccagagatggacgtgtaccagggcc

SEQ ID NO: 408683 - DNA, 201 bp, Homo sapiens
gagggtggcaggagggcagcaggcattggagtgatgctgggccctgctaactcaccatgtgaccctaggccttagtgtaccctgagcaggctgtgctctarggccccagggccagcccacagcctgtgactgctctgtcctgcctgtagtggccctgaatttccagacacctgggccagagatggacgtgtaccagggccg

SEQ ID NO: 408684 - DNA, 201 bp, Homo sapiens
aagcaggaggattgcttgggcctaggagtttgagactagcctgggcaacatagggagaccctgtctctacccaaaaaaaaaaaaaaaagccaggcgtggtkgtgcggtgcacacctgtagtgggaggatcacttgagcctgagaggtctaggctgcaatgagctgtgattgtgccactgcactctaatctgggcgacagag

SEQ ID NO: 408685 - DNA, 201 bp, Homo sapiens
aggtgtgtcttgaccagttgcccctccccacctagcaactgaaggggaagatcctgctgaaggggaagaagctcggggggctcctgccccctggaggggarggtggccctgaggccactgtggtgtcagacgaagacgaggctgctgagatggaggatgaggcagtgaggagccgtgtgcagcacaagcccaaggtttgag

SEQ ID NO: 408686 - DNA, 201 bp, Homo sapiens
taggtgtgtcttgaccagttgcccctccccacctagcaactgaaggggaagatcctgctgaaggggaagaagctcggggggctcctgccccctggaggggrgggtggccctgaggccactgtggtgtcagacgaagacgaggctgctgagatggaggatgaggcagtgaggagccgtgtgcagcacaagcccaaggtttga

SEQ ID NO: 408687 - DNA, 201 bp, Homo sapiens
catgggagccactagccacttgtggctattgattgagaccttgaaatgtggctagtgtgactgccgaactgaattctcaatcttatttaattttaactaawttatatttaaatagccccaggtggctagtggctgctgaattggacagtgcatatagatcattgcagcctgggtttcacatagccaggcccctggagatcc

SEQ ID NO: 408688 - DNA, 201 bp, Homo sapiens
tcagcccgcggctccctgggtgggactgccgggcacgaccctgggcgtttccaggcttgtccgagatctagcccggggggtgggtgggcgggcggtacgggtctaaagacttccctccgcctcgcggacccccttgtcctggtcatgaaagtctgggctccacgatcccgctcgcacggaggggcggcgaaggaaggaaac

SEQ ID NO: 408689 - DNA, 201 bp, Homo sapiens
gtccagcagcctcatagttcactatggcatcctggatccctgcaaggtcaggacctgaggatctgaccctgcatgacctgaggactctcactttgccacarctgctcccttgggaggagcagccttcacttttcctcctgatgcatctggacttgggcccatgaccctctggagggagctcctatgggggttttgcagccc

SEQ ID NO: 408690 - DNA, 201 bp, Homo sapiens
ggtccagcagcctcatagttcactatggcatcctggatccctgcaaggtcaggacctgaggatctgaccctgcatgacctgaggactctcactttgccacmgctgctcccttgggaggagcagccttcacttttcctcctgatgcatctggacttgggcccatgaccctctggagggagctcctatgggggttttgcagcc

SEQ ID NO: 408691 - DNA, 201 bp, Homo sapiens
tgaggccactgtggtgtcagacgaagacgaggctgctgagatggaggatgaggcagtgaggagccgtgtgcagcacaagcccaaggtttgagggggagctktggggtggggcagcccgggccttccccatcccctcacccgtgggaggtctgccttgtctcagttctctgtggctgccactcagaccctctgccccgctct

SEQ ID NO: 408692 - DNA, 201 bp, Homo sapiens
acctgggagaaaggtggaggaaggtcacatcagactgtcacccctgaggaggcccagggatgcctcccctacactgttcttagcccagtgctgatgggggracaaaagcagagagagggaagggagttgcctaaagctatagggggtggatgttagcactgacctctatcctgattggaagcaggagactggggaaggata

SEQ ID NO: 408693 - DNA, 201 bp, Homo sapiens
tgcttgaacccgggaggcagaggttgtagtgagctgagatagcgccactgcactacagcctaggtgacagagtttgactctgtctcaaaaaaaaaaaaaaattaataacacaagtgaaataatgttatacatggatattgtcctgccatttgtatttttcacttattatgtcctatggcaactcatggagaactacttttt

SEQ ID NO: 408694 - DNA, 201 bp, Homo sapiens
tgcatttccctaatgattagtgatattgagcatttttccatgtacgtttatatatcttctttggagaaatatctattcaggtcctttgcccattttttggwtcatttgtctttattattgagttgtaagagctctttatatattatagatacaagtcttttatgagatttatgcttgcaaataatttctccattctgtggg

SEQ ID NO: 408695 - DNA, 201 bp, Homo sapiens
ttattgagttgtaagagctctttatatattatagatacaagtcttttatgagatttatgcttgcaaataatttctccattctgtgggttgtcttttctctytcttgatgggtttttttaggctagaaaagtgaaacagtgagagtggagaaggaacaaagaaatctggaactgcttgtgatcaattagttgtaaacacccc

SEQ ID NO: 408696 - DNA, 201 bp, Homo sapiens
tttttttcaatattgctttagctattctgggtcccttgaatttctatacgaattttaggattagcctgtcaatttctgcaaagaagccagcaagattttgmtagggattatattgaatgtatagatcaatttggagcatattcccagtataataatgtcaagtcttctgatccatgaacatgtaattctttccatttattt

SEQ ID NO: 408697 - DNA, 201 bp, Homo sapiens
tcaggggagactctgtcggtggatcagttagtgacgttcctgcagcaccagcagcgggaggaggcggcagggcctgcgctggccctctccctcattgagcrctacgagcccagcgagactggtgagagcctgaccagggcctgctacctgcagtcgcagggccgcactgggctgggagacccctggggagactgcagccag

SEQ ID NO: 408698 - DNA, 201 bp, Homo sapiens
tatggttttccaggttttgcacttaaacaatttctttaaaagcattttattcactttgctgctactgtaaatggaaatgttttcttaatttcactttcaawtttttcattgctggtgtatgtccactccttaggggacacattttgagccctgttaatttccttttctgtgtgcttttgagcatttgaaagacttttaagt

SEQ ID NO: 408699 - DNA, 201 bp, Homo sapiens
gctggagccaggatgcgaagcagctgtaatggtctgagcggatttattgacaatgaataaagggcacgaaggccaggccagggcctgggcctcttgtgctragagggcagggggcctacggtgctattgctttaggggcccaccacgggcaggggcctgctcccagctgccacgctctatcatatggagcgaggtgttggg

SEQ ID NO: 408700 - DNA, 201 bp, Homo sapiens
cgcgccgtggcaggcggggggagggaagaacagagaaggatgcgggctggctgagagcggtggcaggctccgggcaactccggccctgggtcagggagatygcctccgcagccgccctggcttcccaaatgccttcacccgtcgcgggcccaggaccagggggcggagcgcaggtgtgcggggcggagagcgtgagctctg

SEQ ID NO: 408701 - DNA, 201 bp, Homo sapiens
tgctccaaccgccagggggcggtgctctccgccgcggccgcggagagctgcaccgcccactcaccacccccccccacgtgggtccgaatggttaggtccgmtgggcaggtagcgcgcttccgcggcttccctccgcccctctcccttcccccattggtaggggctgcgggtccgggcggaagtggggcaggcgggcgggag

SEQ ID NO: 408702 - DNA, 201 bp, Homo sapiens
caggctgtacagccacgtgggcgctgcgtgggagccagaggcctgcgctgctccaaccgccagggggcggtgctctccgccgcggccgcggagagctgcascgcccactcaccacccccccccacgtgggtccgaatggttaggtccgctgggcaggtagcgcgcttccgcggcttccctccgcccctctcccttccccca

SEQ ID NO: 408703 - DNA, 201 bp, Homo sapiens
gtctgggatgtgagagggtccaggctgtcaggctgtacagccacgtgggcgctgcgtgggagccagaggcctgcgctgctccaaccgccagggggcggtgytctccgccgcggccgcggagagctgcaccgcccactcaccacccccccccacgtgggtccgaatggttaggtccgctgggcaggtagcgcgcttccgcgg

SEQ ID NO: 408704 - DNA, 201 bp, Homo sapiens
atttggttctggttccggcttctgctggggttccggctccaggggcgtcctagtgcggctcagggcccccgacgcccttccggcgctcatcccttgattcmtcccctcccccttcgccgcctcaccggccccgggctgtggctgcggatacccgcgccgtggcaggcggggggagggaagaacagagaaggatgcgggctg

SEQ ID NO: 408705 - DNA, 201 bp, Homo sapiens
acgggattcttggctgaggaggtctctcagtctcaaccctgaccttgacctccctcctccctgattagcttctcccaagttcttgatgctttattcaggckgcctcttccactgctgcagattccctactgcctgctcacatttcagccttctctgcatatccctctcctgtccctgcctctagcctctaggctggagccc

SEQ ID NO: 408706 - DNA, 201 bp, Homo sapiens
ggcgcagctcctgccctcagatgccccgaccgagcggagagtcaggaatcttctccgagggctgggggaagccggctttccgcacctttgagggacggagwggcgggatcttcggagcttcctagagaagtgaccacggcctgcgcccggtttggggcaagcggctggatgggatggctcggcttcccgaggatctgaccc

SEQ ID NO: 408707 - DNA, 201 bp, Homo sapiens
gggccgcaacgcccagttccgcagaggccggctacgtgcttgcgcagcacgcacggccggggaggggctggcggcggccgcgggcggcgggcggcggaggygcggggcctgctcccgccggcaccatggccaagaccgtggcctatttctacgaccccgacgtgggcaacttccactacggtgaggaaacagggatatgca

SEQ ID NO: 408708 - DNA, 201 bp, Homo sapiens
tgcctgagtcagcgcccgcacctcctccacgccggcctgagccaggcctctgcagccccttcctctcagtactcccgcacccctctccctttttggtttckcccaccctgaccacctggccgacccggtaccggtgatttggttctggttccggcttctgctggggttccggctccaggggcgtcctagtgcggctcaggg

SEQ ID NO: 408709 - DNA, 201 bp, Homo sapiens
atcgctgctggtagaagaggccattagtgaggagcttccctatagtggtaaggaccaccccacaacacccccataacaggaaggccattctcaccagattscagaatgacctggtttgaaggcacatgggaaattttacactctcagagctctgcagactaaacccctgggctcagagcagggaagagattgggcagctat

SEQ ID NO: 408710 - DNA, 201 bp, Homo sapiens; identical to SEQ ID NO: 91772

SEQ ID NO: 408711 - DNA, 201 bp, Homo sapiens
ttaggtaatacctgttatatactaggtactgttctaagtgctttacagccattagcttatttaatctcaacaacccctatgaagcagggtctattattgtktccttttaccgatgaggacacttaagcacagaaaggttaaacagtttgtacaacctcactatcattagtaggtgttaaagaacctaggtagtctagctcc

SEQ ID NO: 408712 - DNA, 201 bp, Homo sapiens
gatgctttattcaggctgcctcttccactgctgcagattccctactgcctgctcacatttcagccttctctgcatatccctctcctgtccctgcctctagsctctaggctggagcccccagttgcctttagggaactggtgacattaagtttcaggtgaccagggcagaagcagactcttcacaattcgagacccggtgtt

SEQ ID NO: 408713 - DNA, 201 bp, Homo sapiens
ctcgggtgctctacattgacattgacatccaccatggtgacggggttcaagaagctttctacctcactgaccgggtcatgacggtgtccttccacaaatayggaaattacttcttccctggcacaggtatgggaatagggattactttcccctttgcacccttcagctctttactatgagtgcctccttctcagccttcta

SEQ ID NO: 408714 - DNA, 201 bp, Homo sapiens
ttattagggaaaatttcaaaaatttctgaaagtgaagtagtgcagtgacctcccatacgtccatcacctagcttcaacgcttatgagcaaatggccactctttttttttttttttttttttttgagacagagtctcactctgtagcccaggctggagtgcagtggtgcagtcttggctcactgcaacctctgcctcctggg

SEQ ID NO: 408715 - DNA, 201 bp, Homo sapiens
atgcctcagactcccgagtagctgggattacaggcgcctgccaccatgcctggctaatttttgtatgtttagtagagatggggtttcactatgttggtcargctggttttgaactcctgacctcaggtgatccaccagcctcagcctccaaaagtgctgggattacagacgtgagccatcgcacccagctgagcaagtggc

SEQ ID NO: 408716 - DNA, 201 bp, Homo sapiens; identical to SEQ ID NO: 91778

SEQ ID NO: 408717 - DNA, 201 bp, Homo sapiens
ttcactatgttggtcaggctggttttgaactcctgacctcaggtgatccaccagcctcagcctccaaaagtgctgggattacagacgtgagccatcgcacycagctgagcaagtggccactcttacttcatctatactccctcatgttagattgttttaaagcagatcctagatgttatatccttttatccataaatattt

SEQ ID NO: 408718 - DNA, 201 bp, Homo sapiens
ggccgcgggacccgggacaagaagaagggccggagcccagatgagctgccctcggcgggcggcgacggcggcaaatctaagaaatttgtgagtgtccctcycatcccgctcctgcctggccccgtaaccgccctctggacccctgcagccggcccctggggcgcctgcccggctttggggagccgcccccgcgccttcctt

SEQ ID NO: 408719 - DNA, 201 bp, Homo sapiens; identical to SEQ ID NO: 91779

SEQ ID NO: 408720 - DNA, 201 bp, Homo sapiens
gttgggacacggaggttttgaggcggggttgcaactccaggggtgagagctgacgaactctcttctccccacccccaggagctggacaccctatgaagccycatcgcctggcattgacccatagcctggtcctgcattacggtctctataagaagatgatcgtgagttccgccgcctcggccgggggttggggggtggggc

SEQ ID NO: 408721 - DNA, 201 bp, Homo sapiens
cgatttttggtctgggatgtgagagggtccaggctgtcaggctgtacagccacgtgggcgctgcgtgggagccagaggcctgcgctgctccaaccgccagrgggcggtgctctccgccgcggccgcggagagctgcaccgcccactcaccacccccccccacgtgggtccgaatggttaggtccgctgggcaggtagcgcg

SEQ ID NO: 408722 - DNA, 201 bp, Homo sapiens; identical to SEQ ID NO: 91774

SEQ ID NO: 408723 - DNA, 201 bp, Homo sapiens
atttgctttagagaggatggagctgaaccaagttctcttttctttctgcggtgttagtcttaacccttaatctgctgaatttttaaaactaaatagctcargtaatgaggaaaattgcattagtagctacggaattggaaggtttctaggaaagtagtgctgcttaacccttttattgccaaatgtaacctatctcaaggc

SEQ ID NO: 408724 - DNA, 201 bp, Homo sapiens
cagagtatgaagaggaggtgaactgaattgaggctaaagaaataggaccttttaaaagcaaacagctctattatgaattggggtttttacccgtagagtakagggaagctatcaaagtgttttaaaaagcaagggatcttaagagggctatgggcagttaaaaaaacaaaaaaaacaacgaaggagtggtttgatatcatt

SEQ ID NO: 408725 - DNA, 201 bp, Homo sapiens
acagcaccaaaatatggtgttggcgttcacacaatcccagacctattccacaggagtaaccactgttaatagtttttattgttttggatagacctttttckatagattgcaaatatactattctgtatgtacatataaacaaacacatatacactcatttacagtttgtgtggtttttggtttttcgtaaatacaaatagg

SEQ ID NO: 408726 - DNA, 201 bp, Homo sapiens
cgtgaatgggtgaatgaatagcagtctctaccaacaagaggaggagtggttctcaacggggcctgagaaatggctttggaaaagggtgctgggagaagatyagaacttagagtgagatcctgacctctctccccttgctttgcaggccagaggcacccaatgagttctatgatggagaccatgacaatgacaaggaaagcg

SEQ ID NO: 408727 - DNA, 201 bp, Homo sapiens
aggcagaggtgtggggagaagggtgaaaggtgactgagccagggttccaggctcctcactcacggggctgaagctgggcatcgtcaggctcagagcccctmgacgtgcggcagcggtagcccttcttcttgagcacgtggcagatcatgaagcctaccaggcccatgaggaagaagaccagcacaagcaggaagagcatat

SEQ ID NO: 408728 - DNA, 201 bp, Homo sapiens
ggtggaaggggtatctgtgatgttctgatcagttctgatcactgcactttcctggggttttgctttttgcagtgtggagctgactctctgggctgtgatcsattgggctgctttaacctcagcatccgagggcatgggtgagacttgctctccttcttctccccaaggtttttaagtggccttggacttcagtacgtgggt

SEQ ID NO: 408729 - DNA, 201 bp, Homo sapiens; identical to SEQ ID NO: 91777

SEQ ID NO: 408730 - DNA, 201 bp, Homo sapiens
  misc_feature (1)...(201): n = A,T,C or G
tactgtccgaaatgttgcccgctgctggtgagcactctcctgatttcctcccctgttgtccagtgtgagctagggtgtccctcagatatggccacatgggnccttcagcccacttggtcagcctgctcccctctgctggttggtttcaggacatatgagacatcgctgctggtagaagaggccattagtgaggagcttccc

SEQ ID NO: 408731 - DNA, 201 bp, Homo sapiens
ggagagctgagccgggcgaggggcggagctcccctgggggcgtggcctgggtgtggatggaggcggggccgcaacgcccagttccgcagaggccggctacktgcttgcgcagcacgcacggccggggaggggctggcggcggccgcgggcggcgggcggcggaggtgcggggcctgctcccgccggcaccatggccaagac

SEQ ID NO: 408732 - DNA, 201 bp, Homo sapiens
ctatcattagtaggtgttaaagaacctaggtagtctagctccagaatcggtgcttgtaatcatactcccctcctgtattgtctctcattgctatttcttcrtctgtcaattttaggcattatctgttaagcttttagtatgggatatgagcatttagtcttcttacaccatcacattggcttcctttcccctttcagcttc

SEQ ID NO: 408733 - DNA, 201 bp, Homo sapiens
gcctgctcccgccggcaccatggccaagaccgtggcctatttctacgaccccgacgtgggcaacttccactacggtgaggaaacagggatatgcatgaggrgttgggacacggaggttttgaggcggggttgcaactccaggggtgagagctgacgaactctcttctccccacccccaggagctggacaccctatgaagcc

SEQ ID NO: 408734 - DNA, 201 bp, Homo sapiens
ctgagggaatagacagggatacccttaagggagaactctggagcactaactgtgtgttccctacagatgcgtccaccacctcccccgccggctaaagcccyggatcctggccacccagatcccctcacctgaaggccagggaagccttgacccccagtgatgctgctgtccctatcttcaagctgtcagaccacaccatca

SEQ ID NO: 408735 - DNA, 201 bp, Homo sapiens
aagctttttgtttttcctggagctgacaattgcattattttttcatttgcttagttttctggtattaatcactaattctttccaagccttttgagaaactrtaaaaccctacaattcttgcttgaacccgggaggcggaggctgcagtgagccgagatcgcaccattgcaccccagcctgggcgacagagcaagaccccat

SEQ ID NO: 408736 - DNA, 201 bp, Homo sapiens
tggtgaaatgcctgaaatctctggggctggaaaccatccatcaaggtctctagtagttctggcccacctctttccccaccctggctccatgacccaccccmctctggatgccagggtcactggggttgggctggggagaggaacaggccttgggaatcaggagctggagccaggatgcgaagcagctgtaatggtctgagc

SEQ ID NO: 408737 - DNA, 201 bp, Homo sapiens
caggtcaggctgtggttccgacatgaggccctggggggcgagcgcgggccagggcgcctcctgggtttagggggctgcagctgggaatgggggaggggtargaatgccgtcctcaggatctgaaacaagcacgtctaagacgtccggctgaggtccggccccaccccctacccaaccagggagctgtccgggccaggagtg

SEQ ID NO: 408738 - DNA, 201 bp, Homo sapiens
ggcctgagaaatggctttggaaaagggtgctgggagaagattagaacttagagtgagatcctgacctctctccccttgctttgcaggccagaggcacccartgagttctatgatggagaccatgacaatgacaaggaaagcgatgtggagatttaagagtggcttgggatgctgtgtcccaaggaatttcttttcacctct

SEQ ID NO: 408739 - DNA, 201 bp, Homo sapiens
cggaggtgcggggcctgctcccgccggcaccatggccaagaccgtggcctatttctacgaccccgacgtgggcaacttccactacggtgaggaaacagggmtatgcatgaggggttgggacacggaggttttgaggcggggttgcaactccaggggtgagagctgacgaactctcttctccccacccccaggagctggaca

SEQ ID NO: 408740 - DNA, 201 bp, Homo sapiens
ggggccgcaacgcccagttccgcagaggccggctacgtgcttgcgcagcacgcacggccggggaggggctggcggcggccgcgggcggcgggcggcggagktgcggggcctgctcccgccggcaccatggccaagaccgtggcctatttctacgaccccgacgtgggcaacttccactacggtgaggaaacagggatatgc

SEQ ID NO: 408741 - DNA, 201 bp, Homo sapiens
cccccagcatctccttcaaggcctcagcattggctgagggaagaaggaaaagagggagtcagtggaggtggaggtcagggcaagagaaggttggagaagasggagcaaggggctatgctagacccaccttcattctggatgatgcagcgaacaatcctctctactgtgtcctcattcatgtcatcgtcctcagctgaagga

SEQ ID NO: 408742 - DNA, 201 bp, Homo sapiens
acagagaacacagtggtctcccctgtccgggggcggctttttccttccttggagcgtccctgacggacaagtggaggcctcttgctgcggctgcaatggakgcaaggggctgcagagcccaggtgcactgtgtgatgatgggagggggctccgtcctgcaggctggaggtggcatccacactggacagcagggaggagggg

SEQ ID NO: 408743 - DNA, 201 bp, Homo sapiens
cacctgagagaaaggggaggggtcaacaatgagagaccaggagtaggtcctatcagtgccccccagagtagagagcaataagagcccagcccagtgcagtsccggctgtgttttcctacctggtgatcagaagtgtctggtttgcttggctgcccatttgcctcttgagtgggcagccctgggcttgggcccctccctccg

SEQ ID NO: 408744 - DNA, 201 bp, Homo sapiens
tcactgctatttgtgtttattgtggttttttgttttgttttgtttactgcctccctcctcctcatggctattccctaagaatataagcgtggtgggatatygtaaatttcattagttccattcgttgctgcatccctactgcctagtacacagttggctcagagtggatcccccaaaactatttgcccaatgaatgcaagc

SEQ ID NO: 408745 - DNA, 201 bp, Homo sapiens
tagggtggtgaaatgcctgaaatctctggggctggaaaccatccatcaaggtctctagtagttctggcccacctctttccccaccctggctccatgacccmccccactctggatgccagggtcactggggttgggctggggagaggaacaggccttgggaatcaggagctggagccaggatgcgaagcagctgtaatggtc

SEQ ID NO: 408746 - DNA, 201 bp, Homo sapiens
tgctatgtcaacgacattgtgattggcatcctggagctgctcaagtaagtagcccaggaggagatgggggcagttacgggattcttggctgaggaggtctytcagtctcaaccctgaccttgacctccctcctccctgattagcttctcccaagttcttgatgctttattcaggctgcctcttccactgctgcagattccc

SEQ ID NO: 408747 - DNA, 201 bp, Homo sapiens
tatctgcactgtgcatctccctaagaaacctctggcctcccaaacctgttcttgacctttccctcatccttccgcccccttgattatgtactgtcagtathcatttggtgaagttgctttgcaggtgcctttgtgtagcgctggagaatgaagaagttggtgacccgggtaaagtgtggtcaccattccttagctcacatc

SEQ ID NO: 408748 - DNA, 201 bp, Homo sapiens
atacctcagtttcatcatcaatataatggagaaaacaataggacctaaatcaaaatatatgtggagaaggtaaataagttgtatgcaaacagttattataracattccctctgagaacctatgagaaccctaaagagacgaaaattacataaatttgaagaatttttgtaattttgaagaatttttttaagccttcagaag

SEQ ID NO: 408749 - DNA, 201 bp, Homo sapiens
agagatgctttgtacactcagttataactaactttggttatgcttggccttttttgtgaactaggccataagccatttttgacaatatgtttggaagataytgtgaactcagaatagaaagttggtcccatttgtttcttgttacttttgttccagaggttgctgaaacctcagcaggccccagtgtggttagtgtgaaaa

SEQ ID NO: 408750 - DNA, 201 bp, Homo sapiens
ggctggagtgcagtggcgtgatctcggctcactgcaagctccacttcctgggttcacgccattctcctgcctcagcctcctgagtagctgggactacaggygcctgccaccacgcccagctaattttttgtatttttagtagagacagggtttcaccatgttagctaggatggtctcgatctactgaccttgtgatctgcc

SEQ ID NO: 408751 - DNA, 201 bp, Homo sapiens
ccagtcttgagcttcaggaggatgtgcaggaaatgaatgccgtgaggaaaggtaagagatgagttgtgaaccattagtggtagtgaaggggtccttttagwtcttttgggccctcagatttgtgtatgagctattattagggcagtatttatggaaacaccttcctcttttagggccagagaggaaggtcttcaagataga

SEQ ID NO: 408752 - DNA, 201 bp, Homo sapiens
agccccttaacttgtgagggttcaagcttataggctcaatgaccacacacgtcagtccactttctatcactctgcaagtgagtgtgcctttaacaccaggmagtctttcacagagacatccttggttgtggctgtgagtggagaaatacgaatctagcagcgctagagaaaaagctactccaaaagacatgttaaaaagga

SEQ ID NO: 408753 - DNA, 201 bp, Homo sapiens; identical to SEQ ID NO: 118098

SEQ ID NO: 408754 - DNA, 201 bp, Homo sapiens
acagatgaatcagagaggcagcagtgtcttctgcaaagccagtcttgagcttcaggaggatgtgcaggaaatgaatgccgtgaggaaaggtaagagatgarttgtgaaccattagtggtagtgaaggggtccttttagttcttttgggccctcagatttgtgtatgagctattattagggcagtatttatggaaacacctt

SEQ ID NO: 408755 - DNA, 201 bp, Homo sapiens
tgctccacccatgtccaacctaaaggcagagatggaagggggctattagccacaggtcacctctgcctcgaaggtacattgccttcccaagcccgcccagygtggctcagcttcctcacaggctctctgttctgttggaaatgctgggtttaaactgtcacgtggcagtgttggagcagcttcttccctacaggcctgtga

SEQ ID NO: 408756 - DNA, 201 bp, Homo sapiens
ttgaggccagccttggcaacatagcaagacactatctctaccaaaacagtttttttaattagccaggcatgatggcttgcatctatagtcccagctactcwggaggctaaggtaggaagattgcttaagcccaagacttcaaggttcagtgagctatgatcacgctattgcactccagcctgaatgacagacagagactca

SEQ ID NO: 408757 - DNA, 201 bp, Homo sapiens
tcaccactgccctctactccatgatgttgtataatccttgaataaccccacacctaatcgcctctgataagaggaattgctcaatattttcaactgccccrtggttctatactgctccacccatgtccaacctaaaggcagagatggaagggggctattagccacaggtcacctctgcctcgaaggtacattgccttccca

SEQ ID NO: 408758 - DNA, 201 bp, Homo sapiens
ctgaaggatgcacagtaatgacttgcagggagaagaggcctctgaaggcttgagtccccgctgtccctccggagtccacctcacatttgtcttcaccactrccctctactccatgatgttgtataatccttgaataaccccacacctaatcgcctctgataagaggaattgctcaatattttcaactgccccgtggttcta

SEQ ID NO: 408759 - DNA, 201 bp, Homo sapiens
ttacaagatgaggacatcaaataacctgcccaggatctccctcagttgccaagctgagacttgttgtatttcaccaaaacgcagctgtgtttcacaaccaycattctgtactgtcttttgttcaatttttagctgtttccacttttcagtatgatcgtttctttgagaaaaaaattgatgagaaaaagaatgaccacacct

SEQ ID NO: 408760 - DNA, 201 bp, Homo sapiens
acgacatacagtcttatttacttacaagatgaggacatcaaataacctgcccaggatctccctcagttgccaagctgagacttgttgtatttcaccaaaaygcagctgtgtttcacaaccatcattctgtactgtcttttgttcaatttttagctgtttccacttttcagtatgatcgtttctttgagaaaaaaattgatg

SEQ ID NO: 408761 - DNA, 201 bp, Homo sapiens; identical to SEQ ID NO: 118100

SEQ ID NO: 408762 - DNA, 201 bp, Homo sapiens; identical to SEQ ID NO: 118101

SEQ ID NO: 408763 - DNA, 201 bp, Homo sapiens; identical to SEQ ID NO: 91812

SEQ ID NO: 408764 - DNA, 201 bp, Homo sapiens
tggactgctgaagaacttccaggacatcatgcaaaagcaaagaccagaaagagtgtctcatcttcttcaagataacttgccaaaatgtaagtctcattgtyatttgcctgatgtagaaaagaatttataattcaaatgtacattagattaaatataaaattgcatggtgaggctgggcacagtagctcatacctgtaatcc

SEQ ID NO: 408765 - DNA, 201 bp, Homo sapiens
cggtgtgcccactggaagagctgtgtgatgtggcccatgagtttggagcaatcaccttcgtggatgaggtccacgcagtggggctttatggggctcgaggyggagggattggggatcgggatggagtcatgccaaaaatggacatcatttctggaacacttggtatgtatacattgtattacatacactaaaattccatta

SEQ ID NO: 408766 - DNA, 201 bp, Homo sapiens; identical to SEQ ID NO: 118102

SEQ ID NO: 408767 - DNA, 201 bp, Homo sapiens
ccttagaatagaagtttacgttgttctgactctaaccaaaacagaaatttctgaagcggcaaaagctcttcagagcagtctctggtctttcctcaggggcrgtgtgcccactggaagagctgtgtgatgtggcccatgagtttggagcaatcaccttcgtggatgaggtccacgcagtggggctttatggggctcgaggcg

SEQ ID NO: 408768 - DNA, 201 bp, Homo sapiens
ttgttccagaggttgctgaaacctcagcaggccccagtgtggttagtgtgaaaaccgatggaggggatcccagtggactgctgaagaacttccaggacatyatgcaaaagcaaagaccagaaagagtgtctcatcttcttcaagataacttgccaaaatgtaagtctcattgttatttgcctgatgtagaaaagaatttat

SEQ ID NO: 408769 - DNA, 201 bp, Homo sapiens; identical to SEQ ID NO: 118105

SEQ ID NO: 408770 - DNA, 201 bp, Homo sapiens
cctgcctcagcctcctgagtagctgggactacaggcgcctgccaccacgcccagctaattttttgtatttttagtagagacagggtttcaccatgttagcyaggatggtctcgatctactgaccttgtgatctgcccgcctcagcctcccaaagagctggaattacaggtgtgagccaccgcacctggcctaactttttgt

SEQ ID NO: 408771 - DNA, 201 bp, Homo sapiens
aatctagattatacatcgtgggtatgagagtctgctggtacgaacagaaccagtgttttctgattaaaaatgtatttctttttaataaggttttggttccstggtgttcacgaaacaacactggcttcttttaaatgacaggtgtttgggcagcgctttccctctgccccaagcttgcatgtgttgctacagtctggtctt

SEQ ID NO: 408772 - DNA, 201 bp, Homo sapiens
taagaggcaactggaatgtgccagttaactcttcatagacgcattgtttcctgtgaagcagatgaaaaactagagagattagcagaacctaataaaaatargcttgtggctgagtgcagtggttcacgcctataatcccagcactttgggaggccaaggcaggtggataacctgaggtcaggagttcaagaccagcctgga

SEQ ID NO: 408773 - DNA, 201 bp, Homo sapiens
aatgttctaatttccctcattaaacatttagccttctaatttccctcattaaacatttggccttcggctttttatttatttaatttttcttttttgagacwgagtcttgctctgtcgcccaggttggagtgcagtgatgcagtctcggcttactgcaacctccacctcccaggttcaagtgattctcctgcctcagccttc

SEQ ID NO: 408774 - DNA, 201 bp, Homo sapiens
gtgagtgtcctccattcctactcctccacaatgtccccactggtccagtggattgaagcaggacctgagggggtgattggagaaactcaaggccaaggaayaccgtgacctcttggacaggaactactgccatgaccattgcatggatagggagattcagaccagagaggggcagggactttctggagtccctatcagggt

SEQ ID NO: 408775 - DNA, 201 bp, Homo sapiens
ctttgccctggatgagggtgagcaggttggcaagccaatgagcagccaggcagggagtaggaggctgctagtggggactgagctgctccaccctctgaacmccctttccctcctcaggcatagccaatcccactgatgccttcactgtcttttatagtgagcggagtccctggtgtaagtatgagcttggagggagggctc

SEQ ID NO: 408776 - DNA, 201 bp, Homo sapiens
ttggcaagccaatgagcagccaggcagggagtaggaggctgctagtggggactgagctgctccaccctctgaaccccctttccctcctcaggcatagccartcccactgatgccttcactgtcttttatagtgagcggagtccctggtgtaagtatgagcttggagggagggctcactctacaggcgggaggctaggccag

SEQ ID NO: 408777 - DNA, 201 bp, Homo sapiens
atctatgccaggggtgcccaggacatgaagtgcgtcagcatccagtgagtgtcctccattcctactcctccacaatgtccccactggtccagtggattgamgcaggacctgagggggtgattggagaaactcaaggccaaggaacaccgtgacctcttggacaggaactactgccatgaccattgcatggatagggagatt

SEQ ID NO: 408778 - DNA, 201 bp, Homo sapiens
  misc_feature (1)...(201): n = A,T,C or G
accagcctccaacccctgtcacccagctgagccccactctgctgtcccaaatggctccccaacccctccagccattccccaagtaaatagactgaggcagnccctccaggttagggaggaaccctttccccagagactctgctgctgaccaaggttactcctggcagctggttaaagaaaaacttcacctcactctccagg

SEQ ID NO: 408779 - DNA, 201 bp, Homo sapiens
cactttgcccccagctcaccacgcgcagcgccatgaccagcaagggtcccgaggaggagcacccatcggtgacgctcttccgccagtacctgcgtatccgsactgtccagcccaagcctgactatggtgagaagacggtggttccagagcctgtgacggggcctaagggacggggactgtgctctaaaccagcctccaacc

SEQ ID NO: 408780 - DNA, 201 bp, Homo sapiens
tggagggagggctcactctacaggcgggaggctaggccagaaagggcacggtcctatgcagggttgcacagcaaagttgaggcctgagaaggccttgaacycagggcctctacctcccagctctttcctatctgagcttctctgagggcaagccctgaatgggcagaaaccagctgtatgctacgggccctgagtggggac

SEQ ID NO: 408781 - DNA, 201 bp, Homo sapiens
tgtgatggaagccgggtcccactagtgatgcaggaacaggctccattggccgggtgcggttgctcatgcctgtaatcctaacactgtgggaggctgaggcrggcggattgcctaagctcaggagttcaagaccagcttgggcaacatggcaaaaccccctctctactgaaaatataaaaaaagtagccaggcatggtgcca

SEQ ID NO: 408782 - DNA, 201 bp, Homo sapiens
ctcacagcccagccccctactcctctccttcctgctgccccctcccttctccctccttctcccacctctttcccaccttcctttgccccttcaattcttcrctttctccctccccattcatcaggctctttctcctacaggaacctcactctggagcctgagatcatgcctgctgccactgacaaccgctatatccgcgcg

SEQ ID NO: 408783 - DNA, 201 bp, Homo sapiens
tgcagctgtagcataacagcacccctttaggagtttctaaagtgtccgaggttggaccaaggctggttttgaggattaagtgcggccaggaagtgcccacstggtgccttctataggcagcctccacaaaggcttactattacttcagtactttcttcactgactgctgaggataaagacctccatgtgaagcagctgacc

SEQ ID NO: 408784 - DNA, 201 bp, Homo sapiens; identical to SEQ ID NO: 91835

SEQ ID NO: 408785 - DNA, 201 bp, Homo sapiens
  misc_feature (1)...(201): n = A,T,C or G
aggcagcctgggaggcagtggggtggctctgggaggcggtaccacagaggatagagtctgagccacctcttttatctgttgctgccgctaccctgcccccncaccacaggctgcagtcaaacccccacctgaaagaggggtccgtgacctccgtgaacctgactaagctagagggtggcgtggcctataacgtgatacctg

SEQ ID NO: 408786 - DNA, 201 bp, Homo sapiens
  misc_feature (1)...(201): n = A,T,C or G
acacctccccaggggtgcgggttaccagcactgggaggccaggccatgcctcacgcttcatggaggacacagcagcagagaagctggtacgtggcaccccnggagggagtctgggagttcaggaggctctatcctgaggccactgtcccatttaacctcatattctcatagcacaaggttgtaaactccatcctggcattc

SEQ ID NO: 408787 - DNA, 201 bp, Homo sapiens
  misc_feature (1)...(201): n = A,T,C or G
cggttccccagaaccatccacatgacctttgtgcctggtaggagtggctcagatacctttgggaaaggggagggtggggcggggcagcctcctcatctcangtccctgctgcttttacagatgaggaggttgggggtcaccaaggcatggagctgttcgtgcagcggcctgagttccacgccctgagggcaggctttgccc

SEQ ID NO: 408788 - DNA, 201 bp, Homo sapiens
gacgctcttccgccagtacctgcgtatccgcactgtccagcccaagcctgactatggtgagaagacggtggttccagagcctgtgacggggcctaagggayggggactgtgctctaaaccagcctccaacccctgtcacccagctgagccccactctgctgtcccaaatggctccccaacccctccagccattccccaagt

SEQ ID NO: 408789 - DNA, 201 bp, Homo sapiens
ggtgggcaggccctggactgagggaggggactcgttggagagttcccgctggttgggctctgccactgcccagctgcgcagcctcagccacagaactcccytctggcctcaggctggctggtctctgtctggtgtcacgccctgccccgctgctcctgcccacatgtgccctctatcttcaggtggacagaggcccagtga

SEQ ID NO: 408790 - DNA, 201 bp, Homo sapiens
acacatgctaaggaagtgttttaattttttatttatattaatgatgtcgaagggagcatgaactctgcaacccaccacagtccccacccctccctatcgcrttccccagtccacttttctcatttgctgttcccacttggccccaccgagctctctccaggctctggtaactcaggggctgccccaggcctacagggctgc

SEQ ID NO: 408791 - DNA, 201 bp, Homo sapiens
ccgtgtggtgagtgccctgcctgctctgcacatactccccagggtcctcaaaaggccacagctactgacttgggggggcacctcccaactgtcccagggcrctcagcacagggcctggcccgacacacaggccagcaaatgctgatggtgggcatacccctgaaggctgtcggttgcagggagaggtcggccagtcaaaga

SEQ ID NO: 408792 - DNA, 201 bp, Homo sapiens
ggagccaggcagaccctgttgaccagagtgggcagactggacagagtcctaaccttgcacttgggactggggaaaggggtgtttctgagtgacaaagagcygggtgtggtctggggctgggaatgccgtcagagtggacacaggatgcagtgggaggccaccgaagggccaacccggggtggggcaagttggtgctgtgct

SEQ ID NO: 408793 - DNA, 201 bp, Homo sapiens
tgggtttctatcaacatcaatatatctacttatttgctcaatcctgcacaaaaaggagtttcagaattgccatacccataccctgtgaaaaacaaacattytaaatagagctcaagatgtatctgatcttactcagtattttttttttttgtcgttagattgagggtccatggtcaaagtaacagtttgaatacacgttca

SEQ ID NO: 408794 - DNA, 201 bp, Homo sapiens
aagtcggagcaagagccttctctgtgtttgcgccccttggccgctggggggcgccagagacgcggcgccctttcgcgttctggaacgtgactcctcccctmcatgggcagcccggcgctagacccaacggggatccaagcagccccggggagagggaggctgcgtctgtatccgggcccaaggtcaccgcgcgaccggcag

SEQ ID NO: 408795 - DNA, 201 bp, Homo sapiens
gaagtcggagcaagagccttctctgtgtttgcgccccttggccgctggggggcgccagagacgcggcgccctttcgcgttctggaacgtgactcctccccwccatgggcagcccggcgctagacccaacggggatccaagcagccccggggagagggaggctgcgtctgtatccgggcccaaggtcaccgcgcgaccggca

SEQ ID NO: 408796 - DNA, 201 bp, Homo sapiens
aggtgtacaagtgctggcagctctgggcctcccaaatgagaatgagcttgctgcggtcaccagaggcctgcagggatgaagacaatgatcacaggcacccmccatgcaccagacctcccgcctgcccccagggccaacctggccttacaaggtacttgccgtcggaggagatggccatgcagaggacgtggctgctgtggc

SEQ ID NO: 408797 - DNA, 201 bp, Homo sapiens
  misc_feature (1)...(201): n = A,T,C or G
tcggggaggacaccccaggcagaagccccagcccctgcagtggtttggaggtgggcaaggtggaaatgagcaggcgtgccctgtgacagacatggagagcntagggggcaggacttactcgtaaggcctgggaccagtgacccctgggccaccctggcccttgctgtgccctgcagatccgacccaggacactgagttgga

SEQ ID NO: 408798 - DNA, 201 bp, Homo sapiens
gtgccagctgcagctgctagactctggagcacctgagtacaaggtgagttgggccccacagaggggccaggctatcagtgggcactgtccctctgcccacstgccctcgaggtgcccagaggaatactcgccctcagccttctcttcctgtgtctccagggcctgaggagggcttgggactgggggaagaaaaatggggga

SEQ ID NO: 408799 - DNA, 201 bp, Homo sapiens
ctggaggaggccctgaaaggccccacggatggtggccaaagcctggaggagctgtcctcacacttttacaccgtcatcccgcacaacttcggccacagccrgcccccgcccatcaattcccctgagcttctgcaggccaagaaggacatgctgctggtgagggctggcaggggtgcgggcaggcagtggggcactgaacag

SEQ ID NO: 408800 - DNA, 201 bp, Homo sapiens
gtacacacttatcgaagtacaggcagaggatgaggcccaggaagctgtggtgaaggtgagatggccaaggaaggtgggcaggccctggactgagggagggractcgttggagagttcccgctggttgggctctgccactgcccagctgcgcagcctcagccacagaactcccctctggcctcaggctggctggtctctgtc

SEQ ID NO: 408801 - DNA, 201 bp, Homo sapiens
ccagggcaggggtggggactgagagtgggtcgttggggatgaggagaccatggaggcctaagggcctctctgtgccccaggacagccatggctccaaagcygaagccctgggtacagactgagggccctgagaagaagaagggccggcaggcaggaagggaggaggaccccttccgctccaccgctgaggccctcaaggcc

SEQ ID NO: 408802 - DNA, 201 bp, Homo sapiens
ggttgtcccagtagcagggctgaccgcggccctcagaagcgccatgctcacctttcgccgccgcttgccggcccccgcgccagccccggccccagaggccrgctttccccgcttacgagcagccgctgttgccgacatgctgcccaccaggcgtgtagcagcggccgcagaactcacgtggcagctgaaccctcccagctc

SEQ ID NO: 408803 - DNA, 201 bp, Homo sapiens
cagaacgatcgaggaggctttatccagagagtgatggttagcccagctggacttgtctgtagcaggatcccagtggctacagctgtggagaggggggcagyagccagaggctgcagagaggccatcctcttatccaggctggatgtgatgggtgcctggcccaagggctgggaagtgcaggggagggagcccatgagaggg

SEQ ID NO: 408804 - DNA, 201 bp, Homo sapiens
tggatttgcccctgtcccccgcagagtcggcctgggaattatacggtcttttctttggtcaggggtccagaccaccctggcattgaccaagggcccccccycctcggttccctcagaaccccaggaatggggaaggcggtggttcccgggttaagcgaacggctttctaggatttggcccgcggagagagggacgaagctg

SEQ ID NO: 408805 - DNA, 201 bp, Homo sapiens; identical to SEQ ID NO: 91841

SEQ ID NO: 408806 - DNA, 201 bp, Homo sapiens; identical to SEQ ID NO: 91842

SEQ ID NO: 408807 - DNA, 201 bp, Homo sapiens; identical to SEQ ID NO: 91843

SEQ ID NO: 408808 - DNA, 201 bp, Homo sapiens; identical to SEQ ID NO: 91844

SEQ ID NO: 408809 - DNA, 201 bp, Homo sapiens
gccttggggctaaagtgtgcagagccctctccacagcagtgctgttgacctctattccaagttgctgccctacccacactgggcttggccaggtccctcargggtcgggcaagaccagccagccaccatgctgccctctgtgccccagccccacctgcccacccatgtgggaaggctccttgaaggaggcacctccctgac

SEQ ID NO: 408810 - DNA, 201 bp, Homo sapiens
ccagaacctctcccagttcttccctgaggccatcagcttcattggtaggtgctgtgtgctgggcaggggggtgtgggtgcatcaaggtgtatgcaggactstgggtggcgcccccgcctgactgggtacctctgggcctgttgagacctgtgtgtgccctacgtgtgccagcgtgtgcccgtgggtgtacccaggcctact

SEQ ID NO: 408811 - DNA, 201 bp, Homo sapiens
tgggaaggctccttgaaggaggcacctccctgacccatgccaatgtgtttcagacgaagcccgctccaagaagtgtggtgtcctggtgcactgcctggcargcatcagccgctcagtgacggtcactgtggcctatctgatgcagaagatgaacctgtcactcaacgacgcctacgactttgtcaagaggaaaaagtccaa

SEQ ID NO: 408812 - DNA, 201 bp, Homo sapiens
gaacacccatgggtgctaggtgtgcgtgggagctgcagaagaggaattagctggggcctgtcctcaagtgccctaaagctggtgccatggctgggggcccygaagtgttatgggtaccagtttggagtccaggcacgtcacttcaccttctggggcctcagtttccttatctgtgaagtggtcatggtttagatggagaga

SEQ ID NO: 408813 - DNA, 201 bp, Homo sapiens
tctccttctcttctctccctcatctctgctcttcagttagtctgcaccagaacgcagtcacaaccatcatgcgcagcctgtggagaggggtagagggcagkttctgcccactgtggggcctgggtgcaaatctcagctgtgtgactgcagtccctcagttctaccccctaacactcccatgtggagcgtggaagaatcctg

SEQ ID NO: 408814 - DNA, 201 bp, Homo sapiens
gtggaaaaagtcacgtggcgcttcactgggcgcctgtcaccaccccgcttgtaaagctttcttaaagggctcgcgatcccttcccaaagctggtcctttcyaggatttctccacacctgcccacggaaggtggcacggccctgagtcttcctaccccgccagttgcccaggtcctgatttcccatcaggcctgctggcgtg

SEQ ID NO: 408815 - DNA, 201 bp, Homo sapiens
ctggagctcttcctctgctggggactctgggtggggttttgggatgggatccagggtccttgtagggactcagttccagcctcttttccctctcctctccytctccagactgtggtacagacctccatgagccggtcccaggtagccctgctgggcctgagtctgctgctcatgctcctactgtatgtggggctgccaggc

SEQ ID NO: 408816 - DNA, 201 bp, Homo sapiens
aaactgaagacacaaggtcaggaagtggcagtctcaaaggcctgtcctgtttgagtcctgggtcctaagggctgtcctctggggtggcagagaccccagaytggaggagtccacgaagcagtcatttggccagaagctgtctgtgtgtaggatggggagtagcaggcggcattcatctctccaacctctacactgtgcttt

SEQ ID NO: 408817 - DNA, 201 bp, Homo sapiens
ggagaagcgcgggggcgccccgagtgggcagcaaggaaatgtccctcgcgcccggtgggaatctggactaacgcccagttagagacgcgcgtctgaggttrttagtggtctggaagaaaagaggaacgcgctcttcctccactaggtcctggttttccagaaacagcagaaaggcggctgctgctgtggctcacaagcccc

SEQ ID NO: 408818 - DNA, 201 bp, Homo sapiens
ggcttgggggtcagaaactcatcaggccccaagatcacagccccctgccttgccctgcagactccaacccttatcctgtatggagagctggaccacatccyggctcgagagtcactgcggcagctccgccacctgcccaaccactctgtggtgaagctacgcaatgcaggccatgcctgttacctccacaagccgcaagac

SEQ ID NO: 408819 - DNA, 201 bp, Homo sapiens
agcgttatgtcttccgagtgtatttctgtgtgcgtgtgattttaagggtatgtgtctacctgtctgcgtgtgtgcatttctgggggtttgtgtgtgtgtgygtgtctgctttcctgtgcatgtgcctttcttgtgtgaatgtgtagtcttacggttgtgtgtatgaccgtgcttgagtatttctgaggatcagcctgtggt

SEQ ID NO: 408820 - DNA, 201 bp, Homo sapiens
gggggtcagaaactcatcaggccccaagatcacagccccctgccttgccctgcagactccaacccttatcctgtatggagagctggaccacatcctggctsgagagtcactgcggcagctccgccacctgcccaaccactctgtggtgaagctacgcaatgcaggccatgcctgttacctccacaagccgcaagacttcca

SEQ ID NO: 408821 - DNA, 201 bp, Homo sapiens
attatactcagggtgctcaggtcctgggagggcaatgggagaagcctaggaataaagaaaggtgggctacaccaggttcccagcaaacacattcccctgtstgcctgcagggtggaggtggtgctgcttcatggaaaggcctttaactctcacacgtgggagcagctgggcacactgcagctactgtcacagaggggctac

SEQ ID NO: 408822 - DNA, 201 bp, Homo sapiens
gccactatgccctgcccttcctgatgcgaggccaccaccagctacatggatttgtgcccatcgcacccacctccacccagaactacacccaggagcaattytgggctgtgaaggtactgggagaaggatctcaaaggtcctggcaccctgtctgtggcttgggggggttcaggactcaagtcttacttggagggacatggc

SEQ ID NO: 408823 - DNA, 201 bp, Homo sapiens
agaaaggtgggctacaccaggttcccagcaaacacattcccctgtgtgcctgcagggtggaggtggtgctgcttcatggaaaggcctttaactctcacacrtgggagcagctgggcacactgcagctactgtcacagaggggctaccgggccgtggcccttgaccttccaggtgagcacccccacccctttgtctagggaa

SEQ ID NO: 408824 - DNA, 201 bp, Homo sapiens
aactcatcaggccccaagatcacagccccctgccttgccctgcagactccaacccttatcctgtatggagagctggaccacatcctggctcgagagtcackgcggcagctccgccacctgcccaaccactctgtggtgaagctacgcaatgcaggccatgcctgttacctccacaagccgcaagacttccaccttgtcctg

SEQ ID NO: 408825 - DNA, 201 bp, Homo sapiens
ggatccagggtccttgtagggactcagttccagcctcttttccctctcctctccctctccagactgtggtacagacctccatgagccggtcccaggtagcyctgctgggcctgagtctgctgctcatgctcctactgtatgtggggctgccaggcccccctgagcagacttcctgcctctggggagaccccaatgtcacag

SEQ ID NO: 408826 - DNA, 201 bp, Homo sapiens
ttgggcatgcttctttgagcatgtgagcaataatttctctagggtagctactgaggacaattgatgggccaaaggatgtgttgtgttttgttttttttttktttgtttctttttttgttttttgttttttttttttttgagacagagcctcgctctgtcaccctggctggagtgcagtggctcgtactcggctcactgcaa

SEQ ID NO: 408827 - DNA, 201 bp, Homo sapiens
gaggggctaccgggccgtggcccttgaccttccaggtgagcacccccacccctttgtctagggaagccttaagtgtggctgggaggcaactggaccctagkgtctggacaggccgtggcaggtcacaacataaggtggcaccatgaaaaagtctgtgttttcattttctactatgaaaactacagtgtgaattctaggtca

SEQ ID NO: 408828 - DNA, 201 bp, Homo sapiens
ctgtgtgggacccccattatactcagggtgctcaggtcctgggagggcaatgggagaagcctaggaataaagaaaggtgggctacaccaggttcccagcawacacattcccctgtgtgcctgcagggtggaggtggtgctgcttcatggaaaggcctttaactctcacacgtgggagcagctgggcacactgcagctactg

SEQ ID NO: 408829 - DNA, 201 bp, Homo sapiens
cctccatgagccggtcccaggtagccctgctgggcctgagtctgctgctcatgctcctactgtatgtggggctgccaggcccccctgagcagacttcctgsctctggggagaccccaatgtcacagtcctggctggtctcacccctggcaactcgcccatcttttaccgcgaggtgctcccactcaaccaggcacacaggt

SEQ ID NO: 408830 - DNA, 201 bp, Homo sapiens
ttggggggggggtgtgttcgttgatgtctgcctgcttgtgtcagcgttatgtcttccgagtgtatttctgtgtgcgtgtgattttaagggtatgtgtctacctgtctgcgtgtgtgcatttctgggggtttgtgtgtgtgtgcgtgtctgctttcctgtgcatgtgcctttcttgtgtgaatgtgtagtcttacggttgtg

SEQ ID NO: 408831 - DNA, 201 bp, Homo sapiens
gcctggcagccccacatacagtaggagcatgagcagcagactcaggcccagcagggctacctgggaccggctcatggaggtctgtaccacagtctggagarggagaggagagggaaaagaggctggaactgagtccctacaaggaccctggatcccatcccaaaaccccacccagagtccccagcagaggaagagctccag

SEQ ID NO: 408832 - DNA, 201 bp, Homo sapiens
aaagcacagtgtagaggttggagagatgaatgccgcctgctactccccatcctacacacagacagcttctggccaaatgactgcttcgtggactcctccartctggggtctctgccaccccagaggacagcccttaggacccaggactcaaacaggacaggcctttgagactgccacttcctgaccttgtgtcttcagttt

SEQ ID NO: 408833 - DNA, 201 bp, Homo sapiens
ggggcttgtgagccacagcagcagccgcctttctgctgtttctggaaaaccaggacctagtggaggaagagcgcgttcctcttttcttccagaccactaayaacctcagacgcgcgtctctaactgggcgttagtccagattcccaccgggcgcgagggacatttccttgctgcccactcggggcgcccccgcgcttctcc

SEQ ID NO: 408834 - DNA, 201 bp, Homo sapiens
ggttggaggctggtttagagcacagtccccgtcccttaggccccgtcacaggctctggaaccaccgtcttctcaccatagtcaggcttgggctggacagtscggatacgcaggtactggcggaagagcgtcaccgatgggtgctcctcctcgggacccttgctggtcatggcgctgcgcgtggtgagctgggggcaaagtg

SEQ ID NO: 408835 - DNA, 201 bp, Homo sapiens
accacaggctgatcctcagaaatactcaagcacggtcatacacacaaccgtaagactacacattcacacaagaaaggcacatgcacaggaaagcagacacrcacacacacacaaacccccagaaatgcacacacgcagacaggtagacacatacccttaaaatcacacgcacacagaaatacactcggaagacataacgct

SEQ ID NO: 408836 - DNA, 201 bp, Homo sapiens
gtcttgcggcttgtggaggtaacaggcatggcctgcattgcgtagcttcaccacagagtggttgggcaggtggcggagctgccgcagtgactctcgagccrggatgtggtccagctctccatacaggataagggttggagtctgcagggcaaggcagggggctgtgatcttggggcctgatgagtttctgacccccaagcc

SEQ ID NO: 408837 - DNA, 201 bp, Homo sapiens
tggaagtcttgcggcttgtggaggtaacaggcatggcctgcattgcgtagcttcaccacagagtggttgggcaggtggcggagctgccgcagtgactctcsagccaggatgtggtccagctctccatacaggataagggttggagtctgcagggcaaggcagggggctgtgatcttggggcctgatgagtttctgaccccc

SEQ ID NO: 408838 - DNA, 201 bp, Homo sapiens
caggacaaggtggaagtcttgcggcttgtggaggtaacaggcatggcctgcattgcgtagcttcaccacagagtggttgggcaggtggcggagctgccgcmgtgactctcgagccaggatgtggtccagctctccatacaggataagggttggagtctgcagggcaaggcagggggctgtgatcttggggcctgatgagtt

SEQ ID NO: 408839 - DNA, 201 bp, Homo sapiens
ctggcctagcctcccgcctgtagagtgagccctccctccaagctcatacttacaccagggactccgctcactataaaagacagtgaaggcatcagtgggaytggctatgcctgaggagggaaagggggttcagagggtggagcagctcagtccccactagcagcctcctactccctgcctggctgctcattggcttgccaa

SEQ ID NO: 408840 - DNA, 201 bp, Homo sapiens; identical to SEQ ID NO: 91855

SEQ ID NO: 408841 - DNA, 201 bp, Homo sapiens
ttgcagtgagccgagtacgagccactgcactccagccagggtgacagagcgaggctctgtctcaaaaaaaaaaaaaacaaaaaacaaaaaaagaaacaaamaaaaaaaaaacaaaacacaacacatcctttggcccatcaattgtcctcagtagctaccctagagaaattattgctcacatgctcaaagaagcatgcccaa

SEQ ID NO: 408842 - DNA, 201 bp, Homo sapiens
agccctgtccatagactttattatttggaagggggaagaggaggtccttggcactggttgggatggaagccccaggggcaaaggtttaggagttccagggstcagctgtcactgggcagggcaggcacactggcaagggcaggcagcaggcgtgtatatatgtccaccccacggaggaacacagcctcatgcagccgttca

SEQ ID NO: 408843 - DNA, 201 bp, Homo sapiens
cactttcctgactcctacccactcctccccaccccctccccgacgcacacccacggtcagagcctgggctggccctgggctcgttcacgtctactcatggsgcctgccctggttggcgatgtgttaccaacgtctggcctgtcccagcccaaggctccgcgtggcgaccaggcccagcactgggaggctgtgcagagcgtg

SEQ ID NO: 408844 - DNA, 201 bp, Homo sapiens
caggtatcacgttataggccacgccaccctctagcttagtcaggttcacggaggtcacggacccctctttcaggtgggggtttgactgcagcctgtggtgygggggcagggtagcggcagcaacagataaaagaggtggctcagactctatcctctgtggtaccgcctcccagagccaccccactgcctcccaggctgcct

SEQ ID NO: 408845 - DNA, 201 bp, Homo sapiens
ggggacctacccaaggtcacatagacaataaatgcagaattgggttctggacccagacttcttgggcttcagagcctgattctctccaggacacttactgstggggagacaggcacagacgtggagagaagtgcctcatgcttggcacgataagatagaatgaggctactgtaggaataaacgtgggcacactgggtgtta

SEQ ID NO: 408846 - DNA, 201 bp, Homo sapiens
gaatgccaggatggagtttacaaccttgtgctatgagaatatgaggttaaatgggacagtggcctcaggatagagcctcctgaactcccagactccctccyggggtgccacgtaccagcttctctgctgctgtgtcctccatgaagcgtgaggcatggcctggcctcccagtgctggtaacccgcacccctggggaggtgt

SEQ ID NO: 408847 - DNA, 201 bp, Homo sapiens
tggggagacaggcacagacgtggagagaagtgcctcatgcttggcacgataagatagaatgaggctactgtaggaataaacgtgggcacactgggtgttayaggaacctggccacagagaaactgacctaggagggcttcctggagagagcaaccatctcccttgttttgccattcactgcccttgtcttgtctctttcac

SEQ ID NO: 408848 - DNA, 201 bp, Homo sapiens
gggcaaagcctgccctcagggcgtggaactcaggccgctgcacgaacagctccatgccttggtgacccccaacctcctcatctgtaaaagcagcagggacrtgagatgaggaggctgccccgccccaccctcccctttcccaaaggtatctgagccactcctaccaggcacaaaggtcatgtggatggttctggggaaccg

SEQ ID NO: 408849 - DNA, 201 bp, Homo sapiens
cacaaccgtaagactacacattcacacaagaaaggcacatgcacaggaaagcagacacgcacacacacacaaacccccagaaatgcacacacgcagacaggtagacacatacccttaaaatcacacgcacacagaaatacactcggaagacataacgctgacacaagcaggcagacatcaacgaacacaccccccccccaa

SEQ ID NO: 408850 - DNA, 201 bp, Homo sapiens
accctgatagggactccagaaagtccctgcccctctctggtctgaatctccctatccatgcaatggtcatggcagtagttcctgtccaagaggtcacggtrttccttggccttgagtttctccaatcaccccctcaggtcctgcttcaatccactggaccagtggggacattgtggaggagtaggaatggaggacactcac

SEQ ID NO: 408851 - DNA, 201 bp, Homo sapiens; identical to SEQ ID NO: 91852

SEQ ID NO: 408852 - DNA, 201 bp, Homo sapiens; identical to SEQ ID NO: 91853

SEQ ID NO: 408853 - DNA, 201 bp, Homo sapiens
atcaatgctgccaactatgccagtgtgaaggtacccttgtgtgggaagctgaggtgcccctgccaggagcaaggaagggtgcatccctgggctttcctcayctgggggctggataatcaaggggtgtcttctgggaggagctgaccacccaactccacccttttggtttactcagcagactactgtgccaagccctgtgct

SEQ ID NO: 408854 - DNA, 201 bp, Homo sapiens
aagacaggctcagaaatgcccagcggggacttctttgagttgcagcaacatctttgaggggcacagaggcctgagtgatcacatctgacttggaagcctgsggagggcttcacagaggaggtggcgtttgagaaggattttgacagagagtggggaggatgggcgttttgagctgaggtaagcctggagaaaggcccgaag

SEQ ID NO: 408855 - DNA, 201 bp, Homo sapiens; identical to SEQ ID NO: 91854

SEQ ID NO: 408856 - DNA, 201 bp, Homo sapiens
gtagcccctctgtgacagtagctgcagtgtgcccagctgctcccacgtgtgagagttaaaggcctttccatgaagcagcaccacctccaccctgcaggcasacaggggaatgtgtttgctgggaacctggtgtagcccacctttctttattcctaggcttctcccattgccctcccaggacctgagcaccctgagtataat

SEQ ID NO: 408857 - DNA, 201 bp, Homo sapiens
ttccctagacaaaggggtgggggtgctcacctggaaggtcaagggccacggcccggtagcccctctgtgacagtagctgcagtgtgcccagctgctcccaygtgtgagagttaaaggcctttccatgaagcagcaccacctccaccctgcaggcacacaggggaatgtgtttgctgggaacctggtgtagcccacctttct

SEQ ID NO: 408858 - DNA, 201 bp, Homo sapiens
gccatgtccctccaagtaagacttgagtcctgaacccccccaagccacagacagggtgccaggacctttgagatccttctcccagtaccttcacagcccaraattgctcctgggtgtagttctgggtggaggtgggtgcgatgggcacaaatccatgtagctggtggtggcctcgcatcaggaagggcagggcatagtggc

SEQ ID NO: 408859 - DNA, 201 bp, Homo sapiens
ctgtgacattggggtctccccagaggcaggaagtctgctcaggggggcctggcagccccacatacagtaggagcatgagcagcagactcaggcccagcagrgctacctgggaccggctcatggaggtctgtaccacagtctggagagggagaggagagggaaaagaggctggaactgagtccctacaaggaccctggatcc

SEQ ID NO: 408860 - DNA, 201 bp, Homo sapiens
caggccctagctggtccagacattctggccagcagagcggagggaatcccccaaggggcgggccagtctacttgaatcgcctggccccaggagccctcccytcccccggattgttcttgctccagaacaaaggcagggtggacacttgatccctgcatgtggggtgagctggctaagcccccagccctttgattgggcagc

SEQ ID NO: 408861 - DNA, 201 bp, Homo sapiens
aatggactttaactcataacaatgctggataattctttatttagttatttttttgatacagagtctcactctgtcatgcgggcaaatagattttaactcayaacaatgctggctaattatttacctatttattcatgcgggcaaatagactttaactcataacaatgctggctaattatttagctatttatttttttgaga

SEQ ID NO: 408862 - DNA, 201 bp, Homo sapiens
gagggccaccgctttgccccctgcttttacccttccttctgggtgctctacacctcaggttaccaggcctgaggcatctcagccaagcttgtttcctgctytgaggcttgtggggtgggagccagagtggaggtcggtgaaataaagtgatgcaattagaccccaccggctcctgcttctaaagagcgccgcccctccccc

SEQ ID NO: 408863 - DNA, 201 bp, Homo sapiens
tgacctagaattcacactgtagttttcatagtagaaaatgaaaacacagactttttcatggtgccaccttatgttgtgacctgccacggcctgtccagacmctagggtccagttgcctcccagccacacttaaggcttccctagacaaaggggtgggggtgctcacctggaaggtcaagggccacggcccggtagcccctc

SEQ ID NO: 408864 - DNA, 201 bp, Homo sapiens
cccagaagtgacccccagaaagggagggccaccgctttgccccctgcttttacccttccttctgggtgctctacacctcaggttaccaggcctgaggcatytcagccaagcttgtttcctgctctgaggcttgtggggtgggagccagagtggaggtcggtgaaataaagtgatgcaattagaccccaccggctcctgctt

SEQ ID NO: 408865 - DNA, 201 bp, Homo sapiens
cagtagctgcagtgtgcccagctgctcccacgtgtgagagttaaaggcctttccatgaagcagcaccacctccaccctgcaggcacacaggggaatgtgtwtgctgggaacctggtgtagcccacctttctttattcctaggcttctcccattgccctcccaggacctgagcaccctgagtataatgggggtcccacacag

SEQ ID NO: 408866 - DNA, 201 bp, Homo sapiens
acctgtgtgcctggttgagtgggagcacctcgcggtaaaagatgggcgagttgccaggggtgagaccagccaggactgtgacattggggtctccccagagscaggaagtctgctcaggggggcctggcagccccacatacagtaggagcatgagcagcagactcaggcccagcagggctacctgggaccggctcatggagg

SEQ ID NO: 408867 - DNA, 201 bp, Homo sapiens
aagccctatcctcaaggagtctgcttattcaaggaggcatctggactgctagaatgtttgaaaatgacaagattagtgggcatctgttggaactgtactgygttcagatgtgtttaagaagcgtctagtagcttgtatttaaaatggagatgaggcagatagcatggactagaaatagcatggactcaggcaccaagccag

SEQ ID NO: 408868 - DNA, 201 bp, Homo sapiens
ggtcatctagggttttataaaggaggaggagacaatattttttcaaactttttggggagtggggtcatttctgtatataaaaaatgttaatatttaaggtrtatttatgttaccgttctgaataaacagaatggaccattgaaccagtcttcattgtacaagtgtttttatgcttcgtcctgggcatgggttatgtctgga

SEQ ID NO: 408869 - DNA, 201 bp, Homo sapiens
tctgttgcaggaggtcactcctcttaaaccactttagttaggaagacgataggggtgagagctgccatgtgccctggggctaaatagactctggagggagrgaatcccaaagcaaagacctagatccttatggcccatcattatttctcataccttgggggtgaatatgcaggtgttttccatgacagtgtcacggaatcc

SEQ ID NO: 408870 - DNA, 201 bp, Homo sapiens; identical to SEQ ID NO: 91871

SEQ ID NO: 408871 - DNA, 201 bp, Homo sapiens
acctgatgtttatgctgtcttttctgtgaagcacagataagagaagagaaacaagagatgtggcccagactggaaactcatccactggccactgtatttcytctagcagtggagctgggctcaggcccctgcctacttgacctcaaagtcacaaccctcatatgttaaatcatggccggcagctcatggtacagatttggc

SEQ ID NO: 408872 - DNA, 201 bp, Homo sapiens
ctgattaatgtaacaggccccacagttgtctgaaggagtgcttgcaagaatatctgtggtgttgggcagcttattctttcttgataatgatatgggcaagrgcccagtagtctctgcaactcatgtttccttgtctgttttgtccatttggtatctctcaggctcccgatggccatatcttcttggaagccttctctccag

SEQ ID NO: 408873 - DNA, 201 bp, Homo sapiens
gaagattttgttctcagaaagcagaggccaatggaaaaagctcagtttaggcacatctgaccactttaggattgcaagttgggtttccctaaagtaaaatkaacttttcacttggttggtaggtgtaagatgtgaccagtaatgaatgtgttctgagttagctgcacatttacctgttggatgttatctgtatttgcagtt

SEQ ID NO: 408874 - DNA, 201 bp, Homo sapiens
aaagcccacagctgtcctcagaccctatcaggagaagagcttgcgaaagatgtttggaaacgggcgtgcacgttcgggggtcattgttcttccctgcggtragtggtaccagagttaagaaggtggtcaggctgttgtgtctggatctgccagctgcctcccgctttctctctgcacatttccctaaatcacaccttgctg

SEQ ID NO: 408875 - DNA, 201 bp, Homo sapiens
taaccccgagtgcagggcttttccactccagtgcttgcttttgagcctgggacccttagctcttggcattctaatggctaatgttgtcttctttattgccrtttctcattttttcctgcagggatggttgcagaagagtacaatgcctttttctactcactggtatcccaggacacacaggaaatggcttactcaaccaag

SEQ ID NO: 408876 - DNA, 201 bp, Homo sapiens
gtaagctgggtttgactgcgaccctcgtccgcgaagatgacaaaattgtggatttaaattttctgattgggcctaagctctacgaagccaactggatggarctgcagaataatggctacatcgccaaagtccagtgtgctgaggtagctgggcctgggctgggggcgtctgggaaagggcctcctcctatgggcaggggag

SEQ ID NO: 408877 - DNA, 201 bp, Homo sapiens
ttcttgtaggtgctggaaagtccctggttggtgtgactgctgcatgcactgtcagaaaacgctgtctggtgctgggcaactcagctgtttctgtggagcartggaaagcccagttcaagatgtggtccaccattgacgacagccagatctgccggttcacctccgatgccaaggacaagcccatcggctgctccgttgcca

SEQ ID NO: 408878 - DNA, 201 bp, Homo sapiens
caaaaacaaacaaaaaaacaggccaggcgcggtggctcacacctgtaatcctagcactttgggaggctgaggtgagtggatcacctgaggtcaggagttcsagaccagcctggccaacatggtgaaaccccatctccactaaaaatacaaaaattagccgggcgtggtggcaggtgcctataatctcagctactcaggagg

SEQ ID NO: 408879 - DNA, 201 bp, Homo sapiens
tgctgtgctggaaatagactgaaggaagcaagacagaagcggtgaggtgagtttgtggaatcccagtaaggatgaaggcgtgatccgactctggatatgtygtgaagctttaattgacaggtcaggtgtggaatcagagagaaatcaagaatgacactaaggtttttggcttgaacaaagggaggatacagtgggcattaa

SEQ ID NO: 408880 - DNA, 201 bp, Homo sapiens
tctgaggcattttcacaggtagtgttcaaaatgtcaaaatggccccagcatctggttctttctgtgcatgagagctcttcagccctgatgggtttctggaratacctagagatgttcacagctggccagggagggattggaggtctttctgatggaagcccagggtgtgggccctgctgtgggaaagtacttggcatagtg

SEQ ID NO: 408881 - DNA, 201 bp, Homo sapiens
catcagatagaccctggtataaagaggagaaaagagtgattatgtttcaaaattatctacagaacttatttaaattctggatcagttgactttttttttttcctcatatataaaaaccttccaacttgtttctgtaggtaggtgacacttcgtttgatctgccggaagcaaatgtcctcattcagatctcatcccatggtg

SEQ ID NO: 408882 - DNA, 201 bp, Homo sapiens
tcactggaagctctgcctcccgggttcaagtgattctcctgcctcagcctcccgagtagctaggattacaggtgtgcgccaccatgcccagctaattttawatttttagtagagacagggtttctccgtgttggtcaggctggtctcaaactcctgacttcaggtgatccgcccacctcagcctcaccctgggattacagg

SEQ ID NO: 408883 - DNA, 201 bp, Homo sapiens
gtggtgatgtgttttatttgaagcccggaatattgatccttagtcaatatgtaatagaagccctacttctccaagtatcatgggcaaacctttttttttttaagctgctctattgatttaatttatataccataaaatcaccccttgtaaatatataatccaatgagttttagtaaatttgtggaccagtgcaaccatgac

SEQ ID NO: 408884 - DNA, 201 bp, Homo sapiens
atccgctatgattagtgtcctcctaagaagagacaccggagcatgctttctctcacctgcccttcttgtcatgtgagtacacaatgggaaggtggtccatrgacaagagccttcaccagaaactgaatcggctgataccttgatcatagactttcagcctccacagctctgagaaaatacagttctaatgttgaagccacc

SEQ ID NO: 408885 - DNA, 201 bp, Homo sapiens
tttgatggagcacatgttccagtaggttcctgagagaagggatgtaggaggagaagctttggagacttcacatgtttacagatgtctttactcgactttayacttgatcagtagtttggccaggtcctagaactaacattggagcttccagtgcagcagtttggcagtctgatgccctttgcttcctctcagtgtgttgtc

SEQ ID NO: 408886 - DNA, 201 bp, Homo sapiens
cagagatgcctttctgaggtttattgcttcacctctctctgcctgcatcagatagaccctggtataaagaggagaaaagagtgattatgtttcaaaattayctacagaacttatttaaattctggatcagttgactttttttttttcctcatatataaaaaccttccaacttgtttctgtaggtaggtgacacttcgtttg

SEQ ID NO: 408887 - DNA, 201 bp, Homo sapiens
ttagaggccttgcctcaaactccctttatctctgcatgaatctctgagggcagctgttggtggaaagtgtgccgtcctggcaggactgaggtgccatggcrctatgaccagcactgtgtgaatctgagccccgcagggctgctttctcagggatgcctctctaggtagctaggagagctcttcctttcatcagctggtaag

SEQ ID NO: 408888 - DNA, 201 bp, Homo sapiens
cacaagttgggggttactttaatattcagttacattattttgactgtgtaagtatgttcaggcagagctgtagagtactattacattttccttttttttttgagacggagtcttgctctgttgccaggctggagtgcagtggcgctatctcagctcactgcaacctctgccttgtgggttcaagtgattctcctgcctcag

SEQ ID NO: 408889 - DNA, 201 bp, Homo sapiens
ctgctttttcttacatgttcatttttttgaaagattgtggtgcaaaggcttactctaataagtaaccttctggactatggaatgaatataaatgaatggcmctttgagtgttaataaagctaatatttatttccactgtgattggtttttccaaatctattcttggacacattttatttacagttattccctccttgcttg

SEQ ID NO: 408890 - DNA, 201 bp, Homo sapiens
gcacaaccccaaaattaacaccatcttcatatccaaggtttgtgtggcatatggggtggaggtgaggcccctagcactctggggacctggggggtacactrtgattcctggacagtgaattcatgtctgctgaaggaacttctcctgcatgttttcatttccgacatgtccagggatagggggcactgcctggggttagtg

SEQ ID NO: 408891 - DNA, 201 bp, Homo sapiens
gccccaagcgcctaactgatatgctcccagccctgctgggaagtgtgtgaagaggtggcggtactcagtagcagtgctgactcgtgtgtggaagtgtggcytaaatggaagaattgctgacactaccaattgagaatctggtttcgcacacttgcagctggtgtgaaaataactccctggatgtgattgcatttaaaaatc

SEQ ID NO: 408892 - DNA, 201 bp, Homo sapiens
cgaagagaatggtgggcctaaacctagaatcagtggggaaggctgggaggtgcatctgtagccagtcatttttttgggtgtaacgatattcctacatgacragggctttctacttgagaagagctagcctgagctcctttttccctctgatgtgttttcaagataactgaggcattattctgtggtctaacacagcttcat

SEQ ID NO: 408893 - DNA, 201 bp, Homo sapiens
tccaaaaagaaaacgaaaaatggaaaggagggaatcccgaagagaatggtgggcctaaacctagaatcagtggggaaggctgggaggtgcatctgtagccmgtcatttttttgggtgtaacgatattcctacatgacgagggctttctacttgagaagagctagcctgagctcctttttccctctgatgtgttttcaagat

SEQ ID NO: 408894 - DNA, 201 bp, Homo sapiens; identical to SEQ ID NO: 91874

SEQ ID NO: 408895 - DNA, 201 bp, Homo sapiens; identical to SEQ ID NO: 91875

SEQ ID NO: 408896 - DNA, 201 bp, Homo sapiens
tatctctcaggctcccgatggccatatcttcttggaagccttctctccagtttacaaatatgcccaagacttcttggtggctattgcagagccagtgtgcygaccaacccatgtgcatgagtacaaactaactgcctactccttgtatgcagctgtcagcgttgggctgcaaaccagtgacatcaccgagtacctcaggaa

SEQ ID NO: 408897 - DNA, 201 bp, Homo sapiens
gggttatatggcagtgtggggctgtgggcagagcatcgtttttgggatcagacagactggatgtgggaaagttgtttacctctgaactccttttgtacttyggtcacatggagctactgccacccaatgtgtactgggtcctggtgtcccttgatggtggggggtggattcttgtgcctggcagcttgtaagtatttagta

SEQ ID NO: 408898 - DNA, 201 bp, Homo sapiens
tttatcccggttgttgactgagcaagatctaaaatcttgtataagtttagatagaatgccacttttttgaccattggacctcttagaagatgtaatgtttytgagcacagtaacaagattttaaaaccccttttgtgccctctttccaggaaatgattgaggaactccagaaacgttgcatccacctggagtaccctctgt

SEQ ID NO: 408899 - DNA, 201 bp, Homo sapiens
taggtggttggagtcagaggttagagcatagagaaaaggggggctagtcaccttgagcccaaagaacagggagcagagacttggactgagctgggtggggycccatggaagatctgggctccaaaggtgggtgggagttggcatttggagctttgggctgtgtgagctctgtgggtggagaggaggccagactggatggcc

SEQ ID NO: 408900 - DNA, 201 bp, Homo sapiens
tctaaaatgatcctgcgggccaggcgcagtggctcatgcctataatcccagcactttggggggccaaggcagaaagatcacttgagcccaggagttcaagwccagcttgggcaatatagtgagaccccatcctttaaaaaaaaagtgatcctgtggctctcgggcattgctccattctttgctcgtgtgtggtggggattc

SEQ ID NO: 408901 - DNA, 201 bp, Homo sapiens
gtctgttagctcaggtactgtgcctgcatctgtctgcttttcagcttctgaaatgttacccacttctctcatctgctgttatttcttctcctgttttcttkgtgggtttgtgttctgtcacattagtgccaatttgagcagggcaatgagacagttcctatatttactttgccttatttaagaactattctctccccatcc

SEQ ID NO: 408902 - DNA, 201 bp, Homo sapiens
gtaacgatattcctacatgacgagggctttctacttgagaagagctagcctgagctcctttttccctctgatgtgttttcaagataactgaggcattattytgtggtctaacacagcttcattcttctctagaccctatatctacggacctacgtctcagggggaaaggatgcaaattctccagaatttcaagcacaaccc

SEQ ID NO: 408903 - DNA, 201 bp, Homo sapiens
cacagtgtatttttataataaaggaaggatctctgtttaatggaaaagcttgatttttctcttgatcttcaaatggtggatggtagtaaactcagaagctyctggaatttcattttctctgtacacacatagcgcatccctgaattctcagccccgtttgctgtgtaataataatagtggtcttttgccgagtgcctcctt

SEQ ID NO: 408904 - DNA, 201 bp, Homo sapiens
ttgcctgctgattagatttcattttcaaagtgttgttagtctgggttgcttttctgtgctttatcccggttgttgactgagcaagatctaaaatcttgtakaagtttagatagaatgccacttttttgaccattggacctcttagaagatgtaatgtttttgagcacagtaacaagattttaaaaccccttttgtgccctc

SEQ ID NO: 408905 - DNA, 201 bp, Homo sapiens
ataactgttgtgaggggaatgctgggattcattaacttggagattccttaagctcatttcaccctcttgttctccttttcattttcttttggacaggtctraaagtgatggtgaagcatttgcctagtcattcttgtctagagccagcttctgtggtcctgaaacccaagggttagttcaggtggtgtcataagccagtgt

SEQ ID NO: 408906 - DNA, 201 bp, Homo sapiens
cagtagtgaaaaagaacaaacttgctgcatgttgcaacctggatgaatctcaaaagcatggtgctgagtgaaagaagtcagcctcaaaagcttccatagtrtgtgatttcatttatacaacgacagtatagtgctggccagcagatcagtggttgccagaagtggggggtcagagatggatgactctaaaggagagcacag

SEQ ID NO: 408907 - DNA, 201 bp, Homo sapiens
ctgaagggcacttttctcctttctgctcatctcttggagcatgcctgtgtcttggcaaacagttgcttccagcctttttttggaaatagcagtggtttctktgcacctctctttgggcttcatgaaatgtggagatgctccttgtatagactctgtgctgagagtaagagatgttgaagcaggaaaaagcatagtccaaaa

SEQ ID NO: 408908 - DNA, 201 bp, Homo sapiens; identical to SEQ ID NO: 91873

SEQ ID NO: 408909 - DNA, 201 bp, Homo sapiens
gaagctcagcaagactggagtccctgatggaattatgcagtttattaaggcaagtgacagctgagaccagcaattccacctgccctgctaatgtaacaatrggcataggtgctccatgttgtcagcctgtggcagccatgagaatgtgccattcagatttcctgtggggagcataacgactgattaccccagccgctacac

SEQ ID NO: 408910 - DNA, 201 bp, Homo sapiens
gcagcgttttataacttaatggatatgcatcagaattacccaggcaagaggaagattttgttctcagaaagcagaggccaatggaaaaagctcagtttagrcacatctgaccactttaggattgcaagttgggtttccctaaagtaaaatgaacttttcacttggttggtaggtgtaagatgtgaccagtaatgaatgtgt

SEQ ID NO: 408911 - DNA, 201 bp, Homo sapiens
aaagttattaatttaagcaagggaataaaaatcatatgctaaggttgctaagatcgagggtgagaatgactcttcctgctgtacaagatgatcatccccaragcacatagccgtcagactttccaaggtcaatacaaaagaaagaatcttaaagacagctagagaaagggtcatataactcatcatgctaacagcagactt

SEQ ID NO: 408912 - DNA, 201 bp, Homo sapiens
gtggctcacatctgtaatcccagcactttgggaggctgaggcgggtggatcaccggaggtcaggagttcgagaccagcctggccaacatggagaaaccctstctctactaaaaatacaaaaattagctgggtgtggtggcagacgcctgtaatcccaactactcaggaggctgaggcagcagggttcagtcacttgaaccc

SEQ ID NO: 408913 - DNA, 201 bp, Homo sapiens
atgcttagaacaatgcctgagacagtaagcgatctgtaaacattattaaaaatgatgtattaaatttatgtaagtcttataaaatttgctgtgattataartattataaaaggagtatcttttcttctggagactaacatgggctggttcccccttcccggcaggcatctcggcgctttggcaccatgagttctatgtctg

SEQ ID NO: 408914 - DNA, 201 bp, Homo sapiens
gtgacatcaccgagtacctcaggaagctcagcaagactggagtccctgatggaattatgcagtttattaaggcaagtgacagctgagaccagcaattccayctgccctgctaatgtaacaatgggcataggtgctccatgttgtcagcctgtggcagccatgagaatgtgccattcagatttcctgtggggagcataacga

SEQ ID NO: 408915 - DNA, 201 bp, Homo sapiens
gaaaccctgtctctactaaaaatacaaaaattagctgggtgtggtggcagacgcctgtaatcccaactactcaggaggctgaggcagcagggttcagtcasttgaacccgggaggtggaggttgcagtggagctgagattgtgccgttgcactccagcctaggcaacaagagcgagactccgtctcaaaaaaaaaaaaaaa

SEQ ID NO: 408916 - DNA, 201 bp, Homo sapiens
aggaggctgaggcagcagggttcagtcacttgaacccgggaggtggaggttgcagtggagctgagattgtgccgttgcactccagcctaggcaacaagagygagactccgtctcaaaaaaaaaaaaaaaaaaaaaaaaaaagaaatgagattttatgtgattgtggctgggcgcttataagcaccaaaccttcatgtctgt

SEQ ID NO: 408917 - DNA, 201 bp, Homo sapiens
cggtcgctggctctccgctcttccagccacccacatcacggcgcctagaggcgggacatcctgtgtggacaacagggagcttccggattgagccggaagtycccccagagcggatgccgcggcgggcctgtgggagcggggtcatcttctctctgctgctgtagctgccatgggcaaaagagaccgagcggaccgcggtga

SEQ ID NO: 408918 - DNA, 201 bp, Homo sapiens
ttttaatgtgtctctttatgcattggtgagagttcccattattggccttaggaggacagggttgtctgaccttccctcttttagctagaggcagtgacacytcagacctctcatgctggcctagaggacaagatgcttgggttttgagcccagttttttggaggatttgcatcatgacctttttatccatccatgaaaatc

SEQ ID NO: 408919 - DNA, 201 bp, Homo sapiens
ttaaagtcccagtgtcctctttttcaggctggtaggctggtcttcacaggttcctgaggagatgtgagaaatggtgcctgaaggtcaattttgcctgctgmttagatttcattttcaaagtgttgttagtctgggttgcttttctgtgctttatcccggttgttgactgagcaagatctaaaatcttgtataagtttagat

SEQ ID NO: 408920 - DNA, 201 bp, Homo sapiens
gatggagggttctagaagtaggggaattaaattccccctatggtccactaaaaggacatccctagaacattagactcccaggttcttgattgcaaaagacygcaatccaggctgccttttgagatacgtttttaatgtgtctctttatgcattggtgagagttcccattattggccttaggaggacagggttgtctgacct

SEQ ID NO: 408921 - DNA, 201 bp, Homo sapiens
acccagtctccaccatgctgttcttactctctcagagaagctctataaataatcttcctgatatcctatcattttcattttcacgtgctcattcctgctgraagccccagttgcggagcacagcagatgccagggaccttcacaaagggccacagcctgtgccttccagtcacttgtcccttcctttgtctgctccaagat

SEQ ID NO: 408922 - DNA, 201 bp, Homo sapiens; identical to SEQ ID NO: 91879

SEQ ID NO: 408923 - DNA, 201 bp, Homo sapiens
ctatttttatattgtttttggagaagtaatctgttcatattcttctctcatttataattaatttgtcttgttgttgagtttcaacagttctttgtataacstagatacaaatcccttatcagatatatgctttccacatttttttattctgaggattgttttttcacttgatggtgtccttggaagcacaaaagacttcca

SEQ ID NO: 408924 - DNA, 201 bp, Homo sapiens
atgtttccttgtctgttttgtccatttggtatctctcaggctcccgatggccatatcttcttggaagccttctctccagtttacaaatatgcccaagactycttggtggctattgcagagccagtgtgccgaccaacccatgtgcatgagtacaaactaactgcctactccttgtatgcagctgtcagcgttgggctgcaa

SEQ ID NO: 408925 - DNA, 201 bp, Homo sapiens
gctacagggcttacagtaaccaaaacagcatggtactggtacagaacaggcacatagaccaatggagcagaatagagagctcagaaataatgccatgtacytgcagccaactgatgttcaacaaaattggcaaaaatatgcagtggggaaagtactccctattcaataaatggtgctggggaaactggctaactgtatgca

SEQ ID NO: 408926 - DNA, 201 bp, Homo sapiens
agccgagatcgcgccactgcactccagcctgggcaacagagcgagactctctcaaaaaaaaaaaaaaaaaaaaaagactcaataaattcaaaaaagtcgaratcataccaagcattttcttgggtcacagtggaataaaagtagaaatcagtaccaggaagaactctcaaaaccacacaattggccaggcacagtggctca

SEQ ID NO: 408927 - DNA, 201 bp, Homo sapiens
acagcagacttctcagcagaaactttacaagtcagaagagattgggggactgtttttagcattcttaaagaaaagaaaagaaatcctggctgggcacggcrgctcacacctgtaatcccagcactttgggaggccaaggtaggcagattgcttgaactcaggagtttgagaccagtctgggcaacatgatgaaaccctgtt

SEQ ID NO: 408928 - DNA, 201 bp, Homo sapiens
ggaacggctgggaagaggcgggggaaatgggtgtctcgggaggtggcggcagggaggggtcccctggaggggccccagccgggacccctggggaggaggtrgcggggaggggagtcagggatggagtttcggagagtggtagcccgagagaggcggcgggcagggtctccagggactggtcccggggagggacccaggcag

SEQ ID NO: 408929 - DNA, 201 bp, Homo sapiens
gggaatgagcaggcgtttctgagaggtcagcacgaggggtcagaggttaggtgtttaggctgagccacccagatgccagcaaatgatgtagctgcctgaaracatgctgttcagctcatttctttaatagtgacaaaggcatgagttccgcctgcgtccccattgcaagccttgacccttgagccttggtgccctgtctga

SEQ ID NO: 408930 - DNA, 201 bp, Homo sapiens
ttgtttcataatttcatacatgaagagggtacagacattaaaaaccttattagttatcatttaaaatattccaggccatggaatttatttataaagccaaraattcatttcattcactccccaatttgttctataaagccaacataacttcaaaaccaaaacctgctaaagagagtgtaaagaaagtaaactaaagcagtt

SEQ ID NO: 408931 - DNA, 201 bp, Homo sapiens
tcaaggctttatttttattgtaatatcacttaagcatgtaaaagcgaaaaacaaaacaaaacaaaacaaaaacaaacccacacagcataaactccttattyttttggattttgtgcaacaataaaacaaaaagtatatgaactaaatgcaaactaaatgatgcaatcaatgagaattctaattaactacctgaatgtgatg

SEQ ID NO: 408932 - DNA, 201 bp, Homo sapiens
aagtttgcttcaaaggcaagagtgtaagaagctctaacaggctccagggctgcagttattaacttctctctccccagcaaaaagtctttcctgtcttaatyctactttgttgggcagctcttgttgattctttatggctgaaattttttctagaggttccttgaattctttcccagaatgtcagtgtaagtaagatgattt

SEQ ID NO: 408933 - DNA, 201 bp, Homo sapiens
caagtgtatgagtgaaactcccaggttgacgttagataaattgggtttccttaccctctgtcacctgccactggtttagttaagctactgggaggacagarggctttgagactgaaaagatgattctcaacccaaactcctttcaaaagaaatactgttttcaaacaggccaaattcatgttgacaacaagttgagggaca

SEQ ID NO: 408934 - DNA, 201 bp, Homo sapiens
ggagtctctgaagggctcgacggtcttctcagtggctgcagtgacatttggggtgcagtgtggagtgggaaggggggagcggctgccatcctgggtgtgartggacccgggcggcccccaggcgggagcaccccgggagactgtccggctagggctctgggccctgccctgctcttgagtgattctgccccttttcccttt

SEQ ID NO: 408935 - DNA, 201 bp, Homo sapiens
tgagggacatacagtaccaaatggaccgaggccggagggtgagcgggggacttctcacatacctcttccttagccaggctctgacgctgcaggagatctaygccaacgtgactgagatgctgctggccggcgtcgacacggtgagtctgggggtcctgttctcagcaagcaacacacgataaccccttcctcatcacctca

SEQ ID NO: 408936 - DNA, 201 bp, Homo sapiens
aggctgtttccagtgctgccagggaacggccgggtcacccaggaagacctggttattggcgggtatctgattccgaaaggcgtgagtttggggccatgggkgtggccaggccttgcgggtcggggttgaattggaatctgcttctaccttcaggaagtctttgtccctaagcagagatcaataggtttccttttcttttgc

SEQ ID NO: 408937 - DNA, 201 bp, Homo sapiens
ttactgggggtttcccaaaatgttcctgggtcaatggcctttgactttgttcctctgaagataacacgaaacaagatcgatttgttaggaaaatagtttgrcctgttcagctgatttgcagacctggatacaaacctcatggttcttgagtgaatgttctcatctgggtttagacgccacccagtgaggctcaattactcc

SEQ ID NO: 408938 - DNA, 201 bp, Homo sapiens
cctatctgtgttcatgtgttctcaatattcaactcccacttatgaataagaacatgcagtatttggttttctgttcctgtgttagtttgctgaggatgatkgcttccagcttcatccatgtccctgcaaaggacatgatctcattcctttttatgactgcatagcattccatggtgtatatgtgccacattttctttaacc

SEQ ID NO: 408939 - DNA, 201 bp, Homo sapiens
gtacaaatgtggctttataatcttatgggatcaccattgtatattgggtccatcattgaccaaaacatcactatacgatgcatgattgtatattaaatgtaaggtgcataatgatttctgtgaaaagcataaccaaaattccattagcacacacacaaaatgataataaatgtttaaagtttacaaatcattcctgatttg

SEQ ID NO: 408940 - DNA, 201 bp, Homo sapiens
aagaccttgcacattatattatatatacaagagggctgccctctaaaacacgtgatatcttctacaagaaaatgatatcaatattgcctgcttaaattagttttttttttttggtgaaagagaaaggcctttatactgtggcatttccttgtttactagagagtgaaatgtagtcccatagatgatactattgattttagc

SEQ ID NO: 408941 - DNA, 201 bp, Homo sapiens
agtcccagctacttgggaggctggggcaagagaatcgcttgaagttaggtgatggagccaagattgcaccagtgcactccagcctgggcaacagagcgagrctctgtctcaaaaaaaaaaaaaaaagaaaaaagatctttggagcagtcattgaatattgtccctgctttagccaattggcttactgggggtttcccaaaa

SEQ ID NO: 408942 - DNA, 201 bp, Homo sapiens
ggagttcaagagcagcctggccaacatggtgaaactgcgtctctactaaaaatacaaaaattagcagggcgtggtggtaggcacctgtagtcccagctacktgggaggctggggcaagagaatcgcttgaagttaggtgatggagccaagattgcaccagtgcactccagcctgggcaacagagcgaggctctgtctcaaa

SEQ ID NO: 408943 - DNA, 201 bp, Homo sapiens
taacactgctttaggccgggcgcagtggctcacgcctgtaatcccagcactttgggaggccgaggtgggtggatcacgaggtcaggaggtcgagaccatcytggctaatacggtgaaaccccgtctctactaaaaatacaaaaaaaaattagctgggcgtggtagcgggcgcctgtagtcccagctactcgggaggttgag

SEQ ID NO: 408944 - DNA, 201 bp, Homo sapiens
tctgagataatccgatcgccgaagtatcttttctccaaatgcatttcatggggccttaagtcctatgaactattccttgataaagtggtcccgtggtcacrtaaaatattagaaacttggaatttccctcctgggaacacaatggcatgtgaaaggcttggctttgtgttttgcaaatgttttgctttgggagtcttttcc

SEQ ID NO: 408945 - DNA, 201 bp, Homo sapiens
tcctacctgccaccgcctctgtttcagtccctggtgttactcactgcctgcctgtgtctgccactttctctccttagacgtccttcaccttgtcttggackgtgtacctcctggcaaggcacccagaagtgcagcagacggtgtaccgggagattgtgaagaatttaggggaaaggcatgttccaactgcagctgatgtcc

SEQ ID NO: 408946 - DNA, 201 bp, Homo sapiens
cgcagtcttgcggctcactgcaacctctgcctcctgggttcaagcgattctactgcctcagcctccgagtagctgggattacaggtgcacaccaccatgcytggataatttttgtgtttttagtagaaatggggtttcaccatgttggctaggctggtctcaaactcttgaacccaggtgatcccctcgccttggcctccc

SEQ ID NO: 408947 - DNA, 201 bp, Homo sapiens
tcaccctgagctcagcccctcctgcccactgctcagacagcttccttcaccacacccagggccctggggcacggagcagagagtcacaactgactcacttkctgccttctcaccaagcgcacacaggacctggagagtaaaagaaataaaggaaaaagttctttccctttactctccaggtggcactaccccaaccctcaa

SEQ ID NO: 408948 - DNA, 201 bp, Homo sapiens
tggctgaccgggcgtggtggctcacgcctgtaatcccagcactttgggagacccgaggtgggcagatcacaaggtcaggagttccagaccatcctggctaacacagtgaaatcctgtctctcctaaaaatacaaaaaattagccgggcgtggtggtgagcgcctgtagtcccagctactcgggaggctgaggcaggagaat

SEQ ID NO: 408949 - DNA, 201 bp, Homo sapiens
cttggggaggggcagcgggcgcctggtggacgccgccggggcctgggagtggagagctggcgggacccgcggagttggggctgaggggggctgctgcctgsggccggcccgaggggagcgctaggttccctagctcctctaggctctgcggagctcggtgtccttaggtggccgagaccgtgtgtattcatttctagtcct

SEQ ID NO: 408950 - DNA, 201 bp, Homo sapiens
ggctgaccgggcgtggtggctcacgcctgtaatcccagcactttgggagacccgaggtgggcagatcacaaggtcaggagttccagaccatcctggctaacacagtgaaatcctgtctctcctaaaaatacaaaaaattagccgggcgtggtggtgagcgcctgtagtcccagctactcgggaggctgaggcaggagaatg

SEQ ID NO: 408951 - DNA, 201 bp, Homo sapiens
gctgcacggtagagcctattactcctaggctacacaactgtacggaatgttactgtactgaatactgtgggcagctggaacacagtggtaagtatgtgtgkatctaacatacttaaacattggcaagctacagtacaaatgtggctttataatcttatgggatcaccattgtatattgggtccatcattgaccaaaacatc

SEQ ID NO: 408952 - DNA, 201 bp, Homo sapiens
taaccccttcctcatcacctcatggacgttgtctacttttttggagcgggaggatggagttttactctattgcccaggctggagtgcaatggcatggtctyggctcactgcaacctctgcctctcaggttcaagtgattctcttgcctcagcctccagagtagctgggattacaggcgcccgccaccacttccagctaatg

SEQ ID NO: 408953 - DNA, 201 bp, Homo sapiens
ggtgaccatagcagaggatgcctagatgtagtcacgtgttagtttttggacccataacttttggattttttttttttttgagacggagtctggctctgtcrcccatgctggagtgcagtggtgtgatctcagctcactgcaacctctgcctcctaggttcaagtgattatcatgcctcagcctcctgagtagctgcgatta

SEQ ID NO: 408954 - DNA, 201 bp, Homo sapiens
caggatgattctggcttcataaaatgagttaggggggagtcccttcttctcaattgtttggaatagtttcagaaggaatggtaccagctcctctttgtatktctggtagaattcagctgtgaatccatctagtcctgggctttttttggttggtagactattaattactgcctcaatttcagagcttgttattggtctatt

SEQ ID NO: 408955 - DNA, 201 bp, Homo sapiens
gggcagtatggccattttcacgatattgattcttcctatccataaggatggaatgtttttccatttgtttgtgtcctctcttattttcttgagcagtggtktgtagttctccctgaagaggtccttcacattccttggtagctgtattcctagatattttattctctttgtagtgattatgaatgggagttcattcatgat

SEQ ID NO: 408956 - DNA, 201 bp, Homo sapiens
gtatagtttgaagtcaggtatcgtgatgcttccagctttgttctttttgcttaggattgttttggctatatggggtcttcaattccatatgaaatttaagktttttttttttctaattctgtgaagaatgtcaatggtggtttgatgggaatagcattgaatctataaattactttgggcagtatggccattttcacgata

SEQ ID NO: 408957 - DNA, 201 bp, Homo sapiens
tgggcccaggagttggaggctgcggtgagctatgtttatgccactgcactccagcctgggcaacagagcaagaccctgtctctaaaaaacaaacaaacaarcaaacaaacaaacggaaacaacaaaaaagagatggttatgtgaaaacatgtttatctcagcaatatgtaaattactgctctgattcagtgctgtgttaga

SEQ ID NO: 408958 - DNA, 201 bp, Homo sapiens
acggaaacaacaaaaaagagatggttatgtgaaaacatgtttatctcagcaatatgtaaattactgctctgattcagtgctgtgttagatagcacttccckctgccccaattttctgctcctctagcacacaggatgtttatgttaaaggtatatcatatctatgtattttttccttttttgatttctccatggtattgca

SEQ ID NO: 408959 - DNA, 201 bp, Homo sapiens
cagatgccagcaaatgatgtagctgcctgaaaacatgctgttcagctcatttctttaatagtgacaaaggcatgagttccgcctgcgtccccattgcaagmcttgacccttgagccttggtgccctgtctgactcttaattatttaaaagagataccttaaagagataatcgctttagggtgatggatactttggtgttct

SEQ ID NO: 408960 - DNA, 201 bp, Homo sapiens
tcctggcgggagtaccgagacttgcgggggagagccaccgggctcatctcggcgtgagtatgtgggcccgggctgagccacgggctggagggggagctcagggggaggccccctcctccaaagctgagttcctaaaagccagctcttaaaaaagcacagaacccccccatggaatgatatcagacagtctccttgtgcgat

SEQ ID NO: 408961 - DNA, 201 bp, Homo sapiens
tgaggcaggagaatggcatgaacccgggaggcagagcttgcagtgagccgagatcgcgtcactgcattccagcctgggcgacagagcgagactccgtctcaaaaaaaaaaaaaaagacactgctttgcatagacgagttattgacttgctctgtgtggaccttacttgatgaaggcaggacacgatggctaactagtgatc

SEQ ID NO: 408962 - DNA, 201 bp, Homo sapiens
gaggcaggagaatggcatgaacccgggaggcagagcttgcagtgagccgagatcgcgtcactgcattccagcctgggcgacagagcgagactccgtctcaaaaaaaaaaaaaaagacactgctttgcatagacgagttattgacttgctctgtgtggaccttacttgatgaaggcaggacacgatggctaactagtgatct

SEQ ID NO: 408963 - DNA, 201 bp, Homo sapiens
ctcccagagtgctgggattacaggcatgagccactgcgcccggcctgtactaagtctttttttttttaatttcctctaaaaaaaaaaaaccaaaaaaaaamaaaaaacaaaaaacggatacatgtgcagaacatgcaggtttgttacataggtgtacgtgcaccatggtggtttgctgcacctattgacccatctaagttt

SEQ ID NO: 408964 - DNA, 201 bp, Homo sapiens
gagtgctgggattacaggcatgagccactgcgcccggcctgtactaagtctttttttttttaatttcctctaaaaaaaaaaaaccaaaaaaaaaaaaaaamcaaaaaacggatacatgtgcagaacatgcaggtttgttacataggtgtacgtgcaccatggtggtttgctgcacctattgacccatctaagtttcctccc

SEQ ID NO: 408965 - DNA, 201 bp, Homo sapiens
gtctttttttttttaatttcctctaaaaaaaaaaaaccaaaaaaaaaaaaaaaacaaaaaacggatacatgtgcagaacatgcaggtttgttacataggtrtacgtgcaccatggtggtttgctgcacctattgacccatctaagtttcctcccctcaacccccaccccagcaggccctggtgtatgttattcccctatct

SEQ ID NO: 408966 - DNA, 201 bp, Homo sapiens
ccaggcagtgtgctaagtctgggacatacatgcatgtcacctccacggtgctaacgtgaacctggtgtgaaccaccgttgaccaatgaggaaactgagactttttttttttttttctgagatgaagtcttgctctgtcacccaggctggagtgctatgatgtggtcttggctcgctgcaacctctgcctcccaggttcaag

SEQ ID NO: 408967 - DNA, 201 bp, Homo sapiens
agaggggcccgaatgctgaggcagaatctctctgctgtctgccccgttagctgcaggctcaggagcctgtgtgggtgcctggacccctcttcggctgagayggagagaggcggtgctggtgacttcagcacagtggacagcaaagggaagggcagtgcctaggcccaggcgccgggctggcttagcttgggtcctccaaag

SEQ ID NO: 408968 - DNA, 201 bp, Homo sapiens
ggtttgttacataggtgtacgtgcaccatggtggtttgctgcacctattgacccatctaagtttcctcccctcaacccccaccccagcaggccctggtgtrtgttattcccctatctgtgttcatgtgttctcaatattcaactcccacttatgaataagaacatgcagtatttggttttctgttcctgtgttagtttgct

SEQ ID NO: 408969 - DNA, 201 bp, Homo sapiens
caccatactgtcttccacaatggttgaactaatttacattcccaccaacagtgtaaaagtgtttcagtttctccacagccttgccagcatctattcctgastttttagtaatcaccattctgactggtgtgagatggtatctcattgtggttttgatttgcatttctctgatgatcagtgatgtatacattatacattgag

SEQ ID NO: 408970 - DNA, 201 bp, Homo sapiens
agagagtacaggcatgagcctttgcacccagccatgtattttttttagagacagaattttgccatgttgcccaaccttatcttgaactcctgtgctctagygatccacccacctaagcctcccaaaagtgctgggattacagacaggcatgagccactgcagctggtcaagtattgtattctttttgatgtattgtaaatt

SEQ ID NO: 408971 - DNA, 201 bp, Homo sapiens
gtgttactttttaagaatttttaatggaaatgggaatatatccagggttctgaacgttcaataaaatactgtgaaagtcaccacgccattcccgtccccgytggctcttttccaggctgtttccagtgctgccagggaacggccgggtcacccaggaagacctggttattggcgggtatctgattccgaaaggcgtgagtt

SEQ ID NO: 408972 - DNA, 201 bp, Homo sapiens
ctgggtagcccgctcactcaccacctcccttggctggggggagtgggttcccttccccgtgtggcttccaggtgggccactgcactacactgttcttcctkctctccgtgggttatgccagccttctagtcaattttgatgagagaacctggataccctggctgccagtgaaggtttcacatgcttattatgttttttttg

SEQ ID NO: 408973 - DNA, 201 bp, Homo sapiens
gcacagttctgtggaaaaagcacagtttccccagctgggtagcccgctcactcaccacctcccttggctggggggagtgggttcccttccccgtgtggctyccaggtgggccactgcactacactgttcttccttctctccgtgggttatgccagccttctagtcaattttgatgagagaacctggataccctggctgcca

SEQ ID NO: 408974 - DNA, 201 bp, Homo sapiens
tgtgttactttttaagaatttttaatggaaatgggaatatatccagggttctgaacgttcaataaaatactgtgaaagtcaccacgccattcccgtccccrctggctcttttccaggctgtttccagtgctgccagggaacggccgggtcacccaggaagacctggttattggcgggtatctgattccgaaaggcgtgagt

SEQ ID NO: 408975 - DNA, 201 bp, Homo sapiens
ggatgcttggctctggtggcatgggttcgagagtgggatcttctgacctgtaggttgcacagttctgtggaaaaagcacagtttccccagctgggtagccygctcactcaccacctcccttggctggggggagtgggttcccttccccgtgtggcttccaggtgggccactgcactacactgttcttccttctctccgtgg

SEQ ID NO: 408976 - DNA, 201 bp, Homo sapiens
ggtgatccacccgccttggcctcccaaagtgctgggattacaggcatgagccactgcgactggccgttgtctacttttaaggcagatttgtttagcacacygttcatgtttgtactaggcctgctgcactgctggggggctccaggaggagaaaactctgtgtatgcagtcacgcctcacttaatgatgcagatttgttct

SEQ ID NO: 408977 - DNA, 201 bp, Homo sapiens
tcttctgatttgctcctgtgcctggagatgtcactcaaggaggctgaagtgcagcaatgatgggtgcctgctccttcttctgggacctctgacctcaaggrgcatcaacctgatgccagtaggattgcttctgtatagggtatctgacaacccctattggagggtctcacccagttgggtggcatggggagcaagaacctt

SEQ ID NO: 408978 - DNA, 201 bp, Homo sapiens
accccttctctctctttctcttcttagttgcttcaacattttgagatcaaaacatcttctcagaccaatgctgttcatgcaaaaacccacgggctcctgaygccaggggggcccatccacgtgcgatttgttaacagaaagtaagcctagattttaaacctgggctgatgtagcagaccagctcgccgacacacagtgggt

SEQ ID NO: 408979 - DNA, 201 bp, Homo sapiens
tgataaggtcaaatgagcttagtgttatgaaactgtaataataacaaataataacgatcagtatttctagaactcttttcatgtgccaggcacagtttcargtcttacgtgaaacttatttctccattttttgggtgaggaaactgaggcatagtgggacctaacttccaaaggttattcagctagtaaactgtgagccca

SEQ ID NO: 408980 - DNA, 201 bp, Homo sapiens
tgaggactcccaatttcgaacacatggttctagaaaaaccctctcttcccgctctccaggttgctcattgttctgtggcccatcacatccagttcacttgygctccccttgcaatcacagaatgttagctaaacaagggctcttagtgttcacctacatagctcacctctcattttacagatggaaagagttgggtggtta

SEQ ID NO: 408981 - DNA, 201 bp, Homo sapiens
gtgttagaacatgctcctttaggtcatcgcagttttttattacccatcttctgaagtgtacttctgtcaattcgtccatctgatcctccatccagttctgygctcttgatggagagacattgtgattatttggaggagaagaggcactcaggccttttggttttcagcatttttttgttgattatttctcatctctgtgag

SEQ ID NO: 408982 - DNA, 201 bp, Homo sapiens
ccacacagcataaactccttattcttttggattttgtgcaacaataaaacaaaaagtatatgaactaaatgcaaactaaatgatgcaatcaatgagaattytaattaactacctgaatgtgatggtgtggattcgctcaaattaagacaccacttgaaaggtgaagaaatcaatgaatggcttcgtcgctgagcttgtgcc

SEQ ID NO: 408983 - DNA, 201 bp, Homo sapiens
taaatgcaaactaaatgatgcaatcaatgagaattctaattaactacctgaatgtgatggtgtggattcgctcaaattaagacaccacttgaaaggtgaaraaatcaatgaatggcttcgtcgctgagcttgtgcctcctgtcccctggtggtaactaagaacatcacaatgaggtggcattcagaaggaagctgttcctt

SEQ ID NO: 408984 - DNA, 201 bp, Homo sapiens
ggtgtgagtggacccgggcggcccccaggcgggagcaccccgggagactgtccggctagggctctgggccctgccctgctcttgagtgattctgccccttwtcccttttctgtcatccctgatttcctcagacccagctggccctttgccactatgccacatcgtaccaggatgagaacttccctcgggccaaggagttcc

SEQ ID NO: 408985 - DNA, 201 bp, Homo sapiens
atgctgttgaacctcaaaattaaaaaaaaagaagcagctggctgtggggtttattggtatttgtcaattaaagttttattcagggttttctgagataatcygatcgccgaagtatcttttctccaaatgcatttcatggggccttaagtcctatgaactattccttgataaagtggtcccgtggtcacataaaatattaga

SEQ ID NO: 408986 - DNA, 201 bp, Homo sapiens
gtgatctcactgctctggaaacttactgctcaccagcaaggcagcccatgctccttggcctgctccccaggccgtgtggaagtggccagtcaccgctgggrgtctctgaagggctcgacggtcttctcagtggctgcagtgacatttggggtgcagtgtggagtgggaaggggggagcggctgccatcctgggtgtgagtg

SEQ ID NO: 408987 - DNA, 201 bp, Homo sapiens; identical to SEQ ID NO: 91894

SEQ ID NO: 408988 - DNA, 201 bp, Homo sapiens
ctccgggccggtggtggccatggtgagtatccgggaagcgggcgggcggctccgggacccccacccccgcgtgataccgcgcccgttcctccgcacaggtwtggcaggggctggacgtggtgcgcacctcgcgggcgctcatcggagccacgaacccggccgacgccccgcccggcaccatccgcggggatttctgcatcg

SEQ ID NO: 408989 - DNA, 201 bp, Homo sapiens
cctgggcagtgcagtggccaatctcggctcactgcaacctctgcctcccgggctcaagcgagtctcctgcctcagcctcctgagtagctgggactacaggygctcgccaccacgcccagctaatttttgtattttttattagagacaggtttcaccatattggtcaggctggtctcgaactcctgaccccgcgatccgccc

SEQ ID NO: 408990 - DNA, 201 bp, Homo sapiens
tgtggggggccttaaccagggcggggctgctctccctcctggcaccctctcaccggacaccccccgggggcatccaggtcccgtccctgaggactttcacrggtggtaacagccttccgagctcacctgtcacctctctcctcagagagtctactgtggccacgagtacaccatcaacaacctcaagtttgcacgccacgt

SEQ ID NO: 408991 - DNA, 201 bp, Homo sapiens
tccccgaattcactggaaacggtgtcacaagcacgcacgcctgggtggtctcaggcgtgggctccctctgctgagtggagtgagagtcgctgcctctgacmgggttgttttaaataaatcacccggttttttgagcatctttttcaatttcttagagtagaggttaacattattttacagtatttactcatgcaaattcca

SEQ ID NO: 408992 - DNA, 201 bp, Homo sapiens
gcctctgacagggttgttttaaataaatcacccggttttttgagcatctttttcaatttcttagagtagaggttaacattattttacagtatttactcatrcaaattccaactctaaatcagatgaatcataaatactcatcttttttttttttttaatttttttttgagacggagtctccctctgtcgcccaggctggag

SEQ ID NO: 408993 - DNA, 201 bp, Homo sapiens
ctctgcctcccgggctcaagcgagtctcctgcctcagcctcctgagtagctgggactacaggtgctcgccaccacgcccagctaatttttgtattttttaktagagacaggtttcaccatattggtcaggctggtctcgaactcctgaccccgcgatccgcccgcctcggcctcccaaagtgctgggatgacaggcatgag

SEQ ID NO: 408994 - DNA, 201 bp, Homo sapiens
gccctgcctgcctcccagggtggttgcagacctgtggagccacctgtggaggtcatatggccgggggacggcctcactgtaggccgggcccttcatggctkcggccttctaaggcggtgcggaggctgctggtggtgggggctgcctcccgtgcttgttactgtggccttgtcccgactggcctcacagtgcggggtttca

SEQ ID NO: 408995 - DNA, 201 bp, Homo sapiens
cttttgtccattttaaatattgggtttggcctgttgggctgctcttgtaagagttccttatatcatctggaaacaagtctttgtgagatatatatatatakgtgtgtgtgtgtgtgtgtgtgtgtgtgtgtatatacatatatatatttatttgtttgttttttgagacaaagtcttgctctgtcgcccaggctggagtgc

SEQ ID NO: 408996 - DNA, 201 bp, Homo sapiens
tttattagagacaggtttcaccatattggtcaggctggtctcgaactcctgaccccgcgatccgcccgcctcggcctcccaaagtgctgggatgacaggcrtgagccaccgcacgtgggcagtatttttgtttgtaatgttctgctccttgtttgtaatggagctcctttccaggaggacgcccggcactcggaatcctgt

SEQ ID NO: 408997 - DNA, 201 bp, Homo sapiens
tcccagctcatggcttgccttttcattttcttaacattgtcttttggaaaatagtttatagttttggtgaagttccatttacttattttttgtttgtttcttttttttttttttgagacggagtttcactcttgttgcccaggctggagtgcagcggcgcgatctcagctcaccgcaacatccacctcctgggtttaagcg

SEQ ID NO: 408998 - DNA, 201 bp, Homo sapiens
tgggggcagttgtggccaactttccgtctcaaaggaactgctgatttttgtgcatatctcagattcgtgctgttcaagagcaagtattgtttgtttgtttktttttttttttgagactgtctcactctgttgcccaggctggagtgcagtagggcgatcttggctcactgaaactttcacctcccggattcaagcaattct

SEQ ID NO: 408999 - DNA, 201 bp, Homo sapiens
ctactaaaaaatacaaaaaattagccgggtatggtggcgggcgtctgtagtcccagctactcaggaggctgagacaggagaacggcgtgaacctgggaggyggagcttgcagtgagccgagatcgcgccactgcactccagcctgggcgacagagcgagactccgtctcaaaaaaaaaaaagaaaaaaaaaaagacaaggt

SEQ ID NO: 409000 - DNA, 201 bp, Homo sapiens
acttctcgccccggtgggtttagggacatcaaggcctgtctccccccacggctctgtctgctttgtgaggacaagcccccagcagacttctgagaaagacycgggactcaccgtagcccccaaggggcaagtctggtgctcagtgactctgaggccccgagggtgaggggagaaggttacagccttaccctcaggccccac

SEQ ID NO: 409001 - DNA, 201 bp, Homo sapiens
gtggccgcgtcttcttcctggaggcggccagatcgcgcgacctccaggcagtgctcctgcttggcagcacccacctgcctctgcttgagaaagcacaaacygccctctggggaagcagccagctggggagtgctctcggcctgtgaccccgggagggctgggtaggtggccacatgtcctgccccggctctgggtgtggct

SEQ ID NO: 409002 - DNA, 201 bp, Homo sapiens
gtgttctgaagcatcttttttgagacgtgatgtcgctgtcacccaggctggagggcagtagcacagtcttggctcactgtagcctcgacctgtgctcaagmgatcctcccacctcagccccctgagtagctgggaccacaggtgcctgccaccatgcctggctagttttttgtatttttagtagacacagggtctcgccat

SEQ ID NO: 409003 - DNA, 201 bp, Homo sapiens
gccttctcagccttgtcagtcgggcagtgtgctaaggttaccaggaggtgttctgaagcatcttttttgagacgtgatgtcgctgtcacccaggctggagrgcagtagcacagtcttggctcactgtagcctcgacctgtgctcaagagatcctcccacctcagccccctgagtagctgggaccacaggtgcctgccacca

SEQ ID NO: 409004 - DNA, 201 bp, Homo sapiens
aatcatgcagttgagtggtatttagtccattcacaatgctgcagccacctctcgcgtgttctgaaacatttgacctattcactgactgactgactgctctstcagtgagctgtgaggggaggtgactctgtgtggggcccacaccctctgccacctggtcctatagacagactcttctgagtggaggggcagagcggccct

SEQ ID NO: 409005 - DNA, 201 bp, Homo sapiens; identical to SEQ ID NO: 91906

SEQ ID NO: 409006 - DNA, 201 bp, Homo sapiens
tggctcatcccggacgctggcttctcttccctcttccatacgcgcacacccgccggggtctgctcaccttgccttctcagccttgtcagtcgggcagtgtsctaaggttaccaggaggtgttctgaagcatcttttttgagacgtgatgtcgctgtcacccaggctggagggcagtagcacagtcttggctcactgtagcc

SEQ ID NO: 409007 - DNA, 201 bp, Homo sapiens
gtccctgtcgtcctctccaggccggtgcgggaaggcggatgtgtggctcatcccggacgctggcttctcttccctcttccatacgcgcacacccgccgggstctgctcaccttgccttctcagccttgtcagtcgggcagtgtgctaaggttaccaggaggtgttctgaagcatcttttttgagacgtgatgtcgctgtca

SEQ ID NO: 409008 - DNA, 201 bp, Homo sapiens
tgaatgaaaaggaagctccgtccctgtcgtcctctccaggccggtgcgggaaggcggatgtgtggctcatcccggacgctggcttctcttccctcttccayacgcgcacacccgccggggtctgctcaccttgccttctcagccttgtcagtcgggcagtgtgctaaggttaccaggaggtgttctgaagcatcttttttg

SEQ ID NO: 409009 - DNA, 201 bp, Homo sapiens
cggggctgtgaagcagggctctgagaccctggggagcgggccatgtgggcagggtcttggtgccagagcacagcacacaggtgggagggccctgcgagggkgtctttagcctttttgagggtgtgaacatttttgaagtaaagaattggggcagatggggacaggaaaacaaaaggccatgtgtgggaaggaaagccgtct

SEQ ID NO: 409010 - DNA, 201 bp, Homo sapiens
ctccagggtggccctgcacttggggcgcacccatggagtgagcgagtcccccagtcccgtggtggggagcacctgccccaccttcacgggcatttccctcrgagctgaggaggcccagtagggcccaggcggcgcgccgtgaccccgggagatggctctccagggtgtctgggagcacacgcggtcgcctgctttgttgaa

SEQ ID NO: 409011 - DNA, 201 bp, Homo sapiens
gtggcccagctcgccctgcacggcaaacccaggggttctatggagatccctctgcctcggagggtctggagtaggcctcagacgctgcgtgtgtaaaaagygcccagcctgttcccacattctgagcagtagggtcaggctggcagcacgtggctctgctggctctccaggccacagaacgtggctctgtgtccaaaggac

SEQ ID NO: 409012 - DNA, 201 bp, Homo sapiens
ccatggcctcctgctggtcctcagactcgaggtctagggcccttcaggggaacaggctccccaccgtccattcccatctctcgtgcccagaaggactcctrgccttggcctgtgcccagcaccgctgcatgcttctctgccccaggtggtgagaagtggggcggcctccactgtgctgggtgctgggcaccctcctctcag

SEQ ID NO: 409013 - DNA, 201 bp, Homo sapiens
cctgggcttgaggggcggtgcctgcagcctccctggcccttgtcctgtgtggctgagctgctgtctctcagcacgttggcctgcctgtcgtgcgaggcccytgctgccaccatgcctcctcctggggaccctggtggtggcctctgtgtggctgcctggcacatcacagcttgctgcagctccctgcctctcccggcctcg

SEQ ID NO: 409014 - DNA, 201 bp, Homo sapiens
ctctcctgggccatgcgggtttgtgccctggcacgttggcctcaatgttggggaggaaatgagtctacaggtgagtggtttttaaaaaaaaaaaacaaacmaaaaaaaaaaaaaacaagcagccagccgggcacggtggctcatgcctataatcccagcactttgggaggctgaggtagttgggtcacttgaggtcaggac

SEQ ID NO: 409015 - DNA, 201 bp, Homo sapiens
gtgggtggtgatgggcagaccaaggcctgtggtgccgcgccctcctgaagggtgggaggggcagagggcagcggccaccactccaccctgttatcttgggrcccagtggtgccaaggcaggcggtttctggtgtggttgctggagtcttcatgggaggcacacgaaggagtctgtgatatcatgtgagacccgggaagggc

SEQ ID NO: 409016 - DNA, 201 bp, Homo sapiens
gatttaaccttaattttacagcccttggcttgtgttatcggacgttttaatgcatatttataagagaagtttaacaagtatttattcccataacttccccytgcagactgttttcttctggcctttaggcctctgcttgtcccctcgggcctccttcctcctccatgagccactgcagtccccccacccacgcttcaggtc

SEQ ID NO: 409017 - DNA, 201 bp, Homo sapiens
ctgaactgcgggtcaggcaggctcccctggggaaacctgggcgcgtaggaggcacctccacctgctggagctggcccaggctggcctcccctgcagacagrccgcgtctagggccagctgctcatcccagacgcacccaggtgattcccatgctgaacagtttgatctcctgccagagtgtcgggccacaaactgggcagc

SEQ ID NO: 409018 - DNA, 201 bp, Homo sapiens
tttctggtgtggttgctggagtcttcatgggaggcacacgaaggagtctgtgatatcatgtgagacccgggaagggccccttcaaccgcccctttctgaamtgcgggtcaggcaggctcccctggggaaacctgggcgcgtaggaggcacctccacctgctggagctggcccaggctggcctcccctgcagacaggccgcg

SEQ ID NO: 409019 - DNA, 201 bp, Homo sapiens
gtcgtaggtggttgcaagagtgtcaggctgagcaggaaggagaaggtgctttcactggctctcctggagcagggcaagctggcagggtcaggacgggccaygtcagcggcccctcatggcgtgtcctgggttctgctgggcaccctaccatataggccagcaagccaggcctaggagtgtgacaggcctttgtccttcccc

SEQ ID NO: 409020 - DNA, 201 bp, Homo sapiens
tgcctggctctccctgccctggtcacccagctcggagtcctcacccccgatgggtttcctaaccgcagtgtccttgcaactttgcctaagctaaatggaarttagtctccggccactctgttaacagggccccaagaagggtggaggcgagaggcagtgacacagaaagcgctgtgcagtacaatcctgggcacttgagtc

SEQ ID NO: 409021 - DNA, 201 bp, Homo sapiens
gcgctgggattcccggcaagaaccaccatacctggccagaatattccttttcaaaggaacctagaaaggctgggaagcactgcagcttgcgcgtcctgtcktggagggcctggcgcggctgcccgctgagttgtgctctgtgtctgcaggtccagccctgctgggagttttctgccacacagatttgcggaagaacctgac

SEQ ID NO: 409022 - DNA, 201 bp, Homo sapiens
agtagctgggactacaggcatgtgccaccatgcctgggtaatttttatatttttagtagagatggggttttaccatgttggccaggctgatctcaaactcstgacttcgtgatctgcccgcctcagcctcccaaagtgctgggattacaggcgtgagccactgtgcctggcctgtcattcttttttttttttttttttggt

SEQ ID NO: 409023 - DNA, 201 bp, Homo sapiens
ctcacctgggggtgtgggacctggctcacttctcgccccggtgggtttagggacatcaaggcctgtctccccccacggctctgtctgctttgtgaggacargcccccagcagacttctgagaaagactcgggactcaccgtagcccccaaggggcaagtctggtgctcagtgactctgaggccccgagggtgaggggagaa

SEQ ID NO: 409024 - DNA, 201 bp, Homo sapiens
tcaggcgattctgctgcctcagcctcccgtagctgggactacaggcctgtgccatcatgcctggttaatttttgtatttttggtagagagggggtttacascatgttgcctaggctggtcttgaatttctgggctcaagtgatcctcctgccttggcctcccaaagtgctgggattacaggcatgtgccaaccacgcccgg

SEQ ID NO: 409025 - DNA, 201 bp, Homo sapiens
agtctggtgctcagtgactctgaggccccgagggtgaggggagaaggttacagccttaccctcaggccccaccccccggctctctcctgggccatgcgggyttgtgccctggcacgttggcctcaatgttggggaggaaatgagtctacaggtgagtggtttttaaaaaaaaaaaacaaacaaaaaaaaaaaaaaacaagc

SEQ ID NO: 409026 - DNA, 201 bp, Homo sapiens
tgactctgaggccccgagggtgaggggagaaggttacagccttaccctcaggccccaccccccggctctctcctgggccatgcgggtttgtgccctggcaygttggcctcaatgttggggaggaaatgagtctacaggtgagtggtttttaaaaaaaaaaaacaaacaaaaaaaaaaaaaaacaagcagccagccgggcac

SEQ ID NO: 409027 - DNA, 201 bp, Homo sapiens
cacatgtcctgccccggctctgggtgtggctggtggcagagggtctatgagggaagggcaggaaaaggcaacccctaaggctaatctgaaatttagggctggggcgtggtggctaagcctgtgatcccagcactttgggaggccgaggcgggtggatcacgaggtcaggagatcgagtccatcctggctaacatggtgaaa

SEQ ID NO: 409028 - DNA, 201 bp, Homo sapiens
gccccaccccccggctctctcctgggccatgcgggtttgtgccctggcacgttggcctcaatgttggggaggaaatgagtctacaggtgagtggtttttawaaaaaaaaaacaaacaaaaaaaaaaaaaaacaagcagccagccgggcacggtggctcatgcctataatcccagcactttgggaggctgaggtagttgggt

SEQ ID NO: 409029 - DNA, 201 bp, Homo sapiens
ccccaccccccggctctctcctgggccatgcgggtttgtgccctggcacgttggcctcaatgttggggaggaaatgagtctacaggtgagtggtttttaaaaaaaaaaaacaaacaaaaaaaaaaaaaaacaagcagccagccgggcacggtggctcatgcctataatcccagcactttgggaggctgaggtagttgggtc

SEQ ID NO: 409030 - DNA, 201 bp, Homo sapiens
ccccggctctctcctgggccatgcgggtttgtgccctggcacgttggcctcaatgttggggaggaaatgagtctacaggtgagtggtttttaaaaaaaaamaacaaacaaaaaaaaaaaaaaacaagcagccagccgggcacggtggctcatgcctataatcccagcactttgggaggctgaggtagttgggtcacttgag

SEQ ID NO: 409031 - DNA, 201 bp, Homo sapiens
cggctctctcctgggccatgcgggtttgtgccctggcacgttggcctcaatgttggggaggaaatgagtctacaggtgagtggtttttaaaaaaaaaaaacaaacaaaaaaaaaaaaaaacaagcagccagccgggcacggtggctcatgcctataatcccagcactttgggaggctgaggtagttgggtcacttgaggtc

SEQ ID NO: 409032 - DNA, 201 bp, Homo sapiens
gctctctcctgggccatgcgggtttgtgccctggcacgttggcctcaatgttggggaggaaatgagtctacaggtgagtggtttttaaaaaaaaaaaacamacaaaaaaaaaaaaaaacaagcagccagccgggcacggtggctcatgcctataatcccagcactttgggaggctgaggtagttgggtcacttgaggtcag

SEQ ID NO: 409033 - DNA, 201 bp, Homo sapiens
cctgggccatgcgggtttgtgccctggcacgttggcctcaatgttggggaggaaatgagtctacaggtgagtggtttttaaaaaaaaaaaacaaacaaaamaaaaaaaaaacaagcagccagccgggcacggtggctcatgcctataatcccagcactttgggaggctgaggtagttgggtcacttgaggtcaggaccagc

SEQ ID NO: 409034 - DNA, 201 bp, Homo sapiens
cggctgtgtgcggggctgtgaagcagggctctgagaccctggggagcgggccatgtgggcagggtcttggtgccagagcacagcacacaggtgggagggcmctgcgagggtgtctttagcctttttgagggtgtgaacatttttgaagtaaagaattggggcagatggggacaggaaaacaaaaggccatgtgtgggaagg

SEQ ID NO: 409035 - DNA, 201 bp, Homo sapiens
gggctctgagaccctggggagcgggccatgtgggcagggtcttggtgccagagcacagcacacaggtgggagggccctgcgagggtgtctttagccttttkgagggtgtgaacatttttgaagtaaagaattggggcagatggggacaggaaaacaaaaggccatgtgtgggaaggaaagccgtctttcctagccagacgg

SEQ ID NO: 409036 - DNA, 201 bp, Homo sapiens
gtgtgggaaggaaagccgtctttcctagccagacggcgagcgtggatttggcccagttttgaaggaggaaacaagccccttggttttttacacgctcttgytccagggtggccctgcacttggggcgcacccatggagtgagcgagtcccccagtcccgtggtggggagcacctgccccaccttcacgggcatttccctca

SEQ ID NO: 409037 - DNA, 201 bp, Homo sapiens
cagattcttttcgccagaagggaagaacagattagtgagaaaccatcttggcatctaccagacccccgcttggtgcagctctaccagctgaagagtcactsaccgacaccactgcccatagcgggtggggaacctcgggggtgaggcgcggtggtcttgagcctgtgcgtgggcaccagcagcttctgtcagagctctgcc

SEQ ID NO: 409038 - DNA, 201 bp, Homo sapiens
ttacaggtgtgagcaaccgcgcccggcctgttgttctttctttgggagacagtgtcttgctctgctgcccaggctggagtgcagtggcatggtcttggctsgctgcagcctccacctcctgggttcaagtgattctcctgcctcagcttctccagtagctgggattacaggcgcccgccaccacacccggctgattttttc

SEQ ID NO: 409039 - DNA, 201 bp, Homo sapiens
agtacagcatcggggagcccacagtgccatccaccctggcagaggagtttacctacaaccccttcatgagagtgaggtgaggcccagggcaggtggtgggygcgggcccctcccctctggcagtcccactgctgcacacacagccggtacgtccgagaccccagatggctgaggctgccttggggagctgtcgcaggtgca

SEQ ID NO: 409040 - DNA, 201 bp, Homo sapiens
ccacgtctggctaatttttgtatttttagtagagacggggtttcaccatgttggccaggccggtctcaaactcctgacctcaggtggatccacctgcctcrgcctcccccagtgctgggattacaggtgtgagcaaccgcgcccggcctgttgttctttctttgggagacagtgtcttgctctgctgcccaggctggagtg

SEQ ID NO: 409041 - DNA, 201 bp, Homo sapiens
gattacaggcatgtgccaaccacgcccggcctcattctttttgataggtgtaaaatatactattgcgtgggtgtcacccataaatcattttaccaatcccmataggagggacgttgagagttttcaactccttttgcaccctggagtccagaacccacacgaggtggagctcttctgagctgtgctgcaaggactgacctt

SEQ ID NO: 409042 - DNA, 201 bp, Homo sapiens
ggggtttacagcatgttgcctaggctggtcttgaatttctgggctcaagtgatcctcctgccttggcctcccaaagtgctgggattacaggcatgtgccawccacgcccggcctcattctttttgataggtgtaaaatatactattgcgtgggtgtcacccataaatcattttaccaatcccaataggagggacgttgaga

SEQ ID NO: 409043 - DNA, 201 bp, Homo sapiens
cccgtagctgggactacaggcctgtgccatcatgcctggttaatttttgtatttttggtagagagggggtttacagcatgttgcctaggctggtcttgaayttctgggctcaagtgatcctcctgccttggcctcccaaagtgctgggattacaggcatgtgccaaccacgcccggcctcattctttttgataggtgtaaa

SEQ ID NO: 409044 - DNA, 201 bp, Homo sapiens
tggcacaatctcggctcactgcaacctccgcctcctgggttcaggcgattctgctgcctcagcctcccgtagctgggactacaggcctgtgccatcatgcytggttaatttttgtatttttggtagagagggggtttacagcatgttgcctaggctggtcttgaatttctgggctcaagtgatcctcctgccttggcctcc

SEQ ID NO: 409045 - DNA, 201 bp, Homo sapiens
ccatctcgagaggaggtgaccagctgcctgcctgcaggggcttgggtggcctcccctgctgctggtccctgtgcccctcctccccgtgcttgctgtgaggstgcagctgtggcggtttcttttctgtgtctcctgcattgctgttacctccataatgtgaaatgtaaaccatgtgaatgaaaaggaagctccgtccctgtc

SEQ ID NO: 409046 - DNA, 201 bp, Homo sapiens
ctgggccatgcgggtttgtgccctggcacgttggcctcaatgttggggaggaaatgagtctacaggtgagtggtttttaaaaaaaaaaaacaaacaaaaamaaaaaaaaacaagcagccagccgggcacggtggctcatgcctataatcccagcactttgggaggctgaggtagttgggtcacttgaggtcaggaccagcc

SEQ ID NO: 409047 - DNA, 201 bp, Homo sapiens
cccagtctctaccgaaaatacaaaaattaactgggcgtggtggtgggcgcctgtaatctcagctactcgggaggctgaagcaggagaatcacttgaacccrggaggcggaggttgccgtgagccaagatcgtggcattgcactccagcctgggtgacagagcgagactccgtctcaaaaaaaacaaagacaagcagccata

SEQ ID NO: 409048 - DNA, 201 bp, Homo sapiens
tctgtctgctttgtgaggacaagcccccagcagacttctgagaaagactcgggactcaccgtagcccccaaggggcaagtctggtgctcagtgactctgargccccgagggtgaggggagaaggttacagccttaccctcaggccccaccccccggctctctcctgggccatgcgggtttgtgccctggcacgttggcctc

SEQ ID NO: 409049 - DNA, 201 bp, Homo sapiens
gcagccatatctggagaggttgggtttttaaaaatccttgaaaatggatgaataaaatgccctgtctgggttctagggctggcattgcctgctcaaggccrttgtttggcttttagaaatttttgaggctcttcaaagctagagagacttacttctttttgccaagcaagcgcccgagggcaaccggcacctttctcctga

SEQ ID NO: 409050 - DNA, 201 bp, Homo sapiens
gatgtgtaaagctctgctggaggtcttgggccggctccccccggacacagtaggcagcgcctccctgcgggccggggtgtggggggccttaaccagggcgsggctgctctccctcctggcaccctctcaccggacaccccccgggggcatccaggtcccgtccctgaggactttcacaggtggtaacagccttccgagctc

SEQ ID NO: 409051 - DNA, 201 bp, Homo sapiens
tgagtgtttctgtgagctttccatctatgaatgtctttagcttttctcagcagtgttttgaaatttgcgtgttcaaggtcttgcacgtgttactaaatggrtccctaagcacttctggtcatgattatttgttgatactagttataaatacagtggatgcgtattaacttcctgggtgtcttagtctgtgtggtgttgcta

SEQ ID NO: 409052 - DNA, 201 bp, Homo sapiens
ggtttcaccatattggtcaggctggtctcgaactcctgaccccgcgatccgcccgcctcggcctcccaaagtgctgggatgacaggcatgagccaccgcaygtgggcagtatttttgtttgtaatgttctgctccttgtttgtaatggagctcctttccaggaggacgcccggcactcggaatcctgtcacaacccttctg

SEQ ID NO: 409053 - DNA, 201 bp, Homo sapiens
ttagtatgaactcccaccccccaaatgtctgctggatctgtaatgatattcctgctttcattcctgattttgacaatttgtgtgtttttttttgttttttgtttttttttttttgagacagcgtttcgctcttgccgcccaggctggagtgcaatggcgcgatctcggctcaccgcaacccctgcctcccgggttcaagcg

SEQ ID NO: 409054 - DNA, 201 bp, Homo sapiens
ggctgtccttgtttccaggtgacaccttgtttgtggctggctgcgggaagttctatgaagggactgcggatgagatgtgtaaagctctgctggaggtcttrggccggctccccccggacacagtaggcagcgcctccctgcgggccggggtgtggggggccttaaccagggcggggctgctctccctcctggcaccctctc

SEQ ID NO: 409055 - DNA, 201 bp, Homo sapiens
cctgagtagctgggaccacaggtgcctgccaccatgcctggctagttttttgtatttttagtagacacagggtctcgccatgttgtccaggctggtctcaractccagggctcaagtgatccatctgccttagcctcccaaagtgctggtatcacagacgtgagcctccgtgcctggtctgccatcctgtgaagttcccgt

SEQ ID NO: 409056 - DNA, 201 bp, Homo sapiens
ttttttttgagactgtctcactctgttgcccaggctggagtgcagtagggcgatcttggctcactgaaactttcacctcccggattcaagcaattctcctscctcagcctgccgtcaagtattggttctttctggctagaggctgagaagggctgtaactgcatggaacgcaggctcgcttagtcagtggtggcagcacag

SEQ ID NO: 409057 - DNA, 201 bp, Homo sapiens
ttcctgaggagaatgatctggaaaatgcccagctggttgtcaggcgggtaataggatatctttgtgcagtgattgaaactatagtttgggcagtttccccrgctgtggaaataaggtcggattccgcatttcggtgggccctggagacgcgtgtgtctgtcagttggtggctgctgcccatttctggatcccttttgggag

SEQ ID NO: 409058 - DNA, 201 bp, Homo sapiens
ctcttccatacgcgcacacccgccggggtctgctcaccttgccttctcagccttgtcagtcgggcagtgtgctaaggttaccaggaggtgttctgaagcatcttttttgagacgtgatgtcgctgtcacccaggctggagggcagtagcacagtcttggctcactgtagcctcgacctgtgctcaagagatcctcccacct

SEQ ID NO: 409059 - DNA, 201 bp, Homo sapiens
tcttccatacgcgcacacccgccggggtctgctcaccttgccttctcagccttgtcagtcgggcagtgtgctaaggttaccaggaggtgttctgaagcatcttttttgagacgtgatgtcgctgtcacccaggctggagggcagtagcacagtcttggctcactgtagcctcgacctgtgctcaagagatcctcccacctc

SEQ ID NO: 409060 - DNA, 201 bp, Homo sapiens
cccgtctctactaaaaatacaaaaaattagccaggtgtggtggcggacacctgtagtcccggctactcgggaggctaaggcaggagaatggtgtgaacccrggaggcggagcttgcagtgagccgagatagcgccactgcactccagcctgggagacagagcaagactctgtctcaaaaaaaaaaaaatatgaaatttaat

SEQ ID NO: 409061 - DNA, 201 bp, Homo sapiens
actaaaaatacaaaaaattagccaggtgtggtggcggacacctgtagtcccggctactcgggaggctaaggcaggagaatggtgtgaacccgggaggcggrgcttgcagtgagccgagatagcgccactgcactccagcctgggagacagagcaagactctgtctcaaaaaaaaaaaaatatgaaatttaataataatatt

SEQ ID NO: 409062 - DNA, 201 bp, Homo sapiens
ctcggagtcctcacccccgatgggtttcctaaccgcagtgtccttgcaactttgcctaagctaaatggaaattagtctccggccactctgttaacagggcyccaagaagggtggaggcgagaggcagtgacacagaaagcgctgtgcagtacaatcctgggcacttgagtcttcttgggggctttctgcccctgcatgctg

SEQ ID NO: 409063 - DNA, 201 bp, Homo sapiens
gccaggtgtggtggcggacacctgtagtcccggctactcgggaggctaaggcaggagaatggtgtgaacccgggaggcggagcttgcagtgagccgagatmgcgccactgcactccagcctgggagacagagcaagactctgtctcaaaaaaaaaaaaatatgaaatttaataataatatttttaaaaagttacctgggca

SEQ ID NO: 409064 - DNA, 201 bp, Homo sapiens
ggcctccttcctcctccatgagccactgcagtccccccacccacgcttcaggtcaggcgtgagccggtgcctttgctgtggccttggctgggtgctgatgsgactgtcaggcccactgctgcggtcggtacctttgcagcctgtgcttgtggtctgatctgttcaggcccccggcagggagaggtggccgcgtcttcttcc

SEQ ID NO: 409065 - DNA, 201 bp, Homo sapiens
cctcagccccctgagtagctgggaccacaggtgcctgccaccatgcctggctagttttttgtatttttagtagacacagggtctcgccatgttgtccaggstggtctcaaactccagggctcaagtgatccatctgccttagcctcccaaagtgctggtatcacagacgtgagcctccgtgcctggtctgccatcctgtga

SEQ ID NO: 409066 - DNA, 201 bp, Homo sapiens
gtggtgggtgcgggcccctcccctctggcagtcccactgctgcacacacagccggtacgtccgagaccccagatggctgaggctgccttggggagctgtcrcaggtgcagccgcagagcctgagcactcttcttgaggggggtccggcctttcctggcaccttggccggggtgtgagtccttctggaccctggagttcaga

SEQ ID NO: 409067 - DNA, 201 bp, Homo sapiens
gccactgcattctggcttggggaacagggagaccctgtctcaaagaaattaattaatcatgcagttgagtggtatttagtccattcacaatgctgcagccrcctctcgcgtgttctgaaacatttgacctattcactgactgactgactgctctctcagtgagctgtgaggggaggtgactctgtgtggggcccacaccct

SEQ ID NO: 409068 - DNA, 201 bp, Homo sapiens
ccctctggcagtcccactgctgcacacacagccggtacgtccgagaccccagatggctgaggctgccttggggagctgtcgcaggtgcagccgcagagccygagcactcttcttgaggggggtccggcctttcctggcaccttggccggggtgtgagtccttctggaccctggagttcagaacctgtcagaaggggagtgg

SEQ ID NO: 409069 - DNA, 201 bp, Homo sapiens
ggagcttgcagtgagccgagatagcgccactgcactccagcctgggagacagagcaagactctgtctcaaaaaaaaaaaaatatgaaatttaataataatmtttttaaaaagttacctgggcagggtggtgtgcagctgtagtcctagctactcaggaggctgaggcaggaggatcgcttgagcccgggagtccaaggctg

SEQ ID NO: 409070 - DNA, 201 bp, Homo sapiens
gcttgtggtctgatctgttcaggcccccggcagggagaggtggccgcgtcttcttcctggaggcggccagatcgcgcgacctccaggcagtgctcctgctyggcagcacccacctgcctctgcttgagaaagcacaaactgccctctggggaagcagccagctggggagtgctctcggcctgtgaccccgggagggctggg

SEQ ID NO: 409071 - DNA, 201 bp, Homo sapiens
tgtgcttgtggtctgatctgttcaggcccccggcagggagaggtggccgcgtcttcttcctggaggcggccagatcgcgcgacctccaggcagtgctcctrcttggcagcacccacctgcctctgcttgagaaagcacaaactgccctctggggaagcagccagctggggagtgctctcggcctgtgaccccgggagggct

SEQ ID NO: 409072 - DNA, 201 bp, Homo sapiens
ttttaattttaatgaagtccaatagatttttttatgcttcattcttttttgtctcccatctaagaaatctttgtttatcgcaaggtcaaaaaattttctcmtgtattttatttttggaatttgtatagttttaaaacttagtatgaactcccaccccccaaatgtctgctggatctgtaatgatattcctgctttcattcc

SEQ ID NO: 409073 - DNA, 201 bp, Homo sapiens
cagtatcttttgagccaacatttttaattttaatgaagtccaatagatttttttatgcttcattcttttttgtctcccatctaagaaatctttgtttatcscaaggtcaaaaaattttctcatgtattttatttttggaatttgtatagttttaaaacttagtatgaactcccaccccccaaatgtctgctggatctgtaa

SEQ ID NO: 409074 - DNA, 201 bp, Homo sapiens
aggccgcctcctgcagggcgcctcccattctgcggcctctggttttcttagcagtatcttttgagccaacatttttaattttaatgaagtccaatagattyttttatgcttcattcttttttgtctcccatctaagaaatctttgtttatcgcaaggtcaaaaaattttctcatgtattttatttttggaatttgtatagt

SEQ ID NO: 409075 - DNA, 201 bp, Homo sapiens
ttctttccccactcccagaagcgggacaatggcctggatgctgccatgattcccatcaagtgcccctgtagtcacgtgggctgggccggtcagctgatgcmtacggcatcccggagaggaccaactgcctcggaacgctgtcccccgcagcgacggcccgttccacctcgcgatctgccgggtacccgggcggcgtggcgc

SEQ ID NO: 409076 - DNA, 201 bp, Homo sapiens
ccattaattggggatcagatttgagcatgcgtttggagggatggacatcccagccgcagccccgtgtgaacacccaggagaagggagtggccgggctggaygggaggtgtgtttgacttttaaagaaactgccaaactccccttccccggtgcttgtggtgtttgctttcctgctgggaaggcgtgggcacaccagctggt

SEQ ID NO: 409077 - DNA, 201 bp, Homo sapiens
gatcctgtgggaactaacagcaaaaactcgcacttggagcagggcaccaagccgttcacaaaggattccccccatgatccaaacacctccattaattgggratcagatttgagcatgcgtttggagggatggacatcccagccgcagccccgtgtgaacacccaggagaagggagtggccgggctggatgggaggtgtgtt

SEQ ID NO: 409078 - DNA, 201 bp, Homo sapiens
acaaacaatttacagtgttccctttcaagatggtgtttgtgtgtggtgcgaggtgagggtagaggttcaccctctcgcagtgtgatcccgaggtgttcagsgctgtctgtcgaaggactgtcctttcctccctggattgccttggcacctttctgaaaagaatgggccctctatgcccgagtctgcttctggtctctgctc

SEQ ID NO: 409079 - DNA, 201 bp, Homo sapiens
tttatatttacaaacaatttacagtgttccctttcaagatggtgtttgtgtgtggtgcgaggtgagggtagaggttcaccctctcgcagtgtgatcccgasgtgttcagggctgtctgtcgaaggactgtcctttcctccctggattgccttggcacctttctgaaaagaatgggccctctatgcccgagtctgcttctgg

SEQ ID NO: 409080 - DNA, 201 bp, Homo sapiens
aggcatgcaccaccacacccggttaattttgtatttttagtagagatggggtttctccatgttgatcaggctggactcgaactcctgacctcaggtgatcygcccaccttgggctccaaaagtgctgggattacagatgtgagccactgcgcccggcctactcaatttttcttttatgtttcttgtgccctttctaagata

SEQ ID NO: 409081 - DNA, 201 bp, Homo sapiens
ttcactcttgttgcccaggctggagtgcagcggcgcgatctcagctcaccgcaacatccacctcctgggtttaagcgattctcctgcctcagcctcccgartagctgggattacaggcatgcaccaccacacccggttaattttgtatttttagtagagatggggtttctccatgttgatcaggctggactcgaactcctg

SEQ ID NO: 409082 - DNA, 201 bp, Homo sapiens
cgcccagctaatttttgtattttttattagagacaggtttcaccatattggtcaggctggtctcgaactcctgaccccgcgatccgcccgcctcggcctcscaaagtgctgggatgacaggcatgagccaccgcacgtgggcagtatttttgtttgtaatgttctgctccttgtttgtaatggagctcctttccaggagga

SEQ ID NO: 409083 - DNA, 201 bp, Homo sapiens
gcacagtcttggctcactgtagcctcgacctgtgctcaagagatcctcccacctcagccccctgagtagctgggaccacaggtgcctgccaccatgcctgrctagttttttgtatttttagtagacacagggtctcgccatgttgtccaggctggtctcaaactccagggctcaagtgatccatctgccttagcctcccaa

SEQ ID NO: 409084 - DNA, 201 bp, Homo sapiens
agaagtttaacaagtatttattcccataacttccccttgcagactgttttcttctggcctttaggcctctgcttgtcccctcgggcctccttcctcctccrtgagccactgcagtccccccacccacgcttcaggtcaggcgtgagccggtgcctttgctgtggccttggctgggtgctgatgcgactgtcaggcccactg

SEQ ID NO: 409085 - DNA, 201 bp, Homo sapiens
aggctcttttaggtaactggctttcctgctggtccgtgcgggaaattcagtcttgatttaaccttaattttacagcccttggcttgtgttatcggacgttytaatgcatatttataagagaagtttaacaagtatttattcccataacttccccttgcagactgttttcttctggcctttaggcctctgcttgtcccctcg

SEQ ID NO: 409086 - DNA, 201 bp, Homo sapiens
ttgtaatggagctcctttccaggaggacgcccggcactcggaatcctgtcacaacccttctgcaccccacctgcagcccccagcacccacactctgcttgktgtgctccttgggctggggtggtgctgaggctaaggggaaggggaataacacaggaagctgctcatatagaaatcttggtattattgttcctgaggagaa

SEQ ID NO: 409087 - DNA, 201 bp, Homo sapiens
cagatggctgaggctgccttggggagctgtcgcaggtgcagccgcagagcctgagcactcttcttgaggggggtccggcctttcctggcaccttggccggrgtgtgagtccttctggaccctggagttcagaacctgtcagaaggggagtggctgccgcctccccgccctccgtgtcctctgagggcggggcttggccagc

SEQ ID NO: 409088 - DNA, 201 bp, Homo sapiens
attaggctcttttaggtaactggctttcctgctggtccgtgcgggaaattcagtcttgatttaaccttaattttacagcccttggcttgtgttatcggacrttttaatgcatatttataagagaagtttaacaagtatttattcccataacttccccttgcagactgttttcttctggcctttaggcctctgcttgtcccc

SEQ ID NO: 409089 - DNA, 201 bp, Homo sapiens
ttgtttgtttgtttgtttttttttttgagactgtctcactctgttgcccaggctggagtgcagtagggcgatcttggctcactgaaactttcacctcccgkattcaagcaattctcctgcctcagcctgccgtcaagtattggttctttctggctagaggctgagaagggctgtaactgcatggaacgcaggctcgcttag

SEQ ID NO: 409090 - DNA, 201 bp, Homo sapiens
tcagaaggggagtggctgccgcctccccgccctccgtgtcctctgagggcggggcttggccagcacgagtcgccttcctctgcagtggccctggctcctcsggtgggcgtggctcggcacagcctgcagcccggtgctggcctccgcagggagaagacggtgcagcagcacgcaggtgagacggacccggtgaccaccatg

SEQ ID NO: 409091 - DNA, 201 bp, Homo sapiens
tgtgaagcagggctctgagaccctggggagcgggccatgtgggcagggtcttggtgccagagcacagcacacaggtgggagggccctgcgagggtgtcttyagcctttttgagggtgtgaacatttttgaagtaaagaattggggcagatggggacaggaaaacaaaaggccatgtgtgggaaggaaagccgtctttccta

SEQ ID NO: 409092 - DNA, 201 bp, Homo sapiens
tggccggggtgtgagtccttctggaccctggagttcagaacctgtcagaaggggagtggctgccgcctccccgccctccgtgtcctctgagggcggggctyggccagcacgagtcgccttcctctgcagtggccctggctcctcgggtgggcgtggctcggcacagcctgcagcccggtgctggcctccgcagggagaaga

SEQ ID NO: 409093 - DNA, 201 bp, Homo sapiens
gcaccttggccggggtgtgagtccttctggaccctggagttcagaacctgtcagaaggggagtggctgccgcctccccgccctccgtgtcctctgagggckgggcttggccagcacgagtcgccttcctctgcagtggccctggctcctcgggtgggcgtggctcggcacagcctgcagcccggtgctggcctccgcaggg

SEQ ID NO: 409094 - DNA, 201 bp, Homo sapiens
tcaagtgatccatctgccttagcctcccaaagtgctggtatcacagacgtgagcctccgtgcctggtctgccatcctgtgaagttcccgtgataaagtggygcgtttctcttgcaggagaagtacagcatcggggagcccacagtgccatccaccctggcagaggagtttacctacaaccccttcatgagagtgaggtgag

SEQ ID NO: 409095 - DNA, 201 bp, Homo sapiens
accccgtctctactaaaaatacaaaaaattagccaggtgtggtggcggacacctgtagtcccggctactcgggaggctaaggcaggagaatggtgtgaacscgggaggcggagcttgcagtgagccgagatagcgccactgcactccagcctgggagacagagcaagactctgtctcaaaaaaaaaaaaatatgaaattta

SEQ ID NO: 409096 - DNA, 201 bp, Homo sapiens
agccggtgcctttgctgtggccttggctgggtgctgatgcgactgtcaggcccactgctgcggtcggtacctttgcagcctgtgcttgtggtctgatctgytcaggcccccggcagggagaggtggccgcgtcttcttcctggaggcggccagatcgcgcgacctccaggcagtgctcctgcttggcagcacccacctgcc

SEQ ID NO: 409097 - DNA, 201 bp, Homo sapiens
cgaggtggacgctgattggctgagggcagcgcgaggcgggcgctgattggctgcgacgcgccgacgccggtgttttgcagtcctgggcagctcggcagtcmagcccggcccgggtcatggtggtgggccgagggctgctcggccgccgcagcctcgccgcgctgggagccgcctgcgcccgccgaggcctcggtgggtgcg

SEQ ID NO: 409098 - DNA, 201 bp, Homo sapiens
ctgagaaagactcgggactcaccgtagcccccaaggggcaagtctggtgctcagtgactctgaggccccgagggtgaggggagaaggttacagccttaccytcaggccccaccccccggctctctcctgggccatgcgggtttgtgccctggcacgttggcctcaatgttggggaggaaatgagtctacaggtgagtggtt

SEQ ID NO: 409099 - DNA, 201 bp, Homo sapiens
gacccgtctggcactgccctagggcctctcagctgtggcttccccagcctctgtgttggggtgaaatgaagcctttggtcctctccttggtggtgggagcrctgtgctggtggcttggccaaggtttgatggaagcgtcatggttcacacgcagctggacttaggcctggagagtctcaggctctgtgagttgggcccctc

SEQ ID NO: 409100 - DNA, 201 bp, Homo sapiens
cgctgtgctggtggcttggccaaggtttgatggaagcgtcatggttcacacgcagctggacttaggcctggagagtctcaggctctgtgagttgggccccwcgagcctcttcggggtcatcagaggtgtccgtgcagggacctgggcttgaggggcggtgcctgcagcctccctggcccttgtcctgtgtggctgagctgc

SEQ ID NO: 409101 - DNA, 201 bp, Homo sapiens
gtttcttttttttttttttgagacggagtttcactcttgttgcccaggctggagtgcagcggcgcgatctcagctcaccgcaacatccacctcctgggttyaagcgattctcctgcctcagcctcccgagtagctgggattacaggcatgcaccaccacacccggttaattttgtatttttagtagagatggggtttctcc

SEQ ID NO: 409102 - DNA, 201 bp, Homo sapiens
aatttttgccattctaacttgcctgtggtggcgtctcactgcctttaaaatgtggatttccccatgactagtggggttgaccatcttttcatgtgtgtcgrcctttggatgccttctcatgaagtttatgttcaatcttttgtccattttaaatattgggtttggcctgttgggctgctcttgtaagagttccttatatca

SEQ ID NO: 409103 - DNA, 201 bp, Homo sapiens
ccccaaaggctcctgtgtccctcccatgtggcgtccccgccagctgttgctctgctgtgacctcaggtcactttctagtttcccatgaacagaatctcatygctccgtcatctctgtggcattctcggccccgctgatgttggtgagggtcagccacgctctttgcttctgagtagcccattgtgtggaaatgctacaatt

SEQ ID NO: 409104 - DNA, 201 bp, Homo sapiens
ctggcccgtgtgtctgtcttgagtggacagattgcagtttgaggaatgttgatgatgtttgcacttgtgtaatcccctccacagtccagatgtggaacttwccactaccccaaaggctcctgtgtccctcccatgtggcgtccccgccagctgttgctctgctgtgacctcaggtcactttctagtttcccatgaacagaa

SEQ ID NO: 409105 - DNA, 201 bp, Homo sapiens
acaccatcaacaacctcaagtttgcacgccacgtggagcccggcaatgccgccatccgggagaagctggcctgggccaaggtgagtggggccgtcactgcrcagtgccttcctgtgggctgctcagggccgctgtgcacagcggggtcgccagagtgggtagacactcacactctgagcccagagagcaggcctgggattc

SEQ ID NO: 409106 - DNA, 201 bp, Homo sapiens
ctgctctccctcctggcaccctctcaccggacaccccccgggggcatccaggtcccgtccctgaggactttcacaggtggtaacagccttccgagctcacstgtcacctctctcctcagagagtctactgtggccacgagtacaccatcaacaacctcaagtttgcacgccacgtggagcccggcaatgccgccatccggg

SEQ ID NO: 409107 - DNA, 201 bp, Homo sapiens
catggctgcggccttctaaggcggtgcggaggctgctggtggtgggggctgcctcccgtgcttgttactgtggccttgtcccgactggcctcacagtgcgrggtttcacccggtgactcgatgtgggccttgtacggctgggaggcctcctggtgggaggtggcagccccagccttgaacccaggtgggagtgacccaggg

SEQ ID NO: 409108 - DNA, 201 bp, Homo sapiens
cccgagcgtggctgatacctacctccttatcctcggccttgcctccgcgagctccgcggcctcggccccggccccgtccacggccgcgaccccggccccgratgccactgccgaaacctccgcggaagccaccgcggttccccatcccagggccaccagggcccccgggcccccccgctgcaccggcgtcatccgccattt

SEQ ID NO: 409109 - DNA, 201 bp, Homo sapiens
ccgggcacccctccactgcaccgctggcctcaggcctctctcaaatgtctctctgccagatgaccaagtgtcggggtgatggccgagatgcccaaattcascatctctggaacgaaccgggaaaatgcccagttcagtttttgttgttttttttttttcctgagacagtctcactctgttgcccaggctggagtgcagtgg

SEQ ID NO: 409110 - DNA, 201 bp, Homo sapiens
ccactgccccaggaccccgcactgctctccgccccccgccgccccgggcacccctccactgcaccgctggcctcaggcctctctcaaatgtctctctgccrgatgaccaagtgtcggggtgatggccgagatgcccaaattcaccatctctggaacgaaccgggaaaatgcccagttcagtttttgttgtttttttttttt

SEQ ID NO: 409111 - DNA, 201 bp, Homo sapiens
accagggctcccttcccactcccaacactcacccctactcatgcctccttccagacaaaagacctgtccgtgctgtaggaaagaggtgaaaaggaaaaagrttgtccacatgaataaactccggaaaaccattggccgcctggaagtcaaggtagctcaaagtacccactcccctgaccctcaacccttctcacccttgta

SEQ ID NO: 409112 - DNA, 201 bp, Homo sapiens
gtcccatggtgcatcgcggcgccagcgcgcagacgcagccgccctcggcgtcctctgtagcgggcgacctaggccgcgggacccggacggaggtagaggcyagggcagcgcgtccgggagcggagtccgcgcccgccgccgccatgccggacagctgggacaaggatgtgtaccctgagcccccgcgccgcacgccggtgc

SEQ ID NO: 409113 - DNA, 201 bp, Homo sapiens
acctcatcgtggaccgacccgtgaccctcgtgagaggtacgaagccccagcccggggctccctcgccggcctctggggacccctggatcccacaccctgcmtggatcctccaatgcctccggggtcccgtctgcctgagaccgccccccgctgcaccccggggacaactccccacccccggagacctccgagctccgtcgc

SEQ ID NO: 409114 - DNA, 201 bp, Homo sapiens
cgggagcggagtccgcgcccgccgccgccatgccggacagctgggacaaggatgtgtaccctgagcccccgcgccgcacgccggtgcagcccaatcccatygtctacatgatgaaagcgttcgacctcatcgtggaccgacccgtgaccctcgtgagaggtacgaagccccagcccggggctccctcgccggcctctgggg

SEQ ID NO: 409115 - DNA, 201 bp, Homo sapiens
cccccgcgccgcacgccggtgcagcccaatcccatcgtctacatgatgaaagcgttcgacctcatcgtggaccgacccgtgaccctcgtgagaggtacgargccccagcccggggctccctcgccggcctctggggacccctggatcccacaccctgcctggatcctccaatgcctccggggtcccgtctgcctgagaccg

SEQ ID NO: 409116 - DNA, 201 bp, Homo sapiens
ttaatgcgagtcaatggcagatgctaatcctccaaccccagcccaaatgactccggggtcgcacttgctcaacgccccaacgaccgacgcgtaccttaatrggcagggagaagagatagatctcctccagggacttgatcttcatgtccttgaccaagcggcccaacttggtgacgggcatccactaaagggagaaaaggc

SEQ ID NO: 409117 - DNA, 201 bp, Homo sapiens
ggtcccaccaaccatggtggccgatccctgaaggtcaggaaggggcctcgccgctagccgccagaggtcgagtggcagggccaggactcacagctgccagytcccagattagcccctggcacagtcagcagggtctccggtgccaggagcaggcaggggcggggcagtgttgggggcatcagatagacagcctgagtgggg

SEQ ID NO: 409118 - DNA, 201 bp, Homo sapiens
cctactgggaagcagcttttatagcacgccaagcgccgcgagatctccgcagccccgccccaagcgggagcgggccgagctcctataagacaacctgtgaytggctccgcggtgccccgtcctcaccgggctctgagtgctctttcccgtccggccccagccgcggcccgggaatctacgtcacccgaaaagcgactataa

SEQ ID NO: 409119 - DNA, 201 bp, Homo sapiens
agaggtacgaagccccagcccggggctccctcgccggcctctggggacccctggatcccacaccctgcctggatcctccaatgcctccggggtcccgtctscctgagaccgccccccgctgcaccccggggacaactccccacccccggagacctccgagctccgtcgcctcctttggcctcccactgcaccccggacctc

SEQ ID NO: 409120 - DNA, 201 bp, Homo sapiens
caaattcaccatctctggaacgaaccgggaaaatgcccagttcagtttttgttgttttttttttttcctgagacagtctcactctgttgcccaggctggartgcagtggcgcgatctcggctcactgcaacctctgccccaccccgggttcaagcgattctcctgcctcagcctccccagtactaggattacaggcgcacc

SEQ ID NO: 409121 - DNA, 201 bp, Homo sapiens
cccggggctccctcgccggcctctggggacccctggatcccacaccctgcctggatcctccaatgcctccggggtcccgtctgcctgagaccgccccccgstgcaccccggggacaactccccacccccggagacctccgagctccgtcgcctcctttggcctcccactgcaccccggacctcacctcccaggatccctta

SEQ ID NO: 409122 - DNA, 201 bp, Homo sapiens
agacatcactgagtgcaaggaggaggacatcatgtgcatgtatgaagccgaaatgcagtggaagagggactagtacgtgagccatgctgggagtgtggagrtctgcaccgtgtgctgctgggacactagtccctgggatgccacagggtggcatgcccagattttaggggtgacatgggaggagccagaccccagggctct

SEQ ID NO: 409123 - DNA, 201 bp, Homo sapiens
cccgtctgcctgagaccgccccccgctgcaccccggggacaactccccacccccggagacctccgagctccgtcgcctcctttggcctcccactgcacccmggacctcacctcccaggatcccttactctcccctgcaccccgggatgccccgcttcttcccaggactcttccctccctgccgcacccagcgcccactgcc

SEQ ID NO: 409124 - DNA, 201 bp, Homo sapiens
cgggatgccccgcttcttcccaggactcttccctccctgccgcacccagcgcccactgccccaggaccccgcactgctctccgccccccgccgccccgggmacccctccactgcaccgctggcctcaggcctctctcaaatgtctctctgccagatgaccaagtgtcggggtgatggccgagatgcccaaattcaccatct

SEQ ID NO: 409125 - DNA, 201 bp, Homo sapiens
tacaggaaaaggattccttgtgattagcctctcttgctccttttctccaccagcaaagtcgaccaagaaattatcaacattatgcaggatcggctcaaagyctgtcagcagagggaaggacagaactaccagcagaactgtatcaaggaagtggagcagttcacccaggtggccaaggcctaccaggaccgctgtgcgtgc

SEQ ID NO: 409126 - DNA, 201 bp, Homo sapiens
ttgcgcacccagcagggtccctgtgcagctgggggaggtgcactggcagagctgcgtcccagtccttgccatctgtgagaagcagctgcctgtaggcttgygtgggggacagagtaaggtaatgcatgtggaactctgaggatgatgcctggtactcgggagctctccatcagctgtagcctaggccttcacaggcctgcc

SEQ ID NO: 409127 - DNA, 201 bp, Homo sapiens
ccctcaccctggtcccaccaaccatggtggccgatccctgaaggtcaggaaggggcctcgccgctagccgccagaggtcgagtggcagggccaggactcasagctgccagctcccagattagcccctggcacagtcagcagggtctccggtgccaggagcaggcaggggcggggcagtgttgggggcatcagatagacagc

SEQ ID NO: 409128 - DNA, 201 bp, Homo sapiens
attctcctgcctcagcctccccagtactaggattacaggcgcaccaccaccacgcccagctaatttttatatttttagtagacacggggtttcaccatgtkggccaggctggtctcgaactcctgacctcaggtgatcctcccaccttggcccccaggtgctgggattacaggcctgagccaccgtgtccagcctggttca

SEQ ID NO: 409129 - DNA, 201 bp, Homo sapiens
cggaccctcgcggtgagtgttgcagttcctaaaggcggggtgtccggagtttgctcgttctgatgttccgatgtgttcggagtttcttccttctggtaggytcgcgctctcgctagctcaggaatgaagctacagaccttcgcggtgttacagctcttaaggcgccgcgcgtctggagttgttcatcctgccagtgggctc

SEQ ID NO: 409130 - DNA, 201 bp, Homo sapiens
aaggtaatgcatgtggaactctgaggatgatgcctggtactcgggagctctccatcagctgtagcctaggccttcacaggcctgcctggctggccacatcycttagagagacgaattgctgttttctaaacgctggaacactcaggaagttctcctctctcccctccaaagggcttatgagaaataagaaagctaaaagcc

SEQ ID NO: 409131 - DNA, 201 bp, Homo sapiens
cgagtcaatggcagatgctaatcctccaaccccagcccaaatgactccggggtcgcacttgctcaacgccccaacgaccgacgcgtaccttaatgggcagrgagaagagatagatctcctccagggacttgatcttcatgtccttgaccaagcggcccaacttggtgacgggcatccactaaagggagaaaaggcgccagt

SEQ ID NO: 409132 - DNA, 201 bp, Homo sapiens
gctgtagcctaggccttcacaggcctgcctggctggccacatcccttagagagacgaattgctgttttctaaacgctggaacactcaggaagttctcctcyctcccctccaaagggcttatgagaaataagaaagctaaaagcctgtccaaaccgatgaggcgtttgagtctgtggctttgtctttgcagaatttatagag

SEQ ID NO: 409133 - DNA, 201 bp, Homo sapiens
gttctgcttgctggaggctccctgttggagcctctttgcgcacccagcagggtccctgtgcagctgggggaggtgcactggcagagctgcgtcccagtccwtgccatctgtgagaagcagctgcctgtaggcttgtgtgggggacagagtaaggtaatgcatgtggaactctgaggatgatgcctggtactcgggagctct

SEQ ID NO: 409134 - DNA, 201 bp, Homo sapiens
tcatgtccttgaccaagcggcccaacttggtgacgggcatccactaaagggagaaaaggcgccagtgaccaggaccgctctccggcgccgcccaggggccsgaccccgagcgtggctgatacctacctccttatcctcggccttgcctccgcgagctccgcggcctcggccccggccccgtccacggccgcgaccccggcc

SEQ ID NO: 409135 - DNA, 201 bp, Homo sapiens
ggccccggccccgtccacggccgcgaccccggccccggatgccactgccgaaacctccgcggaagccaccgcggttccccatcccagggccaccagggccyccgggcccccccgctgcaccggcgtcatccgccatttgctgggaaaagcgacaagaaggaactagtcagtgtggcctacgcatctggcagccccccgcga

SEQ ID NO: 409136 - DNA, 201 bp, Homo sapiens
ggtgcatcgcggcgccagcgcgcagacgcagccgccctcggcgtcctctgtagcgggcgacctaggccgcgggacccggacggaggtagaggccagggcarcgcgtccgggagcggagtccgcgcccgccgccgccatgccggacagctgggacaaggatgtgtaccctgagcccccgcgccgcacgccggtgcagcccaa

SEQ ID NO: 409137 - DNA, 201 bp, Homo sapiens
gtgtgctgctgggacactagtccctgggatgccacagggtggcatgcccagattttaggggtgacatgggaggagccagaccccagggctcttgctttcarttgttctcacagggtacaggaaaaggattccttgtgattagcctctcttgctccttttctccaccagcaaagtcgaccaagaaattatcaacattatgca

SEQ ID NO: 409138 - DNA, 201 bp, Homo sapiens
actagtccctgggatgccacagggtggcatgcccagattttaggggtgacatgggaggagccagaccccagggctcttgctttcaattgttctcacagggkacaggaaaaggattccttgtgattagcctctcttgctccttttctccaccagcaaagtcgaccaagaaattatcaacattatgcaggatcggctcaaagc

SEQ ID NO: 409139 - DNA, 201 bp, Homo sapiens
cagctgggggaggtgcactggcagagctgcgtcccagtccttgccatctgtgagaagcagctgcctgtaggcttgtgtgggggacagagtaaggtaatgcmtgtggaactctgaggatgatgcctggtactcgggagctctccatcagctgtagcctaggccttcacaggcctgcctggctggccacatcccttagagaga

SEQ ID NO: 409140 - DNA, 201 bp, Homo sapiens
acatgatgaaagcgttcgacctcatcgtggaccgacccgtgaccctcgtgagaggtacgaagccccagcccggggctccctcgccggcctctggggacccmtggatcccacaccctgcctggatcctccaatgcctccggggtcccgtctgcctgagaccgccccccgctgcaccccggggacaactccccacccccggag

SEQ ID NO: 409141 - DNA, 201 bp, Homo sapiens
gagcgggccgagctcctataagacaacctgtgattggctccgcggtgccccgtcctcaccgggctctgagtgctctttcccgtccggccccagccgcggcycgggaatctacgtcacccgaaaagcgactataaacgccggcgcctccgtccccagccgcggctcgggaatccacccgaagagtggctataaacgtccgcg

SEQ ID NO: 409142 - DNA, 201 bp, Homo sapiens
ccaggaagtgcctggccaaacagaggcagaggatgctgcaagagagaaaagctgcaaaagaggccgccgctgccacctcctgaggcagctgtgggtgcccytgctgtgtggctctgtatgactgttgctgaaatataaagccctgcaacctgcctgtgtgtctggtgtgatctattggccccacgccccagattcaaacca

SEQ ID NO: 409143 - DNA, 201 bp, Homo sapiens
tagctcctgcgcttaccgccccggtgactggaccaggttcctcactgctttgtgcctcaatgtcctcatctgcgagctggggccatgacagaacccgcccrgaagccctgcctgtgctcagcgtccaccccaattcccgggggcgaggcctggtgctccctgggactgtggccctgtctggaccaaaagcgtgagttctgg

SEQ ID NO: 409144 - DNA, 201 bp, Homo sapiens
acaggcctgcctggctggccacatcccttagagagacgaattgctgttttctaaacgctggaacactcaggaagttctcctctctcccctccaaagggctyatgagaaataagaaagctaaaagcctgtccaaaccgatgaggcgtttgagtctgtggctttgtctttgcagaatttatagagcggcagcacgcaaagaac

SEQ ID NO: 409145 - DNA, 201 bp, Homo sapiens
cctatgtgtctggatgttcgagctctccttttagctcgttcatttcccagtgaggaagctgaggccgtaaggtggtaagttctgcttgctggaggctcccygttggagcctctttgcgcacccagcagggtccctgtgcagctgggggaggtgcactggcagagctgcgtcccagtccttgccatctgtgagaagcagctg

SEQ ID NO: 409146 - DNA, 201 bp, Homo sapiens
cggcggagccggggaactacaagtcccatggtgcatcgcggcgccagcgcgcagacgcagccgccctcggcgtcctctgtagcgggcgacctaggccgcgrgacccggacggaggtagaggccagggcagcgcgtccgggagcggagtccgcgcccgccgccgccatgccggacagctgggacaaggatgtgtaccctgag

SEQ ID NO: 409147 - DNA, 201 bp, Homo sapiens
tgttttctaaacgctggaacactcaggaagttctcctctctcccctccaaagggcttatgagaaataagaaagctaaaagcctgtccaaaccgatgaggcrtttgagtctgtggctttgtctttgcagaatttatagagcggcagcacgcaaagaacaggtattactactaccaccggcagtaccgccgcgtgccagacat

SEQ ID NO: 409148 - DNA, 201 bp, Homo sapiens
ctgagaccatggggacggctgagaccgtggggactcctgagaccctggggacagctgagaccatggggatgctgagaccgtggggactcctgagaccgtgrggactcctgagaccgtggggactgctgagactgtggggtggatgctgcagggtgggaccccagcccccaccccgagccagcccgttgggaacaataccgt

SEQ ID NO: 409149 - DNA, 201 bp, Homo sapiens
cctcctctccaccgtcagtcagctcatccaggctcttgaggggcctcccacttggggactgtagcccactagtgcccccgagctcagcacatgctcagccrttcccccactagtgaagcacctgtgtctgccaggtgtgggggtcacgcagactccccaaggtctcgatctgggaagggtgccctgtctgggggcaaatgg

SEQ ID NO: 409150 - DNA, 201 bp, Homo sapiens
atggggatgctgagaccgtggggactcctgagaccgtgaggactcctgagaccgtggggactgctgagactgtggggtggatgctgcagggtgggaccccmgcccccaccccgagccagcccgttgggaacaataccgtttcaagctagaccagaagaagaatttcctgtgacccagcataagccagcatgctctcctcgc

SEQ ID NO: 409151 - DNA, 201 bp, Homo sapiens
gcagtgacttctcatgaggcctggggtctttcccctcccagcactggcctggtttctctctatgggcatcgtcagcgaggtcccgtggtggggggtggtgmctccccttcttgacctctctcagggacgggggtgcccctgagctgccaggcctcagaccttggtaccgccaccacccaaggcctctgtgtttgtccctgg

SEQ ID NO: 409152 - DNA, 201 bp, Homo sapiens
tccacacctgggctaggataggcttcggatgcctggggagggaaagtaattgatcccaaagatctccgatctctgagctggtttgtgcaagagggggcctygaaagcccttgccgcctgtctgtgttcccactccccttccacggcagggggtccgggaaccccatccccctacggagctccctctgactctttggagaga

SEQ ID NO: 409153 - DNA, 201 bp, Homo sapiens
ctgaagtggaaaaaccccacacaaatcaaggacagctgggcccgccctctggcggcagccccctccgcttgctcccctcgcaggaatcctggcaggaggcrcggagcggggcagagccagtctcagggatgaagggtgtggttctcagggagggagttcctggagctcctcctggctgtgtgaaatctaccctagctgtct

SEQ ID NO: 409154 - DNA, 201 bp, Homo sapiens
gaccgtgggggctcctgagaccgtggggactgctgagaccgtggggacggctgagaccgtggggactcctgagaccctggggacggctgagaccatggggwcggctgagaccgtggggactcctgagaccctggggacagctgagaccatggggatgctgagaccgtggggactcctgagaccgtgaggactcctgagacc

SEQ ID NO: 409155 - DNA, 201 bp, Homo sapiens
gaggactcctgagaccgtggggactgctgagactgtggggtggatgctgcagggtgggaccccagcccccaccccgagccagcccgttgggaacaataccrtttcaagctagaccagaagaagaatttcctgtgacccagcataagccagcatgctctcctcgcattgtgcccgctgcctgcccacggggctcctgcagag

SEQ ID NO: 409156 - DNA, 201 bp, Homo sapiens
gcagagtaaccagggcccccagttgagtctccgggccacggctcccactgggctgtgaccgacctagttccaggcggtgacccggccttcctgtggcctcsgcagttgggtcctggattgactttggccataggccctccttccctcctctccaccgtcagtcagctcatccaggctcttgaggggcctcccacttgggga

SEQ ID NO: 409157 - DNA, 201 bp, Homo sapiens
attacctgaggtcaggagtttgagaccagcctgactaacatggtgaaaccccatctctactaaaaatacaaaaattagccaggcgtggtgatgggtgcctrtattcccagctacttgggaggctgaggcaggagaatcgcttgaacccgggaggcagaggttgtagtgagctgagattgtgccactgcactccagcctggg

SEQ ID NO: 409158 - DNA, 201 bp, Homo sapiens
tggctgggaagaggctgggcctctgccgggagcctgtgccgtgcctgcctggcgccagccctgtggccaggaaggctggggcagaggtggagagaggaccygggtctcataccacctttgccttcggatggggcaagttgctcgccctctctgagcccggctcgcctcccctgccttccctgcaggctgctgctgggcgtt

SEQ ID NO: 409159 - DNA, 201 bp, Homo sapiens
ttgtagtgagctgagattgtgccactgcactccagcctgggcgacaagagtcagctggagtgcagctctgtctcaaaaacaaacaaaacaaaagaaaagcmagaggaggcaaggagcggggtgggtaggggaaccccttagttcctggtttgcaagagcagtgggtgcagggagtggggtctgagtatgtagtggggaaga

SEQ ID NO: 409160 - DNA, 201 bp, Homo sapiens
agtggggaagaacccggtctcctgtgggggatgcagtccccctgcactttctggctttggcatctgccaggcccttttggcatctgcgagtcccaggcctraggtgtggggcaggaggagggaggctgagatggaggagggagggtcgcccagggctggatgaaagccgcagggaaatgcacaccagatgaggtgggctcc

SEQ ID NO: 409161 - DNA, 201 bp, Homo sapiens; identical to SEQ ID NO: 91922

SEQ ID NO: 409162 - DNA, 201 bp, Homo sapiens
ggagcagcggcacgatatcctgcctcccagggagcaggggtgcgctccgggcagtggggttgggaccgccctgtgggggccccaggcttgacctggggtcscggctccggaagaaggaatgatacttggctaggattccctgaaactttgaaaactgtggggaaagccccggttccgttctctctgctgagggacccagca

SEQ ID NO: 409163 - DNA, 201 bp, Homo sapiens
ggagagaggccagccgcagtggctcacgtctgtaatcccagcactttgggaggctgaggcaggcggatcacctgaggtcaggagttcgagaccagcctggscaacatggcgaaaccccgtctctactaaaaatacaaaaattagctgggtgtggtggcgggcacctgtaatcccagctactccgggggctgaggcaggaaa

SEQ ID NO: 409164 - DNA, 201 bp, Homo sapiens
ggtggcttcccagcccagaggtcgtttccagcccgtgggattacctggcagcgtcagaaatgcctctgccgcccgctcactctgggcactcaggtgtgacygaccgctggccaggtactgtagaaaggggcctccaggttccaggcagccacctagaaagcgtccttcctccccaagacccccgagtctgcgcacaggaac

SEQ ID NO: 409165 - DNA, 201 bp, Homo sapiens
gactgcctttaggtgagtgcccagggtgagtccagccccgtgcatggggctctgtggctgtcctgcctctacccaggatggacgtgggggtgcggcagccycagctgaagcagcccgcgctggtggctgctcatccccaagcttggacccagcgcctgcagagaggaccctgcccaaggccagttggggagtcagtggggg

SEQ ID NO: 409166 - DNA, 201 bp, Homo sapiens; identical to SEQ ID NO: 91926

SEQ ID NO: 409167 - DNA, 201 bp, Homo sapiens
tggatgaaagccgcagggaaatgcacaccagatgaggtgggctccacaaggaggggggcagtcctcagagcaacttgtcagatgtttgtcacacgggggtycagtcctgctcctctccctcctcccccgtctctcccaccctcatccacacctgggctaggataggcttcggatgcctggggagggaaagtaattgatccc

SEQ ID NO: 409168 - DNA, 201 bp, Homo sapiens
tcctctccctcctcccccgtctctcccaccctcatccacacctgggctaggataggcttcggatgcctggggagggaaagtaattgatcccaaagatctcmgatctctgagctggtttgtgcaagagggggcctcgaaagcccttgccgcctgtctgtgttcccactccccttccacggcagggggtccgggaaccccatc

SEQ ID NO: 409169 - DNA, 201 bp, Homo sapiens
tgcaccgctcatggtgggtgttgtgggggaagcctggattctctcccgctgcctcacacatcctccctcccacctccagcgctctccaccgagcaccccastgcaggggtctgtgcagctgcctctggcccagcctgcgtttccctgggggtctgagcaggaaaaggggactcagaacctgcctcccaagggctcaagtct

SEQ ID NO: 409170 - DNA, 201 bp, Homo sapiens
ctggcaaggcatcccctccctaacacagtccctgtgtttctatcgacctagttcccagccctccccagctctccctccgagctgtttgctcagctgacctrccacgccctgccctgcccaacctcaccctgcactacctggctggcaggtgctgcccggggcactgctgggggtgcctgggcctgcccgggctgggcaccc

SEQ ID NO: 409171 - DNA, 201 bp, Homo sapiens
atctggtattgtcccttggaccaactgtgctgacccctcactgggcggtgcagagccagtagagctgggcctgctgagcttccgcattgcaagtgtcctcrtgctctccgaggggccgtggccacgtggggctggtgtgctcctaggtgcctgtgcctccgtcctttcagcctgctaggagcctgcaatgagcctctgaaa

SEQ ID NO: 409172 - DNA, 201 bp, Homo sapiens; identical to SEQ ID NO: 91923

SEQ ID NO: 409173 - DNA, 201 bp, Homo sapiens; identical to SEQ ID NO: 91924

SEQ ID NO: 409174 - DNA, 201 bp, Homo sapiens
gccactgagtgaacgggtgacctcaagtgatctaggcgggcgggcctcggggtacttggtctgggatgagaaaggagctgggggcagcctagttccaggaragtgtgggtccggtgggagggagctggctctggaagcgaggacggcagggattgcacagggaagatatgtgggtggtgaggagcatttgggcctcccgac

SEQ ID NO: 409175 - DNA, 201 bp, Homo sapiens
agatgacgggccaggacttcggctggggctgagcggcaccctggggatgctcagcaccttgattgacacccgctcgcctggccagagcgggctgcgtgcayatgctgggcagagaggaatatttaagaaataaagcttggacccagatttttccacaaacctcgaggttggagggtggaggcgctgtccccagggatgtgg

SEQ ID NO: 409176 - DNA, 201 bp, Homo sapiens
caggagattcacttgaacctggaaggcggaggttgcagtgagccgagatcgcgccattgcactcaagcctgggcaacagagcgagactccctctcaaaaasaaacaaacaaacaaaaaacagaagggggcttacaggctccaaaagtggtgtggggtgtcacttggggctttccacactgtgtgaaggtgcctggggcctg

SEQ ID NO: 409177 - DNA, 201 bp, Homo sapiens
cgcccgggtggtggcggctgccggcgggtccagcccaggcagtggcctcggaggcggagtgggcgggggagggggaggggggagggcgtccagaccccgcycccggtcccgccccgcgcccgctcccaggctgcgggaccgccgggcgcagagcacaagccgggcacccacggactgagcggcgcgcgggccgagatgcgc

SEQ ID NO: 409178 - DNA, 201 bp, Homo sapiens
gcagtgccaggtggaccaaggctgggcagatggggtgacttagtagacagagtatgtctcaggcctgaattcagttcaccactgggcccctgggagggaarcctattttctctgagcctgtcccctccattctaaaacagtaaccagaggtgacttgacctctcagcggccaggctgtgacccgatgtgtgactgtcagct

SEQ ID NO: 409179 - DNA, 201 bp, Homo sapiens; identical to SEQ ID NO: 91925

SEQ ID NO: 409180 - DNA, 201 bp, Homo sapiens
gagtagggactgctgagaccgtggggatggctgagactgtggggacggctgagaccgtggggatggctgagaccgtggggactgctgaacctgtggggackcctgagaccgtgggaacagctgagaccgtggggactcagaccgtggggacggctgagaccgtggggactcctgagaccgtggggatggctgagaccgtgg

SEQ ID NO: 409181 - DNA, 201 bp, Homo sapiens; identical to SEQ ID NO: 91927

SEQ ID NO: 409182 - DNA, 201 bp, Homo sapiens
cctgtgtcctgggagtaggagggactcctcagtaatgaccctcacctgcttgtggccacgtgctgtctgccaggtgcccaccagctgccctgacgatgacytccggggctgcttgggcttagccccaggtctgtcgcaaggcctagctgtggtctccacagccccgctgagtcccacaggccctgatatggtctttctgcc

SEQ ID NO: 409183 - DNA, 201 bp, Homo sapiens
agtagggactgctgagaccgtggggatggctgagactgtggggacggctgagaccgtggggatggctgagaccgtggggactgctgaacctgtggggactmctgagaccgtgggaacagctgagaccgtggggactcagaccgtggggacggctgagaccgtggggactcctgagaccgtggggatggctgagaccgtggg

SEQ ID NO: 409184 - DNA, 201 bp, Homo sapiens; identical to SEQ ID NO: 91929

SEQ ID NO: 409185 - DNA, 201 bp, Homo sapiens
ccacagcggcccagggtcttgggaaggatcctccggccggcgccgccacgtctccgactttcctcacatgtgctgggctctgctggtaactttttggcctsctgagtccaggcccaggctgatgagaattcacagggctacagttaaagacggggagagaggccagccgcagtggctcacgtctgtaatcccagcactttg

SEQ ID NO: 409186 - DNA, 201 bp, Homo sapiens
aactccgcctaaccaccagcactcaatgcgggtgaggtgcccagctgggcctccgaacacacggagggcagatgtcggtggggacctacgggctgcgtgcrgggaggcgctccctgggagagtcatcagcctttaattaaagtccctaaattgcttccccagccgctccgtgggttttccatgttggaatgttccagatgg

SEQ ID NO: 409187 - DNA, 201 bp, Homo sapiens; identical to SEQ ID NO: 91920

SEQ ID NO: 409188 - DNA, 201 bp, Homo sapiens
gggtcagtcccgtggcttctgcctcattaatctggtattgtcccttggaccaactgtgctgacccctcactgggcggtgcagagccagtagagctgggccygctgagcttccgcattgcaagtgtcctcatgctctccgaggggccgtggccacgtggggctggtgtgctcctaggtgcctgtgcctccgtcctttcagcc

SEQ ID NO: 409189 - DNA, 201 bp, Homo sapiens
aatctggtattgtcccttggaccaactgtgctgacccctcactgggcggtgcagagccagtagagctgggcctgctgagcttccgcattgcaagtgtcctyatgctctccgaggggccgtggccacgtggggctggtgtgctcctaggtgcctgtgcctccgtcctttcagcctgctaggagcctgcaatgagcctctgaa

SEQ ID NO: 409190 - DNA, 201 bp, Homo sapiens
ctgtggctgcttctgaagtggcagtgggtgggtggagggagtcccagctccctctgtcaccaagacggaggaggacttgtccggtatcgtctgtaggccakctctgcccagggcctggttctgcggggtgggaaggctcccgtgccgcccacccctactctgcaccgctcatggtgggtgttgtgggggaagcctggattc

SEQ ID NO: 409191 - DNA, 201 bp, Homo sapiens
ctaccggcccttcaaccgcaggttctaccagatgacgggccaggacttcggctggggctgagcggcaccctggggatgctcagcaccttgattgacacccrctcgcctggccagagcgggctgcgtgcacatgctgggcagagaggaatatttaagaaataaagcttggacccagatttttccacaaacctcgaggttgga

SEQ ID NO: 409192 - DNA, 201 bp, Homo sapiens
  misc_feature (1)...(201): n = A,T,C or G
aggcgagtgccggccagggccccggggaggggaagaggctcctgctggccagcagctctcccgcatcttccatacggaagtccacgaggccctacgtgggncccatctcccctgtaccacctatgactcaggcttgaacaggcgcaaagcaggcgctggctgggaggtctgaggggactgcaggtggccctggagctgtgg

SEQ ID NO: 409193 - DNA, 201 bp, Homo sapiens
ctgctgggaaagtggaaggccagccccggcttcctctgcccctgtgtaagtgctgggcacgcccttgcagtagtgggttcccccgcacaggctgacgggcygtccctctccccagcggccagcgacagcgactaccctcccggggagatgttcctggacagcgacgtgaacccagaggacccgggcgcagatggcgtgctg

SEQ ID NO: 409194 - DNA, 201 bp, Homo sapiens
agcagtgccgtttgtccatccgcctgcctgcaggggagctgggcggcttgtttttacgtaaccttcacgcatgagcggtttgtaagcccgctcaccccgttggcagggtgttgggccaagcactgctctggggcaggctggcagtgaaacccagagactagaatccgcttatgaggggggtgcgtctttgcggagaccctt

SEQ ID NO: 409195 - DNA, 201 bp, Homo sapiens
cacagggccgtctggggtcctgagggtctgccacaggatcacaggttgtttgctcccagaaccagagtcttactactcagctccccttggcccaggggccyacccaacagagcaggcttgctggagtcccagacctccaggcagagggtcgtgggtgggctgtgggtggagcatgtgtggaagctgggtctgctgggaaag

SEQ ID NO: 409196 - DNA, 201 bp, Homo sapiens
ttgtaagcccgctcaccccgttggcagggtgttgggccaagcactgctctggggcaggctggcagtgaaacccagagactagaatccgcttatgagggggrtgcgtctttgcggagacccttagagcccacagcatcattactctggtgcattttcttttgagccactgttacggcaagagatccagggcgtgccacgtga

SEQ ID NO: 409197 - DNA, 201 bp, Homo sapiens
tcagctccgtttatattttgtaatcgtgctttatagacttaaattcatctctattccccaagtccccaccactgaaaattcttggttctctttttttttttgagatggagtctcgctctatcgcccaggctggagtgcagtggcacgatctcagctcactgcaagctccgcctcccaggttcctgccattctcctgcctca

SEQ ID NO: 409198 - DNA, 201 bp, Homo sapiens
agcactgctctggggcaggctggcagtgaaacccagagactagaatccgcttatgaggggggtgcgtctttgcggagacccttagagcccacagcatcatyactctggtgcattttcttttgagccactgttacggcaagagatccagggcgtgccacgtgaaacgcgacagggcctttcctcaagacctctcctccgtgt

SEQ ID NO: 409199 - DNA, 201 bp, Homo sapiens
aacagttgaacctgggaggcagaggttgcagtaagctgagattgtgctactgcactccagcctgggcaacagagcgagatgccgtctcaaaaaaaaataamataaaaattagccaggtgtggtggtgggtgcctataatcctagctactcaggagactgggaggctgaggcaagagaatcacttgaacccaggaggcggag

SEQ ID NO: 409200 - DNA, 201 bp, Homo sapiens
ttgtttacatataaaaggaaggatgatatcattctatggaatactgaaaaaactggcttggattactagattttcgaagaccctatgctctcaggtcattwctttttttttttttttttgagacagagtctccctctgtcatgcagtggcgcgatctcggctcactgcaacctctgcctcctgagttcaagagattctcct

SEQ ID NO: 409201 - DNA, 201 bp, Homo sapiens
cacgtgaaacgcgacagggcctttcctcaagacctctcctccgtgtggtgcgtttctcacacagggtctaggacatttcaattcttgttatcaacaaccasattcaaaacttgccttttgttaaagtttcggggggccccttcctccccaggcctctggggagtttggggctcctgttccctaacctttcctcagccagcc

SEQ ID NO: 409202 - DNA, 201 bp, Homo sapiens
tgagcccgcgaggaccccgctcaggctggctgggcgagcgggaggctggggagtgccggtgacacccgacctcggccctgcccttgcagctgtggtgtgcygcgggcgtcaacctgagcgggtggaggcccaatgaggacgacgctgggaatggagtcaagccagcgccaggccgcgatcccctgacctgcgaccgcgaag

SEQ ID NO: 409203 - DNA, 201 bp, Homo sapiens
gtgaactgaggcacggttagcaggcctctcgttcagtggaaccagagggagtcggaggttggggctgattaggaagtttcagaagccaatgtaaactcctragaatgcaccagagaataaaagtttacttgagaataatttttcccagggagatgtttcataggatgggacacttaacttgaggttttggttttatcttca

SEQ ID NO: 409204 - DNA, 201 bp, Homo sapiens
acggttagcaggcctctcgttcagtggaaccagagggagtcggaggttggggctgattaggaagtttcagaagccaatgtaaactcctaagaatgcaccasagaataaaagtttacttgagaataatttttcccagggagatgtttcataggatgggacacttaacttgaggttttggttttatcttcatttttcttccgc

SEQ ID NO: 409205 - DNA, 201 bp, Homo sapiens
aggttggggctgattaggaagtttcagaagccaatgtaaactcctaagaatgcaccagagaataaaagtttacttgagaataatttttcccagggagatgyttcataggatgggacacttaacttgaggttttggttttatcttcatttttcttccgctggtaccaaccatataaatttatatatatatttcccaatacaa

SEQ ID NO: 409206 - DNA, 201 bp, Homo sapiens
ctgggctgcaggggtcaggcaggcagcaggcacagaggagcccaggagcggcagagcttgcctcccagtggtgggaggcttagttttatgcccagcttggrcctcttggagctcaggggcctcttctgtggaggcgaaaccgtgtctgtgagtgctttagagtgcagtcctgagtccgcattgttctggtcctgggggagg

SEQ ID NO: 409207 - DNA, 201 bp, Homo sapiens
aaatatatatatatctatttcccatctgtcttacccattcttgaaatcagttcgtattcaaccagttgggatttgttttacgtggacactgaacccagccrtccctttcacagaacgtgaggaagccttgcttttcaacctggtttttggagtcccgagctagtggccagctctctcagccccacacgtaatacctgaatg

SEQ ID NO: 409208 - DNA, 201 bp, Homo sapiens
tgcccttgcagctgtggtgtgccgcgggcgtcaacctgagcgggtggaggcccaatgaggacgacgctgggaatggagtcaagccagcgccaggccgcgaycccctgacctgcgaccgcgaaggagacggcgagcccaagagcgcccacacgtctcccgagaagaagaaggtgagcatggccgaggccaccgggcaccctc

SEQ ID NO: 409209 - DNA, 201 bp, Homo sapiens
gaaatcagttcgtattcaaccagttgggatttgttttacgtggacactgaacccagccatccctttcacagaacgtgaggaagccttgcttttcaacctgrtttttggagtcccgagctagtggccagctctctcagccccacacgtaatacctgaatggagaaatgtccttccctcgacccgtgtcccgtccagcaggct

SEQ ID NO: 409210 - DNA, 201 bp, Homo sapiens
cccaccactgccggcttcagccagcgccgcaaccatgccatgtgcccgatctcggcaggcagccggcccctggaattcttccctgacgagtgagtgtcccrcagcccccacttgtggcctgcaatggggttggggaggccctgtcctgaggctcctcccctccaggccctgaagcgggactttgagggcagcctccacctt

SEQ ID NO: 409211 - DNA, 201 bp, Homo sapiens
ccagttgggatttgttttacgtggacactgaacccagccatccctttcacagaacgtgaggaagccttgcttttcaacctggtttttggagtcccgagctrgtggccagctctctcagccccacacgtaatacctgaatggagaaatgtccttccctcgacccgtgtcccgtccagcaggcttcaggggcagctttgtaac

SEQ ID NO: 409212 - DNA, 201 bp, Homo sapiens
aggccgtctcagacatttctacaaagccactccgggaggcgggctgcgcccgtgtgagggctctccctcggcactgctcatcttttggggctggacatgcrtggcctgggccgctgggacgcggtgggtgtggagcagcatccctggcttccacccacgaaagccaggagcacccccttcatttgtgaccacaaaaatgtc

SEQ ID NO: 409213 - DNA, 201 bp, Homo sapiens
ggcctcaggcagccacggcggagccgcaggccagggacctgcagtgactcgctctccctcctccctgtgtttggccttagtgtccacaggatgaaatgtcygagtcaggccagtcctcggcggccgccacacccagcaccacaggcaccaagtccaacacgcccacatcctccgtgccctcggccgccgtcacacccctca

SEQ ID NO: 409214 - DNA, 201 bp, Homo sapiens
cgagaggaggtccagccactggcttgcttggacgtgggatctctggggactgggcttactgctgacactcccatgcagagaggctgctgcaacccaccccsctccaggccccgcctcagacgtctactgtgctggggttcgacctctgcccagtcagcctgggaagagctgttttctgatcatccccacctagcaggtggt

SEQ ID NO: 409215 - DNA, 201 bp, Homo sapiens
tggagtctcctgtgctcatggcatctgctggcagctgagcactggccatgtggctctgagccccaggctttcaggcatgacaggcgggcagtaggacagcscagtctgtccccttgcacgcgtcagggtccgagcctttcgccatggccttgcttcccccagcccgcagggtgagaagctcctggatcccaggctgcctcc

SEQ ID NO: 409216 - DNA, 201 bp, Homo sapiens
gctattaccgcactacctggtgggaatttcacagcaaatattcactaaggaacttatttttctgtttcacaaatgactaatactcagagaagttatactaygtgccttgcattgctgagcggaatctggaatccacgcagctgatctttctctccgctctgctctgcatggacgaggcagccctcaggagagattccaccg

SEQ ID NO: 409217 - DNA, 201 bp, Homo sapiens
gtactcacatcacaatgtcattttgataggagcgttttgttatttttacaaggcagaatggggtgtaacagttgaattaaacttagcaatcacgtgctcaragcttttgcctgtcagttgtgtgtgtcccttatagtcccttcccccacagctcttgctgaaagagtttgccttgttttgttttgttgttttgtatttagc

SEQ ID NO: 409218 - DNA, 201 bp, Homo sapiens
gtgaccgtccgtgtgagcttccgtgtgaccgtccgtgtgagcatctgtgtgaccgttcgtgtgagtgtgtgaccgtccgtgtgagtgtccgcataaccgtrtgagcatccgtgtgatcatccgtaaccgtgtaggcgtccttgtgagcctccgtgtgagcgtgcaaccgtctgtgtgaccgtccgtgtaagcgtgtgaccg

SEQ ID NO: 409219 - DNA, 201 bp, Homo sapiens
cagccccaggctggttagattcccctccaggacgctgtcttgatttctgcctggacagggcagccggaaaagcctcacaggttagaggggacggagacaggccccccacggcagcgctaatgcaggcgtttccctcctcgcagatgatacagacctacgtggagcacattgagaggtccaagatgcagcaggtcggaggaa

SEQ ID NO: 409220 - DNA, 201 bp, Homo sapiens
cacctccctgtgcctctggcagcttcagccgcctcttcagctcttcctccagcccccctccggccaagcgcccctatccctcggtgaacatccactacaaktcacccaccactgccggcttcagccagcgccgcaaccatgccatgtgcccgatctcggcaggcagccggcccctggaattcttccctgacgagtgagtgt

SEQ ID NO: 409221 - DNA, 201 bp, Homo sapiens
gctcgtcgtgctgccacagccaggacttgcgcgtgaccaggcggcccaggccgaagagcgggaggcggccgagcagctgcaagaggcggctctcgcggcgsacgtcggcccaggcccggaccggcagccggcgtccagagaacggccgcgtcaaggtctcgtagtccaccgcgtagagctgggagtcgcgcggcctgttca

SEQ ID NO: 409222 - DNA, 201 bp, Homo sapiens
ggagcggaaccagtacaaggagcggctgatggagctgcaggaggctgtgcggtggactgagatgatcaggtgggagttgcggccaccccaggaggggctgygggatcatccctgacggcaggactgcggctccctcctctgcacctccctgtcttctggggggactgaagtgcgctgggtgcttcctggcgggagccagag

SEQ ID NO: 409223 - DNA, 201 bp, Homo sapiens
aggactccgccggctcggaggccgccgcgagagcccgggacccagcgggtgagcgcagggcggctgccgaggcgttgcggctgctgcggccggagcaggtsctgaagcgcctcgcggtgtgcgtggacacaggtgcggcggagggcacgggcgatactcggggtaggaaaggcctttctccgccaggcggcgccctctgtc

SEQ ID NO: 409224 - DNA, 201 bp, Homo sapiens
tacagaatcggtacatccactcttcactcttcacatgcggggcgtccaccattcacttttcacaggcggggcggccaccgttcaccattcacacacagggsgaccaccattcaccattcacaggcagagcggccaccattcaccattcacaggcagagcggccaccattcaccattcacaggcggggcggccaccattcac

SEQ ID NO: 409225 - DNA, 201 bp, Homo sapiens
aggatgtaagcagctatctctgtacagaatcggtacatccactcttcactcttcacatgcggggcgtccaccattcacttttcacaggcggggcggccacygttcaccattcacacacagggtgaccaccattcaccattcacaggcagagcggccaccattcaccattcacaggcagagcggccaccattcaccattcac

SEQ ID NO: 409226 - DNA, 201 bp, Homo sapiens
atggcgcaatcttggctcactgcaacctgggttcaagcaattctcctgcctcagcctcctgagtagctgggattacaggcgcacgccaccacgcccagctrattttttgtgtttttagtagagatggggtttcaccgtgttggccaggctggtcttgaactcctgacctcaggtgatccacccgccttggcctcccaaagt

SEQ ID NO: 409227 - DNA, 201 bp, Homo sapiens
cagtgaataaatcaggttacaaaacactgtgtacaagatgatcgtacatctgctctacacacacacatacaaatccagaagcacgtcacacaattttaacygaccctatagaccgagactcataatttaaaattttttctgtttttacctaacactgattttcctgcagaaacatacattgtttatataattattttcatt

SEQ ID NO: 409228 - DNA, 201 bp, Homo sapiens
ggctggagtgcagtggcgtgatctcagctccctgcaacctccgcctcccgggttcaagtgattctcctgcctcgccctcccgagtagctgggactacaggmgcccgccaccacgcccagctaattttttttatttttagtagaaacggggtttcaccatgttagccaggaaggtctccatctcctgacctcgtcatccccc

SEQ ID NO: 409229 - DNA, 201 bp, Homo sapiens
tcctcccatgtccccagctgtggtcctgcaccgaggccagctcctggggctccgaggtaagcccagccacctcgtgtcccctcacgggagcctctcccatyctccacctgtatgcgggctcagcgcctctgggttctctccctgcagccaataagacatcccccacctctggggagggcgcccgtcccgggggcatcatcc

SEQ ID NO: 409230 - DNA, 201 bp, Homo sapiens
ctccggccaagcgcccctatccctcggtgaacatccactacaagtcacccaccactgccggcttcagccagcgccgcaaccatgccatgtgcccgatctcsgcaggcagccggcccctggaattcttccctgacgagtgagtgtcccgcagcccccacttgtggcctgcaatggggttggggaggccctgtcctgaggctc

SEQ ID NO: 409231 - DNA, 201 bp, Homo sapiens
ggggtctcccattcagccaccttcctaaccaggctgtgccttctccagggcggaagtgcaggcgcccctggcaaggccccttcacgtacctgtatgccgcrcccgtggcactcccatctttctgctttttcaaagaaacgccttgaatgtggtgaagaatgacctgattgccaaggtcgaccagctgtccggggagcagga

SEQ ID NO: 409232 - DNA, 201 bp, Homo sapiens
ttctgaacagccacaagctacagggggctgccgctgtgtccctggcgaggcactggcccattacaagcaatcgtctggggagggcaccagtggaaagcccygttccaagccatttcaggagggtggccctgcttccgaggagccggagtcagtggccggataagcagagccactcgggagtggtgaggcccggaagggtta

SEQ ID NO: 409233 - DNA, 201 bp, Homo sapiens
agtggggcccttgctcccattgtgacttcagtcatccttcaccgaggtcctgccctacccaggctgacccagaagcctaggagtccagctccaggcctgcktctgcggtgtctccctcgccgctctctccctcgcccacgctggggggcttttggagactgggtacctgccacaccctgccacacacactctcctcttcac

SEQ ID NO: 409234 - DNA, 201 bp, Homo sapiens
cccaggctgacccagaagcctaggagtccagctccaggcctgcgtctgcggtgtctccctcgccgctctctccctcgcccacgctggggggcttttggagrctgggtacctgccacaccctgccacacacactctcctcttcacaggcctgcatcatgggggctgcggggggcctgccctcctgatgggcgatgggagcag

SEQ ID NO: 409235 - DNA, 201 bp, Homo sapiens
accctgccacacacactctcctcttcacaggcctgcatcatgggggctgcggggggcctgccctcctgatgggcgatgggagcagagggcagcaggcttcmgggtcagggctcggcaacacagccctgggctggaccacggcgcctgggcctggttccctgcaggcctctgcctgggcacacggggcaccgggacctgctg

SEQ ID NO: 409236 - DNA, 201 bp, Homo sapiens
tcaccattcacaggcggggcggccaccattcaccattcacaggcggggcggccaccattcaccattcacaggcagggcggccgccattcaccattcacacrcagggcgaccaccattcaccattcacaggcagagcggccaccattcaccattcacaggcggggcggccaccattcaccattcacaggcggggcggccacc

SEQ ID NO: 409237 - DNA, 201 bp, Homo sapiens
gggtcagcccagccgtggctgatgcagttgtcacagccttcccctccccccgccttctgcagcaggtgggcccctgcctcctccaagccctccaggtgcaraagccccgtccccaggcgccctctcatgcctttgcctgctcctaggcgctggaggcctgcagcacggagcgggagcgcatgggcctcctggccgaccttc

SEQ ID NO: 409238 - DNA, 201 bp, Homo sapiens
tggcaggttcctagtgagcctcctgggcaggggtctggagggtcggagaaggagccccgcggctcccacgcccccacctgcctccagtcttgaagtggctstgccgccagaagctggcagccctacctgtctcagatttctggagggatgggtaggagccagggttcgtgcccacggcgcctccctgctccctgcagctga

SEQ ID NO: 409239 - DNA, 201 bp, Homo sapiens
tgaaggggggcaggatcacctcaaggtagtggtgcctccccggccttttgggagctgctcacatgcggttctaaaaggcttctctctgtccccaggcagtmccgggaatcccaggccttctccttctgcacagcagggcgctgggcagccggcgagccagtggcaagagacggcgcagggctgcaggcggcctggcggagg

SEQ ID NO: 409240 - DNA, 201 bp, Homo sapiens
cctttccagagccttaaacgtaatgcgtataagaaaggcagggaggccaggcacagtcactcacacctgtaatcccagagctttgggaggccagggcaggrggatcacctgcgcctaggagttcaagaccagcctggtcaacatagcgagaccccatctctacaaaacattttataaaaaaattaggcaggcatggtggtg

SEQ ID NO: 409241 - DNA, 201 bp, Homo sapiens
ccgggctgcccactgactctgctctctctcccgacctgtggatcccaacagcccaacccagggcatcgtgaacaaagctttcggcatcaacaccgactccstgtaccatgagctgtcgacggcagggtctgaggtcatcggggatgtggacgaaggggccgacctcctaggtaagcgcaagccttcccccgcaccgctgtg

SEQ ID NO: 409242 - DNA, 201 bp, Homo sapiens
gacgattctcctcaggctttggccctgcaagcaaacccacatatctgctctgtatgtaataaatgtcttaacgtcgtagctgcctgttcctgggcccaaaycgaaacgaaaacgaggactttattataaaaaaacgttggaccacgttgggctgggcaccaggacagtgtcctggcacgtttccaggcgagccgcgcaggc

SEQ ID NO: 409243 - DNA, 201 bp, Homo sapiens
ggtgaagtcttcctctgccaccactgggagaaccatcaaggctgtggcctaccgcctccatccacgaccggcctgcagggcagtgtgggcattgaatggcyacggtgggaggtgttggaagagtctgcagacgcagccactccgggctgcccactgactctgctctctctcccgacctgtggatcccaacagcccaaccca

SEQ ID NO: 409244 - DNA, 201 bp, Homo sapiens; identical to SEQ ID NO: 91956

SEQ ID NO: 409245 - DNA, 201 bp, Homo sapiens
tctgaggtcatcggggatgtggacgaaggggccgacctcctaggtaagcgcaagccttcccccgcaccgctgtgcctgcacaatgctggggctttctgctrttggttttgtttgtaatgaaaggaaagtcctctgtcagctgtgagctaggaacctttttttttccagctttgttgagttgcgtttcacatggaattgtcc

SEQ ID NO: 409246 - DNA, 201 bp, Homo sapiens
gaggtgggagcctcagccacgcaaacctgcagggaggaggggaggcggggagaccaggcggctgcaggggcggggtgcggacggggtgcacgcacctacctgcgccgtgtagtcgggccgcacccgcgtgaggcgccagtagcacggctcgtcgtgctgccacagccaggacttgcgcgtgaccaggcggcccaggccgaa

SEQ ID NO: 409247 - DNA, 201 bp, Homo sapiens; identical to SEQ ID NO: 91944

SEQ ID NO: 409248 - DNA, 201 bp, Homo sapiens
ggaggtgggagcctcagccacgcaaacctgcagggaggaggggaggcggggagaccaggcggctgcaggggcggggtgcggacggggtgcacgcacctacctgcgccgtgtagtcgggccgcacccgcgtgaggcgccagtagcacggctcgtcgtgctgccacagccaggacttgcgcgtgaccaggcggcccaggccga

SEQ ID NO: 409249 - DNA, 201 bp, Homo sapiens; identical to SEQ ID NO: 91946

SEQ ID NO: 409250 - DNA, 201 bp, Homo sapiens
cacggccaccctctaaccatcgcttcctctcctctcgccccccatttcagcaggaaggagcgccccacctccctgaacgtgttccccctggctgacggcasggtacgtgcacagatcgggggcaagctcgtgcctgcgggggaccactggcacctgagtgacctcggccagctgcagtccagctccagctaccaggttttg

SEQ ID NO: 409251 - DNA, 201 bp, Homo sapiens
aggaggtgggagcctcagccacgcaaacctgcagggaggaggggaggcggggagaccaggcggctgcaggggcggggtgcggacggggtgcacgcacctacctgcgccgtgtagtcgggccgcacccgcgtgaggcgccagtagcacggctcgtcgtgctgccacagccaggacttgcgcgtgaccaggcggcccaggccg

SEQ ID NO: 409252 - DNA, 201 bp, Homo sapiens
atgactgctctttccctcccttccatgcacagaaattcattgagtttgaagatgctctggaacaagagaagaaagagctgcaaatccaggtggagcactaygagttccagacgcgccagctggagctgaaggccaagaactatgccgatcagagtaagtggctggcgggagcctggaggcgcgcttgatgggcgctgctct

SEQ ID NO: 409253 - DNA, 201 bp, Homo sapiens
caggaggtgggagcctcagccacgcaaacctgcagggaggaggggaggcggggagaccaggcggctgcaggggcggggtgcggacggggtgcacgcacctacctgcgccgtgtagtcgggccgcacccgcgtgaggcgccagtagcacggctcgtcgtgctgccacagccaggacttgcgcgtgaccaggcggcccaggcc

SEQ ID NO: 409254 - DNA, 201 bp, Homo sapiens
ggtggccacagccacgtggcgggaagcccccattccggcctggccatgggccagcttgtggccctggggacatctttggcccctgggccctcaaagcctgyggcccttcaagtgaaaggcggctgctccacactcactcctgatgactgctctttccctcccttccatgcacagaaattcattgagtttgaagatgctctg

SEQ ID NO: 409255 - DNA, 201 bp, Homo sapiens
gctcctcagaccttttatgagctgcttttattttgcaaaatgttttcttttcacttggtttgataataattttgtcctgaaacttaccacataaggttaakattccaaacctagaccaatccccctgcctttttatttaatgactaggagcaagactgtgttgctggttatcccagtaacgatggtgtcctgagctgagct

SEQ ID NO: 409256 - DNA, 201 bp, Homo sapiens
gcccaatgaggacgacgctgggaatggagtcaagccagcgccaggccgcgatcccctgacctgcgaccgcgaaggagacggcgagcccaagagcgcccacrcgtctcccgagaagaagaaggtgagcatggccgaggccaccgggcaccctccctggcttagtctcaggacagctcagctgcagagcatgctgggagtgag

SEQ ID NO: 409257 - DNA, 201 bp, Homo sapiens
tcacatttgctgcatgcagcgtctgtgagtcacatgtgtcacgtgtcatgtctgtaagtcttgtgttgtgtgcggtgtctgtacatcgtgtgtcaggtgcrgcgtctgtaagttatgcatgtttggtgctgtgtctaagtcgtgcgtgtgaggtgctgtgtctaagtcgtgtgtgtgaggtgctgtgtctaagtcgtgcgt

SEQ ID NO: 409258 - DNA, 201 bp, Homo sapiens
aagtaaaagccctgccacacagcagctgccttctcggggtgtcctgtggacacgggaatgtggcagtggacggtgggaggggcagcacccagtcaagtgargccctgggccctgtttctgggaggaagctcgcggcagcctcggcctcttctccctacctactcaggaccccacgcttacctggttagagggtgacgggtg

SEQ ID NO: 409259 - DNA, 201 bp, Homo sapiens
ctccctacctactcaggaccccacgcttacctggttagagggtgacgggtgggcacggcctgcagcttgaagcatcactcggagaccacaggaaaacattkcctcatgctgaatgtgaaacctccagttgggccgaaggggctatgggggtgtgggtgaggagcttcgtgtcacccctgtgggcagtagccttggtgatgt

SEQ ID NO: 409260 - DNA, 201 bp, Homo sapiens
ggggtgccgagggctctgccaggtctctggtgtgaaaccacagggccgtctggggtcctgagggtctgccacaggatcacaggttgtttgctcccagaacmagagtcttactactcagctccccttggcccaggggcctacccaacagagcaggcttgctggagtcccagacctccaggcagagggtcgtgggtgggctgt

SEQ ID NO: 409261 - DNA, 201 bp, Homo sapiens
  misc_feature (1)...(201): n = A,T,C or G
gaggctcctgctggccagcagctctcccgcatcttccatacggaagtccacgaggccctacgtggggcccatctcccctgtaccacctatgactcaggctngaacaggcgcaaagcaggcgctggctgggaggtctgaggggactgcaggtggccctggagctgtggcaggtttggggctccccacttcctctcctctccc

SEQ ID NO: 409262 - DNA, 201 bp, Homo sapiens
ctcctcccatgtccccagctgtggtcctgcaccgaggccagctcctggggctccgaggtaagcccagccacctcgtgtcccctcacgggagcctctcccaycctccacctgtatgcgggctcagcgcctctgggttctctccctgcagccaataagacatcccccacctctggggagggcgcccgtcccgggggcatcatc

SEQ ID NO: 409263 - DNA, 201 bp, Homo sapiens
cctcttctcccatgctcctcccatgtccccagctgtggtcctgcaccgaggccagctcctggggctccgaggtaagcccagccacctcgtgtcccctcacrggagcctctcccatcctccacctgtatgcgggctcagcgcctctgggttctctccctgcagccaataagacatcccccacctctggggagggcgcccgtc

SEQ ID NO: 409264 - DNA, 201 bp, Homo sapiens
tccacatcccctgcatgccagtggccgccgcctcccccaggaggccgctgtcctgaatcgcttctgccatcccagggaacgtgctggccaccctgaatggsagtgtgctggacagcccagccgagggccctgggccagctgcccctgcctcggaggtcgagggccagaagctgcggaacgtgctggtgctgagcggcgggg

SEQ ID NO: 409265 - DNA, 201 bp, Homo sapiens
acgtgctggtgctgagcggcggggagggctacatcgacttccgcattggtgagcggggcccagggacagggctgaggttgggcgcggggggagcctggccstcactctgctgctttgcccgcaggagacggagaggacgacgagacggaggagggcgcaggggacatgagccaggtgaagcccgtgctgtccaaggcagag

SEQ ID NO: 409266 - DNA, 201 bp, Homo sapiens
ccaggcaattgtgggaaatggaaagagctctgactgccccctgccagcccagggtaaccacagccatgcgaggtccctgcccgtacctgggaactagccaygaagggcatctgccaggcacgtgcccggcacctgtctgcctgcttaagataaaagaccaaaaatgagcgtttttcctttggaaattcatactacaccctc

SEQ ID NO: 409267 - DNA, 201 bp, Homo sapiens
tctgggcaaacctggacgtgctactggtggcctcttggcaggagctgagtcggcacgtgtgcgccgttaccaaggctctcgcccagtatcccctcaagtgygtgatgccaaggctgaaggggggcaggatcacctcaaggtagtggtgcctccccggccttttgggagctgctcacatgcggttctaaaaggcttctctct

SEQ ID NO: 409268 - DNA, 201 bp, Homo sapiens
acctcctctcactgtctctggctcacgcttcccgggcctggagctgggacctgcccataggcatctgaagacacgtcagcctcagccggggggagcccttrcttgacgctctctggcctccgggctgcctctcgcgcccgctctgggcccgctcttcttctcatgatgtctttcctttcacctcctgcgttgtctgacatc

SEQ ID NO: 409269 - DNA, 201 bp, Homo sapiens
gtcagctcgcaaagctctcggcccccgaggtcaggaggtgggagcctcagccacgcaaacctgcagggaggaggggaggcggggagaccaggcggctgcasgggcggggtgcggacggggtgcacgcacctacctgcgccgtgtagtcgggccgcacccgcgtgaggcgccagtagcacggctcgtcgtgctgccacagcc

SEQ ID NO: 409270 - DNA, 201 bp, Homo sapiens
cgatgcagaaatccccgcggatggtgccgggcggggcgtcggccgggttcgtggctccgatgagcgcccgcgaggtgcgcaccacgtccagcccctgccawacctgtgcggaggaacgggcgcggtatcacgcgggggtgggggtcccggagccgcccgcccgcttcccggatactcaccatggccaccaccggcccggag

SEQ ID NO: 409271 - DNA, 201 bp, Homo sapiens
gtcatctccatccccctgacagagagtgagtggcctgcacccctgcaggggcagtggtgctgccagaggtgtacgtgggttcacggggtggctctgcagggccaccttggagggtgccttgctgcccctacgctgaccgctctcctcttctcccatgctcctcccatgtccccagctgtggtcctgcaccgaggccagctc

SEQ ID NO: 409272 - DNA, 201 bp, Homo sapiens
cctcgccccatcttctgcacacaccctcagggctgccaactctccaggaggttgggagggtgcccgcttctctgctctgtgcccattagcctcgccgcacrccctaggaccattgactttggaggaggttgggagggtgcccacttgcccactcctccgcagacagccctggcttcacctcagcgccacaggtctacaccg

SEQ ID NO: 409273 - DNA, 201 bp, Homo sapiens
gtgaagcagttacaagagccgggccctgtggggagcaccacttagcttcattcattcaccgtcagatactgagctcggcctgcctgtgtgtgggcccagarcctcgccctttgtcagaaacaggttcagggaggctggttcccatccctgctttgcctctgtgaccttggcctgtcgcctgcctggggttcgattttccat

SEQ ID NO: 409274 - DNA, 201 bp, Homo sapiens
gagcactacgagttccagacgcgccagctggagctgaaggccaagaactatgccgatcagagtaagtggctggcgggagcctggaggcgcgcttgatgggygctgctctgggacggctctggttggggtgggcatggagcgccttccacacaaggggacgagaggaagcccagtgggagcctcagccatgtattccagctc

SEQ ID NO: 409275 - DNA, 201 bp, Homo sapiens
ttccgtgtgaccgtccgtgtgagcatctgtgtgaccgtgtgtgtgtgaccgtccgtgtgtgaccgtccatgtgagcgtgtcaccgtccgtgtgagcatccrtgtgaccatccgtgtgagcgtgtgagcatccgtgtgaccgtccgtgtgagcatccgtgtgaccgtgtgagcctgtgagcatccgtgtgaccgtccgtgtg

SEQ ID NO: 409276 - DNA, 201 bp, Homo sapiens
  misc_feature (1)...(201): n = A,T,C or G
cattgttctggtcctgggggaggacagccatgtcccctcaagctgtagtcaaggctggatcctgacagattctgggagccccatggccctgtgctgccacngggtagcctcaagctcgggctctgaccttgatcccgtgccctgaaacaggccaaggagctccctgaaatggacgccacctccagccgggtgtggatcctg

SEQ ID NO: 409277 - DNA, 201 bp, Homo sapiens
cagcagctgaacggggtgggggctggcaaggagcagatgctgcctccacacgcaccgtccggtgcagctccagaggagggccgggcagagccaccacgttkgccgggcttacccgggcagcaaagagcccttctcccatagtgatcaactgcttagcttacaagaggaaaaataaggtgtgagagatgacatgtgaatatt

SEQ ID NO: 409278 - DNA, 201 bp, Homo sapiens
ccctgaggctctaccatgcacacacgcaccagcatctacaggacgtggacattgagccctacgtcagcaagatgctaggtgaggggccacgccaggtgggktggtggggggctcaaggccagccaccctgaccgctctcccccacaggcactggcaagctgggtttctccttcgtacgcatcacggccctgcttgtcgcgg

SEQ ID NO: 409279 - DNA, 201 bp, Homo sapiens
ccgtgtgagagtgtgaccacccatgtgagcatctgtgtgaccgtccgtgtgagcatgtgagcatccgtgtgtgtgaccatccatgtgagcatctgtgtgascgtccgtgtgagcgtccgtgtgagcgtgtgagcgtccgtgtgagtgtgaccatccatgtgagcatctgtgtgaccgtctgtgtgagcatccgtgtgagcg

SEQ ID NO: 409280 - DNA, 201 bp, Homo sapiens
tgctgcctccacacgcaccgtccggtgcagctccagaggagggccgggcagagccaccacgtttgccgggcttacccgggcagcaaagagcccttctcccrtagtgatcaactgcttagcttacaagaggaaaaataaggtgtgagagatgacatgtgaatattagtggtcattatttgccttaaaatcttcttaacccta

SEQ ID NO: 409281 - DNA, 201 bp, Homo sapiens
gcggcatctgtgtgagtcatgtgctgtgtgctgtgtatgagtgttgtgtgctgtgtgtggcgtctgagttgtgtgccgtgtggagcgtctgtgtgagtgtsatgtgctgtgtgcggcacctgagttgtgtgctgtgtggagggtctgtgagtgtcgtgtgctgtgtgcggcatctgagttgtgtgctgtgtgcggcgtctg

SEQ ID NO: 409282 - DNA, 201 bp, Homo sapiens
  misc_feature (1)...(201): n = A,T,C or G
cgcatcacggccctgcttgtcgcgggcagccggctctgggtgggcaccggcaacggagtggtcatctccatccccctgacagagagtgagtggcctgcacncctgcaggggcagtggtgctgccagaggtgtacgtgggttcacggggtggctctgcagggccaccttggagggtgccttgctgcccctacgctgaccgct

SEQ ID NO: 409283 - DNA, 201 bp, Homo sapiens
cgtttgccgggcttacccgggcagcaaagagcccttctcccatagtgatcaactgcttagcttacaagaggaaaaataaggtgtgagagatgacatgtgartattagtggtcattatttgccttaaaatcttcttaaccctaaagaaactgctgctggtaacaccccccaggctcatggcaggcagctggagtgggtgttc

SEQ ID NO: 409284 - DNA, 201 bp, Homo sapiens
ccgcccttcacggcccccgctccctgtagatcgggcgtcatccccagccaggctaccctctttggaagcgttgttgccctgaggcaggtgcggcggcatcrgtgacctgttttgaagggcacaggtgaaacctccgcaccttctgtttcaggaatgggcaaagaagtggggaatctgctactggaaaactcacagcttctg

SEQ ID NO: 409285 - DNA, 201 bp, Homo sapiens
tgttttgatatgttagacttactcctatccccagccaaggcctaaaggctgctgtgctgacaatgacctgctgacgagtctgggggccagagggtgaccayggtggcagcttccacacacatggaaacacactggcattcacaatgcaaagcaaacctaagacccgtgctgagcatacctaggtaatgcctttccataatt

SEQ ID NO: 409286 - DNA, 201 bp, Homo sapiens
cctggcatgtcccttttctagcatttgctgccaggcttgaaggctgtcagccccaggctggttagattcccctccaggacgctgtcttgatttctgcctgsacagggcagccggaaaagcctcacaggttagaggggacggagacaggccccccacggcagcgctaatgcaggcgtttccctcctcgcagatgatacagac

SEQ ID NO: 409287 - DNA, 201 bp, Homo sapiens
  misc_feature (1)...(201): n = A,T,C or G
tctaccatgcacacacgcaccagcatctacaggacgtggacattgagccctacgtcagcaagatgctaggtgaggggccacgccaggtggggtggtggggngctcaaggccagccaccctgaccgctctcccccacaggcactggcaagctgggtttctccttcgtacgcatcacggccctgcttgtcgcgggcagccggc

SEQ ID NO: 409288 - DNA, 201 bp, Homo sapiens
cggcatttgatgctatgtaaggaaaggatgcaagggaagacagttttatccaaaacttattttttccgagttaaataaaagttaccggccaggcgcagcgrctctcacatgtgtaatcccagcactttgggaggctgaggcaggcgagagatgaggtcacgctatgttgcccaggctggtctcaaactcctggactcaagc

SEQ ID NO: 409289 - DNA, 201 bp, Homo sapiens
cggggtggaggtacgcggggcgcggcggggcggaggtacgcaggacgcggcacatgccagggtcgtagtgcttgttatggcccgcgctctgggctcaggaygacagggaacactctggagacccaggaggagggagctggttggagcgtggctgagcagggatgtgggggggcggccctgggcgacggacatgtgtcgagc

SEQ ID NO: 409290 - DNA, 201 bp, Homo sapiens
  misc_feature (1)...(201): n = A,T,C or G
ctccaccctgaggctctaccatgcacacacgcaccagcatctacaggacgtggacattgagccctacgtcagcaagatgctaggtgaggggccacgccagntggggtggtggggggctcaaggccagccaccctgaccgctctcccccacaggcactggcaagctgggtttctccttcgtacgcatcacggccctgcttgt

SEQ ID NO: 409291 - DNA, 201 bp, Homo sapiens
attccccaagtccccaccactgaaaattcttggttctctttttttttttgagatggagtctcgctctatcgcccaggctggagtgcagtggcacgatctcrgctcactgcaagctccgcctcccaggttcctgccattctcctgcctcagcctcctgagtagctgggactacaggcgcccgccaccacacccggctaatct

SEQ ID NO: 409292 - DNA, 201 bp, Homo sapiens
gccagctgtggcctccaagcccaggggcatagccggtgccaggaaagccacccttcccagctgggcacccagtgccgggaaagccacccttcccagctggrcacccggtggccgggaaaaggcgaggatgggcccaggcgggcctccctgccgtgacctcccccaggacaagcctggggcactgtgggggccgctcaccct

SEQ ID NO: 409293 - DNA, 201 bp, Homo sapiens
agggtaggcacagtggctcacacctgtaatcccggcactttggaaggctgaggccggcagatcacttgaggtcaggagtttgagaccagcctggccaacayggtgaaaccccgtctctactaaaaatacaaaaattagctgggtgtggtggcacatgcctgtagtcccagctactagagaggctgaggcaggagaattgct

SEQ ID NO: 409294 - DNA, 201 bp, Homo sapiens
gcaggtttggggctccccacttcctctcctctccccagccctgttgatgggcagccatgactccacagaagtcatttgacgcccacccgcggcgggagagycaggtgcggcagctggcgtggatcggcgatggcgtatgggtgtccatccgcctggactccaccctgaggctctaccatgcacacacgcaccagcatctac

SEQ ID NO: 409295 - DNA, 201 bp, Homo sapiens
tatgtacctacaatattttttcttaagaaattcaagttttgggctgggcacagtggcgtatagctgtaatcctagcactttgggaggccgaggtgggtggmtcacctgaggctaggagttcaagaccagcctggccaacatagtgaaaccccgtatctactaaaaatacaaaaaatagctgggtgtggtggcttgtgcctg

SEQ ID NO: 409296 - DNA, 201 bp, Homo sapiens
ctgcgagctgcccgtgcgtccagttgcacaaaatcttgcctgcctccaccaagcggaagcctcattggttggttggttggggttttattttttaacggtaraagttgagccctttattcattaaaaaaaatcacattatatggcagtgtttctctaataaactgaatatttttatttaaagtattgaaaatgttgtggcaa

SEQ ID NO: 409297 - DNA, 201 bp, Homo sapiens
taattcaaaccaatttcatgtgtatagtctaatttttttatcacagtttaaatacatctgtgttacaactattactttttaggtctagctagcatgggctstgatcactgcttttatagagctggtcactaaaaaataatctaagcgcttagaaaaagctctaagctttttcagtataaaccttgtgagtcatcctgttca

SEQ ID NO: 409298 - DNA, 201 bp, Homo sapiens
gacaaacattttaaaaataaatgatatgggtcattcattcggcaaatattggactgcctgtagtagattaggcactgtgtaggacactggcaatatactgrtgacacaagctacccgctgccccttagcaagtcatttttgcaagtcacttttatgacatatttatctgaaatagcccatcacttattaaaatcacctgtg

SEQ ID NO: 409299 - DNA, 201 bp, Homo sapiens
taaaacctcaaatagcttttcatactgttgtatcatttactgtaagtaatcttgcacatgagtttcattattataactattccttaaagttactggaaatycactgtgataccttttaattaaaggaatgttattttggccttccagataaacctctacttgcaaagggaatttgaaaaagatgagaagccacgtgacaag

SEQ ID NO: 409300 - DNA, 201 bp, Homo sapiens
gccccgacccgccttctcagcagccccccgcctctcccctcttccctcatcacacgagcccccatacctgtgagatagttggtccacttgtacaacacccsctccatgcttcagagccccacaccgcgcatcctcccggcccggcgccggccgcggtgatggggtaggcgcagggcctggggcagcccctcccggcccgcc

SEQ ID NO: 409301 - DNA, 201 bp, Homo sapiens; identical to SEQ ID NO: 91975

SEQ ID NO: 409302 - DNA, 201 bp, Homo sapiens
catttagaataaaatagagaaatttaataagaatttatacaattttataatttaataagaatttaataaattatatcattagaatttaataagaaaatatrccattttaaattactattaaaatgactttttgaggctaaaactgccctatcatttttttacaacaaacccagggagttaaatgagttctttgtacaagcc

SEQ ID NO: 409303 - DNA, 201 bp, Homo sapiens
gccaattgggtttctttcactaatggcagtcatgcgtgattttcctttgataataggaacagcatggattattagaaagcatttagtttcaacaaaattcmgtttaaatattaatcttcgagtatgtaccactaaccatctatcatcttagggaaaactaatttgaagacctgtttctctccaaaacattgcttcaaagaa

SEQ ID NO: 409304 - DNA, 201 bp, Homo sapiens
agccaaataagaattgcttgaacctgggaggcagaggttacagtgagccgagatcgcgccattgcactctagcctgggtgacagaggaagattcttgtctaaaaaaaaaaagtggtataagccactgcgcccggccaatattttctatgtttatagcaaaattgttcaaaaactgcatatgtacctacaatattttttctt

SEQ ID NO: 409305 - DNA, 201 bp, Homo sapiens
ccattactagcaaaattaaggtcatgttcttacccactgtctttttgtacctctgtactgtagtttactggaaaaggagtcaagtttaagcatcagcaatwttggttatgtaaaaataatttgacttacttagaaactgagaaatatttgaaggtattaaaaattgtttacccctacataggattgctaagctttggctgg

SEQ ID NO: 409306 - DNA, 201 bp, Homo sapiens
tttatctgtggggcctttttactgctcagagacaaaagaaagaggagagcaccgaagaagtgaaaatagaagttttgcatcgtccagaaaactgctctaaracaagcaagaagggagacctactaaatgcccattatgacggctacctggctaaagacggctcgaaattctactgcaggtaggaaatgctgcgagctgccc

SEQ ID NO: 409307 - DNA, 201 bp, Homo sapiens
ttcaaaaatactcttgcctctataatgccagccttactgaacattacctccagatgattgtgcattgctttctttagttattataaggattagtgctttcmaaaggaaatacaattgttacacatataattttaaaatttttatagtcacatcttaaaaagtaaaaagatacaggtgaaattaattttaatgttatatctt

SEQ ID NO: 409308 - DNA, 201 bp, Homo sapiens
gagtgattatatgggaatgatggttagagaggactccaattttaaatgcccagctgtattttcaagtttgatttcttgaaatcagtttacttaagtattgytttttgttatagccggacacaaaatgaaggccaccccaaatggtttgttcttggtgttgggcaagtcataaaaggcctagacattgctatgacagatatg

SEQ ID NO: 409309 - DNA, 201 bp, Homo sapiens
tgaaatcagtttacttaagtattgctttttgttatagccggacacaaaatgaaggccaccccaaatggtttgttcttggtgttgggcaagtcataaaaggyctagacattgctatgacagatatgtgccctggagaaaagcgaaaagtagttatacccccttcatttgcatacggaaaggaaggctatggtaagatgttta

SEQ ID NO: 409310 - DNA, 201 bp, Homo sapiens
gttaactcagtaaatctgtgactcattctctccacgacgacaggcggcctttttttttccgcgcccggctctttaaaatcggccccgcccctgtgacgtgkcctggtgccgcggccaatcaaaaagcccaataaggatggtgccagtcccttcttcaccccagccagtccgcttcccgttcgggtcacgcgctccgggcct

SEQ ID NO: 409311 - DNA, 201 bp, Homo sapiens; identical to SEQ ID NO: 91989

SEQ ID NO: 409312 - DNA, 201 bp, Homo sapiens; identical to SEQ ID NO: 91990

SEQ ID NO: 409313 - DNA, 201 bp, Homo sapiens; identical to SEQ ID NO: 91991

SEQ ID NO: 409314 - DNA, 201 bp, Homo sapiens; identical to SEQ ID NO: 91992

SEQ ID NO: 409315 - DNA, 201 bp, Homo sapiens
actgctccactcagtgccacacacccttgctcccctcggggacagggcattttccctgttccctccctgaggtcctgtcctctcccctcagccctatgagytcccagatggctcagtcgtcatcaatgcccgaaaccagaacaactaccactgccactgccgaattgtcctccgcagctatgatgcctgtgatacactaag

SEQ ID NO: 409316 - DNA, 201 bp, Homo sapiens
ctaaggccccgtgatgtgaccttcgaccctgagctcgtggaccctgtggtagctgcaggagctgtagtcaccagctccggcattgtcttcttctccaaccmagcacatccagagttccgtgagtgcctcatgggtggggtcagcagggagagccctgtgtctagacaaggcctgggcagagaccctctctccctgactctc

SEQ ID NO: 409317 - DNA, 201 bp, Homo sapiens
caactaccactgccactgccgaattgtcctccgcagctatgatgcctgtgatacactaaggccccgtgatgtgaccttcgaccctgagctcgtggaccctktggtagctgcaggagctgtagtcaccagctccggcattgtcttcttctccaacccagcacatccagagttccgtgagtgcctcatgggtggggtcagcag

SEQ ID NO: 409318 - DNA, 201 bp, Homo sapiens
cttccacaagccccaggacatccctaccttccccttaatctctgccttcatccgcacactccggtaaggatggggcaggggcctggtcattgtaggcacgsgggccccaggggtcctggagctgtctctgactgcataacaccctctgcagttaccacactgggtcattggcatttggagccctcatcctgacccttgtgc

SEQ ID NO: 409319 - DNA, 201 bp, Homo sapiens
ataattccttaatatcatcaaatacccagcctgttcaatttgccggaaagggttttggtagacgttgcagaggctgctctggaatgggaatgctgagtgagtgccttcccctctgattgagactgagggagctgattatgcttatgctataggcagaccaaactgagtttgagcctggagatggaactctccgacagaact

SEQ ID NO: 409320 - DNA, 201 bp, Homo sapiens
aagaactgtttaaaagcatagccactatatcattatcacatctcacaaaattaacaataattccttaatatcatcaaatacccagcctgttcaatttgccrgaaagggttttggtagacgttgcagaggctgctctggaatgggaatgctgagtgagtgccttcccctctgattgagactgagggagctgattatgcttat

SEQ ID NO: 409321 - DNA, 201 bp, Homo sapiens
acccctccccaggacattgctctgacttgaggaccatcaaccacttcaccctctgagtctcagcctactcctgtttgtttgtttgtttgtttgtttgtttgttttgagacagggtcttgctctgttgcccaggctggagtgcagcagtgcaatctcagctcactgcaacctccatcccccaggctcaagcaatcttcccac

SEQ ID NO: 409322 - DNA, 201 bp, Homo sapiens; identical to SEQ ID NO: 91998

SEQ ID NO: 409323 - DNA, 201 bp, Homo sapiens
agctgcggggagagatgactggggagcgacccagcacggcgctcccggacagacgctgggggccgcggattctgggcttctggggaggctgtagggtttgrgtgtttgccgcgatcttcctgctgctgtctctggcagcctcctggtccaaggctgagaacgacttcggtctggtgagtcaccctttgcatagccccatcc

SEQ ID NO: 409324 - DNA, 201 bp, Homo sapiens; identical to SEQ ID NO: 92004

SEQ ID NO: 409325 - DNA, 201 bp, Homo sapiens
agtctccttctgtgacacccagttccctttcccacagaaacagcgggagccacggaagggccgcctcatcgtgtgtggccatgggacgctggagcgggacrgagtcttctgtctcctcagcgatgatcatggtgcctcctggcgctacggaagtggggtcagcggcatcccctacggtcagcccaagcaggaaaatgattt

SEQ ID NO: 409326 - DNA, 201 bp, Homo sapiens
ggtccaaggctgagaacgacttcggtctggtgagtcaccctttgcatagccccatccccgacccgcgcaggtgatcgacacctagtgtcccccggaacgckggcggctgagccgactttccgcgacaggacccttttctttctcccagaccccgtttcctcctaccgctcccagcccctctccctctccgggtccccgtcc

SEQ ID NO: 409327 - DNA, 201 bp, Homo sapiens
gccacggaagggccgcctcatcgtgtgtggccatgggacgctggagcgggacggagtcttctgtctcctcagcgatgatcatggtgcctcctggcgctacrgaagtggggtcagcggcatcccctacggtcagcccaagcaggaaaatgatttcaatcctgatgaatgccaggtcaggagtccatgagatgttccctaccc

SEQ ID NO: 409328 - DNA, 201 bp, Homo sapiens; identical to SEQ ID NO: 91988

SEQ ID NO: 409329 - DNA, 201 bp, Homo sapiens
aaaacaaacaaacaaaaagattttattaaagatattttgttaactcagtaaatctgtgactcattctctccacgacgacaggcggcctttttttttccgckcccggctctttaaaatcggccccgcccctgtgacgtgtcctggtgccgcggccaatcaaaaagcccaataaggatggtgccagtcccttcttcaccccag

SEQ ID NO: 409330 - DNA, 201 bp, Homo sapiens
gtctggaaaaatttatcaagttcctaaaccgcaatgcatacatcatggtgagctacactgcaagcaaccctttgttctggtgccctttggtctagacaccyccatcctggtccaggcagctcgccttggtaactctgacctttccacctccctcagatcgccatctacgggaagaatttctgtgtctcagccaaaaatgcg

SEQ ID NO: 409331 - DNA, 201 bp, Homo sapiens
aggggtcctggagctgtctctgactgcataacaccctctgcagttaccacactgggtcattggcatttggagccctcatcctgacccttgtgcagatagcycgggtcatcttggagtatattgaccacaagctcagaggtgagtctggagtcggagtaggagtcaggagctggggaaggccattagggaggggcagtgacc

SEQ ID NO: 409332 - DNA, 201 bp, Homo sapiens
gtgaccatggagcaactgctgtgggtgagcgggagacagatcggctcagtggacaccttccgcatcccgctcatcacagccactccgcggggcactcttckcgcctttgctgaggcgaggaaaatgtcctcatccgatgagggggccaagttcatcgccctgcggaggtccatggaccagggtataaagatgtctgggtga

SEQ ID NO: 409333 - DNA, 201 bp, Homo sapiens; identical to SEQ ID NO: 91997

SEQ ID NO: 409334 - DNA, 201 bp, Homo sapiens
aataattccttaatatcatcaaatacccagcctgttcaatttgccggaaagggttttggtagacgttgcagaggctgctctggaatgggaatgctgagtgagtgccttcccctctgattgagactgagggagctgattatgcttatgctataggcagaccaaactgagtttgagcctggagatggaactctccgacagaac

SEQ ID NO: 409335 - DNA, 201 bp, Homo sapiens
aattccttaatatcatcaaatacccagcctgttcaatttgccggaaagggttttggtagacgttgcagaggctgctctggaatgggaatgctgagtgagtgccttcccctctgattgagactgagggagctgattatgcttatgctataggcagaccaaactgagtttgagcctggagatggaactctccgacagaacttg

SEQ ID NO: 409336 - DNA, 201 bp, Homo sapiens
taattccttaatatcatcaaatacccagcctgttcaatttgccggaaagggttttggtagacgttgcagaggctgctctggaatgggaatgctgagtgagtgccttcccctctgattgagactgagggagctgattatgcttatgctataggcagaccaaactgagtttgagcctggagatggaactctccgacagaactt

SEQ ID NO: 409337 - DNA, 201 bp, Homo sapiens
gaccctctctccctgactctcctgctctccccaggagtgaacctgaccctgcgatggagcttcagcaatggtacctcatggcggaaagagacagtccagcyatggccaggccccagtggctattcatccctggcaaccctggagggcagcatggatggagaggagcaggccccccagctctacgtcctgtatgagaaaggc

SEQ ID NO: 409338 - DNA, 201 bp, Homo sapiens
cctcagccctatgagctcccagatggctcagtcgtcatcaatgcccgaaaccagaacaactaccactgccactgccgaattgtcctccgcagctatgatgyctgtgatacactaaggccccgtgatgtgaccttcgaccctgagctcgtggaccctgtggtagctgcaggagctgtagtcaccagctccggcattgtcttc

SEQ ID NO: 409339 - DNA, 201 bp, Homo sapiens
ttcctaaaacccccaagacaagtttgtctttgttgacccttcctcctcccatgacaggtgcagccgctggtgaccatggagcaactgctgtgggtgagcgkgagacagatcggctcagtggacaccttccgcatcccgctcatcacagccactccgcggggcactcttctcgcctttgctgaggcgaggaaaatgtcctca

SEQ ID NO: 409340 - DNA, 201 bp, Homo sapiens
gacacccagttccctttcccacagaaacagcgggagccacggaagggccgcctcatcgtgtgtggccatgggacgctggagcgggacggagtcttctgtcwcctcagcgatgatcatggtgcctcctggcgctacggaagtggggtcagcggcatcccctacggtcagcccaagcaggaaaatgatttcaatcctgatgaa

SEQ ID NO: 409341 - DNA, 201 bp, Homo sapiens
cagccgctggtgaccatggagcaactgctgtgggtgagcgggagacagatcggctcagtggacaccttccgcatcccgctcatcacagccactccgcgggscactcttctcgcctttgctgaggcgaggaaaatgtcctcatccgatgagggggccaagttcatcgccctgcggaggtccatggaccagggtataaagatg

SEQ ID NO: 409342 - DNA, 201 bp, Homo sapiens
ggagtcttctgtctcctcagcgatgatcatggtgcctcctggcgctacggaagtggggtcagcggcatcccctacggtcagcccaagcaggaaaatgattwcaatcctgatgaatgccaggtcaggagtccatgagatgttccctacccatttgaccctccctgccctccagaacatcatttcacgcacagacccagggtc

SEQ ID NO: 409343 - DNA, 201 bp, Homo sapiens
tcccctcggggacagggcattttccctgttccctccctgaggtcctgtcctctcccctcagccctatgagctcccagatggctcagtcgtcatcaatgccygaaaccagaacaactaccactgccactgccgaattgtcctccgcagctatgatgcctgtgatacactaaggccccgtgatgtgaccttcgaccctgagct

SEQ ID NO: 409344 - DNA, 201 bp, Homo sapiens
aggagtagtatttcttttctactccctttgtgctcacaaggccggctgccaggtggcctctaccatgttggtatggagcaaggatgatggtgtttcctggrgcacaccccggaatctctccctggatattggcactgaagtgtttgcccctggaccgggctctggtattcaggtctctgtcctaggagataggtggagggg

SEQ ID NO: 409345 - DNA, 201 bp, Homo sapiens
ctgctctccccaggagtgaacctgaccctgcgatggagcttcagcaatggtacctcatggcggaaagagacagtccagctatggccaggccccagtggctrttcatccctggcaaccctggagggcagcatggatggagaggagcaggccccccagctctacgtcctgtatgagaaaggccggaaccactacacagagagc

SEQ ID NO: 409346 - DNA, 201 bp, Homo sapiens
cagctatgatgcctgtgatacactaaggccccgtgatgtgaccttcgaccctgagctcgtggaccctgtggtagctgcaggagctgtagtcaccagctccrgcattgtcttcttctccaacccagcacatccagagttccgtgagtgcctcatgggtggggtcagcagggagagccctgtgtctagacaaggcctgggcag

SEQ ID NO: 409347 - DNA, 201 bp, Homo sapiens
gtctccatggagctaggcctcacctttctccctccctggcaggtttcctggaagtggcggatgaggccacgggcgccctggcatcggcggtgtcgggctaygtgcaggccctggccagcgcaggtgtggtggctgttctggccctgggggctcccgccccccagggttgcgctgtggctctggcttctgatcgctgctcca

SEQ ID NO: 409348 - DNA, 201 bp, Homo sapiens
agtgcagtggcacagtctcggctcactgcaagctccaaactccgcctcccacgttaacgccattctcctgcctcagcctcccaagtagctaggactacaggtgcccaccaccacgcccggctaattttttttttgtatttttagtagagacggggtttcaccatgttagccaggatggtctcgatctcctgacctcgtgat

SEQ ID NO: 409349 - DNA, 201 bp, Homo sapiens
acgcaggcaagttgatgtaatgcttgcctcactgagttaataggattaaaagatgtgcgcagagcacatagtttagtgccaggcacttttaaagtctcttrgtaaaagtttgatgagtctgaaattgatgaggatagaagttatttgaattgtaggaaaagactgggtgagggagagatgacaattgctgggaggagataa

SEQ ID NO: 409350 - DNA, 201 bp, Homo sapiens
ccaggcctggggaagaacaagactgctctcctcagacctcactgtagggtgactgagaagagtcatttatttcctgttccaggtcctagacccacctgccygccggatctggaataatgtgactcgctggtttgtcacgtgtgtccggcagccagaattccgagccgtgctaggagaagtggttctatactcaggagccag

SEQ ID NO: 409351 - DNA, 201 bp, Homo sapiens
agcctcccgagtagctgggactacaggcgcccgccaccacgcctggctattttttttttgtatttttagtagagatgaggtttcaccatgttagccaggawggtctcgatctcctgacctcgtgatccgcccagaagtatttttattgtgactatttgagtgaagaaatgggactcagaggtggtgatttgtgagagtggg

SEQ ID NO: 409352 - DNA, 201 bp, Homo sapiens
gctcccagccaccgaggggaggcatcaacaaggacagcacatccccaggcttctcccctcaccacatgctgcacctccaggctgcaaaactggcccttctrgcctccatccaggccttcagccttctgcgaagccgcctgggagacagggatttctccaggtgagtggcctcctggggatggaccccttcatggggaggcg

SEQ ID NO: 409353 - DNA, 201 bp, Homo sapiens
catcctcttcttctgggtggcccggatggtcatgctgggcctgaagctcacgggcaggctgccctttagagaggtgcggagacagccgagaccctcccatsgcccccagcctcctctcctaccgtcctgtgctgcagcgcagaccccgcgtggctggggcatggggttagctgtgggcaggcctgacccgggggctggtgt

SEQ ID NO: 409354 - DNA, 201 bp, Homo sapiens
agctgaaaaggtttgggtgggtggggataaaggctgggggtggcagaatcttgggttctagccctgccctctcttcccagtggccgatcctacctgctccrattgcgaggagttgagctgccccaggaattggctgggcttcacactcctcacctctggctactttggaactcatcccccgaaacctccaggtaccagaca

SEQ ID NO: 409355 - DNA, 201 bp, Homo sapiens
tgagtcagaagtgttttgtttttttttttctgagacggagtctcgctgtgttgcccaggctggagtgcagtggcgtgatctcggctcactgcaagctccayctcctgggttcatgccattctcctgcctcagcctcccgagtagctgggactacaggcgcccgccaccacgcctggctattttttttttgtatttttagta

SEQ ID NO: 409356 - DNA, 201 bp, Homo sapiens
gggtttcaccctgtcggccaggatggtctcgatctcttgacctcatgatctgctcacctcggcctcccaaagtgctgggattacaggcgtgacccaccgckcctggcctgtttttttttttgttttttttgtttttttgagacagagtctctctcggtttcccaggctggagtgcagtgatgcgcgcttactgcaacctct

SEQ ID NO: 409357 - DNA, 201 bp, Homo sapiens
actttggacctggttcttctcggcggttccgagcagccttaggtgaggtgtctcgtgccaatgcagcccaggacttcctgccaacttccaggaatgacccygacctgcactttgatgctgagcgactgggtcagggacgcgcgcgcctggtaggggctctgcgggagaccgtggtggcagccagggcccttgaccacaccc

SEQ ID NO: 409358 - DNA, 201 bp, Homo sapiens
tgtttgggggagttcaagtgttgggatagtcagggccctggaaaggaaggacttgggcccagcccttcgtgcatttttaaaaagttaaatagccaggcacrgtggctcatgcctgtaatcccagcgctttgggaggctgaggcaggtgaatcataaggtcacgagttcgagactagcctggccaacatagtgaaaccccat

SEQ ID NO: 409359 - DNA, 201 bp, Homo sapiens
cccccaccctgttgaggccttcctccccctctgctgagcctcggttaattataactctgacctaagtgccctgtgacgtcaagcccgggccagccctgcccaggagacccagcaaccaggtaggggagggcctgagaggactcaggcttcctgagcatggggagtgtttctgcggcagggctggggacgcagccagggact

SEQ ID NO: 409360 - DNA, 201 bp, Homo sapiens
aggtcgacacacagttgctacaggatgcggcaaggaaggaagccctgcagcagaaacagtgatggctcctcctcctcttcccctccctctttcattggtgwcccataaccccaagtcccagcccagaacccctaacccccaatacttgaaggggttttgtttttttactaatgatggttttgtgggttttttttaagggat

SEQ ID NO: 409361 - DNA, 201 bp, Homo sapiens
tggtggaagtgggggtgctggtgggaatgggtggggagccaggccagccaggttcacgcctcctctgagctactgacctcccatggtcctcgctcatcttyccaactttgttgtcctgggtgtttgggggtctcttcacttggacctgggtcctcacccaccccctggttccactccagctccaacagacagaagcagagc

SEQ ID NO: 409362 - DNA, 201 bp, Homo sapiens
tgatcgtaaccagttacagatttctttgttccttctccactcccactagccttaaaaaacaaaacagcctggctcagtggctcacacctgtaatcccagaratttgggaggccaaggtgggtggatcacttgagcccaggggtttgagaccagccaacatggtgaaatcccatctctacaacaaaaatacaaaaattagct

SEQ ID NO: 409363 - DNA, 201 bp, Homo sapiens
ccgtcaccactgcccagtacagcttctggctctatgagctctgtgatgtctacttggtgagaaggagcacagcggggcaggggatggtgggggcaggtggscagcagagccctgggctcagttttgccagagttggccttgagacctaagccaacccatccccttcccagtcctcacaggcacagcgagggctcaaggcta

SEQ ID NO: 409364 - DNA, 201 bp, Homo sapiens
agaccctcccatcgcccccagcctcctctcctaccgtcctgtgctgcagcgcagaccccgcgtggctggggcatggggttagctgtgggcaggcctgaccygggggctggtgtggggttgaaatccagcctgggccctgctcagtgattcctgtgcccagggcttcatcttcccagaggaaggagtgcttctgattcacat

SEQ ID NO: 409365 - DNA, 201 bp, Homo sapiens
ttaggtgaggtgtctcgtgccaatgcagcccaggacttcctgccaacttccaggaatgaccccgacctgcactttgatgctgagcgactgggtcagggacrcgcgcgcctggtaggggctctgcgggagaccgtggtggcagccagggcccttgaccacaccctggctcgccagcgcctcggggctgcacttcatgccctg

SEQ ID NO: 409366 - DNA, 201 bp, Homo sapiens
gaggtgtctcgtgccaatgcagcccaggacttcctgccaacttccaggaatgaccccgacctgcactttgatgctgagcgactgggtcagggacgcgcgcrcctggtaggggctctgcgggagaccgtggtggcagccagggcccttgaccacaccctggctcgccagcgcctcggggctgcacttcatgccctgcaggtg

SEQ ID NO: 409367 - DNA, 201 bp, Homo sapiens
actttgtcactgtcagtgacccagcggtgccccctggggaggtgagcagagggccagagctagctgctgggacaccctgctggagtggtgggtttactggrtccttggtggggggaggggcagggtgagccagaagcagacacacccccttgggtaatcactgcacctgtggcaggaccctgatgggcggtactgggtgag

SEQ ID NO: 409368 - DNA, 201 bp, Homo sapiens
gccctttccatatcatggcccttcatgttccctgtcttggctctgggagctccagattcctccagatggcacatgatcaggaccccgtctcccatggagcytgaactcccagtgtcctctgcaccagtacttgtccccagctgattgtcttcctcgccatctgcagcattacaaggcttgttgcctgctcttgtgttccct

SEQ ID NO: 409369 - DNA, 201 bp, Homo sapiens
ctttttccatattgccttggctcttccttcaaatcttttctccttgactagctttagaatcacaagggttccagctccacccctgcttctttctttttttktttgtttgttttttggagacggagtctcactctgtcacccaggctggagtgcaatggcatgatcccagcttgctgcaacctctgcttcccgggttcaagc

SEQ ID NO: 409370 - DNA, 201 bp, Homo sapiens
cctccccacctgctctgcaggtctacctccatgccatcgtgcgagatgctcacggccggaagatgagcaagtctctaggcaatgtcatcgatcccctggaygtcatctatggaatctccctgcaggtgggctgggtgctgggccagccaggaagggccgtggggctgtggtcacagccacctgactgctcccactccaccc

SEQ ID NO: 409371 - DNA, 201 bp, Homo sapiens
gtgaagatcacccccgcacatgaccaaaatgactatgaagttgggcagcggcacgggctggaggccatcagcatcatggactcccggggggccctcatcartgtgcctccgcctttcctggtgaggctgcctgaggcaagagtgcccgggtcagggagatggagggatggctgggcatcgccatgatgaggcctcattcct

SEQ ID NO: 409372 - DNA, 201 bp, Homo sapiens
aagcccggaggccatgagagcctggtggaccgctggatccgcagccgcctgacagaggctgtgaggctcagcaatcaaggcttccaggcctacgacttccyggccgtcaccactgcccagtacagcttctggctctatgagctctgtgatgtctacttggtgagaaggagcacagcggggcaggggatggtgggggcaggt

SEQ ID NO: 409373 - DNA, 201 bp, Homo sapiens
aaggccagtcttgtttgtcccctgcctcctgggttccgccagagagaagcagtggagtaaactgcacagacacagagaaaaccagtcatggaggccaagarctagagagccttgagtggacgtggttaatctcacttggttctcccaagagccctgggaggggggcaatatcatcatcatcatctgacaaatgaagtgacc

SEQ ID NO: 409374 - DNA, 201 bp, Homo sapiens
ggatggtctcgatctcttgacctcatgatctgctcacctcggcctcccaaagtgctgggattacaggcgtgacccaccgcgcctggcctgtttttttttttgttttttttgtttttttgagacagagtctctctcggtttcccaggctggagtgcagtgatgcgcgcttactgcaacctctgcctcctgagctcaagcgat

SEQ ID NO: 409375 - DNA, 201 bp, Homo sapiens
gtggcatgatctcggctcaccgcaacctccacctcctaggttcaagcgattctcttgcctcagcctcccaagtagctggcattacaggcacctgccaccgygcctggctaatttttgtatttttagtagagatggggtttcaccatgttggccaggctggtctcaaactcctgacctcaggtgatctgcctgcctcggcct

SEQ ID NO: 409376 - DNA, 201 bp, Homo sapiens
catagtgtggctgtaccatagtgaagtcattcttttttttttttttttttttttttttttgagacagagtttcactctttttgctcaggctggagtacagkggcatgatctcggctcaccgcaacctccacctcctaggttcaagcgattctcttgcctcagcctcccaagtagctggcattacaggcacctgccaccgcg

SEQ ID NO: 409377 - DNA, 201 bp, Homo sapiens
ctcacgggcaggctgccctttagagaggtgcggagacagccgagaccctcccatcgcccccagcctcctctcctaccgtcctgtgctgcagcgcagacccygcgtggctggggcatggggttagctgtgggcaggcctgacccgggggctggtgtggggttgaaatccagcctgggccctgctcagtgattcctgtgccca

SEQ ID NO: 409378 - DNA, 201 bp, Homo sapiens
cacccccgcacatgaccaaaatgactatgaagttgggcagcggcacgggctggaggccatcagcatcatggactcccggggggccctcatcaatgtgcctycgcctttcctggtgaggctgcctgaggcaagagtgcccgggtcagggagatggagggatggctgggcatcgccatgatgaggcctcattcctacccaggg

SEQ ID NO: 409379 - DNA, 201 bp, Homo sapiens
tgtggggagaggaaaagactggagctgcaccctagctgtccatcttctctcagagaaaaagaaaataagcttcagccaaatagacagagcttggggtggtyctcaagggactgtattagacaagtgggggccaggagtggtctcggagctacatccttcagcaaaagaggtgagtgtaggaaggaactccgtggagtccct

SEQ ID NO: 409380 - DNA, 201 bp, Homo sapiens
tgccccctaacaggcaccgcatgcgtggggagaccaccctgtggaaccctggctgtgaccatgcaggtattgccacccaggtggtggtggagaagaagctrtggcgtgagcagggactgagccggcaccagctgggccgcgaggcctttctacaggaagtctggaagtggaaggaggagtgagtatgcagcatccctgtgg

SEQ ID NO: 409381 - DNA, 201 bp, Homo sapiens
ccggcctccctgcttctttatttagtccactgactccttgcctgaagcctctgctttctttggtgccaggccccactggcctggctcaccctctggtcctycatgccccctaacaggcaccgcatgcgtggggagaccaccctgtggaaccctggctgtgaccatgcaggtattgccacccaggtggtggtggagaagaag

SEQ ID NO: 409382 - DNA, 201 bp, Homo sapiens
atcagcgtcctaatgtgtcagcagcaaatccccgaggtgtcttcatgatgtgcatcccaccccccaatgtgacaggctccctgcacctgggccatgcactsaccaacgccatccaggactccctgactcgatggtgagcttctatctgcaccttcctctggttccctctgcctagtctggctctctccttttccctgacag

SEQ ID NO: 409383 - DNA, 201 bp, Homo sapiens
cacgcctcctctgagctactgacctcccatggtcctcgctcatctttccaactttgttgtcctgggtgtttgggggtctcttcacttggacctgggtcctyacccaccccctggttccactccagctccaacagacagaagcagagctcaggaaggtggatgaggccatcgccctattccagaagatgctgtgatccacca

SEQ ID NO: 409384 - DNA, 201 bp, Homo sapiens
gacctcgggcatctaaaataccccatctgaaacctagtatggccgtccaagagggtccccagctggctgagtctgaatttctgcacctctctctaggcccygaggctcctgccctcccaaagacagctgctcagctcaagaaagaggcaaagaaacgggagaagctagagaaattccaacagaagcagaagatccaacagc

SEQ ID NO: 409385 - DNA, 201 bp, Homo sapiens; identical to SEQ ID NO: 92044

SEQ ID NO: 409386 - DNA, 201 bp, Homo sapiens; identical to SEQ ID NO: 92045

SEQ ID NO: 409387 - DNA, 201 bp, Homo sapiens; identical to SEQ ID NO: 92046

SEQ ID NO: 409388 - DNA, 201 bp, Homo sapiens
cacttggcatctccccagataggaaagggaggactcacttgaatgaaacgacttctcttgtgaactatcaaggggccgccagaatcacctgcaaggagagsagaagctgtagagaaaaggactgttgggccttgggcacttgtagcacaaccaaagagcattctctcacctctgcaagtattggggtcagcatagggactc

SEQ ID NO: 409389 - DNA, 201 bp, Homo sapiens
tctggccatatttcagcttattcttgagcttgatcagggcaacgtcatagtcataaaattcaggaattcctgcttcttttttcccattaatgttgtagttrgggtgaaataggactacttctatctccaggtcccgcttctcccctcctgaagtaggagagtaggtaccacctctttgtgggcagcttcctgcctctggcc

SEQ ID NO: 409390 - DNA, 201 bp, Homo sapiens
ctgtcttcaaacctgggccgtgcccatcctcagcatcgactccttctatggtctctgtcagggaagacaggaaagcttcggccacctcttgaggggtgtcrtacatgaaggagtctgggagagtcagaaatgaggtcaaatgtctgggagtgtcagggatacagtgaccaaagagacgggggatcatgggtttccagggta

SEQ ID NO: 409391 - DNA, 201 bp, Homo sapiens
aggtggaagcttacacatctccctcagcctctggtttttcagcacttgggattggggttaaacctttaaaaacggctgtcaggtttgatctcagtgtaacracatggccagtgcctgttccccactcccttgccccaaaaggatctggaacacaggtgttgtcgcagctgttttaattcaatcccacgcccctgtccagca

SEQ ID NO: 409392 - DNA, 201 bp, Homo sapiens
ccaggagagtggctcaggctccagcattaacagttctgtcccttctccattttcccccagttccctgccctgcctcccttctctgtcttcaaacctgggcygtgcccatcctcagcatcgactccttctatggtctctgtcagggaagacaggaaagcttcggccacctcttgaggggtgtcgtacatgaaggagtctggg

SEQ ID NO: 409393 - DNA, 201 bp, Homo sapiens
cctggggccgccttggttaccgcgttttccgctcctcgctacgtcatcgttgtgagcccgctatcagcggccagcgcgggcgcggccggagaccgtggggmccccggttgccgccccctcgggtaaggccctctgcttctcactcttcggccctttttctcatagccgtttctctgttcttcctctttgcgttgctctgcg

SEQ ID NO: 409394 - DNA, 201 bp, Homo sapiens
tgcctcatatgccccaatgctggtctcagtaaaacactgaggtggaagcttacacatctccctcagcctctggtttttcagcacttgggattggggttaarcctttaaaaacggctgtcaggtttgatctcagtgtaacaacatggccagtgcctgttccccactcccttgccccaaaaggatctggaacacaggtgttgt

SEQ ID NO: 409395 - DNA, 201 bp, Homo sapiens
catgggctatgtcttgtgactatgatttgtgctcccaaagggtcggattcattccctgaacggcgagcccctaggaaagggaatactctctatgtatatgkagaagacatgacacccacccttctccgtggggccttctctccttttggaaacatcattgacctctccatggacccacccagaaagtaaggatgacaacag

SEQ ID NO: 409396 - DNA, 201 bp, Homo sapiens
acaggccatcctggccaccagagggcagcgtggaaactgggcttccaggggccagtggccaggagtgaggtggtcaggagtcagcctcagggtctgttctrtgatctcctttagaccttaactgttcctctcctccctccctagctgtccagaacagccctaagggttgccaccgggacaagaggacccagattgtctaca

SEQ ID NO: 409397 - DNA, 201 bp, Homo sapiens
gaccgtggggcccccggttgccgccccctcgggtaaggccctctgcttctcactcttcggccctttttctcatagccgtttctctgttcttcctctttgcrttgctctgcgggcgctacgctggctccaccgccttctctgccgttcaaaccccgcggttgtccttaccctagcgagggtaggggggtcgggtgccatcgt

SEQ ID NO: 409398 - DNA, 201 bp, Homo sapiens
tggaccggtggaaggccgggcggaagtgcgcgcctggggccgccttggttaccgcgttttccgctcctcgctacgtcatcgttgtgagcccgctatcagcrgccagcgcgggcgcggccggagaccgtggggcccccggttgccgccccctcgggtaaggccctctgcttctcactcttcggccctttttctcatagccgt

SEQ ID NO: 409399 - DNA, 201 bp, Homo sapiens
agctcaagggtggtggggatggaaccattggatggggtgaagagagtaacatgtctggtggagggaggaaagaggaaggggaagaaacagctagaggcttragagagaatggtgagggccaaagctacaccctgaatgagttctggtggagctagtagcatttcttagtgtgaataatccattttccctgaaagtagattt

SEQ ID NO: 409400 - DNA, 201 bp, Homo sapiens
agaccgagagggtcctttccgcagtgagtgattttggctggaggtcaaggtgaccttaactgaggtttatgtgggtcctactaagtgaaatgtggcatggkctatgtcttgtgactatgatttgtgctcccaaagggtcggattcattccctgaacggcgagcccctaggaaagggaatactctctatgtatatggagaag

SEQ ID NO: 409401 - DNA, 201 bp, Homo sapiens
tttggttagattaggaatttccagcatcatacatgatctaggggaccagaggcaagaggcagagcacatcagtgtaccactctgagggcatcaagaaagayggtccctggagtgatgtgcccaggggccttaggagaggaaccggctaggggctggccctcacttacctctctcttctcacccttgttcccagaaaaaggc

SEQ ID NO: 409402 - DNA, 201 bp, Homo sapiens
ttgagcatgggaggtcaaggctgcagcaagctacgattgctctattgcactccagcctggacaacagagcaggaccgtgtctcaaaaaaaaaaaaaaaaaataagtaaaaccacgtcaaataagaaatgtatgtagaattaaaagggaagaaaagatcagaggaaacctagaagagggtgagggaagaggaacacctctgg

SEQ ID NO: 409403 - DNA, 201 bp, Homo sapiens
cttgagcatgggaggtcaaggctgcagcaagctacgattgctctattgcactccagcctggacaacagagcaggaccgtgtctcaaaaaaaaaaaaaaaaaataagtaaaaccacgtcaaataagaaatgtatgtagaattaaaagggaagaaaagatcagaggaaacctagaagagggtgagggaagaggaacacctctg

SEQ ID NO: 409404 - DNA, 201 bp, Homo sapiens
gcttgagcatgggaggtcaaggctgcagcaagctacgattgctctattgcactccagcctggacaacagagcaggaccgtgtctcaaaaaaaaaaaaaaaaaataagtaaaaccacgtcaaataagaaatgtatgtagaattaaaagggaagaaaagatcagaggaaacctagaagagggtgagggaagaggaacacctct

SEQ ID NO: 409405 - DNA, 201 bp, Homo sapiens
tgcttgagcatgggaggtcaaggctgcagcaagctacgattgctctattgcactccagcctggacaacagagcaggaccgtgtctcaaaaaaaaaaaaaaaaaataagtaaaaccacgtcaaataagaaatgtatgtagaattaaaagggaagaaaagatcagaggaaacctagaagagggtgagggaagaggaacacctc

SEQ ID NO: 409406 - DNA, 201 bp, Homo sapiens
agggaagaaaagatcagaggaaacctagaagagggtgagggaagaggaacacctctggtccatggttgggcaacctcctgctccacactgaggtaggtctytcaccactccaggaccccgagaagggaccagtccccactttccagccgttccagaggagcatatctgctgatgatgacctgcaagaggtaaaggctccta

SEQ ID NO: 409407 - DNA, 201 bp, Homo sapiens
attacttcaggggaacctgaggagagttgtgttctttattcccttgtatctccctaccgatcatttggtagaaaacatcttccaggttttccatatccttractttgaacacatgttgctcattgtctttcttggaagccaaagcattgatgttcacttggttcaccaaaggcccgaccccaaacacatagacatctgagg

SEQ ID NO: 409408 - DNA, 201 bp, Homo sapiens
aggaaaccccttatagaaaacccaaatcctcatcttggagtttctccttcagccagggcagcacttgaaagaggttgatgtgaaagtctcgggcgtgagcrggtacctgcttttgccgcttctggtttttgcagacatccactactccccagctgattacaccaacctgcagaggcagtggggtgccatggatcattcagt

SEQ ID NO: 409409 - DNA, 201 bp, Homo sapiens
cccaatgctggtctcagtaaaacactgaggtggaagcttacacatctccctcagcctctggtttttcagcacttgggattggggttaaacctttaaaaacrgctgtcaggtttgatctcagtgtaacaacatggccagtgcctgttccccactcccttgccccaaaaggatctggaacacaggtgttgtcgcagctgtttt

SEQ ID NO: 409410 - DNA, 201 bp, Homo sapiens
ccagaaggacacacgtactccagtgcctggccctcttggagaagtcggaaggagccgcctttgatctctaccccctccagagagcaggatccctggggccrggccaaagaccatggagtggtggtcacacctgaagagaaaggctgatgaagcctggccccaaaaggccaaggagggatgctggagacagcaggaagggaa

SEQ ID NO: 409411 - DNA, 201 bp, Homo sapiens
tgggacaggagagaggtcccttctgaccatcagtcatgaggatgatgacatggcgggtgcggttccagccttcaggagggacgtcatctggccagctcatmatgctgtacactgcctggagggccttcttggtgttagtccctgacttcaacttgtggtctgtggagagggaagagaccatcacctcacctggtcttccaa

SEQ ID NO: 409412 - DNA, 201 bp, Homo sapiens
gtgcccactcctcgggctgggcgccgtcagggagacagcaatgtagggggaggggatgcttctcacctccgttgtcacagatcgctgtctgcccactccaycggccattcacttggcaggtgcgattggcagagccccggagagtgtaaccgtcatagcagtggaaagagatctcatcactcacattgtagtagggagacc

SEQ ID NO: 409413 - DNA, 201 bp, Homo sapiens
acagcagctgcctggcagcccggaagtgcggcaagtagtcgctgcgaagtaagccccgccccggaacgggcggaagtagaggcaacttccggtacagcccygccgagagcgtgaactatcgctgcggaggggcagacctggaccggtggaaggccgggcggaagtgcgcgcctggggccgccttggttaccgcgttttccg

SEQ ID NO: 409414 - DNA, 201 bp, Homo sapiens; identical to SEQ ID NO: 92061

SEQ ID NO: 409415 - DNA, 201 bp, Homo sapiens
ctgtacagctcaaagtcaacatagcccgaaaacagcccatgctggatgccgctactggcaagtctgtctggggctccctcggtaagaatgggattcttccyttcccatcctctcccccacaggccattccttttggttcccccacacatccttgggtttcctagagatgatcgaggtcagagtgtgtgcggaggctatggg

SEQ ID NO: 409416 - DNA, 201 bp, Homo sapiens
gttggaatgtagatgggtttggggaaaaatatgcatactcaagcactggcaaattgctgtaccattctgagtttcacctctcatgtataaaatgaaaaaaytagacgactcctgaattctccattttacaaattctgtggttctaatccaccttggattggagctcttggaatatgttgccctaagggatggaaagggctg

SEQ ID NO: 409417 - DNA, 201 bp, Homo sapiens
gccagaaggacacacgtactccagtgcctggccctcttggagaagtcggaaggagccgcctttgatctctaccccctccagagagcaggatccctggggcyaggccaaagaccatggagtggtggtcacacctgaagagaaaggctgatgaagcctggccccaaaaggccaaggagggatgctggagacagcaggaaggga

SEQ ID NO: 409418 - DNA, 201 bp, Homo sapiens
gggatctggacgctctcacctgatagtctggccatatttcagcttattcttgagcttgatcagggcaacgtcatagtcataaaattcaggaattcctgctkcttttttcccattaatgttgtagttggggtgaaataggactacttctatctccaggtcccgcttctcccctcctgaagtaggagagtaggtaccacctct

SEQ ID NO: 409419 - DNA, 201 bp, Homo sapiens
ttgaacccaggaggcagaggttgcagtgagtggagatcacaccactgcactccagcctggacgacagagcaagattctgtctcaaaaacaaaacaaaacaagccacaatggcaggtgcggcaatggctcattcctggttaatttcagcactttaggaggccgaggtaggaggattgcttgagcccaggagtttgagaccag

SEQ ID NO: 409420 - DNA, 201 bp, Homo sapiens
cttgaacccaggaggcagaggttgcagtgagtggagatcacaccactgcactccagcctggacgacagagcaagattctgtctcaaaaacaaaacaaaacaagccacaatggcaggtgcggcaatggctcattcctggttaatttcagcactttaggaggccgaggtaggaggattgcttgagcccaggagtttgagacca

SEQ ID NO: 409421 - DNA, 201 bp, Homo sapiens
acttgaacccaggaggcagaggttgcagtgagtggagatcacaccactgcactccagcctggacgacagagcaagattctgtctcaaaaacaaaacaaaacaagccacaatggcaggtgcggcaatggctcattcctggttaatttcagcactttaggaggccgaggtaggaggattgcttgagcccaggagtttgagacc

SEQ ID NO: 409422 - DNA, 201 bp, Homo sapiens
cacttgaacccaggaggcagaggttgcagtgagtggagatcacaccactgcactccagcctggacgacagagcaagattctgtctcaaaaacaaaacaaaacaagccacaatggcaggtgcggcaatggctcattcctggttaatttcagcactttaggaggccgaggtaggaggattgcttgagcccaggagtttgagac

SEQ ID NO: 409423 - DNA, 201 bp, Homo sapiens
tcacttgaacccaggaggcagaggttgcagtgagtggagatcacaccactgcactccagcctggacgacagagcaagattctgtctcaaaaacaaaacaaaacaagccacaatggcaggtgcggcaatggctcattcctggttaatttcagcactttaggaggccgaggtaggaggattgcttgagcccaggagtttgaga

SEQ ID NO: 409424 - DNA, 201 bp, Homo sapiens
aaagtcaacatagcccgaaaacagcccatgctggatgccgctactggcaagtctgtctggggctccctcggtaagaatgggattcttcctttcccatcctytcccccacaggccattccttttggttcccccacacatccttgggtttcctagagatgatcgaggtcagagtgtgtgcggaggctatgggaatgggaagga

SEQ ID NO: 409425 - DNA, 201 bp, Homo sapiens
gcagatcacttgagattaggagtttaagaccaacctggccaacatggtaaaaccccgtctctactaaaaatacaaaaatcagcagggtgtgaggccgggcrcggtggctcacacctgtaatcccagcactttgggaggccgaggcaggcggatcacgaggtcaggagatcgagaccatcctggctaacaaggtgaaacccc

SEQ ID NO: 409426 - DNA, 201 bp, Homo sapiens
accgcagccatgagaggaaccgggacagagaccgagatcgggagcgggatcgagaccgggatcgagacagagacagagagcgggacagggatcgggatcgrgatcgagatcgagaccgggaacgggacagggatcgggagcgggatcgagaccgagaccgagagggtcctttccgcagtgagtgattttggctggaggtca

SEQ ID NO: 409427 - DNA, 201 bp, Homo sapiens
actacaccaattctgccacatgtttggactcaaaactctgacttccccactatttgcatagtcaaacctttgccaagtcttattgtttcttcttttgaagkaatttttcctgtttattcttcactgtgcattcccccgagcagggctttattgacattcatgtgggccattgtaatggtctctcaacaaatttctcagtct

SEQ ID NO: 409428 - DNA, 201 bp, Homo sapiens
tctggacgctctcacctgatagtctggccatatttcagcttattcttgagcttgatcagggcaacgtcatagtcataaaattcaggaattcctgcttcttytttcccattaatgttgtagttggggtgaaataggactacttctatctccaggtcccgcttctcccctcctgaagtaggagagtaggtaccacctctttgt

SEQ ID NO: 409429 - DNA, 201 bp, Homo sapiens
cgacttctcttgtgaactatcaaggggccgccagaatcacctgcaaggagaggagaagctgtagagaaaaggactgttgggccttgggcacttgtagcacraccaaagagcattctctcacctctgcaagtattggggtcagcatagggactcactcctccagtacaaaggaaccgaggggtgaccacctctgagatgtcc

SEQ ID NO: 409430 - DNA, 201 bp, Homo sapiens
tcactgggagagagggaaggttagtgtgggggatgcacccatagagtgttctgcagcagttggaagcagtgggttagatgtggccacaggaacatggacaratgttgaaacactaggtggagaaaaagaagcaaaaaaaaatcagatatataaccactttttatatgaattataaactacaagctcacaaaagaagacatg

SEQ ID NO: 409431 - DNA, 201 bp, Homo sapiens; identical to SEQ ID NO: 92089

SEQ ID NO: 409432 - DNA, 201 bp, Homo sapiens
gtgggtggatcacaaggtcaagagatcgagaccatcctggccaacatggtgaaaccctgtctctactaaaaatacaaaaattagctgggcatggtggcagrtgcctgtagtcccagctacttgggaggctgaggcaggagaattgcttgaacccaggaggcagagattgcagtgagccaagatagcaccgctgcactccag

SEQ ID NO: 409433 - DNA, 201 bp, Homo sapiens
tttgcctggagagttcagtgagatcccataagtaacaactgggatggtgccttatgcctacaaagtaaggtgggcttggccagggctgggggtgtgtgtaygtagagcctttgctgatcctttctgttctcctctgtcccaggtcttgtttgccacagagacctttgccatgggagtaaacatgcctgctcgtacagtagt

SEQ ID NO: 409434 - DNA, 201 bp, Homo sapiens
acgatggcacccgacccccctaccctcgctagggtaaggacaaccgcggggtttgaacggcagagaaggcggtggagccagcgtagcgcccgcagagcaaygcaaagaggaagaacagagaaacggctatgagaaaaagggccgaagagtgagaagcagagggccttacccgagggggcggcaaccgggggccccacggtc

SEQ ID NO: 409435 - DNA, 201 bp, Homo sapiens
catggttgcagagctaggaccggatctgacgggagtaggcccagtccagaagactggctggggttcagtaggtcccaccctgatctcagtgacttctgtgrcctgactccaggggaagccgtcccagctgcagtcccagttccgcctcacgtacactatgatcctcaacttgctgcgagtggatgccctcagggtggagga

SEQ ID NO: 409436 - DNA, 201 bp, Homo sapiens
ctgttgtcatccttactttctgggtgggtccatggagaggtcaatgatgtttccaaaaggagagaaggccccacggagaagggtgggtgtcatgtcttctmcatatacatagagagtattccctttcctaggggctcgccgttcagggaatgaatccgaccctttgggagcacaaatcatagtcacaagacatagcccatg

SEQ ID NO: 409437 - DNA, 201 bp, Homo sapiens; identical to SEQ ID NO: 92092

SEQ ID NO: 409438 - DNA, 201 bp, Homo sapiens
attttccccacttggccagggcaggttgcgtcatcatagggccctcattttcccctcttgccctccttttcaccctctcccttcccatcaccacatcatgytcactccttcctcccaccaccccaagaagtctgctctgatcgcttgacttggttgcccctctctactggtgagctctgcatggttgcttcctgattcctg

SEQ ID NO: 409439 - DNA, 201 bp, Homo sapiens; identical to SEQ ID NO: 92094

SEQ ID NO: 409440 - DNA, 201 bp, Homo sapiens
aacagttggggagaaggggaggtggtcagagacaagctcagcctcattggggctctgatctcttgccttaggtcttgctggagaacacaaatctctcggcyacaacctccttgtctcttcgccggcctccagggccagcctcccagtccttatggggaaatccaactcagtatcccttctggccaggtgactcttgtggag

SEQ ID NO: 409441 - DNA, 201 bp, Homo sapiens; identical to SEQ ID NO: 92096

SEQ ID NO: 409442 - DNA, 201 bp, Homo sapiens
gcctttttctgggaacaagggtgagaagagagaggtaagtgagggccagcccctagccggttcctctcctaaggcccctgggcacatcactccagggaccrtctttcttgatgccctcagagtggtacactgatgtgctctgcctcttgcctctggtcccctagatcatgtatgatgctggaaattcctaatctaaccaaa

SEQ ID NO: 409443 - DNA, 201 bp, Homo sapiens
gtgggtggggcagtggttggggcaggggggctaggggacagcagtgtgtccaatgcccaccctttttcttgcaggtgctccgaaccctgggttacgtggaygaggcgggcactgtgaagctggcagggcgggtggcttgtgccatgagcagccatgagttgctcctcactgagctcatgtttgacaatgcactgagcaccc

SEQ ID NO: 409444 - DNA, 201 bp, Homo sapiens
tgtctcttcgccggcctccagggccagcctcccagtccttatggggaaatccaactcagtatcccttctggccaggtgactcttgtggagatgggatggtmgaagagggtgtctttaatctccagggaagggttccccacctatctcgtattaccctcatcccatgaatccctgtctgtcctgtctcttcccaggggggat

SEQ ID NO: 409445 - DNA, 201 bp, Homo sapiens
cggatctgacgggagtaggcccagtccagaagactggctggggttcagtaggtcccaccctgatctcagtgacttctgtgacctgactccaggggaagccrtcccagctgcagtcccagttccgcctcacgtacactatgatcctcaacttgctgcgagtggatgccctcagggtggaggacatgatgaagaggagcttct

SEQ ID NO: 409446 - DNA, 201 bp, Homo sapiens
ggtgggagggagcaagccctctctccattttccccacttggccagggcaggttgcgtcatcatagggccctcattttcccctcttgccctccttttcaccctctcccttcccatcaccacatcatgctcactccttcctcccaccaccccaagaagtctgctctgatcgcttgacttggttgcccctctctactggtgagc

SEQ ID NO: 409447 - DNA, 201 bp, Homo sapiens
cctgggagccccagtcccatccgacctacaggcccaaagacacccaaccacaggccagatactgggttacaaagaggtaggaggtcaggggtcatgagaamcagttggggagaaggggaggtggtcagagacaagctcagcctcattggggctctgatctcttgccttaggtcttgctggagaacacaaatctctcggcta

SEQ ID NO: 409448 - DNA, 201 bp, Homo sapiens
cttgtcccccaggggttttgacttgagctttgagcactgccccagttaacactagctcacctctcattggttcaggaactcaacctctgctccttcccctyccccttccttctccaggaccgcggagtgtacctgtccctcctggcctccctccgcacacgtgcccagttgcccgtggtggtgttcaccttctcccggggc

SEQ ID NO: 409449 - DNA, 201 bp, Homo sapiens
gtgggagggagcaagccctctctccattttccccacttggccagggcaggttgcgtcatcatagggccctcattttcccctcttgccctccttttcaccctctcccttcccatcaccacatcatgctcactccttcctcccaccaccccaagaagtctgctctgatcgcttgacttggttgcccctctctactggtgagct

SEQ ID NO: 409450 - DNA, 201 bp, Homo sapiens
gtagaggtgggtggggcagtggttggggcaggggggctaggggacagcagtgtgtccaatgcccaccctttttcttgcaggtgctccgaaccctgggttaygtggacgaggcgggcactgtgaagctggcagggcgggtggcttgtgccatgagcagccatgagttgctcctcactgagctcatgtttgacaatgcactga

SEQ ID NO: 409451 - DNA, 201 bp, Homo sapiens
ctgggagccccagtcccatccgacctacaggcccaaagacacccaaccacaggccagatactgggttacaaagaggtaggaggtcaggggtcatgagaaamagttggggagaaggggaggtggtcagagacaagctcagcctcattggggctctgatctcttgccttaggtcttgctggagaacacaaatctctcggctac

SEQ ID NO: 409452 - DNA, 201 bp, Homo sapiens
cctcttgccctccttttcaccctctcccttcccatcaccacatcatgctcactccttcctcccaccaccccaagaagtctgctctgatcgcttgacttggktgcccctctctactggtgagctctgcatggttgcttcctgattcctgcccaagggtgggtatctggtctctgcctttgatgtctactcatcacacccccc

SEQ ID NO: 409453 - DNA, 201 bp, Homo sapiens
caggtgaccccctccagccctgtaagtgccccaaggatggaaaatggctgccttcttgatctggtccttccctgtcctggagcaggaaggcaggccttaayctctccttctttcctgcagggaatagaacgtgtccgggctgtggccaagcggattggtgaggtccaggtggcttgtggcctgaaccagacggtggaggaa

SEQ ID NO: 409454 - DNA, 201 bp, Homo sapiens; identical to SEQ ID NO: 92104

SEQ ID NO: 409455 - DNA, 201 bp, Homo sapiens
gcctgacatgactggccaactggtcgacctgcctgaatattacagctggggggaggaactgacagagacccagcacatgatccaggtgagcaagtgtgagwgctgaggaggtgataggagaagggaagagaagatcgtgttactctaggtgctactaaacttagtccaagtgtctgtccctgtgatgcctcctcccatctg

SEQ ID NO: 409456 - DNA, 201 bp, Homo sapiens
ttgcccctctctactggtgagctctgcatggttgcttcctgattcctgcccaagggtgggtatctggtctctgcctttgatgtctactcatcacacccccstctcctggcctctctgaccacccccaggtctcctcgaactccaccagcagagtattcacaaccctggtcttgtgtgataagcccttgtcccaggacccac

SEQ ID NO: 409457 - DNA, 201 bp, Homo sapiens; identical to SEQ ID NO: 92106

SEQ ID NO: 409458 - DNA, 201 bp, Homo sapiens; identical to SEQ ID NO: 92107

SEQ ID NO: 409459 - DNA, 201 bp, Homo sapiens
atcagtcattgctgctgcttcctgagtaccatcagcgagtagaggtgggtggggcagtggttggggcaggggggctaggggacagcagtgtgtccaatgcycaccctttttcttgcaggtgctccgaaccctgggttacgtggacgaggcgggcactgtgaagctggcagggcgggtggcttgtgccatgagcagccatga

SEQ ID NO: 409460 - DNA, 201 bp, Homo sapiens
tttatcctctttccttacctaatgcctctcatcttgcccttgtttcagcttccccatggcctccctccttgtgccccagatctgcagcaagaagcagaacrgttgtttctgtcatccccagcctggctgcctctgcatggtgtggagcactcagcccggtgaggagtctggaggggcttagactagggtgatgggttcctg

SEQ ID NO: 409461 - DNA, 201 bp, Homo sapiens; identical to SEQ ID NO: 92109

SEQ ID NO: 409462 - DNA, 201 bp, Homo sapiens; identical to SEQ ID NO: 92085

SEQ ID NO: 409463 - DNA, 201 bp, Homo sapiens
cagtatcccttctggccaggtgactcttgtggagatgggatggtagaagagggtgtctttaatctccagggaagggttccccacctatctcgtattaccckcatcccatgaatccctgtctgtcctgtctcttcccaggggggatggatgaacccaccataacagatctgaacacacgggaggaggctgaggaggagatag

SEQ ID NO: 409464 - DNA, 201 bp, Homo sapiens; identical to SEQ ID NO: 92086

SEQ ID NO: 409465 - DNA, 201 bp, Homo sapiens
tggggcagtggttggggcaggggggctaggggacagcagtgtgtccaatgcccaccctttttcttgcaggtgctccgaaccctgggttacgtggacgaggygggcactgtgaagctggcagggcgggtggcttgtgccatgagcagccatgagttgctcctcactgagctcatgtttgacaatgcactgagcaccctgcgg

SEQ ID NO: 409466 - DNA, 201 bp, Homo sapiens
cccagtcccatccgacctacaggcccaaagacacccaaccacaggccagatactgggttacaaagaggtaggaggtcaggggtcatgagaaacagttgggkagaaggggaggtggtcagagacaagctcagcctcattggggctctgatctcttgccttaggtcttgctggagaacacaaatctctcggctacaacctcct

SEQ ID NO: 409467 - DNA, 201 bp, Homo sapiens
ttcagaaacaggccatcctgcacttggaacggcatgactctgtctttgtcgcagctcacacatctgcaggaaaaacagttgtggctgaatatgccattgcyctggcccagaaacacatgacacggtatgagttcctttgccaacctcccccttcaccagccagccccattttctcctgcatcctttgaaaatctcatctct

SEQ ID NO: 409468 - DNA, 201 bp, Homo sapiens
caaggccccgctcctttcttcagctcctgtctatttctctctcccatagtgggcatttgagccagatgtgtttcagaaacaggccatcctgcacttggaayggcatgactctgtctttgtcgcagctcacacatctgcaggaaaaacagttgtggctgaatatgccattgccctggcccagaaacacatgacacggtatga

SEQ ID NO: 409469 - DNA, 201 bp, Homo sapiens
cccatagcctccgcacacactctgacctcgatcatctctaggaaacccaaggatgtgtgggggaaccaaaaggaatggcctgtgggggagaggatgggaarggaagaatcccattcttaccgagggagccccagacagacttgccagtagcggcatccagcatgggctgttttcgggctatgttgactttgagctgtacag

SEQ ID NO: 409470 - DNA, 201 bp, Homo sapiens
acaagagcccagagagaaatgaaaagacatggtggggagaaagtttagaagaatgacctgggttagtttaggaaggggttggggacagaatttttctgggrttatatcatgcaggagaatgtaagggcagtttgggtgaagaagaggagcacctgagcttctggggcatgcttccacgagggctccatgtgggagaggaag

SEQ ID NO: 409471 - DNA, 201 bp, Homo sapiens
catgtttttgagaaaattagaaaaagatattctgtccataacaacctttactgtcatctgctgggaaatttctacaacaacctttactgtcatctgttggraaagtgtcatagcaaacatccctatctacagcatctgtcctgtaaatggtatcttttaggtttatataatgtacacaatttgttcaccagtgtgcagtga

SEQ ID NO: 409472 - DNA, 201 bp, Homo sapiens
cttctcctaaggaacagagatggacatgacaaggttgaccttgttggcttgctcctcagattgtccaactccagctcctggactactaagccttagctgtmtgttggagcctctggatttgggtgggggtgacgaggatgagaatgaggcagtgggacagccaggaggtcccagaggggacactgtttcagcctctccctg

SEQ ID NO: 409473 - DNA, 201 bp, Homo sapiens
accagaagttccgggacttccgaaacacattcggggatgtggggctgctcaccggggatgtacagctgcatccggaggcctcctgcctcatcatgaccacrgagatccttcggtgagagatggacactcaatacaggggagttttggctgggaagatgtggccgttgtggagagtgtgctgtctgaggagtgggtggagac

SEQ ID NO: 409474 - DNA, 201 bp, Homo sapiens
tcctggcctctctgaccacccccaggtctcctcgaactccaccagcagagtattcacaaccctggtcttgtgtgataagcccttgtcccaggacccacagracagggggccagccactgcagaggtgccctatccagatgacctcgtgggattcaagctgttcctgcctgaaggtgagagtgtggcagatgtctgttttct

SEQ ID NO: 409475 - DNA, 201 bp, Homo sapiens
agtaggatctagcttaaccttgttcatctgtgcctgtactcctgtccatcccagcctgaaggggtgctggacagattacagcccagtgtacctgcagtacrtgtgaggacagagcagaaagggctggggatatttttgctttgagagctgctctttcaaatgtggcatttctccgtggagctcccttctgtatccaagcac

SEQ ID NO: 409476 - DNA, 201 bp, Homo sapiens
tggagcaggaaggcaggccttaacctctccttctttcctgcagggaatagaacgtgtccgggctgtggccaagcggattggtgaggtccaggtggcttgtsgcctgaaccagacggtggaggaatttgtgggggagctgaattttgggctggttgaggttgtatatgagtgggcccggggcatggtgagtacctgaggttt

SEQ ID NO: 409477 - DNA, 201 bp, Homo sapiens
taggtcttgctggagaacacaaatctctcggctacaacctccttgtctcttcgccggcctccagggccagcctcccagtccttatggggaaatccaactcrgtatcccttctggccaggtgactcttgtggagatgggatggtagaagagggtgtctttaatctccagggaagggttccccacctatctcgtattaccctc

SEQ ID NO: 409478 - DNA, 201 bp, Homo sapiens
catagcaaacatccctatctacagcatctgtcctgtaaatggtatcttttaggtttatataatgtacacaatttgttcaccagtgtgcagtgacctgattycatgtccctatcctacagatcttcttactattccacctggtttcaagaaaggcatggactttgcaccaaaaggttagttttagtttttgagtggggtgta

SEQ ID NO: 409479 - DNA, 201 bp, Homo sapiens
gagcaggaaggcaggccttaacctctccttctttcctgcagggaatagaacgtgtccgggctgtggccaagcggattggtgaggtccaggtggcttgtggsctgaaccagacggtggaggaatttgtgggggagctgaattttgggctggttgaggttgtatatgagtgggcccggggcatggtgagtacctgaggtttgg

SEQ ID NO: 409480 - DNA, 201 bp, Homo sapiens
tcatgaccacagagatccttcggtgagagatggacactcaatacaggggagttttggctgggaagatgtggccgttgtggagagtgtgctgtctgaggagkgggtggagacgagccactggggagtcaatccttggcctcttctccccagctccatgctgtacagtggctcagatgttattcgggacctggagtgggtcat

SEQ ID NO: 409481 - DNA, 201 bp, Homo sapiens
ggtgagagatggacactcaatacaggggagttttggctgggaagatgtggccgttgtggagagtgtgctgtctgaggagtgggtggagacgagccactggrgagtcaatccttggcctcttctccccagctccatgctgtacagtggctcagatgttattcgggacctggagtgggtcatctttgatgaggttcactatat

SEQ ID NO: 409482 - DNA, 201 bp, Homo sapiens
tgcatgttgaaatgggatgagatgttgggggatagccttccattctgggtctcagaaaagactgggtaaagttggaggggtagggaagggggtggggatgygggttccttcccacgttcccacccctgacctgcttccctctcctttcttcaggcggctgaagcgtcgtcagatctatgtgattagcactgtaacccgccc

SEQ ID NO: 409483 - DNA, 201 bp, Homo sapiens
  misc_feature (1)...(201): n = A,T,C or G
caaggagatcgtggagatgctcttcagccgtggcctggtcaaggtgcatgtggtggtggaaagggactcctcagggtgcttgttgcccacttaggggctgnccagagggcagaggggcagaggtttaggcaggccagtgctgtggttaagaatctgggctctggattcagactacctgggtttgaatcccaggtacaccat

SEQ ID NO: 409484 - DNA, 201 bp, Homo sapiens
ctcccatgtgaatatggagctagatggggcctttgagtccatttatttcagtttgctcccttatgttacagaagaggtgagcaagtggtttgtccaaggcyccatggttgcagagctaggaccggatctgacgggagtaggcccagtccagaagactggctggggttcagtaggtcccaccctgatctcagtgacttctgt

SEQ ID NO: 409485 - DNA, 201 bp, Homo sapiens
ggcagatgtctgttttctgccagcagtataagcaggatgcctgggtccatggcaatgtctgccctgctctccccttttcacagggccttgtgaccacaccrtggtcaagctccagccaggagatatggctgccatcaccaccaaggtgctccgggtgaatggggagaagatcttggaggacttcagcaagaggcagcagcc

SEQ ID NO: 409486 - DNA, 201 bp, Homo sapiens
tgaaggttggtggttctgtgtagtggaggcaagaaagagccttgccaccaggatgtgggctggctaggatgggtctgaggggaagaaagggacatcttttkggaggagtgctaattgagagccctctggttgtatctttatcactgctacccctgactcttccaggaagcgtccacagctgtatccaccccagaggcccca

SEQ ID NO: 409487 - DNA, 201 bp, Homo sapiens; identical to SEQ ID NO: 92105

SEQ ID NO: 409488 - DNA, 201 bp, Homo sapiens
aggtgagaactgggagggttttgtacctgccagcacctgtttttcctcctatcttttttttccccttgtcccccaggggttttgacttgagctttgagcaytgccccagttaacactagctcacctctcattggttcaggaactcaacctctgctccttccccttccccttccttctccaggaccgcggagtgtacctgtc

SEQ ID NO: 409489 - DNA, 201 bp, Homo sapiens
ccgcagggtgctcagtgcattgtcaaacatgagctcagtgaggagcaactcatggctgctcatggcacaagccacccgccctgccagcttcacagtgcccrcctcgtccacgtaacccagggttcggagcacctgcaagaaaaagggtgggcattggacacactgctgtcccctagcccccctgccccaaccactgcccca

SEQ ID NO: 409490 - DNA, 201 bp, Homo sapiens
catgtcttcttttgtgagcttgtagtttataattcatataaaaagtggttatatatctgatttttttttgcttctttttctccacctagtgtttcaacatytgtccatgttcctgtggccacatctaacccactgcttccaactgctgcagaacactctatgggtgcatcccccacactaaccttccctctctcccagtga

SEQ ID NO: 409491 - DNA, 201 bp, Homo sapiens; identical to SEQ ID NO: 92208

SEQ ID NO: 409492 - DNA, 201 bp, Homo sapiens; identical to SEQ ID NO: 92199

SEQ ID NO: 409493 - DNA, 201 bp, Homo sapiens; identical to SEQ ID NO: 92210

SEQ ID NO: 409494 - DNA, 201 bp, Homo sapiens
tcctccaccctgagggcatccactcgcagcaagttgaggatcatagtgtacgtgaggcggaactgggactgcagctgggacggcttcccctggagtcaggycacagaagtcactgagatcagggtgggacctactgaaccccagccagtcttctggactgggcctactcccgtcagatccggtcctagctctgcaaccatg

SEQ ID NO: 409495 - DNA, 201 bp, Homo sapiens; identical to SEQ ID NO: 92211

SEQ ID NO: 409496 - DNA, 201 bp, Homo sapiens
tcactattaaccttctacctgctaaatccaatggacagatttcagttctgggtttttttgttgttgttttcatttttttagagacagggtctccctctgtyacccagcctggagtgcagtcgtgcaatcatagctcactgcagcctcaaattcctgggctcaagcactccttctgcctcaacttcccaaacagctagaaca

SEQ ID NO: 409497 - DNA, 201 bp, Homo sapiens; identical to SEQ ID NO: 92202

SEQ ID NO: 409498 - DNA, 201 bp, Homo sapiens
ctcttactacaacctccacttcacagtctcccttaggctgggggagccccctcactacaaccccaccacttcatggtctccctcaggctggaggaaactcscagaccactgcccctccctgcctctacgtgcccctctggaggagaagggcctccctagcatctctgacttgaattttggctgctgcctcttgctgaagtc

SEQ ID NO: 409499 - DNA, 201 bp, Homo sapiens
gggtgctcagtgcattgtcaaacatgagctcagtgaggagcaactcatggctgctcatggcacaagccacccgccctgccagcttcacagtgcccgcctcrtccacgtaacccagggttcggagcacctgcaagaaaaagggtgggcattggacacactgctgtcccctagcccccctgccccaaccactgccccacccac

SEQ ID NO: 409500 - DNA, 201 bp, Homo sapiens; identical to SEQ ID NO: 92194

SEQ ID NO: 409501 - DNA, 201 bp, Homo sapiens
agaaaacagacatctgccacactctcaccttcaggcaggaacagcttgaatcccacgaggtcatctggatagggcacctctgcagtggctggccccctgtyctgtgggtcctgggacaagggcttatcacacaagaccagggttgtgaatactctgctggtggagttcgaggagacctgggggtggtcagagaggccagga

SEQ ID NO: 409502 - DNA, 201 bp, Homo sapiens
tcagaccttcagcctgtaactcctgcctctcaggggtccaggctggctggcagaggccatagtgacgtggcgggggcacctgacaaaactgctgacgacaycgtatgagcggcaggagggctggcagctggcagcctcccggttccagggaacactatacctgagtgaagtggagacaccgaacgctcgggcccagaggct

SEQ ID NO: 409503 - DNA, 201 bp, Homo sapiens
agaagctcctcttcatcatgtcctccaccctgagggcatccactcgcagcaagttgaggatcatagtgtacgtgaggcggaactgggactgcagctgggayggcttcccctggagtcaggtcacagaagtcactgagatcagggtgggacctactgaaccccagccagtcttctggactgggcctactcccgtcagatccg

SEQ ID NO: 409504 - DNA, 201 bp, Homo sapiens
aaacctcaggtactcaccatgccccgggcccactcatatacaacctcaaccagcccaaaattcagctcccccacaaattcctccaccgtctggttcaggcsacaagccacctggacctcaccaatccgcttggccacagcccggacacgttctattccctgcaggaaagaaggagaggttaaggcctgccttcctgctcca

SEQ ID NO: 409505 - DNA, 201 bp, Homo sapiens; identical to SEQ ID NO: 92214

SEQ ID NO: 409506 - DNA, 201 bp, Homo sapiens; identical to SEQ ID NO: 92215

SEQ ID NO: 409507 - DNA, 201 bp, Homo sapiens
cagccgcgcgcgccgaccctgggcagataaatcggctcacggacagggaactggggcggggacgcggttctaacaaaactctcggctaccggaagcgaggmcccacccccggggttgccatggttacctggctcaccccgaagaggatccgactccacaggccctcgcttccgccgcctcttaactccaaaggtctccggg

SEQ ID NO: 409508 - DNA, 201 bp, Homo sapiens
ccaaacctcaggtactcaccatgccccgggcccactcatatacaacctcaaccagcccaaaattcagctcccccacaaattcctccaccgtctggttcagsccacaagccacctggacctcaccaatccgcttggccacagcccggacacgttctattccctgcaggaaagaaggagaggttaaggcctgccttcctgctc

SEQ ID NO: 409509 - DNA, 201 bp, Homo sapiens; identical to SEQ ID NO: 92216

SEQ ID NO: 409510 - DNA, 201 bp, Homo sapiens
tcagtgcattgtcaaacatgagctcagtgaggagcaactcatggctgctcatggcacaagccacccgccctgccagcttcacagtgcccgcctcgtccacrtaacccagggttcggagcacctgcaagaaaaagggtgggcattggacacactgctgtcccctagcccccctgccccaaccactgccccacccacctctac

SEQ ID NO: 409511 - DNA, 201 bp, Homo sapiens; identical to SEQ ID NO: 92217

SEQ ID NO: 409512 - DNA, 201 bp, Homo sapiens
ttcctccaccgtctggttcaggccacaagccacctggacctcaccaatccgcttggccacagcccggacacgttctattccctgcaggaaagaaggagagrttaaggcctgccttcctgctccaggacagggaaggaccagatcaagaaggcagccattttccatccttggggcacttacagggctggagggggtcacctg

SEQ ID NO: 409513 - DNA, 201 bp, Homo sapiens
ctggaatccctctgtgtgcatgaacttctgtgccgccttccttagctttgcccagagcacggttgtccaggatgaccccaggtgaggcattcagctctgtmcctcccctctggatcccaggatccagcctctggccctcaactgatgcctccatctgccccccaggctcgttcatctcttctcttgggagcctggcggccc

SEQ ID NO: 409514 - DNA, 201 bp, Homo sapiens; identical to SEQ ID NO: 92218

SEQ ID NO: 409515 - DNA, 201 bp, Homo sapiens; identical to SEQ ID NO: 92219

SEQ ID NO: 409516 - DNA, 201 bp, Homo sapiens
tcctctccctccctactgcactgacctaatttaggccttcaccacttctcagatgcagtatcttcttagctgacctccctgcctcatccactatctccaayacaccattccctctctctatgatattctctaccagcccatcgcctcagtgtaagatggaaacaacactgatgtacaaggcctgtcatgatctgacgtctg

SEQ ID NO: 409517 - DNA, 201 bp, Homo sapiens; identical to SEQ ID NO: 92220

SEQ ID NO: 409518 - DNA, 201 bp, Homo sapiens; identical to SEQ ID NO: 92188

SEQ ID NO: 409519 - DNA, 201 bp, Homo sapiens; identical to SEQ ID NO: 92191

SEQ ID NO: 409520 - DNA, 201 bp, Homo sapiens
ggctgctgcctcttgctgaagtcctccaagatcttctccccattcacccggagcaccttggtggtgatggcagccatatctcctggctggagcttgaccayggtgtggtcacaaggccctgtgaaaaggggagagcagggcagacattgccatggacccaggcatcctgcttatactgctggcagaaaacagacatctgcc

SEQ ID NO: 409521 - DNA, 201 bp, Homo sapiens; identical to SEQ ID NO: 92192

SEQ ID NO: 409522 - DNA, 201 bp, Homo sapiens
acctcccatcaccccccaagactccctctcccaaatagtaatgctttagagggaggcagtcatatctctgtgtgcagataataaaagcatatttctaagargttctctcgctgtcttcttagctgagtcatccctgtccagcaactcaagcacacaacagtgctttgctgttttatcatcatgtttttacatggggcattc

SEQ ID NO: 409523 - DNA, 201 bp, Homo sapiens
tcatccctgtccagcaactcaagcacacaacagtgctttgctgttttatcatcatgtttttacatggggcattcactgggtgtagaggctggccgcaaatmcgatgtcccgccgtagcaaggtagccgctgtctccatcttggcacccagcacaggctctcctaccaggcgggctgccccccgcagtgagcgacacatctc

SEQ ID NO: 409524 - DNA, 201 bp, Homo sapiens
ggacctcccatcaccccccaagactccctctcccaaatagtaatgctttagagggaggcagtcatatctctgtgtgcagataataaaagcatatttctaaraggttctctcgctgtcttcttagctgagtcatccctgtccagcaactcaagcacacaacagtgctttgctgttttatcatcatgtttttacatggggcat

SEQ ID NO: 409525 - DNA, 201 bp, Homo sapiens
tccctctcccaaatagtaatgctttagagggaggcagtcatatctctgtgtgcagataataaaagcatatttctaagaggttctctcgctgtcttcttagstgagtcatccctgtccagcaactcaagcacacaacagtgctttgctgttttatcatcatgtttttacatggggcattcactgggtgtagaggctggccgc

SEQ ID NO: 409526 - DNA, 201 bp, Homo sapiens
aaaccaaggtccagggaagctgtgagggtgcccatccccacctgcttctctcattcccctatggacacctcagctttggattcatgcaggtatagccatgwcctcagtctcacccctcactcagcctcccggcgcccctcccctcccaatcccacacgctactccttcctctgtggagagggataccacctgcgccttcct

SEQ ID NO: 409527 - DNA, 201 bp, Homo sapiens
gggctactggcaggtaaggaggaaggaggctgaggggagggggcccctgggagggagcctgccctgggttgctaaccatctcctctctgccaaaagcccargggacagggaatgactgtcctcacaaaaaatcagctactttgctgccatccttcacggtgacacccacggttacagagagcactggaacaaccagccaca

SEQ ID NO: 409528 - DNA, 201 bp, Homo sapiens
tatccttccgccaggtttctcctgccccagtgaccggtccatcttgctgcctctcatcatcggcctgatccttcttggcctcctcgccctggtgcttattrctttctgcatcatccggagacgcccatccgcctaccaggccctctgagcatttgcttcaaaccccagggcactgagggggttggggtgtggtgggggggt

SEQ ID NO: 409529 - DNA, 201 bp, Homo sapiens; identical to SEQ ID NO: 92250

SEQ ID NO: 409530 - DNA, 201 bp, Homo sapiens
cacctgcgccttcctcttcgccccacaggacctccagcagaaggttgtctacctgagctacatggcggtggagtacaatgtgtccttcccccacgcagcamgtaagtaacctccttccctttctcattgctaccactagacgccagggttcctgaaaggactaagctggggccagggaggtggataggatctgacccttcc

SEQ ID NO: 409531 - DNA, 201 bp, Homo sapiens
ggtggtattgtagccagcttatatttgcatctacagccatgtttctagtccagcttggtgtgcaatactagatgagttaataactggtccttgtttctgayctggttcccattgtgtaactgtgttgattgggaaggtagtttgtgagccatgaaatgcttggttcattggttgcttattgacctcattaacctaggactt

SEQ ID NO: 409532 - DNA, 201 bp, Homo sapiens
ttctcagagtgaacatgcctcgtagcttgggtcctatggcaggagtgcaataggacatggatatgcatcacctgttctataaaactggttgctggctgggygcggtggctcaactcgtataatcccaacactttgggaggccaaggcaggcagatctcttgagatcaggagttggagaccagcctggccaacatagtgaaa

SEQ ID NO: 409533 - DNA, 201 bp, Homo sapiens; identical to SEQ ID NO: 92243

SEQ ID NO: 409534 - DNA, 201 bp, Homo sapiens
cccctagagtaactggaatgagattgttgacagctttgatgacatgaacctctcggagtcccttctccgtggcatctacgcctatggttttgagaagcccyctgccatccagcagcgagccattctaccttgtatcaagggtgagacctctcagtcccagaagacattgtggactgtccctgacctgggtagagtggcatc

SEQ ID NO: 409535 - DNA, 201 bp, Homo sapiens
agctttaatttctttgcatcccctagagtaactggaatgagattgttgacagctttgatgacatgaacctctcggagtcccttctccgtggcatctacgcstatggttttgagaagccctctgccatccagcagcgagccattctaccttgtatcaagggtgagacctctcagtcccagaagacattgtggactgtccctg

SEQ ID NO: 409536 - DNA, 201 bp, Homo sapiens
cctgagccgctgcctgcatggggcaaatgcctcagttttatagaaactcctcctttgggtattttttgggagctggtgggagttggatctgggacagcagrttgatggcatcatgcaggccactcctgacagagcccggctgtcaggatttctgagtgcttcggtcgggcaggggacaaaacttatgctttaaaccaacag

SEQ ID NO: 409537 - DNA, 201 bp, Homo sapiens
ttcccagggctgttgtctgcctggcgggaaggtcctgggcaaaggatcagtctttgtactctgagagcagactacttggctcctctctgttttttatcagygaagttggatatatctctcccacatttccctaatcatatgctatatattggctttttttttcttctctagcccccaaatacatcaagatgtttgtactgg

SEQ ID NO: 409538 - DNA, 201 bp, Homo sapiens
atctgagcctctggcttccctgccagtgcagccctggcagtgtcctacttcccagggctgttgtctgcctggcgggaaggtcctgggcaaaggatcagtcyttgtactctgagagcagactacttggctcctctctgttttttatcagcgaagttggatatatctctcccacatttccctaatcatatgctatatattggc

SEQ ID NO: 409539 - DNA, 201 bp, Homo sapiens
tcagctgaatgtgagtttaataatagtgcatgccccaaagttgttggttaggaatcaatacatgaaaaacatttaagaatggtgccgggcacagtggtaaytgacatatgagcacctgcctctctctgctcagatacagaaggtggtcatggcactaggagactacatgggcgcctcctgtcacgcctgtatcgggggcac

SEQ ID NO: 409540 - DNA, 201 bp, Homo sapiens
accagcacgtcactgcaaatacctacctgccctatccttccgccaggtttctcctgccccagtgaccggtccatcttgctgcctctcatcatcggcctgayccttcttggcctcctcgccctggtgcttattgctttctgcatcatccggagacgcccatccgcctaccaggccctctgagcatttgcttcaaaccccagg

SEQ ID NO: 409541 - DNA, 201 bp, Homo sapiens
tgaccggtccatcttgctgcctctcatcatcggcctgatccttcttggcctcctcgccctggtgcttattgctttctgcatcatccggagacgcccatccrcctaccaggccctctgagcatttgcttcaaaccccagggcactgagggggttggggtgtggtgggggggtacccttatttcctcgacacgcaactggctc

SEQ ID NO: 409542 - DNA, 201 bp, Homo sapiens
cccttcctcactcctccagagtggacattctcggctcagaatgcatcccttcgagatctccaagcacccctggggcagagcttcagttgcagcaactcgascatcattctttcaccagctgtccacctcgacctgctctccctgaggctccaggctgctcagctgccccacacaggggtctttgggcaaagtaagacctac

SEQ ID NO: 409543 - DNA, 201 bp, Homo sapiens
ctcagccattcagcttcacccagcaggacatgcccaaacttcgtcggcagatctacaaggagctgtgtcactgcaaactcactgtgtgagcctcgtacccsagaccccaagcccataaatgggaagggagacatgggagtcccttcccaagaaactccagttcctttcctctcttgcctcttcccactcacttccctttgg

SEQ ID NO: 409544 - DNA, 201 bp, Homo sapiens
ttcccactcacttccctttggtttttcatatttaaatgtttcaatttcgtgtatttttttttctttgagagaatacttgttgatttctgatgtgcaggggrtggctacagaaaagcccctttcttcctctgtttgcaggggagtgtggccctgtggccctgggtggagcagtcatcctcccccttccccgtgcagggagca

SEQ ID NO: 409545 - DNA, 201 bp, Homo sapiens
ctatgacatattccaaaagctcaacagcaacacccaggtgagggcagtcttgcttgaatagctaatgattcttgaaaaatagtaagtgccaggggaaccawatactggattcttgagcctttttatgcatctgcttcagttttaggtgtggctagggaagggagcaggcctcaggaaggaaccagcactctaagactggcc

SEQ ID NO: 409546 - DNA, 201 bp, Homo sapiens
tgctctttaccacattcaactcctaatttatttgtttaggttatgatgtgattgctcaagcccaatctgggactgggaaaacggccacatttgccatatcrattctgcagcagattgaattagatctaaaagccacccaggccttggtcctagcacccactcgagaattggctcagcaggtaagagtggcttctattccct

SEQ ID NO: 409547 - DNA, 201 bp, Homo sapiens
gccgggcacagtggtaactgacatatgagcacctgcctctctctgctcagatacagaaggtggtcatggcactaggagactacatgggcgcctcctgtcaygcctgtatcgggggcaccaacgtgcgtgctgaggtgcagaaactgcagatggaagctccccacatcatcgtgggtacccctggccgtgtgtttgatatgc

SEQ ID NO: 409548 - DNA, 201 bp, Homo sapiens
cgccgcgggaaaagaacgggaggcggagtgtccgcagcgcgcacgcgcaacgaaagtcaatggcggtctggagagactggcggaagctagctttgcaatayggcggccgaggcggacggaccgcttaaacggctgctcgtgccgattcttttacctgagaaatgctacgaccaacttttcgttcagtgggacttgcttcac

SEQ ID NO: 409549 - DNA, 201 bp, Homo sapiens
gcccatccgcctaccaggccctctgagcatttgcttcaaaccccagggcactgagggggttggggtgtggtgggggggtacccttatttcctcgacacgcmactggctcaaagacaatgttattttccttccctttcttgaagaacaaaaagaaagccgggcatgacggctcatgcctgtaatcccagcactttgggaggc

SEQ ID NO: 409550 - DNA, 201 bp, Homo sapiens
cccatccgcctaccaggccctctgagcatttgcttcaaaccccagggcactgagggggttggggtgtggtgggggggtacccttatttcctcgacacgcarctggctcaaagacaatgttattttccttccctttcttgaagaacaaaaagaaagccgggcatgacggctcatgcctgtaatcccagcactttgggaggct

SEQ ID NO: 409551 - DNA, 201 bp, Homo sapiens
ggtattttttgggagctggtgggagttggatctgggacagcaggttgatggcatcatgcaggccactcctgacagagcccggctgtcaggatttctgagtrcttcggtcgggcaggggacaaaacttatgctttaaaccaacagatccagagacaatggccccgatgggatggagcccgaaggcgtcatcgaggtgagact

SEQ ID NO: 409552 - DNA, 201 bp, Homo sapiens
ctgcggatgggcaggtccaccttccttcgggggtgagcggcctgaggtatgggagggcgacgctacttcgcgacgggggcgggcgggatgtggattgttccatggaggggtgggagacgccgccgggtggtcgagggagcgagcacatggtggcctgaggcgttcccctcccccagtctgcttcgcttctaagtgttgtgc

SEQ ID NO: 409553 - DNA, 201 bp, Homo sapiens
aagtgtcttccctccgggatagagtgtcctccgtgcacatgctgaagagttgtctttcttgacgtaggccagaggcattgatgtgcagcaggtttctttastcatcaactatgaccttcccaccaacagggaaaactatatccacaggtaagcgtagatctggaacactcccctaccccttcacacctggccctccctggg

SEQ ID NO: 409554 - DNA, 201 bp, Homo sapiens
agaagcagctggtttccctaaagggaggagggttgtaagctctgaggcttttgttagtaggcaccagattctgtttgctcggagactacagctcagctccmccttttccatgactcaagctttaatttctttgcatcccctagagtaactggaatgagattgttgacagctttgatgacatgaacctctcggagtcccttc

SEQ ID NO: 409555 - DNA, 201 bp, Homo sapiens
tgtctgcctggcgggaaggtcctgggcaaaggatcagtctttgtactctgagagcagactacttggctcctctctgttttttatcagcgaagttggatatmtctctcccacatttccctaatcatatgctatatattggctttttttttcttctctagcccccaaatacatcaagatgtttgtactggatgaagctgacga

SEQ ID NO: 409556 - DNA, 201 bp, Homo sapiens
cccggcggcaagcaccacctctgggcaccgtgagcgcggcggcacgcctgccggcctgtcttcagaaagggtcacccccttatgtcgggggtggcctggcytgagccgctgcctgcatggggcaaatgcctcagttttatagaaactcctcctttgggtattttttgggagctggtgggagttggatctgggacagcaggt

SEQ ID NO: 409557 - DNA, 201 bp, Homo sapiens
tttgaattctggcaggctccagaatcctgggcctgggttcttagctgctaagtgcttctccctttaaagtgtgaaaagcgcctgcccatcatgggttctcmagtgttcgttctgatgtctcctccattgtctgaccttcctcccttaccccgaagaaccgaaacatgcagatcctgagcttgcccacaatctaggccttgg

SEQ ID NO: 409558 - DNA, 201 bp, Homo sapiens
ctagcccaacctccaaggagaccattggagactacacgtggaccaatggttcccagccctgtgtccacctccaagcccagattcagattcgagtcatgtayacaacccagggtggaggagaggtaaagctaaaactgggggatgagaggggagggaggcaggactggatataggctcagagggaagaaggaagaggggaca

SEQ ID NO: 409559 - DNA, 201 bp, Homo sapiens
tcgggggcaccaacgtgcgtgctgaggtgcagaaactgcagatggaagctccccacatcatcgtgggtacccctggccgtgtgtttgatatgcttaaccgsagatacctgtgtgagtaattcggttctccaatcccctgggtcactttgctcttgtgcacgctttccagtctttcagcgtaagccagagtcattcccaagg

SEQ ID NO: 409560 - DNA, 201 bp, Homo sapiens
tctcaaaaaataaataaataaataaataaataaatagatgggtctccacgctttgttgccttaggctggtttccaactcgtgagctcaagtgatcctcccrcttcagccttccaaataggtgggactattttattgctctttgaccattttaattgtttttgtaaactgtctgttcatatcctttgcccattaaaaaaagg

SEQ ID NO: 409561 - DNA, 201 bp, Homo sapiens
agcgaaactctgtctcaaaaaataaataaataaataaataaataaatagatgggtctccacgctttgttgccttaggctggtttccaactcgtgagctcargtgatcctcccacttcagccttccaaataggtgggactattttattgctctttgaccattttaattgtttttgtaaactgtctgttcatatcctttgccc

SEQ ID NO: 409562 - DNA, 201 bp, Homo sapiens
aacaagagcgaaactctgtctcaaaaaataaataaataaataaataaataaatagatgggtctccacgctttgttgccttaggctggtttccaactcgtgrgctcaagtgatcctcccacttcagccttccaaataggtgggactattttattgctctttgaccattttaattgtttttgtaaactgtctgttcatatcct

SEQ ID NO: 409563 - DNA, 201 bp, Homo sapiens
cctgggcaacaagagcgaaactctgtctcaaaaaataaataaataaataaataaataaatagatgggtctccacgctttgttgccttaggctggtttccarctcgtgagctcaagtgatcctcccacttcagccttccaaataggtgggactattttattgctctttgaccattttaattgtttttgtaaactgtctgttc

SEQ ID NO: 409564 - DNA, 201 bp, Homo sapiens
gccgcgcggcgcctcctccaggccccagcacaccctgccaaccccaccgccgcggctgcccccaccgggaccgaggcaagtttacaaacaccaaccccggyccgtttccccggaagcacttccccctccccctcgtcctctccgccgagcggctgcatccacttccgggctcggcagctagactagcgggggcagcctcag

SEQ ID NO: 409565 - DNA, 201 bp, Homo sapiens
aattttttttttgctgggcgctctctgtgaagctcagaacgaggacatgagtcaagaagagttttctttctaggtcaataggaggaactggtctcctgggyaaggagtggaagccaacaggagcaaaagtaattggggcctcctatggaggaactctgccaaaaggaaagttgcttggatttgccatctcaggaatggaag

SEQ ID NO: 409566 - DNA, 201 bp, Homo sapiens
attttgcccaggctggtcttgaactcctggcctcaggcaatcctgccttggcctcctgaagtgccgagattataggtgtgagccactatgcctgactcaawtttttttcaatagcattggatcttccagtaaaacattcaagttctttgagagtatgagctttggaaatgaaaacctaggttcgaagtccatctctgcagc

SEQ ID NO: 409567 - DNA, 201 bp, Homo sapiens
ttgaatttccatatgaatttaagatcagcttgtccatttctgcaaagagggcaactgggattttgataggaattgtgttcattcatcaacatgaaacatattttcatttatttaggtctttaatttccacagtgttttgtagttttcagagtatatgctttatacttcttttgttaaatagattaagtattttattctttt

SEQ ID NO: 409568 - DNA, 201 bp, Homo sapiens
cttgaatttccatatgaatttaagatcagcttgtccatttctgcaaagagggcaactgggattttgataggaattgtgttcattcatcaacatgaaacatattttcatttatttaggtctttaatttccacagtgttttgtagttttcagagtatatgctttatacttcttttgttaaatagattaagtattttattcttt

SEQ ID NO: 409569 - DNA, 201 bp, Homo sapiens
ttcgtgtcccatcagtcctgttgccatattgaactttgtcttcaaatagaacttagtgtcctccgaagaaaagataggtgttccaagaatccctggactcygcctggctcctgcctattgtctgaagaaaaagagagtctaccagtcttggttttccagttgaattctcttgatgaagctcacgatctgtttcagaaacct

SEQ ID NO: 409570 - DNA, 201 bp, Homo sapiens
gggttattgtaaggattgaatgaattagtatatgtaaagcacttagaatagttcctggcacatagatgcactgtataaatacaagctactggtattgttgktattattatttattactattattagagtactgggtagccatttaaaagaataggtgagaatatatatactaacatgaaagtatctccactgtatatatta

SEQ ID NO: 409571 - DNA, 201 bp, Homo sapiens
ctgggtggcttttagatctaattcaatctgctgcagaatcaatatggcaaatgtggccattttcccagccccagattgggcttgagcaatcacgtgataayccttgatacaaggtagaatggctcgctgctggatggcagacggcttctctaaaccataggcgtagatgccacggagaagggactctgagaggttcatgtc

SEQ ID NO: 409572 - DNA, 201 bp, Homo sapiens
gctgggtgggaaggaaaagcacctctggaagcctggcaggacaagaagccagcctacctgtcagccgacccaggctgcagctggaatctctctccaccctyccacaggtggcccccgtgctcaaggagcgcatggtgaaggagggctccatgatgattggctaccagccccacgggacccggggcaacttcttccgtgtgg

SEQ ID NO: 409573 - DNA, 201 bp, Homo sapiens
tgggccaacatggagaaaccccatctctactaaaaatacaaaaaaattagctgggcttggtggcacgtgcctgtaatcccagttaccaggtggctgaggcrggagaatcacttgaacccgggaggcgggggttgcagtgagcccatattgtgccattgcactccagcctgggcaacaagagcgaaactctgtctcaaaaaa

SEQ ID NO: 409574 - DNA, 201 bp, Homo sapiens
gcagtgttaggaatcaagagaaagtcaagatttggcagaaaatgtcccacaggacagatttcttggagacaggagaaatggggagaaaagcagaagatagmgaaggccaagcaggttagatatgacagaaaggtaaactgaggccaaggtcaaggtctgagcaaggtgtgctacccccagaaggtggctgggtgggaagga

SEQ ID NO: 409575 - DNA, 201 bp, Homo sapiens
ttgtttttagtgcaggttggccgtgtctcgtgtctgtggaggtgtggtttgacagccagtccacaggcatcccaggcccccagcatccccggctctcttcytaggtctgtgagtggaaggagcctgaggagctgaagcagctgctggatttggagctgcggagccagggcgagtcacagaagcagatcctggagcggtgtc

SEQ ID NO: 409576 - DNA, 201 bp, Homo sapiens
tggggtttctgcatgttggtcaggctggtctcaaactcctgacctcaggcgatccgcctgcctcagcctcccaaagtgctgggattacaggcatgagccaytgcacccggccattttttttttcttttttgagacagagtctcgttgtgtcacccaggccggagtgcaatggcacgatctcggctcactgcaacttccacc

SEQ ID NO: 409577 - DNA, 201 bp, Homo sapiens
ttttttttttctcgagatggagtttcgctcttgtagcccaggctggagtgcaatggtgcgatctcggctcaccgccacctccacctcctgggttcaagcarttctcctgcctcagcctcctgagtagctggggttacaggtgcgcaccaccatgcccagctaattttttgtatttttagcagagacggggtttcaccatgt

SEQ ID NO: 409578 - DNA, 201 bp, Homo sapiens
ctgtctattttttttcttttttttttttttgagacagagttttgctcttgttgcccaggctgaggtgcaatggcgtgatcttggctcacagcaacctccgyctcccgggtttaagccattctcctgcctcaacctccagagtagctgggattacaggcatgtgccaccatgcctggctaattttgtatttttagtagagac

SEQ ID NO: 409579 - DNA, 201 bp, Homo sapiens
ggaaggagatgtcaattccactgaagtcctcatttctgctgtaggtgatattatgtcgtgactttaggagaagtaatggtgataccaaaagaaaaaaaaaactgtatgatgaaaaaaagacaaggattctcaacttttttttttttgtagacagatttcatttccctgagccactccatgatttgggccattgaaagtacg

SEQ ID NO: 409580 - DNA, 201 bp, Homo sapiens
tggggtcagctgggagaggcgttaacttttcttcgcacactcttgctttgtgcgctcaaccacagtctgaattctcgcagaggcgttccttgagtagcccktggccacactgctcacctccctgcagaagtcaaagccccagccctcctctgcgaatcccgaggccagcctggttggttaccttctccccttcgcccttta

SEQ ID NO: 409581 - DNA, 201 bp, Homo sapiens
cttcctcgcggacgtcctgcccatcgctctgagccggcgccccaagtagagccagagtagttcgtacccagccttttcacgtaactcggccgaggtggttsttctccgaattttttccgtcaggcccagattagcagattttggggtcagctgggagaggcgttaacttttcttcgcacactcttgctttgtgcgctcaac

SEQ ID NO: 409582 - DNA, 201 bp, Homo sapiens
tcttcctcgcggacgtcctgcccatcgctctgagccggcgccccaagtagagccagagtagttcgtacccagccttttcacgtaactcggccgaggtggtkcttctccgaattttttccgtcaggcccagattagcagattttggggtcagctgggagaggcgttaacttttcttcgcacactcttgctttgtgcgctcaa

SEQ ID NO: 409583 - DNA, 201 bp, Homo sapiens
cctccccctcgtcctctccgccgagcggctgcatccacttccgggctcggcagctagactagcgggggcagcctcagagcgggtgagcttggggacgcacrgagaggtgcagctgggtgagtgggcggcgccgtgcgccgagggcatggaggagggagcgctgaggccggcgcgtgcgccgtggccggggcgcgccccggc

SEQ ID NO: 409584 - DNA, 201 bp, Homo sapiens
cgccactgcactccagcctgggcaacagagcgagaatccctccgtcactcacacacacacacacacacacacaccccttagcttcagagcgcgcgcgcgcrcacacacacacacacacacacacacacacacacaccccttagcttcagagcccacttttgattggcagatcttgctggtgccaactgtattttctatcgg

SEQ ID NO: 409585 - DNA, 201 bp, Homo sapiens
ccagtggcctctcttaaaagaaaagtttccagcttgaagttggagtcagaggtatcctggagtttctagcttgaggttgccatcagagtttgggaagaacyctgggtattgggaggaaacccaaagaaaggtgttggagccagcaggcagccgtcccagcagtgccatctggctccagggaaagaagagggtatcctgagc

SEQ ID NO: 409586 - DNA, 201 bp, Homo sapiens
ctgggagccagtcatacctgcttctttgatgagctcttctggtagaaagggaagggaggcaagctccagtcttgacccactgctccttcctcttgccaccrccccctccctgtgacaggtggctccatctccaacatgtatgctgtaaatctggcccgctatcagcgctacccggattgcaagcagaggggcctccgcaca

SEQ ID NO: 409587 - DNA, 201 bp, Homo sapiens; identical to SEQ ID NO: 92270

SEQ ID NO: 409588 - DNA, 201 bp, Homo sapiens
aatgtgtgtttctggttcgtaccccccagcctgcgagggaagcaggagagtccagattaccacgaaaggctgtcaaaggtaggcgtgctgtgctgctctcyttacccgttagggagctgatgcaactgatgcgcttctgccccctgttggctgggagtggcatggcaggtctccttgctggtctcttgctctgaggcgtgg

SEQ ID NO: 409589 - DNA, 201 bp, Homo sapiens
agcccccaagccccaactaaagccctagtggagggaaaagggcagggagaggggaaaggggcagggagagggaaaacggtccccctttctcagctcacacyttcctctttctcattcctctcagcctgagtttgtcaatgtgtgtttctggttcgtaccccccagcctgcgagggaagcaggagagtccagattaccacga

SEQ ID NO: 409590 - DNA, 201 bp, Homo sapiens
tggaaggagcctgaggagctgaagcagctgctggatttggagctgcggagccagggcgagtcacagaagcagatcctggagcggtgtcgggctgtgattcsctacagtgtcaagactggtgggccctggcttctgtgaggaggagacttgggagtttgccctgagctctactctgagctccctggcttactctccttctcc

SEQ ID NO: 409591 - DNA, 201 bp, Homo sapiens
agtagctggggttacaggtgcgcaccaccatgcccagctaattttttgtatttttagcagagacggggtttcaccatgttggccaggctggtatcaaactctgaccttgtgatctgcctgccttggcctcccaaagtgctaggattacaggcatgggccaccgcacccggtggtatttgtctttttcgattggcttatttc

SEQ ID NO: 409592 - DNA, 201 bp, Homo sapiens
gtttctgggacttggcaccgacagtgtccgagtggtcaaggctgatgagaggtgaaggtccttctgcccacatggctgtgacctagctttgcacagcgtamcttcctgccgccagaaagctctggcatcagacccttaccgctggtggacctctctcccctcgctattcagtagaattgctgttcctgtctaccagagcct

SEQ ID NO: 409593 - DNA, 201 bp, Homo sapiens
atacaaaaaaattagctgggcttggtggcacgtgcctgtaatcccagttaccaggtggctgaggcaggagaatcacttgaacccgggaggcgggggttgcrgtgagcccatattgtgccattgcactccagcctgggcaacaagagcgaaactctgtctcaaaaaataaataaataaataaataaataaatagatgggtct

SEQ ID NO: 409594 - DNA, 201 bp, Homo sapiens
gaggattgcttgaagccaagagtttaagaccagcctgggcaacatagtgagaccctgtttacaaaaaattaaaaaattaacccggcatgctggcatgtgcstgtagtcctagctactcaggaggctgaggtgggagaattgtttgagcccaagagttcgaagctgcagtaagacatgattgtgctactgcacttcagcctg

SEQ ID NO: 409595 - DNA, 201 bp, Homo sapiens
gcttgaacctgggaggcggaagttgcagtgagccgagatgacaccactgcactccagcctgggtgacagagggagactcttgtctccaaaaaaaaaaaaaacaaacaaatgcagaatcttgggccccaccctagaccccagacctagtggaccagaacctgcatttcattttaaccagacacccaggcgattcgtatgcac

SEQ ID NO: 409596 - DNA, 201 bp, Homo sapiens
ctacagtgtcaagactggtgggccctggcttctgtgaggaggagacttgggagtttgccctgagctctactctgagctccctggcttactctccttctccrggtcaccctcggttcttcaaccagctcttctctgggttggatccccatgctctggccgggcgcattatcactgagagcctcaacaccagccagtgagcat

SEQ ID NO: 409597 - DNA, 201 bp, Homo sapiens
tctcccagaaggtgagtcctttcttcctcctccttcccatcaagctttctttcttttcttttctcttttcttttttcctttcttttctttctcccccccccttccttccttctttcttccttccttttttcctttcttcctttctttcttgacagagtctcgctctatcggccaggctggagtgcagtggcacaatcttgg

SEQ ID NO: 409598 - DNA, 201 bp, Homo sapiens
tcccgggttcaagcgattcttctgcctcagcctcccaagtagctgggattacaggcatgcaccaccacacccggctaatttttgtatttttagtagagacrgggtttcaccatgttggtcaggctggtctcgaactcctgacctcaggtgacctcaggtgatccacctgcctcggcctcccaagtgctgggattacaggct

SEQ ID NO: 409599 - DNA, 201 bp, Homo sapiens
gtttgagaccagctgggccaacatggagaaaccccatctctactaaaaatacaaaaaaattagctgggcttggtggcacgtgcctgtaatcccagttaccrggtggctgaggcaggagaatcacttgaacccgggaggcgggggttgcagtgagcccatattgtgccattgcactccagcctgggcaacaagagcgaaact

SEQ ID NO: 409600 - DNA, 201 bp, Homo sapiens
ttaatagagacggggttttgccatgttggccaggctggtcttgaactcctggcctcaagtgatccacctgccttggcttctcaaagtgctgggattacagktgtgagccaccgtgcctggcctatttgtttatattttttgaggcaggctttcattctgttgcccaggctggagtgcagtggcaaaatcatagctcattgt

SEQ ID NO: 409601 - DNA, 201 bp, Homo sapiens
cctgaggccaggagtttgagaccagctgggccaacatggagaaaccccatctctactaaaaatacaaaaaaattagctgggcttggtggcacgtgcctgtratcccagttaccaggtggctgaggcaggagaatcacttgaacccgggaggcgggggttgcagtgagcccatattgtgccattgcactccagcctgggcaa

SEQ ID NO: 409602 - DNA, 201 bp, Homo sapiens
cactctgggagaccgaggtgggcggatcacctgaggccaggagtttgagaccagctgggccaacatggagaaaccccatctctactaaaaatacaaaaaarttagctgggcttggtggcacgtgcctgtaatcccagttaccaggtggctgaggcaggagaatcacttgaacccgggaggcgggggttgcagtgagcccat

SEQ ID NO: 409603 - DNA, 201 bp, Homo sapiens
tctctggacaggcacggtggctcacgcctgtaatcccagcactctgggagaccgaggtgggcggatcacctgaggccaggagtttgagaccagctgggccracatggagaaaccccatctctactaaaaatacaaaaaaattagctgggcttggtggcacgtgcctgtaatcccagttaccaggtggctgaggcaggagaa

SEQ ID NO: 409604 - DNA, 201 bp, Homo sapiens
gtaatcccagcactctgggagaccgaggtgggcggatcacctgaggccaggagtttgagaccagctgggccaacatggagaaaccccatctctactaaaartacaaaaaaattagctgggcttggtggcacgtgcctgtaatcccagttaccaggtggctgaggcaggagaatcacttgaacccgggaggcgggggttgca

SEQ ID NO: 409605 - DNA, 201 bp, Homo sapiens
gcctgtaatcccagcactctgggagaccgaggtgggcggatcacctgaggccaggagtttgagaccagctgggccaacatggagaaaccccatctctactraaaatacaaaaaaattagctgggcttggtggcacgtgcctgtaatcccagttaccaggtggctgaggcaggagaatcacttgaacccgggaggcgggggt

SEQ ID NO: 409606 - DNA, 201 bp, Homo sapiens
tcactggggacaaggacaatcgtattcatctttgtattcccagcacaatgccttgcatgcaacaggaactcaataaattcctgttggaaaaaaacaaaagmagcattcaccgtactattcactcccttacacccctcagcacttaatgtaccaaatgtaaactgagtacacgttgctttgcaaatgtcccatcagtgcctg

SEQ ID NO: 409607 - DNA, 201 bp, Homo sapiens
ctctccagctggacccaggccaggccagggaggcggctgcctggtcccttcatgctcatgtttgtcaccattccctggggtcagtggtctagttcctgctrtctccggacgggggctgtctcttgggggcagccccagatgtggagaggtgtggtcaagaggatctgctgatcctggatccattctgggatggtatgatcc

SEQ ID NO: 409608 - DNA, 201 bp, Homo sapiens
taatagattctgtgaaaatgaattgtaaaagtttgtaacaactcccatgtttactcagaaccatgtgtgaatgttccctattcctacaactttggcaatgkttagtgtatgctatgaattttttatacagttactagtttaatgggtgaaaaatagtatttgttttaattttcatgtcattaatagtgaagttaatattct

SEQ ID NO: 409609 - DNA, 201 bp, Homo sapiens
agtcagggcacactgcagcctcaacctcctgggctcaaggaatcctcccatcttagcctcccaagtagttgggactacagatgtgggcaactgtgcctggmtaattttgtagttttttttttgtttttttgttttttgtagagacagggttttgccatgttgcccaggctggtctcgaattcctaggctcaagctatccat

SEQ ID NO: 409610 - DNA, 201 bp, Homo sapiens
gggagtggcatggcaggtctccttgctggtctcttgctctgaggcgtggatgctctcttttcggtaggggtggggatggggaggaaggtatgtttctgggragtaagaagcagcgacgtgtgttacaggagaagtcagagaagtcaccagtgtgtagtacacagagccttgtgctggcaattgggctgggaactcaggccc

SEQ ID NO: 409611 - DNA, 201 bp, Homo sapiens
acctcccagacggggtggtggccgggcagaggggctcctcacttcccagtaggggcggccgggcagaggcgcccctcacctcccggacggggcggctggcygggcggggggctgacccccccacctccctgccggactgggcggctggccgggcggggggctggaggtgggggctctttgtggaggagctcagggagactt

SEQ ID NO: 409612 - DNA, 201 bp, Homo sapiens; identical to SEQ ID NO: 92285

SEQ ID NO: 409613 - DNA, 201 bp, Homo sapiens
gggggaactcagaggaactggggccaccaaggttggaaaagggtttggttcttgactttgtattccttccaatacagcaataaactttgtctccctttttattcattcattcattcattcattcattcattcatcatttgtggaaggctcacttggatttttgtagagttgtgtctgcagaggcaagactttgtggtagga

SEQ ID NO: 409614 - DNA, 201 bp, Homo sapiens
gaaggcaaacactgtgacaccgccatcacaggaggttgaccggaagactccgctctggcctcttatcctagcagccttcattcatcccagcatatgttagrctatacggccatccaacaaaaagaaaaagtatgggctctgaccagacagatcttacactctgcctgcctctcagaggtaacccagagcacagagaggtta

SEQ ID NO: 409615 - DNA, 201 bp, Homo sapiens
ccctccttgttccccaactcaccggccacagtcaggcaccagggcctggcttgggggtgatggactctcacgtcttggatgcatgggttgagtcaccaggmatgatctcattcacgacttattcttctctggctcaggcaactttctgggggctggtgacacctcgatcttggtcctgccatacctagaggtcgggacaga

SEQ ID NO: 409616 - DNA, 201 bp, Homo sapiens
ggggaactcagaggaactggggccaccaaggttggaaaagggtttggttcttgactttgtattccttccaatacagcaataaactttgtctccctttttattcattcattcattcattcattcattcattcatcatttgtggaaggctcacttggatttttgtagagttgtgtctgcagaggcaagactttgtggtaggat

SEQ ID NO: 409617 - DNA, 201 bp, Homo sapiens
tgaggcccagtaacgagatgcagatgaactggggaggaagagagtttttatttctgtaaccagttacagggagaaggcctggaaattatcaccaggccaaytaaaaattataaagttttccagagcttatataccttctaagctctatgtctatgtgtaggtgtgcattcatctaaagacataagtgattaacttctttta

SEQ ID NO: 409618 - DNA, 201 bp, Homo sapiens
cccagcatatgttaggctatacggccatccaacaaaaagaaaaagtatgggctctgaccagacagatcttacactctgcctgcctctcagaggtaacccaragcacagagaggttaagcgatttgcttaaagccacacagcaacttttcctccccttccattctgccacaggttaggttcctgatgaaaagctactccttc

SEQ ID NO: 409619 - DNA, 201 bp, Homo sapiens
gggaactcagaggaactggggccaccaaggttggaaaagggtttggttcttgactttgtattccttccaatacagcaataaactttgtctccctttttattcattcattcattcattcattcattcattcatcatttgtggaaggctcacttggatttttgtagagttgtgtctgcagaggcaagactttgtggtaggatg

SEQ ID NO: 409620 - DNA, 201 bp, Homo sapiens
tatgttaggctatacggccatccaacaaaaagaaaaagtatgggctctgaccagacagatcttacactctgcctgcctctcagaggtaacccagagcacaragaggttaagcgatttgcttaaagccacacagcaacttttcctccccttccattctgccacaggttaggttcctgatgaaaagctactccttcctgagag

SEQ ID NO: 409621 - DNA, 201 bp, Homo sapiens
cattacgagggatttggggaacctgcaggctggaaggcaaacactgtgacaccgccatcacaggaggttgaccggaagactccgctctggcctcttatccyagcagccttcattcatcccagcatatgttaggctatacggccatccaacaaaaagaaaaagtatgggctctgaccagacagatcttacactctgcctgcc

SEQ ID NO: 409622 - DNA, 201 bp, Homo sapiens
ggaactcagaggaactggggccaccaaggttggaaaagggtttggttcttgactttgtattccttccaatacagcaataaactttgtctccctttttattcattcattcattcattcattcattcattcatcatttgtggaaggctcacttggatttttgtagagttgtgtctgcagaggcaagactttgtggtaggatgg

SEQ ID NO: 409623 - DNA, 201 bp, Homo sapiens
gcagacccatcaccaccccaccaatgcctgcccttccccccgcaggcctgccaccactgaacccccatccctgctgaccccccaggttgtttttttttttwaaaaaagcactgtgcctggcatagacagaaattcagtgaatgtctggtgaatgaaaggatggctgactggagggacagtgggctctaccctggctttgtc

SEQ ID NO: 409624 - DNA, 201 bp, Homo sapiens
gagtgagccattgaggctggcccctaatttcaatatcgttgtatctcagcgaataggaaagctcgaggagaacagaagagatgggagaatggccggtcagyagagtagtcagaacacacacagaatttgtcagttaagtttgctctcttatttgggtgtatttcatgatgccctaaaacaattacaattgtaacattaaaa

SEQ ID NO: 409625 - DNA, 201 bp, Homo sapiens
  misc_feature (1)...(201): n = A,T,C or G
gcaggacgccctatgtcaggtggaattatgtggccaagaactttgcccaggtgagaagatagggtagaagggtggacctgtgactcatggtggtggagagnggacatttctgggaggcctggggaggcagtgggagggtgatgccaagggaagagaaggccagtgctgggccagaggtcaatgccaccggcagctgccagc

SEQ ID NO: 409626 - DNA, 201 bp, Homo sapiens
  misc_feature (1)...(201): n = A,T,C or G
cagctccttgcttatcccccacccccaccctatccatttctccactcaccaatcccaccacccttccccagcagccccctcacctctgccctctgcccttncccttactaatccacccctctcattcctccccaggtgaggggatccaggcccccagtttctccagctacctctacttcctcttctgcccaacactcatct

SEQ ID NO: 409627 - DNA, 201 bp, Homo sapiens
caaaaactctagtgataagtcaatgctggcacttttggatcagatatgaacccttgatgtggcatccaaggctccttcccacacagccccagcctatctgsgggaagatatgtgcttccatgcctccaggcctttgcccatactggcccctcagcttgaaataccctttcctaattttcagccatggaatctagttgcttc

SEQ ID NO: 409628 - DNA, 201 bp, Homo sapiens
agggaggtgggagagtgtctgctgtccctgttctgccaggagccagcccttctggaacactgggatagggtgcaggcagagggagcagtggggaggagccrgaacccagatgcttgcttacctcctttcccccactctgaccccaccttctccaggactggtggaactcaacgtccttctccaactactaccgcacttgga

SEQ ID NO: 409629 - DNA, 201 bp, Homo sapiens
tctctgtgccactggaagggagccatccagagggaggcctgcatcctgctcctgcagatcccagactgatggtgggaggcctcgcccccaggcctggaggyaaggctgctgagactgagaggtggagtcaagggggtacttggaaagcagggagggaggcagcatttgggaggcagccaagctgtatcctggggcatgtgg

SEQ ID NO: 409630 - DNA, 201 bp, Homo sapiens
ctcacatctgtcccctcctatcagggccattgccatggtctcagttcagaccatctgctccccctccacatcagcctcctaacccatctccctggcacccrgatctttcctttcccatctacccctaacactgctgcccaggtgaactttcctactgcaactaatcattccctaccctccttcaaaaactctagtgataag

SEQ ID NO: 409631 - DNA, 201 bp, Homo sapiens
aggctatacggccatccaacaaaaagaaaaagtatgggctctgaccagacagatcttacactctgcctgcctctcagaggtaacccagagcacagagaggktaagcgatttgcttaaagccacacagcaacttttcctccccttccattctgccacaggttaggttcctgatgaaaagctactccttcctgagagaggctg

SEQ ID NO: 409632 - DNA, 201 bp, Homo sapiens
cctgctggaagcctctggcctcactcctgacctgtgtgcctctctctccagtgccgctcctcccaggggcagcgccgaggtccctgctggtgtgtggatcrgatgggcaagtccctgccagggtctccagatggcaatggaagctcctcctgccccactgggagtagcggctaaagctgggggatagaggggctgcagggc

SEQ ID NO: 409633 - DNA, 201 bp, Homo sapiens
agctgtgccctggggaaggctaatcagggaaggccttgctagttaccttccctcagtttcaacacgttctccttctgagtctctcctcacatctgtccccycctatcagggccattgccatggtctcagttcagaccatctgctccccctccacatcagcctcctaacccatctccctggcacccagatctttcctttccc

SEQ ID NO: 409634 - DNA, 201 bp, Homo sapiens
agggaatctgccaaatcagggttatgatttaaacctgctcagaatcgttcacccatcctaccccaccctgctccagggaggagagcagaagctgagtcacygggtgggtgggacagaagtgaatcagccgtgaaaacatggggggcagcggggagatggggagggcaggaaatgcaaactgcgcatcccagaggctctggg

SEQ ID NO: 409635 - DNA, 201 bp, Homo sapiens
cctgtgggtccatgtgggccagcctgacctgcagcctcttgtccccaaccaccaggcatcttcatgctgctgctcatcttctttgccttcctccattgctrgctcaacgcctttgccgagatgctacgatttggagacaggatgttctaccgggtggggcctggacctaggccagttggaagctggagatagggagggtta

SEQ ID NO: 409636 - DNA, 201 bp, Homo sapiens
cctttcccccactctgaccccaccttctccaggactggtggaactcaacgtccttctccaactactaccgcacttggaacgtggtggtccatgactggctstacagctacgtgtatcaggatgggctgcgggtatgggccctgcagaccccttcagctctcacagttaataggggctctccttccttccctctccttccct

SEQ ID NO: 409637 - DNA, 201 bp, Homo sapiens
gagaaatgaggggggcagaccccactcctgtctgtgaggcactcccagtcttgtggggaagacagacatgtaaccaagtgcctgggtgggtcatttccccsacagagcaccccatccaactgtgaggatgagcctcagagagctgtatacccctgggggtctgtattttcatacctcccactattcccagaccaaactgag

SEQ ID NO: 409638 - DNA, 201 bp, Homo sapiens
gcctgggtgggtcatttcccccacagagcaccccatccaactgtgaggatgagcctcagagagctgtatacccctgggggtctgtattttcatacctcccmctattcccagaccaaactgagggttggggctgctatttctcatggcccaataacgagatgcagatgaactggggaggaagtgagtttttatttctgtaac

SEQ ID NO: 409639 - DNA, 201 bp, Homo sapiens
tccccattgccgctgcaggacgccctatgtcaggtggaattatgtggccaagaactttgcccaggtgagaagatagggtagaagggtggacctgtgactcwtggtggtggagaggggacatttctgggaggcctggggaggcagtgggagggtgatgccaagggaagagaaggccagtgctgggccagaggtcaatgccac

SEQ ID NO: 409640 - DNA, 201 bp, Homo sapiens
agtagagacggggtttcaccgtgttaaccaggatggtctcgatctcctgacctcatgatctgcctgcctcggcctcccaaagtgctgggattacaggtgtragccaccttgcccaacctatagtgtagctttaaaacagagaatgataacagtcctttcccagaacaaacttccttcatgtctgtggactagactaaggcc

SEQ ID NO: 409641 - DNA, 201 bp, Homo sapiens
agacataagtgattaacttcttttaatctataactaaggtctgagtcttgaagaccttcttctggagcctcagtaagtttacttaatctaaatgggtccargtgctggggtgattacccttctcttatctcctgctaaataacggaggtttggggagtttcttcagacccccagcaaaacttgtttaatcatgctttgagg

SEQ ID NO: 409642 - DNA, 201 bp, Homo sapiens
taaccactcagtcagtactgaaacagttgttatggaggtctgcattagtgagacctgcttgtcacagtccccactgtcaatttacacgatttttatcatgyatggatatttatttatcatgagaatcgcagggagatggggagtcgtaatctttctggctacttcctgctgagagggggtcgtcgttatggggcaccaaaa

SEQ ID NO: 409643 - DNA, 201 bp, Homo sapiens
ctacaggcgcccgccaccacgcccggctaatttttttggtatttttagtagagacggggtttcaccgtgttaaccaggatggtctcgatctcctgacctcrtgatctgcctgcctcggcctcccaaagtgctgggattacaggtgtgagccaccttgcccaacctatagtgtagctttaaaacagagaatgataacagtcc

SEQ ID NO: 409644 - DNA, 201 bp, Homo sapiens
  misc_feature (1)...(201): n = A,T,C or G
ataaagatgggaaataggtgactggtagactaccctgtctccttgcccggcctatgatgacactagggcaacccactttcctggtttacccaggactgtcntgataatcctacccatcctacacacccttgttgacatccatgcttaaaacccacttgttatctctgttatggaaagttcagagtatcctagaccccacca

SEQ ID NO: 409645 - DNA, 201 bp, Homo sapiens
ctgagtagctgggactacaggcgcccgccaccacgcccggctaatttttttggtatttttagtagagacggggtttcaccgtgttaaccaggatggtctcratctcctgacctcatgatctgcctgcctcggcctcccaaagtgctgggattacaggtgtgagccaccttgcccaacctatagtgtagctttaaaacagag

SEQ ID NO: 409646 - DNA, 201 bp, Homo sapiens
aaggagaatgggttgtcgaacgtgtgggtaccaaatgaagctctggccacagcaggccctgcactggaagatagggtgcctgaaatgacagcagaagagayggtgttaaagagccagttccgctcctgcccagcttagctcccctagcccgcatccaggtcctacgtccagctccttgcttatcccccacccccaccctat

SEQ ID NO: 409647 - DNA, 201 bp, Homo sapiens
gattacagacgtaagtgaccgtgcccagccagcatgctcttaaataagattgatgtcaccccttctgacctcagatcccatattctttccactgcgccacrctccccctggcttccttaaggtgggggctcttttttttttttttttttttgaccattgggaggtaaacatcttaaaagcaaattttattctggttacatt

SEQ ID NO: 409648 - DNA, 201 bp, Homo sapiens
ccgcaagtccctgcttgagtaagtcggggtgatgacaagtaatgggaggaaaagaaagggctttggctaggggtcaaggtacctcatttctcatccccagsctctaggtggtttgtggagaggacttggaaagggtttctaaggtgcaggtcccctatttgccctaggcatggttgtggaagaaaggcctttagctggaag

SEQ ID NO: 409649 - DNA, 201 bp, Homo sapiens
ttctcatccccagcctctaggtggtttgtggagaggacttggaaagggtttctaaggtgcaggtcccctatttgccctaggcatggttgtggaagaaaggmctttagctggaagttctggatcgctaggccccatgcctcatgtgtacagtgtctgagctagttcacacaaccctgaggaccctcccacactgactttcgg

SEQ ID NO: 409650 - DNA, 201 bp, Homo sapiens
ggagctcagggagacttactcttcactcctttcctcaccctgccagctccttggtgcccgggcccgaggggtagccatgctgggtgtgttcctggtctcckcagtggcccatgagtatatcttctgcttcgtcctggggttcttctatcccgtcatgctgatactcttccttgtcattggaggtgagctggtctctgtgcc

SEQ ID NO: 409651 - DNA, 201 bp, Homo sapiens
ggggctctccttccttccctctccttccctcctgctacagtgtggcaactacaccactcacctaagggcctaagggccgttttgatttcatctgtcctcaytttctcattttacccaacccaatgggtagaaagtccttgcaatcttaactttcttccatctttatccttaattccaccctgtccacagggcattgtttcc

SEQ ID NO: 409652 - DNA, 201 bp, Homo sapiens
aatccaaactgcagaaaataataaaaactgaaaaacatcaggcaagactagaatttaacaacagatgtacttttttttttttttttttgagacagagtctyggtccgttgcccaggctggagtgcagtggcgtgatcttggctcactgcaacctccgcctcctgggttcaagcgaatctccaacctcagcctcctgagtag

SEQ ID NO: 409653 - DNA, 201 bp, Homo sapiens
ccatgctgggtgtgttcctggtctccgcagtggcccatgagtatatcttctgcttcgtcctggggttcttctatcccgtcatgctgatactcttccttgtyattggaggtgagctggtctctgtgccactggaagggagccatccagagggaggcctgcatcctgctcctgcagatcccagactgatggtgggaggcctcg

SEQ ID NO: 409654 - DNA, 201 bp, Homo sapiens
agctgagcatggtggtgcatgcctgtagtcctagctacttgagagactcaggcagaagaatcacttgaacctgggaggcagaggttgcagtaagccaagaycacgccactgcactccagcctgggcgacagagcgagactccatctaaataaataaataaataacaattctaattattattgataatgtacactaagatat

SEQ ID NO: 409655 - DNA, 201 bp, Homo sapiens
actgcgaaggaaggaggcaacacgggcaagggctgcctgctgcccgctggagaccgcaccatggagccaggcggggcccgtctgcgtctgcagaggacagragggctgggaggggagcgggagcgccaaccctgtggagatggtgagccgccctcgggggtgcagaaggcacaggcaagtgggggggaggcggggagagat

SEQ ID NO: 409656 - DNA, 201 bp, Homo sapiens
ttttccagagcttatataccttctaagctctatgtctatgtgtaggtgtgcattcatctaaagacataagtgattaacttcttttaatctataactaaggyctgagtcttgaagaccttcttctggagcctcagtaagtttacttaatctaaatgggtccaggtgctggggtgattacccttctcttatctcctgctaaat

SEQ ID NO: 409657 - DNA, 201 bp, Homo sapiens
tgtttttttttttaaaaaaagcactgtgcctggcatagacagaaattcagtgaatgtctggtgaatgaaaggatggctgactggagggacagtgggctctrccctggctttgtcccgtaggctgtgaaggcacaattgctggagcaagcgcagggacaactgagggagctgctggatcgggccatgcgggaggctatacaa

SEQ ID NO: 409658 - DNA, 201 bp, Homo sapiens
taagctctatgtctatgtgtaggtgtgcattcatctaaagacataagtgattaacttcttttaatctataactaaggtctgagtcttgaagaccttcttcyggagcctcagtaagtttacttaatctaaatgggtccaggtgctggggtgattacccttctcttatctcctgctaaatcacagaggtttggggagttcctt

SEQ ID NO: 409659 - DNA, 201 bp, Homo sapiens
gagggcaggctagggcgtaggttaggggagaggggagaaagagtaggggaaagagggaatctgccaaatcagggttatgatttaaacctgctcagaatcgytcacccatcctaccccaccctgctccagggaggagagcagaagctgagtcactgggtgggtgggacagaagtgaatcagccgtgaaaacatggggggcag

SEQ ID NO: 409660 - DNA, 201 bp, Homo sapiens
tgaccctgaacaaacatctcaattcaggacccaggagccatccctggggaaacagaaagttttcatcatccgcaagtccctgcttgagtaagtcggggtgrtgacaagtaatgggaggaaaagaaagggctttggctaggggtcaaggtacctcatttctcatccccagcctctaggtggtttgtggagaggacttggaaa

SEQ ID NO: 409661 - DNA, 201 bp, Homo sapiens
gcccttaacaagagcccttaaagtcaccagctgcaggctgagcacagtggctcacacaggtaatcccagcactctgggacactgagacaggaggatcgttygagcccaggagttcaagaccagcctgagcaacgtagtgagatggggtctcacttcaaaaaactttttaaaattagccaggtgtggtggctaatgcctgtg

SEQ ID NO: 409662 - DNA, 201 bp, Homo sapiens
cccaggagccatccctggggaaacagaaagttttcatcatccgcaagtccctgcttgagtaagtcggggtgatgacaagtaatgggaggaaaagaaagggmtttggctaggggtcaaggtacctcatttctcatccccagcctctaggtggtttgtggagaggacttggaaagggtttctaaggtgcaggtcccctatttg

SEQ ID NO: 409663 - DNA, 201 bp, Homo sapiens
cttcaaaaaactttttaaaattagccaggtgtggtggctaatgcctgtggtcccagctgtgtggaaggctgaggtgagaagattacttgagtccgggaggkgaaggctgcagtgagccatgactatgtcactgtactccagcctgggcaacagactgagatcccatctcaaaaaaaaaaagtgagagacatgcaactcttt

SEQ ID NO: 409664 - DNA, 201 bp, Homo sapiens; identical to SEQ ID NO: 92290

SEQ ID NO: 409665 - DNA, 201 bp, Homo sapiens
tgcagtgagccatgactatgtcactgtactccagcctgggcaacagactgagatcccatctcaaaaaaaaaaagtgagagacatgcaactctttctttcaytcacttgaacacttaaagaccatttcaacgttattaattggcccaatttcaaatttttttttttttttttgagatggagtcttgccctgtttcccaggct

SEQ ID NO: 409666 - DNA, 201 bp, Homo sapiens
cagcatatgttaggctatacggccatccaacaaaaagaaaaagtatgggctctgaccagacagatcttacactctgcctgcctctcagaggtaacccagarcacagagaggttaagcgatttgcttaaagccacacagcaacttttcctccccttccattctgccacaggttaggttcctgatgaaaagctactccttcct

SEQ ID NO: 409667 - DNA, 201 bp, Homo sapiens
actgtcttgataatcctacccatcctacacacccttgttgacatccatgcttaaaacccacttgttatctctgttatggaaagttcagagtatcctagacyccaccaccctagataatcctcccaggcctaagcaattaagggaactgaggagagagggccccagaacccgtgcccaggctgaacagagaacaacatgaaa

SEQ ID NO: 409668 - DNA, 201 bp, Homo sapiens
aaccactcagtcagtactgaaacagttgttatggaggtctgcattagtgagacctgcttgtcacagtccccactgtcaatttacacgatttttatcatgcrtggatatttatttatcatgagaatcgcagggagatggggagtcgtaatctttctggctacttcctgctgagagggggtcgtcgttatggggcaccaaaag

SEQ ID NO: 409669 - DNA, 201 bp, Homo sapiens
attcctcctgttgactgtgcctttgatccctcctcacaggaaacactgagacgcacagagccccggacttggtacaatggacccgacacatggaggtgagkgatgtcagaggtcagaggtcaagtggacagatccttggtagcaggaagcaggagtgaggcttggtgataaagatgacttttttttttttttttttttgaa

SEQ ID NO: 409670 - DNA, 201 bp, Homo sapiens
tattaatagctcaaaagaaaagtttccttgactctgcaaagcaaaacaaaggactagcaacattttaagcaaaaagtgaaaaagatcacttcaatctcctwttagttcagtacatgcagttaattcctgtcctgcttcatattaatgaatattttaactcttcaagagccctaaatgtttttcctccattgtgatgtcaca

SEQ ID NO: 409671 - DNA, 201 bp, Homo sapiens
cctctcatgctctgccatgcggagctcctcttccataacacacactccaccgttctacaacacaggcttcaaatgggcatttcagcaaagtccaatgaccytaatcttaatctgcatgcaggatttccttttttttctttctttcttccttttttttttttgacagagtcttgctctgtctcccaggctggagtgcagtgg

SEQ ID NO: 409672 - DNA, 201 bp, Homo sapiens
gtgagggcagctgctgagcacacaaagcatttcctgaccacaggatgcctctgggtctgcagaaccccaattcctcctgttgactgtgcctttgatccctsctcacaggaaacactgagacgcacagagccccggacttggtacaatggacccgacacatggaggtgagggatgtcagaggtcagaggtcaagtggacaga

SEQ ID NO: 409673 - DNA, 201 bp, Homo sapiens
tccttcaatcccacactgctctcggaggattttaaacagtttctggctgggtgcagtggctcacgcctgtaatcccagcactttgggaggccgaggcaggmggatcacttgaggtcagcaattcaagaccagtctggccaatatggtgaaaccctgtctctactgaaaaaaaaaaaattagccagtcgtggtggtgcaagc

SEQ ID NO: 409674 - DNA, 201 bp, Homo sapiens
tccagagcttatataccttctaagctctatgtctatgtgtaggtgtgcattcatctaaagacataagtgattaacttcttttaatctataactaaggtctragtcttgaagaccttcttctggagcctcagtaagtttacttaatctaaatgggtccaggtgctggggtgattacccttctcttatctcctgctaaatcac

SEQ ID NO: 409675 - DNA, 201 bp, Homo sapiens
tatttatacaaatatagcccaaagaaagtcaaaccccattttatatttggcaatgcttcctgtatgatttttggtaccaaataagccaaatttcacctttwtattagtgtactattaatgttaaacccaattatttatttatttatttattttcttttttgagacagagtctcactccgtcacccaggctggagtacagtg

SEQ ID NO: 409676 - DNA, 201 bp, Homo sapiens
acaattgacaaggaaatctgttacctctgtagcacacaacaatttaacataacaatggctgggcacagtggctcatgcctgtaatcccagcactttgggaggccgaggtgggtggatcacgaggtccggagttcaaaaccaacctggccaatatggtgaaaccccgtctctactaaaaatacaaaaattagctgagcatgg

SEQ ID NO: 409677 - DNA, 201 bp, Homo sapiens
tggctaattttttttttatatttttagtagagacggggtttcaccatattggccaggctggtcttgaactcctgacctcaagtgatctacccgcctcggcmtcccaaagtgctgggattacaggtgtgagccacggtgcccagcctgatgacttgttcctgagtgcaaagatcggattcgaattaaggatggagatggagg

SEQ ID NO: 409678 - DNA, 201 bp, Homo sapiens
tgtgtcaatcacacaccttgtggtgaaagcgagctgaacgcactgatacatgaagacatttctgactcctccctgaccttcagcctgctgggagagagacyggaaggccagccatgctaggtgacaagcttctgagaggcaaagttcccctccccaagatgtacccagccactattcctgtgtgtgtgtggcggggtggat

SEQ ID NO: 409679 - DNA, 201 bp, Homo sapiens
aagccactggtggctgaacacagcaccatcccggtctctcctggctggcttgccacgttttgttcccaggtcaaactgaaggttgggctgctatttcttgmggcccagtaacgagatgcagatgaactggggaggaagagagtttttatttctgtaaccagttacagggagaaggcctggaaattatcaccaggccaatta

SEQ ID NO: 409680 - DNA, 201 bp, Homo sapiens
agcgatccacccaccttgacattcccaaagtgctgggatcataggtgtgagccactgcacctggccttaaacctaagtcttaataaaaccttatacacatggtttacccaattttaatgtttgaccataaggtaagatttgtatagactttttcgaaccctttacaatttttgttaaagagcaggttagtgctctaagaga

SEQ ID NO: 409681 - DNA, 201 bp, Homo sapiens
actcaccctttgagcgtgtctgcttctgatctctgttcttccccagtagtgaaagggacgtgcagttttgcacacgggacagccctcgggagggtccccargaaaaatctcacgggcagctgcttggaccctcctgaagactgtctcatcgcaagccactggtggctgaacacagcaccatcccggtctctcctggctggc

SEQ ID NO: 409682 - DNA, 201 bp, Homo sapiens
gtaagtcggggtgatgacaagtaatgggaggaaaagaaagggctttggctaggggtcaaggtacctcatttctcatccccagcctctaggtggtttgtggrgaggacttggaaagggtttctaaggtgcaggtcccctatttgccctaggcatggttgtggaagaaaggcctttagctggaagttctggatcgctaggccc

SEQ ID NO: 409683 - DNA, 201 bp, Homo sapiens
tggaggtttcacgtaaacaagaaactgtacctattattttgtaatttgattttactccctaacaatttattttagggatcttttcatgttagtccattggyttgaaggactgaagaatatggaggtgccagatttgttcacttagtcctttactaatggacacttaggttgttttcagtttttccccttaacaaaccatac

SEQ ID NO: 409684 - DNA, 201 bp, Homo sapiens
ggaaaagaaagggctttggctaggggtcaaggtacctcatttctcatccccagcctctaggtggtttgtggagaggacttggaaagggtttctaaggtgcrggtcccctatttgccctaggcatggttgtggaagaaaggcctttagctggaagttctggatcgctaggccccatgcctcatgtgtacagtgtctgagcta

SEQ ID NO: 409685 - DNA, 201 bp, Homo sapiens
actaaggaaagtcagtctagttacctcatatcctaacatgtgttgtatatagagtactgagcccttaccaacaccatgaaatcagagagggctctcaaggycatttagaatcaaactcatgccatgactgagtctcctggagcaacgccctgtgccacagaggtgccgtcttgaacacctccagagatggggagctcacaa

SEQ ID NO: 409686 - DNA, 201 bp, Homo sapiens
ttccacagacaatctctgacatcccttgactttctgatttgtcctaaacatgtttctctttaaacaaccagttattttactttaggacaagaatttaccayacaagatcctttcttatataaattctcttttctttaatatctttttgcatatctagggggcatggctaatttcacatgtccctagccttatctagaatct

SEQ ID NO: 409687 - DNA, 201 bp, Homo sapiens
acagtggctcatgcctgtaatcccagcactttgggaggccgaggtgggtggatcacgaggtccggagttcaaaaccaacctggccaatatggtgaaacccygtctctactaaaaatacaaaaattagctgagcatggtggtgcatgcctgtagtcctagctacttgagagactcaggcagaagaatcacttgaacctggga

SEQ ID NO: 409688 - DNA, 201 bp, Homo sapiens
gctgtaaagcaggcaagttgtacagctaagagtcataaagcatttaggaggcctaatcacctttaaattgtataacatttcttgtataaatttcctttaayaaattctttcaggacttccacagacaatctctgacatcccttgactttctgatttgtcctaaacatgtttctctttaaacaaccagttattttactttag

SEQ ID NO: 409689 - DNA, 201 bp, Homo sapiens
atcatggcttgttcatctttttaccacagcacttagcactgcggggtcctaccccaccagcagacccatcaccaccccaccaatgcctgcccttccccccrcaggcctgccaccactgaacccccatccctgctgaccccccaggttgtttttttttttaaaaaaagcactgtgcctggcatagacagaaattcagtgaat

SEQ ID NO: 409690 - DNA, 201 bp, Homo sapiens
gagaggacttggaaagggtttctaaggtgcaggtcccctatttgccctaggcatggttgtggaagaaaggcctttagctggaagttctggatcgctaggcyccatgcctcatgtgtacagtgtctgagctagttcacacaaccctgaggaccctcccacactgactttcgggcccctgtccctctagtgagctgatggagg

SEQ ID NO: 409691 - DNA, 201 bp, Homo sapiens
tgcttaaagccacacagcaacttttcctccccttccattctgccacaggttaggttcctgatgaaaagctactccttcctgagagaggctgtgcctgggayccttcgtgccagacgaggtgaggccttcatcttgcccggttgtgaactcagtcctcttggctgactgaatgaagccagcaggtgcaggatcctgataaaa

SEQ ID NO: 409692 - DNA, 201 bp, Homo sapiens
tcctgggcttaagcaatcctcctgccttggcctcccaaagtgttgggattacaggagtgagccattgaggctggcccctaatttcaatatcgttgtatctsagcgaataggaaagctcgaggagaacagaagagatgggagaatggccggtcagcagagtagtcagaacacacacagaatttgtcagttaagtttgctctc

SEQ ID NO: 409693 - DNA, 201 bp, Homo sapiens
cccagctggaagatggaacagaaaagagctatgtcagagctgtggcctggccttatccttctgactgtttagccccagatagtgaatggagtagcttcccrttccctgagtgccctgttcccagtaatgtcaccaggccccctgcttgcctatggcctcctcaccactggcaacagcaacttccccttctagtagccccaa

SEQ ID NO: 409694 - DNA, 201 bp, Homo sapiens
aaaaactctagtgataagtcaatgctggcacttttggatcagatatgaacccttgatgtggcatccaaggctccttcccacacagccccagcctatctggkggaagatatgtgcttccatgcctccaggcctttgcccatactggcccctcagcttgaaataccctttcctaattttcagccatggaatctagttgcttct

SEQ ID NO: 409695 - DNA, 201 bp, Homo sapiens
ccctgagtgccctgttcccagtaatgtcaccaggccccctgcttgcctatggcctcctcaccactggcaacagcaacttccccttctagtagccccaaccrtgatactagatattggctggttggggtgagggcagctgctgagcacacaaagcatttcctgaccacaggatgcctctgggtctgcagaaccccaattcct

SEQ ID NO: 409696 - DNA, 201 bp, Homo sapiens
aaactctagtgataagtcaatgctggcacttttggatcagatatgaacccttgatgtggcatccaaggctccttcccacacagccccagcctatctggggraagatatgtgcttccatgcctccaggcctttgcccatactggcccctcagcttgaaataccctttcctaattttcagccatggaatctagttgcttcttg

SEQ ID NO: 409697 - DNA, 201 bp, Homo sapiens
taagtcaatgctggcacttttggatcagatatgaacccttgatgtggcatccaaggctccttcccacacagccccagcctatctgggggaagatatgtgcytccatgcctccaggcctttgcccatactggcccctcagcttgaaataccctttcctaattttcagccatggaatctagttgcttcttggaggcccatggt

SEQ ID NO: 409698 - DNA, 201 bp, Homo sapiens
attacatttgccctggacacatggttggacatctttctgtctctgtctctgtgtgtgtctcacttcaattactctgtgaactcccaatggccctttgagaytcatctctatcaccaacatctggcacaaagtgatgccaagtaaatgtacatgaacaaatggatgaataaatgaatgcatgaggccaggcacagtggctca

SEQ ID NO: 409699 - DNA, 201 bp, Homo sapiens
accaacatctggcacaaagtgatgccaagtaaatgtacatgaacaaatggatgaataaatgaatgcatgaggccaggcacagtggctcacacctgtaatcmcaacactttgggaggccaaaggaggaggaccgcttgaggccaggagttcgagactagactggacaatatagtgagatctcatctctacaaaaaacttaaa

SEQ ID NO: 409700 - DNA, 201 bp, Homo sapiens
gatgaataaatgaatgcatgaggccaggcacagtggctcacacctgtaatcacaacactttgggaggccaaaggaggaggaccgcttgaggccaggagttygagactagactggacaatatagtgagatctcatctctacaaaaaacttaaaaatagccaggcatggtggctcacacctgtaatcccagcactttgggagg

SEQ ID NO: 409701 - DNA, 201 bp, Homo sapiens
cacacctgtaatcccagcactttgggaggctaaggtgggtggatcacgaggtcaggagatcaagaccatcctggctaacacggtgaaaccccatctctacyaaaaatacaaaaaattagccgggcgtggtggcgggcgtctgtagtcccagctactcgggaggctgaggcaggagaatggcatgaacccaggaggcggagc

SEQ ID NO: 409702 - DNA, 201 bp, Homo sapiens
atgggcaagtccctgccagggtctccagatggcaatggaagctcctcctgccccactgggagtagcggctaaagctgggggatagaggggctgcagggccmctggaaggaacatggagctgtcatcactcaacaaaaaaccgaggccctcaatccaccttcaggccccgccccatgggcccctcaccgctggttggaaaga

SEQ ID NO: 409703 - DNA, 201 bp, Homo sapiens
gactccgtctcaaaaaaataataataataaaaaaaattagctgggagtggtggctcatgtctgtagttccagttacttgggaggctgaggtgggaggatcrcttgagtccaggagtttgaggctgcagcgagctatgatcacaccactgcagtccagcctgtctcaaaaaaaaaaaaaaaaaggaatgcataaatttgtga

SEQ ID NO: 409704 - DNA, 201 bp, Homo sapiens
ctcctcccaggggcagcgccgaggtccctgctggtgtgtggatcggatgggcaagtccctgccagggtctccagatggcaatggaagctcctcctgccccmctgggagtagcggctaaagctgggggatagaggggctgcagggccactggaaggaacatggagctgtcatcactcaacaaaaaaccgaggccctcaatcc

SEQ ID NO: 409705 - DNA, 201 bp, Homo sapiens
ccctgagaaataaatatgattatatcctcattttaaaatggcacctaagtcccaatgggatagtagcatgctttttttttttttttttttttttttttttytgagatggagtccagccttgttgcccaggctggagtagagtggcacgatcttggctcacctgcaacctctgcctcctgggttcaagcgattcttctgcct

SEQ ID NO: 409706 - DNA, 201 bp, Homo sapiens
cctgagaaataaatatgattatatcctcattttaaaatggcacctaagtcccaatgggatagtagcatgcttttttttttttttttttttttttttttttkgagatggagtccagccttgttgcccaggctggagtagagtggcacgatcttggctcacctgcaacctctgcctcctgggttcaagcgattcttctgcctc

SEQ ID NO: 409707 - DNA, 201 bp, Homo sapiens
aagaatttttcttagtacagaacaaaatgaaaagtctcccatgtctatttctttctacacagacaccgcaaccatccgatttctcaatcctttccccaccwttcccccctttctattccacaaaactgccattgtcatcatggcccgttctcaatgagctgttgggtacacctcccagacggggtggtggccgggcagagg

SEQ ID NO: 409708 - DNA, 201 bp, Homo sapiens
gtgcattagaactaccttcggggtttgttaatacagagtttctgattcattaagtctggggtcaagcctgagaatgtgcatttctaacaagtttccagggsaagcccttgctgctgatctagggaccacttctttagcatacaccgaaccaagccctctttcttctcctcctttttttcctttttcttcttcaaaattatt

SEQ ID NO: 409709 - DNA, 201 bp, Homo sapiens
tattaatgtttcattcattaaaaatgacatgagcaaagatcattctgttttgggctgagttatagttttgtagcctctatgccaaattttgacaccttatrgtatttggcagagataagtatgaaattgcttgatcaataaatgcaaacaaaaatgtatgctggcaactcttaagacatttctagtattactttaccaata

SEQ ID NO: 409710 - DNA, 201 bp, Homo sapiens
cctctatgccaaattttgacaccttatagtatttggcagagataagtatgaaattgcttgatcaataaatgcaaacaaaaatgtatgctggcaactcttamgacatttctagtattactttaccaataatttttaaagctagcttatgtattaaagattttatttaagtcacataaacttgaaaaagcatttgactagtct

SEQ ID NO: 409711 - DNA, 201 bp, Homo sapiens
tttttttttttttttgaaacaaagtctcgctctgttgctcaggctggagtgcattggcacaatctcggctcactgcaacctctgcctcccaggttcaagcragtagctgaactacagatgagtgccaccaggtgtggctaattttttttttatatttttagtagagacggggtttcaccatattggccaggctggtcttga

SEQ ID NO: 409712 - DNA, 201 bp, Homo sapiens
  misc_feature (1)...(201): n = A,T,C or G
taaggtagggctagagcagctgtgccctggggaaggctaatcagggaaggccttgctagttaccttccctcagtttcaacacgttctccttctgagtctcncctcacatctgtcccctcctatcagggccattgccatggtctcagttcagaccatctgctccccctccacatcagcctcctaacccatctccctggcacc

SEQ ID NO: 409713 - DNA, 201 bp, Homo sapiens
ggtgggttgagtcatagcaaggtcacagcagggacacacattccttttgggtccctgttggcccccctcctacatccgttgctcttctgccccagctctcyggcttcgtgcgcccccttctggcctctggtggaacagccaggtcttttcacccaaagcccaaagccccaaatagtcctttgaatttgttctccatttttt

SEQ ID NO: 409714 - DNA, 201 bp, Homo sapiens
aaacagttgttatggaggcctgtattagtgaaacctggcctgccacatcccctctccctatgttgggcttgggaagcaatgaaaaaaacagctccaaggawccacaggctcagcaacagcactgccttttggtaaaatttttgttgttagttatacaagtattaaaaggacaaaatctactgctaggtttgcataagaaaa

SEQ ID NO: 409715 - DNA, 201 bp, Homo sapiens
cctagcccgcatccaggtcctacgtccagctccttgcttatcccccacccccaccctatccatttctccactcaccaatcccaccacccttccccagcagscccctcacctctgccctctgcccttgcccttactaatccacccctctcattcctccccaggtgaggggatccaggcccccagtttctccagctacctcta

SEQ ID NO: 409716 - DNA, 201 bp, Homo sapiens; identical to SEQ ID NO: 92293

SEQ ID NO: 409717 - DNA, 201 bp, Homo sapiens
attcactttaatcggtgttgaagtaatcattgtaacaggacttacctctcaacccccgtcttaaaaaagctctggtatttctgaattcttaatagactctttttaatggcacaactattatctcatttgcctttagattcttcctcatctttcatatccaataaatcactaagccctcttcattctatcttgcagatatgg

SEQ ID NO: 409718 - DNA, 201 bp, Homo sapiens
gtatctgaatttctaggaggggcgtatttagtctgtaaaagcatactgcaaaattgccattaatttgatttgttttcaatatcaacatcagaagaaagtgyaagatttatatgtatattgaaaggagaatggactttaaaataccaggaatcacgaatttatatgatggaatattacatatactttacattttcaggaatt

SEQ ID NO: 409719 - DNA, 201 bp, Homo sapiens
tcgggctgcaattcaaccaatccaagtactcggtgttgaagggctcagtgacaattaaagatggctgcgcccatgtaacatcactagcgaccggtgacctmtttttcccccttgcctggctcctgtggtggcaggctgggcacgaggaccatgctgggccggagcctccgagaagtgagtggaattggcccgctgaggccc

SEQ ID NO: 409720 - DNA, 201 bp, Homo sapiens
acttagccactccatctccccccacccccaccaatataacaattgaaacttctgcagactcagtaaaaggtttttgaattgtatacactataggtttctgyggcactgaaacaaggccaaattacaccaacagagctctgtcaaaaatgtctctctcttatcaagaagaccaagtttctaaatgcctacattactgtgtca

SEQ ID NO: 409721 - DNA, 201 bp, Homo sapiens
tctataaaacaatatatctgtcattcataagtattgctccttacaggtgcactggccggacctgaccccagggactctaccacagtacatgaacctattartaaaccattcatgcttcccagtttggcagatgtgagcaaactatgtataggaattccaaaggtaactttttcctttcattactttacagaaatactgtca

SEQ ID NO: 409722 - DNA, 201 bp, Homo sapiens
catgaacctattaataaaccattcatgcttcccagtttggcagatgtgagcaaactatgtataggaattccaaaggtaactttttcctttcattactttayagaaatactgtcaagtccaatagagagcacagacttgggaggcggattgggtgggtttgaatctctgctctgccacttttattaatcatgtgagttgagt

SEQ ID NO: 409723 - DNA, 201 bp, Homo sapiens
ttttttttttttttttttttttttttttttgagacggagttccgctcttgtttccagctctccacgctggagtgcaatggagcgatcccagctcactacarcctccgcctcccaggttcaagcaatgctcctgcctcagcctcctgagtagctgggattacaggcatgagccaccacgcccggctaatttggtatttttag

SEQ ID NO: 409724 - DNA, 201 bp, Homo sapiens
gtattatgtatgtctttactctaaaaaagaattcagaatgactatgactcctccttcaattgtcttcattatgagtttattcacgatcttgtgaacaggcytcatcttctataccaccaagtgtgtctaagaggacatgagaagtgtgaaaaagcaagattggttattgtaatgaagagcttcttggagtttttctccatg

SEQ ID NO: 409725 - DNA, 201 bp, Homo sapiens
tcctgaagtacagatttttataaaatcatctatacagatgaagtacaaatttttataaaataatctatacagttccaattttgtatcttgactttttgctrtaaggaatatcttgtaccggaattatcaagtgaagtacagtctctttggtccaaagctgctgacctctttgagtctgagggggccaaagtaattgaagta

SEQ ID NO: 409726 - DNA, 201 bp, Homo sapiens
aattcactttaatcggtgttgaagtaatcattgtaacaggacttacctctcaacccccgtcttaaaaaagctctggtatttctgaattcttaatagactctttttaatggcacaactattatctcatttgcctttagattcttcctcatctttcatatccaataaatcactaagccctcttcattctatcttgcagatatg

SEQ ID NO: 409727 - DNA, 201 bp, Homo sapiens
gccttatttaaagaacttgccatgaggataataaaaatgagggtaatggctatgtgatgcttcataatgtccaactgtattaatttctgccataaatttgwtttctgaagaagtatctttgccaaaaactagtagttactgtaataacatgtattcatgtatctttatattttaaactatctcctttatcactcttttggc

SEQ ID NO: 409728 - DNA, 201 bp, Homo sapiens
tatgatgtgaacaagggagaggataggagcaatagtaacaaagatgacagtgtgctagccagcaaaattgtcaatgaatgaaaagtagtaccaggaaggcwataggtcagcatactggggagcgtggtgtcatctcccaaggcatgtgctttgggtgagcggaatgtttgagagaagagggaagagaagcattgaggaaca

SEQ ID NO: 409729 - DNA, 201 bp, Homo sapiens
tactaccatctttgttcttcccattccatatacatgatgttaaaacgcactgctctcttttattccttctagcttctttcttctagagggtttacatttctttttttttcttttttgagacagagtttcgcttttgttgcccgggttggagtgcattggcacgatctcacctcaccgcaacctctgcctcccgggttcaag

SEQ ID NO: 409730 - DNA, 201 bp, Homo sapiens
aatattaatgtgagttctgacaagttaggactgcaggattaggtgctttttttctgtcctcatcatcccacttagtgttcatctttctgaatgtgcttttkagtagatggcattttgacacataattcctatggaaatgtaagttttacttttacatagccgtcagtgaatgctaataagaaaatgtatcttttaaaattg

SEQ ID NO: 409731 - DNA, 201 bp, Homo sapiens
gtgtttggggctggtaattgtttgttgtgggagactgtcctgtgcattgtaagatgtttagtagcatccctggcctctacccctacatgcaagtagtaccscaccaccaaaaccacaatcccacaaccaaaaatgtctgcagacattgtcaagtgtctcctggttagggaaaaggagacaaaagtaacccccaggtaagac

SEQ ID NO: 409732 - DNA, 201 bp, Homo sapiens
ccgaggcaggagaatcacttgacaagggaggcagaacttgcagtgagccgagattacaccactgcactccagcctaggtgacagagtgagactccatctcaaaaaaaaaaaaaaaaaaagtgaatctaggcctgattttagccaaaactttactgactttacttcctttcaagtaatgtttacccttttcttgttttcagg

SEQ ID NO: 409733 - DNA, 201 bp, Homo sapiens
ttactctatcttggatggaagcagttcttcttctgagccatatttaaagtaggaagaaatttaatagaaaacaagtatttgttttgttttgttttgttttkttttgagacggagtcttgctctgtcgccaggctggagtgcagtggcgcgatcttggctcactgcatcctccacctcctgggttcaagagattctcctcct

SEQ ID NO: 409734 - DNA, 201 bp, Homo sapiens
ttataaaattcaggttttggaatatggtgtttaaaccacttaggtgttgtcagtgtgtaaattatatgtgatgcctgcattggtctctctgtagacctggwggtcaaataagagtaaggacctatgatatttctgtaccactcttttagagtaaaacatatttcacgtttttatcgtattttatttggccctcagtaaaac

SEQ ID NO: 409735 - DNA, 201 bp, Homo sapiens
tcttccttcccatcctccgcaactgtcaattaatgaaagctacatctgaacaggcttcccacctttttcaattcaagctacagtgggttcttaaatgctcratgagtgtcagaagcaaataatatactcagaagatgaaattttcacataaaatgaaagttttactaaggtatcttgcttcacttcgtcatcagatctggg

SEQ ID NO: 409736 - DNA, 201 bp, Homo sapiens
atgtatatttaatacttttaactttaaaataacaaatttttctccatagtatctggttctcttaaaatatgattttgtggatcttgcagaataaagcatcraacataaatgaacttcattgcatttcatttttaaataatttgagtgtgtgctcactgattatacaaatatttagggactaacatacaatggctttagttg

SEQ ID NO: 409737 - DNA, 201 bp, Homo sapiens
tatgctgatatgctgttaggttcctgatacataatgagcatttaacaaatattttccccaaccagatctccaatctttaatgttgttatatccagatcatratatctagtactgtgctttgtcataccataaacactctgaaatggatttagtctttctagctacctaccagcaattttatcctattttctaatgtattac

SEQ ID NO: 409738 - DNA, 201 bp, Homo sapiens
ctcagtgacaattaaagatggctgcgcccatgtaacatcactagcgaccggtgacctctttttcccccttgcctggctcctgtggtggcaggctgggcacraggaccatgctgggccggagcctccgagaagtgagtggaattggcccgctgaggcccccgggagggcggaaagtttaacggacttcgttgacaaagagtc

SEQ ID NO: 409739 - DNA, 201 bp, Homo sapiens
agatgagtttgctatggggtaagtaaaattgaaatcttctcttgagtttcttctgtctgtgcctttattttcactaaatgtagttacctaaaaggattgargatctaatgccagtttcttagtccctctgtgagattatgttatgttgtttaatagatatatagtcatctctaattttgcttttggcttgtatttccctga

SEQ ID NO: 409740 - DNA, 201 bp, Homo sapiens
cctgggttcaagtgattctcctgtctcacctcctaagtagctgaaattacaggcatgcaccaccagacccagctaaattttatatttttagtagagacagygtttctccacattggccaggctggtctcgaactcctaacctcaggtgatccgcctgtcttggcctcccaaagttttgggattacaggcgtgagccacccc

SEQ ID NO: 409741 - DNA, 201 bp, Homo sapiens
ctaactggtaaagtcagtgtttttagattataaaaatagtgaaggcacagactatctttggaaaacatacattagcagtagaaaaaaattactggaaggargtacaactgattatttaaattaggaataattaatacatatcactatgaattgcttaattgcagtttagactcttgattttttgttttttgtttgtttgtt

SEQ ID NO: 409742 - DNA, 201 bp, Homo sapiens
ttttttagtgctacttctctctggtgtcattgagttagccattgtgaaaaacaacttttgccgcatggggggagaaaagaactatttaggagagctgaccyaggggaaaatccagaggttgccttggcatgattgcttttactttatcactcctttaacaaatactgattaatgcctagcatgcaaaatatttggtggtta

SEQ ID NO: 409743 - DNA, 201 bp, Homo sapiens
atttattctttagagtttggtcaaaagaaagcaggtttatcaagatatttggatcctaggaagaaacagaaatagaaaaaaggttattcagagtactagaygctaaaaataatattctatgaggaatatgccccaccttcctctaatatgcagactgttgttaattattttggaatatacgctagagcttttcaatagcta

SEQ ID NO: 409744 - DNA, 201 bp, Homo sapiens
tacttcctacaggaaatattagacactcatcactccatcttaggccctacttcctgtcaatatacactggtattcactacttcccagtcactttcggtgcrgtttttttttaactccttctttaccagccttcccaatgtcttccctaaagacagaatttcagaaaagtttgtttttactttgcctttgaacccgtatttt

SEQ ID NO: 409745 - DNA, 201 bp, Homo sapiens
caagtaatggagtactatacagcaataagaaatgaatgaagaaggtttctgtgaactgatacagaatgatttccaagatatattgttaagtaaacaaaacrtagtacaaaagcattatatagcataatatttttggttgttttttaaaccttatcctgtattgtacttattagcactggaaagtggaagaggtctctgcta

SEQ ID NO: 409746 - DNA, 201 bp, Homo sapiens
gagatagggtttctccatgttggtcaggctggtcttgaactcccaacctcaggtggtctgtccatctcggcctcccaaagtgctgggattacaggcgcgarccactgtgcctggccaagggtttacctttcatacaaaccattagacgaactctctcttcttgttactataaaagtcacttccttaaatcggaccttgctg

SEQ ID NO: 409747 - DNA, 201 bp, Homo sapiens
tgattaccataaacgtactgtataacctctaccttcagctcattgataacatgggaataagtatgaactggctatcatcaatacccttctgtggatgacgkgaggattcattaacatctactgaccagttattttttatttcctgattcctctatctcttgtagcacagtatggcaatgcttagatttattctttagagtt

SEQ ID NO: 409748 - DNA, 201 bp, Homo sapiens
ccttagcttttatccttataccagtctggaagcagcttgaggattgtaggcattaggggacttgagaggagtcaaggaaggagagaaagtggcaaatgcarttttcctcattgttacaacttagccatgggatgggcctgcctacgtatatttgtctctctagctctgggtttttgttagttctaactctcttccacccag

SEQ ID NO: 409749 - DNA, 201 bp, Homo sapiens
attttttatttcctgattcctctatctcttgtagcacagtatggcaatgcttagatttattctttagagtttggtcaaaagaaagcaggtttatcaagatwtttggatcctaggaagaaacagaaatagaaaaaaggttattcagagtactagacgctaaaaataatattctatgaggaatatgccccaccttcctctaat

SEQ ID NO: 409750 - DNA, 201 bp, Homo sapiens
ggtaggtaggcactaaacaggagaagcagcggctgccagggaagacctagtttccattagagaaaagatgtgccagagagagaattttttttcttttaacraaaacttaaaagttaacttcgttttatattcagatttgacacctgcagttttgtcctggggaactgtatatgtgatttatgtttcctgcttcttatgctc

SEQ ID NO: 409751 - DNA, 201 bp, Homo sapiens
atcacctgaggttaggagttcgagaccagctggccaacatgatgaaagcctgtctctactaaaaatacaaaaattagctgggcgtggtggtgggcacctgyaatcccagcaactcgagagactgaggcaggagaatcacttgaacccgggaggcagaggttgcagtgagccaagatcgtgccactgcactctagcctgggc

SEQ ID NO: 409752 - DNA, 201 bp, Homo sapiens
aaattctaccaattagagattaattaattcatacaaattatcttttaatttaattctcttttaaatatgtacagatgcctgggaaggttgaacaatttttycacccattgttgtaaattataacagttcaaatttcttcataataccttaattgagataatcagttgaagagggggaaatttgcggggaattagggagaag

SEQ ID NO: 409753 - DNA, 201 bp, Homo sapiens
ttagccattgtgaaaaacaacttttgccgcatggggggagaaaagaactatttaggagagctgacccaggggaaaatccagaggttgccttggcatgattrcttttactttatcactcctttaacaaatactgattaatgcctagcatgcaaaatatttggtggttatttccccagctctaaaactaccttctgtctactt

SEQ ID NO: 409754 - DNA, 201 bp, Homo sapiens
tgagaatgtgttgatttccctttgatttttaaaggttatttttgctggatgtagaactctggttcaacagttcttatctttagcacttaaaaaatgttaakagcccagtccacttgtgctgtaagatgtcccatccataatcaggatttgtcagattgcttcctcatgattgggttgagttaaacatttttggtagaagta

SEQ ID NO: 409755 - DNA, 201 bp, Homo sapiens; identical to SEQ ID NO: 92298

SEQ ID NO: 409756 - DNA, 201 bp, Homo sapiens
agttagaaacaacgtaagagtttaaattattaaacatctcaatccatgattctaaatggggtgggtagcaaagggctgtatctgaatttctaggaggggcrtatttagtctgtaaaagcatactgcaaaattgccattaatttgatttgttttcaatatcaacatcagaagaaagtgcaagatttatatgtatattgaaag

SEQ ID NO: 409757 - DNA, 201 bp, Homo sapiens; identical to SEQ ID NO: 92299

SEQ ID NO: 409758 - DNA, 201 bp, Homo sapiens
ggtggagaattaatcacctactgggtttccttcttttcccaggattgccagcagtgagtatccctgttgcactctcaaaccaagggttgccaataggactrcagtttattggacgtgcgttttgtgaccagcagcttcttacagtagccaaatggtttgaaaaacaagtacagtttcctgttattcaacttcaagaactca

SEQ ID NO: 409759 - DNA, 201 bp, Homo sapiens
tacatacacaaagtaattctctggggcattgtataaaatagctaaatattgaaaacaatctaaatacccaaccacagaagactggtttactcaattatggkaaaaccaagtaatggagtactatacagcaataagaaatgaatgaagaaggtttctgtgaactgatacagaatgatttccaagatatattgttaagtaaac

SEQ ID NO: 409760 - DNA, 201 bp, Homo sapiens
tggaactacaagcttgcaccaccatgcccagctaatttttgtattttctgtagagacgggatcctgccatgttgcccaggctgatctccaactcctgggtycgagcaatccacccatctcaacctccaaagtgcaggtgttacaggcatgagccaccatgccaggccacaggattactttttctaagaatactatttgagg

SEQ ID NO: 409761 - DNA, 201 bp, Homo sapiens; identical to SEQ ID NO: 92304

SEQ ID NO: 409762 - DNA, 201 bp, Homo sapiens; identical to SEQ ID NO: 92305

SEQ ID NO: 409763 - DNA, 201 bp, Homo sapiens
ggcggatcacgaggtcaggagatcgagaccatcctgtctaacacggtgaaaccccgtgtctactaaaaatacaaaaaattagcctggcgtggtggcgggckcctgaggcaggagaatggcatgaatccgggagacggagcttgcagtgagccgggatcgcgccactgcactccagcctgggcgacagagcgagactccaat

SEQ ID NO: 409764 - DNA, 201 bp, Homo sapiens
tcactacaacctccgcctcccaggttcaagcaatgctcctgcctcagcctcctgagtagctgggattacaggcatgagccaccacgcccggctaatttggyatttttagtagagatggggtttctccatgttggtcaggctggtcttaaactctcagccgcaggtgatccacccacctcggcctcccaaagtgctgggatt

SEQ ID NO: 409765 - DNA, 201 bp, Homo sapiens
tttacctttcatacaaaccattagacgaactctctcttcttgttactataaaagtcacttccttaaatcggaccttgctgccctccttatccctgcagcaktcctgcagcctccccatggaagtccttttcctcttgtcggtgagcattagggatcctcttgatgacctcttcccactgcttgttgcatttaaaaccctca

SEQ ID NO: 409766 - DNA, 201 bp, Homo sapiens
agcactttgggaggccaaggcgggtggataacttgaggtcaggagttcgagaccagcctggccaacatgacaagaccctgtctctactaaaaatacaaaamttagctgggtgggaaggcgtatgcctgtaattccagctactcgggaggccaaggtacaagaatcacttgaacctgggaggcagaggttgcagtaacccaa

SEQ ID NO: 409767 - DNA, 201 bp, Homo sapiens
ttattttatattttcttctaccttcttgaacatatagaacatatttaggctgcgtgcggtggctcacacctgtaatcccagcactttgggaggccaaggcrggtggataacttgaggtcaggagttcgagaccagcctggccaacatgacaagaccctgtctctactaaaaatacaaaaattagctgggtgggaaggcgta

SEQ ID NO: 409768 - DNA, 201 bp, Homo sapiens
tacccattcaggagttaggaccttagcagggaaatctctgcaccgcggatctgtagggtggtgaagcggcttctcaccattagacatttgctctggtgtaggtcgggatccggatggtctcggagtgggctttgccaaagggggcttgcggggccacttcagtctctcttctgtccccgacacttagctgcagttgtcgct

SEQ ID NO: 409769 - DNA, 201 bp, Homo sapiens
tttatacattatatttttttctctagaagttccatgtaggtcttcttatcccttcaatttcttcattattttatattttcttctaccttcttgaacatatrgaacatatttaggctgcgtgcggtggctcacacctgtaatcccagcactttgggaggccaaggcgggtggataacttgaggtcaggagttcgagaccagc

SEQ ID NO: 409770 - DNA, 201 bp, Homo sapiens
ttcaccaaaagtactttatacttacccttttatgacacttgtcacatttgtaatatttgcttggtcattgttctctgtttcatagaaacaagagtccttgygtgtatagttcagagtggtatatcttggaattcattatatatatgttgaatgaactaatccatgagagtatatttgaacaaaggctttcaggaaattgcc

SEQ ID NO: 409771 - DNA, 201 bp, Homo sapiens
tttcctcgggctgcaattcaaccaatccaagtactcggtgttgaagggctcagtgacaattaaagatggctgcgcccatgtaacatcactagcgaccggtracctctttttcccccttgcctggctcctgtggtggcaggctgggcacgaggaccatgctgggccggagcctccgagaagtgagtggaattggcccgctga

SEQ ID NO: 409772 - DNA, 201 bp, Homo sapiens
agtacacagtgttccccagcatgctgttggcattgttgtaaacaaacaagggcaagattcttgccaagagaatgaatgtgcatattgagcacagtaagtamtgtaagagccgagatagcttcctgaaacgcattgaggaaaatgatgaggaaaagaaggaagccaaagagaaaggtacctgggttcaactgacgtgccagc

SEQ ID NO: 409773 - DNA, 201 bp, Homo sapiens
ggccttttggcgggaaccaccatcatccagtaattcaccaaaatgatgaacacaaagggaaagaggagaggcacccgatatgtgttttctaggccttttasaaaacagggagttgtttgccatgtacatgtgaacctataagaaaggtgatgtggacatcaagggaatgggtattgttcaaaaaggaatgccccacaagtg

SEQ ID NO: 409774 - DNA, 201 bp, Homo sapiens
tttgtttcctataaaaaggtaactggccttttggcgggaaccaccatcatccagtaattcaccaaaatgatgaacacaaagggaaagaggagaggcacccratatgtgttttctaggccttttagaaaacagggagttgtttgccatgtacatgtgaacctataagaaaggtgatgtggacatcaagggaatgggtattgt

SEQ ID NO: 409775 - DNA, 201 bp, Homo sapiens
ctgaggacaatgtctagaactaagtactagctattattaacattaattttgttacagggacaaaattactaaattatatgtatttgcatttttcccttccyttactttctaagaagagtggttcctgagcaagattttaaaatttttctaaggaggtatattagttgtctatggctgcataaaaaattactataaactttg

SEQ ID NO: 409776 - DNA, 201 bp, Homo sapiens
cacattggccaggctggtctcgaactcctaacctcaggtgatccgcctgtcttggcctcccaaagttttgggattacaggcgtgagccaccccgccccgcygactcttgtttcttacatatgatttacatgttcgctgttttgtttcctataaaaaggtaactggccttttggcgggaaccaccatcatccagtaattcac

SEQ ID NO: 409777 - DNA, 201 bp, Homo sapiens
cacagttttctgggtcagaagtcagggcatggagtagctgggtcctctactcagggtctcacaaggctgaaatccatgtgctgcagttgcactgcaaggtrttgctagggctagagttccatctggagctccagccctctcgacctcgttggtttctggcagaattcatttcctgtggttgtggaactaaggtccgatttt

SEQ ID NO: 409778 - DNA, 201 bp, Homo sapiens
tccacattggccaggctggtctcgaactcctaacctcaggtgatccgcctgtcttggcctcccaaagttttgggattacaggcgtgagccaccccgccccrccgactcttgtttcttacatatgatttacatgttcgctgttttgtttcctataaaaaggtaactggccttttggcgggaaccaccatcatccagtaattc

SEQ ID NO: 409779 - DNA, 201 bp, Homo sapiens
gtttctccacattggccaggctggtctcgaactcctaacctcaggtgatccgcctgtcttggcctcccaaagttttgggattacaggcgtgagccaccccrccccgccgactcttgtttcttacatatgatttacatgttcgctgttttgtttcctataaaaaggtaactggccttttggcgggaaccaccatcatccagt

SEQ ID NO: 409780 - DNA, 201 bp, Homo sapiens
aggaattctcttgggtcatgttgattctgactgtgactccagcttattcatctgacctttatccagccaagaccaagctgaagctgagagcagaaatgagragtatttggaaagctattttactgcttctgtttaaaaggttttcccttttttgattagttttcagaagtcaactactcttgaccacattgagtagaagta

SEQ ID NO: 409781 - DNA, 201 bp, Homo sapiens
ggatattttttgaatatgttaagatttgatggttttatttattggtagtgtcattggtgcacttgaatatttcatgctctgcctgaaattcatgtcttgcygggaaagttgtacttcattctgtttgacagaagtattaaaaggtgttaggtgtagtgttgcgtgcctgtagtcccagctactcgggaggctgaggcagga

SEQ ID NO: 409782 - DNA, 201 bp, Homo sapiens
gcagcctgtcctctagaactttgtgcagtgatagagatgttctctgtctgcagtattcacttggtggccactaagccactgagcacttgaaatgtagcaartgcaacttgagagactgactttttcattttatttacttacttttgattaacgtaaatagtcacgtgtctagaggctaccatattggacactgcagctttc

SEQ ID NO: 409783 - DNA, 201 bp, Homo sapiens
ttaagatttgatggttttatttattggtagtgtcattggtgcacttgaatatttcatgctctgcctgaaattcatgtcttgccgggaaagttgtacttcaytctgtttgacagaagtattaaaaggtgttaggtgtagtgttgcgtgcctgtagtcccagctactcgggaggctgaggcaggaggattgcttgaacacggg

SEQ ID NO: 409784 - DNA, 201 bp, Homo sapiens
aaaattttgtcatgtaagtgtaaattaggtgtctgattaattctgatatagaattatagaattaggcccagagttaaaaacattgggtttattccctaccratatgcttatattaaaattaaaatgacagccttcttctttcaaatgcattctaaggccttttcttcaccccaccaccacctgtttcttcccactccccaa

SEQ ID NO: 409785 - DNA, 201 bp, Homo sapiens
aaaaaaagcaaaaagggttacactaaaggtccagttagtagttactttttaagggagttgaggaggttttaattgggaggcttagggacacaggtggtatwctaattcttaattttgaatagtggttataataatatttgctttgtaataatttgttaagctgtatatttatattctgtatgcttttatttgtattatatt

SEQ ID NO: 409786 - DNA, 201 bp, Homo sapiens
tgttcagggagcttctactcttgccaggcagggttccaaacaccagctacagtggtgaaccagacaaatgcccactttcatggagcttacattcttgtttrggcggttttagtggtaggtgctctgaaaaaaaatgaaagggaatagatagggaggaggctgttataaatagcaaggttaaagaatgcctcactgaggaag

SEQ ID NO: 409787 - DNA, 201 bp, Homo sapiens
aaattactggcctttaaagaaaaaagaaataagatcctttggaaatctagacaaaatagcacatgtgctacttatgtgtccatataagaaaaaagatgacrtgacttataagagaaataaaattagactatcatgagactttttggcagtaacacttttggcagaaaaaaatggagtaacatatttaagatactcaaggaa

SEQ ID NO: 409788 - DNA, 201 bp, Homo sapiens
aaaccagatggctagaaatcaagtatgggaggaagatctttttttttttttttttttttttttttgagacagggtctcactttgtcacccaggctggagtrtagtggtgtgatctcacctcgctgcagccttgacctcctgggctgaagtgatcctcccacctcagccccccatatagcactacccagcactacctcttgg

SEQ ID NO: 409789 - DNA, 201 bp, Homo sapiens
atcaggatgtgaacatctttgggggccattattctgcctaccacaatgcataaaatacttcaaaaaggttatgagagcaactagaaaccttggttgctcckgaggtgggaaaccagatggctagaaatcaagtatgggaggaagatctttttttttttttttttttttttttttgagacagggtctcactttgtcacccag

SEQ ID NO: 409790 - DNA, 201 bp, Homo sapiens
catgtaaggtgccatattcacacattttgggaatcaggatgtgaacatctttgggggccattattctgcctaccacaatgcataaaatacttcaaaaaggwtatgagagcaactagaaaccttggttgctcctgaggtgggaaaccagatggctagaaatcaagtatgggaggaagatctttttttttttttttttttttt

SEQ ID NO: 409791 - DNA, 201 bp, Homo sapiens
gctagggtgagtgaggattgatggggatttgggtgaagacaactggctggtgtactctgcctactagtgtctgtcctgccgtggactctgtgggaaagggrctgttgcttatcatctggtcatcgttttttggatgtcaaaaggtctttcagggattctggggattgaaagcctcctcagctgccacctgcttatttgggt

SEQ ID NO: 409792 - DNA, 201 bp, Homo sapiens
cacttgcatatttctataaagggactgcacaactattgaatattcttaagttctctcagtctcaatgcctaatatccattaggtcaattctgattccccartgccttgagcgtgtactcatttgggttagcagcaacatggtgaccagaaatgtctcagatgtacttgagtttatatgtagattctgttgctttccagttg

SEQ ID NO: 409793 - DNA, 201 bp, Homo sapiens
gattacaggtgcccaccaccacacctggctaatttttgtatttttagtagagatggggtttcgccctgttggctgtactggtcttgaactcctgacctcaratgatccacctgccttggcctcccaaagtgctgggattacagacatgagccactgcacttagcctttaatagatattaaaatagacagcttttgaaaatc

SEQ ID NO: 409794 - DNA, 201 bp, Homo sapiens
aatttttgtatttttagtagagatggggtttcgccctgttggctgtactggtcttgaactcctgacctcagatgatccacctgccttggcctcccaaagtrctgggattacagacatgagccactgcacttagcctttaatagatattaaaatagacagcttttgaaaatctagtatatatatttagtgtctggaatttat

SEQ ID NO: 409795 - DNA, 201 bp, Homo sapiens
ccttggcgattttgaataacagtgcttttttcaagtagagtatttctgtacacactttatataaaccaacaaatacagcacacgtttcttcactatcacarataggcttctacttcagtgagattcgaatatatagtgtggccattacagcaagctaggtaaaaagtattcccactgtgtaggacttaagtgaagggccat

SEQ ID NO: 409796 - DNA, 201 bp, Homo sapiens
agaatctggattaatgagtattactgatagagtctaaattctgcttgttagccctgcatgccccagtaaaaatggagaagccaccgagttaatatccacartaatgagcactctctgtcaatctgttaatagcattgtccttctaccttctttatgaacaacaaccctacctttgccttctcccagtgcagcactcagtaa

SEQ ID NO: 409797 - DNA, 201 bp, Homo sapiens
tcttcactatcacaaataggcttctacttcagtgagattcgaatatatagtgtggccattacagcaagctaggtaaaaagtattcccactgtgtaggactkaagtgaagggccattgggaggtcagcaacagcagttgcttccctttgcattgaacgtgctgtgaagaatacaacaagaataattagttgagccacaagac

SEQ ID NO: 409798 - DNA, 201 bp, Homo sapiens
cgtgctgtgaagaatacaacaagaataattagttgagccacaagacttcagactttagaagaccgaccggcttattgttggcttgaaaatttattttgccrccgggtgcggtggctcacacctgtaatcccagcactttgggaggctgaggtgggcggattgcctgaggtcaggagttcgagaccagcctggccaacatgg

SEQ ID NO: 409799 - DNA, 201 bp, Homo sapiens
catattgtaatggtatgcacaaaaggcctaaaatcagagctatatatctaggaacaagacagatatgttggatgctgttgtacatgcaccaataatatttkaaaacaagacaaactattccagtgaccataattgcctaccatagactccagagaagatcagcattttagaattagaaacacacttgaatagatggaaaag

SEQ ID NO: 409800 - DNA, 201 bp, Homo sapiens
tgtagcctacataacattactgaacatctgtgaggcaggtagagctattctatacaatatttattaggataatcttggagtagggtatgcatattgcttaycctactccaagatatgcaacagatagagctatgcaatatttattaaggataatcttggagtaagatatgcaacaaacatgaactggaatgattttataga

SEQ ID NO: 409801 - DNA, 201 bp, Homo sapiens
gatgtatctattgtgttgtttgagtagagtgctttggctttgttcctgggtgagcgcagtagtgtagtctctgtatgatttcttttttttttttttttttktgacagagtcttgctctgtcgcccaggctggagtgcagtggcgcgatctcagctcactgcaacctctgcctcccgggttcatgccattctcctgcctcag

SEQ ID NO: 409802 - DNA, 201 bp, Homo sapiens
agctttagttaaaattgatctttgtaatttctgcctggagtttgacctctcagtctacctaggataaatatgttcctccttccaaatagcagctttttagrtatttgaatcttagagttttatagcaagaaggggctttgaaatccttcagtccaaccctatgatgctgtagttgagaaagtgaagggcagaggagttatg

SEQ ID NO: 409803 - DNA, 201 bp, Homo sapiens
ggaagcagttatttcccttggcaagaaagcaagagacatgtctattttatttgaaagatgaaggctggctgtttttctggagacggccactactgttggaygtaaaataataaatcatagaaatggctaaagaaatgaagaatttttacatggggaaaaaatgcagccaacagcatcataccaacaaagtttggtgtcttt

SEQ ID NO: 409804 - DNA, 201 bp, Homo sapiens
gtcagaatatagaaacttgaagatgattttctacttctggatgtcttgctgttttgtagcatgtttcgtgtttttgtttttttttttgtaaggcagctaasggggttggcgccctacctcataagattacaatactgaaaactgtgattgtagagggcttaggtgcccaaatgccaaataaaaagtgactcagtcatggaa

SEQ ID NO: 409805 - DNA, 201 bp, Homo sapiens
ccccaagacctgaggctgtccaccaacagctataccctgaagcatggctgcagaacactgcagggaaggcagccccatgcaggccatgtgtggatgcaggyggataggaggacaagaaattaggctaaaaaatctgagtttagcaaaaaagtatgtaacattgcttcagcacttgtagatgagtaaggatggctcataaat

SEQ ID NO: 409806 - DNA, 201 bp, Homo sapiens
gatagactggattaagaaaatttggcacatatacaccatggaatactatgcagccataaaaaatgatgagttcatgccctttgtagggacatggatgaaaytggaaatcatcattctcagtaaactatcgcaagaacagaaaaccaaacaccgcatattctcactcataggtgggaattgaacaatgagatcacatggaca

SEQ ID NO: 409807 - DNA, 201 bp, Homo sapiens
attcctctgctttaacaggaagccacatcgaggatgggaattgattttcatttatgaaagttgatgaacttgacatctctgaacaaaagatgtttatttcrctttggtgagaatgtagtcaggaatgtgatttttcttagagaacagctaagcataacaaattaaaaagggccccaaatctccctctcatagaggaagctc

SEQ ID NO: 409808 - DNA, 201 bp, Homo sapiens
ccagtactttttcctgtagatgtatctattgtgttgtttgagtagagtgctttggctttgttcctgggtgagcgcagtagtgtagtctctgtatgatttcttttttttttttttttttgtgacagagtcttgctctgtcgcccaggctggagtgcagtggcgcgatctcagctcactgcaacctctgcctcccgggttcat

SEQ ID NO: 409809 - DNA, 201 bp, Homo sapiens
tttatttctttctcttgcttaattgctctggctagtacttccagtactttttcctgtagatgtatctattgtgttgtttgagtagagtgctttggctttgktcctgggtgagcgcagtagtgtagtctctgtatgatttcttttttttttttttttttgtgacagagtcttgctctgtcgcccaggctggagtgcagtggc

SEQ ID NO: 409810 - DNA, 201 bp, Homo sapiens
ggtctatgtatctgtttttataccagtaccatgttgttttggttactgtagctttgtggtatagtatgaagtcaggtagggtgatgcctcctgctgttttrtttttgtgcatattgttttggttattcaaggtcttttgtggttccatgcaaattttaggatttaaaaaatttctgtgaagaatgtcattgatattttgat

SEQ ID NO: 409811 - DNA, 201 bp, Homo sapiens
gtactacctctcctaggagcactgtcatgcctgcttgggtgatagataaatatgggaagaatgaagtgcttcgattcactcagaacatgatgatgcctatyatacactatccaaatgaagtcattgtcaaagttcacgctgccagtgtaaatcctatagacgttaatatgagaagtaagttttcaaaagacattgttacct

SEQ ID NO: 409812 - DNA, 201 bp, Homo sapiens
gttcaggtatataggaccatggcttcccacacttgtgtaaacttctctttgctgacagtgttgaggataatgtgattttgatcatactgtgtgccccctamaagaaaggaaaataataaaagatgaatgtacccatggtgaagggtctatagcagacacaattcccctaacaccagtacagcaaaagtaagcaagtaaaca

SEQ ID NO: 409813 - DNA, 201 bp, Homo sapiens
ggtttcaccatgttggccaggctgtctcaaactcctgacctcaggtgattcgcctgcctcggcttcccaaagtgctgggattacagatgtgagccactgcrctgggccgagaaacatcaatgcattccattctgcaacattaatgcagtccaccctaaagtgggactcaccacagccctctgccttattcttggagagaat

SEQ ID NO: 409814 - DNA, 201 bp, Homo sapiens
ccaacatggtgaaaccccgtcgctactaaaaatacaaaaattagctggacgtgttggcacacacatgtagttcaagctactcgggagcctgaggcaggagratcatttgaaccacagagttggaggttgtagtgagctgagattgcgcaacggtactccagcctggtgacagagcaagactccatctcaaaacaaaaaaaa

SEQ ID NO: 409815 - DNA, 201 bp, Homo sapiens; identical to SEQ ID NO: 92318

SEQ ID NO: 409816 - DNA, 201 bp, Homo sapiens
ccgaggaaatgatctttgtaggcgattggttggcgccgcaaagccatcccggcggctaaggagagcgggcaggcaaggagattccgggccagggtcgcggyggcagtcggcaagcgttcgattctctggcgttggatcgcgagcggtgtctgcttgtcccgccgagggctcccaggacagggcagggatctagggggtttg

SEQ ID NO: 409817 - DNA, 201 bp, Homo sapiens
agtccatgtctttgctgttgtgaatagtgttgcagtgaacatacacttatgtgtctttgtaatggaatgatttataatctacatcttgaagacctaaaatygtactggactataaccctgtagtagttttaaaagcatttcatacttacatttggaggaaacagataaattgtattttacaggtggttatggagctacagc

SEQ ID NO: 409818 - DNA, 201 bp, Homo sapiens
ttcaggtctgggctgcagttcctccttggaaacaaggcactctttcagagtttgttgtagtcagtgggaatgaggtaacttaccaactctgctgaaatgcrttagaaagtttaaacaaagactggcaaatatctgaaataattggtgtttttcagatctagtttatgtttgatggggcagtttataaaaagataatataga

SEQ ID NO: 409819 - DNA, 201 bp, Homo sapiens
gagagattaaaaaagtatttgatgccattcagtaacactgcctgctaacgtagctgtttttctctcatagagcagggatttggaatgagacctagaaccctgctgtgttgcttggttttaccctagataaatagttgaaaacagatataggcagtagagaggatggattagtcatcagtggagacatggaaatatccagcg

SEQ ID NO: 409820 - DNA, 201 bp, Homo sapiens
aaaggtgttaggtgtagtgttgcgtgcctgtagtcccagctactcgggaggctgaggcaggaggattgcttgaacacgggaggcggaggttacagtgagcygagatcatgccactgcactccatcctgggcaacagagttaggaattgaactattcctcctccacaaaataaatttcacttttaaattgtgtatacttgca

SEQ ID NO: 409821 - DNA, 201 bp, Homo sapiens
aaaataacactcctgcttggtgtagtgctgacttctgtgtttttcacagcacagggtatatattagggaacactttcttgcttagcttcggtcaaaaaatrtctgtgtttctaatgaagctgtctgtctgtgtgtgtttcaggtctgggctgcagttcctccttggaaacaaggcactctttcagagtttgttgtagtcag

SEQ ID NO: 409822 - DNA, 201 bp, Homo sapiens
tatttttccacttattcagattaagtttctcactcactttaagacaataaacctggcgtattatgctaagacactttgctatcttttatctgttttccccrtgatttaaaagtcatgtgtgtttcagaacctccacaaggctgagaaaaaaagtagtttgtggaggtgaaagatgagatacattttcagcataatccttat

SEQ ID NO: 409823 - DNA, 201 bp, Homo sapiens
cagtatcttgcaggactgagaggaggtggtggtgaggcagtcttcagatgatacctgctgctaagaaggactgtgtaactgtgttttgaaggaaaatattkatacatatttgcttatatatgcatgcattagtttcctattgcagtaacaaattactatgaatgtggtggcttaagacagcacaaatttattatcttataa

SEQ ID NO: 409824 - DNA, 201 bp, Homo sapiens
ttttacttgagtaagcctccactcatgcctctgctgggattgtatcaacttgttctaacactgtgtattccgtgtaaatttgaaactccagctattaatgkcatgatgggagtttctgggacttggttagtcagcctgactcagaaacagggccacttttaccagggctgtatggagctcaaaactgaatacatctcaccc

SEQ ID NO: 409825 - DNA, 201 bp, Homo sapiens
cagaagccttaccgataacataaaaagccaactaaggctgggtgcagtggctcacacctgtaatcccagcattttgggaggccgaggtgcgtggatcacamggtcaggagttcgagaccagcctggccaatatggtaaaaccctgtctctgctaaaaatacaaaaattagccgggcatggtgttgggcgcctgtagtccca

SEQ ID NO: 409826 - DNA, 201 bp, Homo sapiens
ttcaaaagaggtcacttttggaatttgatagggaaccaatttattatcttataaactgataaagaaaaacagttaagcatttgtcttgcctttcctacatkaactgtataattgagcagacaaaataatatgtgaggggcagtgatatgaggggcagtgttattttgtgaaagtattcaggctggacgcgttggctcatgc

SEQ ID NO: 409827 - DNA, 201 bp, Homo sapiens
ttgtaggcgattggttggcgccgcaaagccatcccggcggctaaggagagcgggcaggcaaggagattccgggccagggtcgcggcggcagtcggcaagcrttcgattctctggcgttggatcgcgagcggtgtctgcttgtcccgccgagggctcccaggacagggcagggatctagggggtttgcgcacctgcttttta

SEQ ID NO: 409828 - DNA, 201 bp, Homo sapiens
ccatagataaattataggaaagcaaagggatagaacaggagcctatgatttaaaagagacttaaggccgggcacagtggctcacacctgtaatcccagcaytttgggaggccaaggcgggtggatcacgtgagctcaggagttcaagaccagcctggccaacctggtgaaatcccatatctactaaaaatacaaaaattag

SEQ ID NO: 409829 - DNA, 201 bp, Homo sapiens; identical to SEQ ID NO: 92316

SEQ ID NO: 409830 - DNA, 201 bp, Homo sapiens; identical to SEQ ID NO: 92320

SEQ ID NO: 409831 - DNA, 201 bp, Homo sapiens
aggaagaagggtcttggttggtgactgcaggcagcctcctgctgctagaaattggtttcccacctagccagtttctcttctcttggaggccgcatagcacrgtggttgcaagcatggactctgcagtcacagtgactggcttcaaaatctgacctctacttagtagctgtgtaaccctgtgcaagttactgaatgtctcta

SEQ ID NO: 409832 - DNA, 201 bp, Homo sapiens; identical to SEQ ID NO: 92321

SEQ ID NO: 409833 - DNA, 201 bp, Homo sapiens
ctttcagagtttgttgtagtcagtgggaatgaggtaacttaccaactctgctgaaatgcattagaaagtttaaacaaagactggcaaatatctgaaataaytggtgtttttcagatctagtttatgtttgatggggcagtttataaaaagataatatagaatataggaatttttgagagattaaaaaagtatttgatgcca

SEQ ID NO: 409834 - DNA, 201 bp, Homo sapiens
tttgtggtttcctctgagtttatgagtataggacagtgtaggttttgaggagagctttgagaaatggaaagttttagaccttattaggtgatgatatcttrtattgagttgggtctgtttattgatttagccaatgttaaccaatctagagtgaaacccattgcaaagagtctcaacaattcacatcatggacttctgctg

SEQ ID NO: 409835 - DNA, 201 bp, Homo sapiens
ttcacatcatggacttctgctgcattcacatgttgtgatctgtaggacacatttgtcctgagtgactcagtgagcacagtgagaccttgctgtcttagtcygttcaggctattatcacaaaataccataaactggtagcttaaaaacaagagaaatttatttctcacagttgtggaggctgggaagcctgagatcaaggtg

SEQ ID NO: 409836 - DNA, 201 bp, Homo sapiens
agttgatatgtaatgtacacatttatggggcatagtgtgatatttcaatacatggataccatgtgtaatgatcaaatcagaacaatcagcatatccttcargtcaaacattgattatttctttgtgttgggaacattaaaaatcctctcttttagttttttgaaagtatacaataaattattattaactatattcaccttg

SEQ ID NO: 409837 - DNA, 201 bp, Homo sapiens
ttgatttatttctgggttctttattctgttccattggtctatgtatctgtttttataccagtaccatgttgttttggttactgtagctttgtggtatagtwtgaagtcaggtagggtgatgcctcctgctgttttatttttgtgcatattgttttggttattcaaggtcttttgtggttccatgcaaattttaggatttaa

SEQ ID NO: 409838 - DNA, 201 bp, Homo sapiens
taacagtgctttctcgcttgtcctcatattctggaaggggtgaggatatctctggggtctctctctcttataagagcacaaatcccattcatgagggttcygcttgcatgacctaatcaccccacctcctaataccatcaccctgggggttaggatttcaacatacgaattttggtgggacacaaacattacaaacattca

SEQ ID NO: 409839 - DNA, 201 bp, Homo sapiens
gtccctttgcacttcaggagagacaaagggaagggatgagagaccgtggccgggatggtgagagaaggtcagagagaccttcgttctgaggctgcttcttwacttcaaagtactcagcatgtcaaagtgacatactctggggtattgttttctgaaccctaacaggatctttaaaatttcttctagtctttataattttgg

SEQ ID NO: 409840 - DNA, 201 bp, Homo sapiens
aaatgtagaaattggtaagctgattctaaaatttatatagaaatacagtagccaaaataccgttaagatggcaatactcccctgaagtgatttatagattyagtacaatccctatcaaaatgcaactgctttttttttgcttttcataaatggacaagttgaccccaaaatgcatgtggaatcacaggggaccccaaatag

SEQ ID NO: 409841 - DNA, 201 bp, Homo sapiens
aaacacagatcccttgtattctagtgagcctttatatcttatattaaggaagttcaggaaattgatacttaggacaagattgagaaaacaagtgatctctkatgatctataattatctgcacaaaaatttcttagtaatcttcaagtggctattctcaaattagctgaaaatagcccccttttaagtctatgaaattaaca

SEQ ID NO: 409842 - DNA, 201 bp, Homo sapiens
cagcccatctatagtttcttcatgatttgttcagtaggaacacatagataacttagggctctcaagataagtagaaatttttttaaaaagttgttacaacyggatattttttgaatatgttaagatttgatggttttatttattggtagtgtcattggtgcacttgaatatttcatgctctgcctgaaattcatgtcttgc

SEQ ID NO: 409843 - DNA, 201 bp, Homo sapiens
tggacatggtggcatgtgtctgtaattccagttactcaggaggctgaggcaggagaattgcttgaacctggaaggcggaggtttcagtgagcctagatcaygccactgcactccagcctgggtgatgagtgaaactctgtctcaaaaaacaaaaacaaaaacaaaaaactcaaaatggatcaaagatctaaacataagagc

SEQ ID NO: 409844 - DNA, 201 bp, Homo sapiens
gtcgctactaaaaatacaaaaattagctggacgtgttggcacacacatgtagttcaagctactcgggagcctgaggcaggaggatcatttgaaccacagarttggaggttgtagtgagctgagattgcgcaacggtactccagcctggtgacagagcaagactccatctcaaaacaaaaaaaaagaaaaagaaaatgtcaa

SEQ ID NO: 409845 - DNA, 201 bp, Homo sapiens
agttccccaagcctccagaaacatgatggggcccagtgactgctcctgttgtggtcagatgtgtaactgactggctcctagaagagggagcttgattaagmctctctcaggatgaggggagagattcttttccccagtaggggccagcgagtagcctcagaggctctgccacattactttccaggagggaggtttgggtgt

SEQ ID NO: 409846 - DNA, 201 bp, Homo sapiens
gttgatgaatggataaacaaaatgtggtatagacatataatggaatattatatatctatattatatatcagccataaaaaggaataaaatattgatgatgatacagcatggatgaatcttcaaaacatgctaagtgagaaaaatccagaaacaaaaggtcctacatattgtatgattccatttatatcgtatgtttagaat

SEQ ID NO: 409847 - DNA, 201 bp, Homo sapiens
tccaagtttttaagaaaaaatgattatagtttcttccccttctttttaagagaaccttttcatatgttacctattacttaatagctcattactttgacacrctttctgattcaatattgtgttaacacttattagagatgcaaatgaagatatgtggcattttaatgttctgtatacattttaaatagtcatttttctgaa

SEQ ID NO: 409848 - DNA, 201 bp, Homo sapiens
gatgaatggataaacaaaatgtggtatagacatataatggaatattatatatctatattatatatcagccataaaaaggaataaaatattgatgatgatayagcatggatgaatcttcaaaacatgctaagtgagaaaaatccagaaacaaaaggtcctacatattgtatgattccatttatatcgtatgtttagaatagg

SEQ ID NO: 409849 - DNA, 201 bp, Homo sapiens
agagattcttttccccagtaggggccagcgagtagcctcagaggctctgccacattactttccaggagggaggtttgggtgttatagaccaccccagaccsagcttagactttttgagaacccagatggtgctggaggcttcctgtctgtctgctgactgaactaggtgaaggaggcgaggattcctgggatgcacacttt

SEQ ID NO: 409850 - DNA, 201 bp, Homo sapiens
agcccatctatagtttcttcatgatttgttcagtaggaacacatagataacttagggctctcaagataagtagaaatttttttaaaaagttgttacaaccrgatattttttgaatatgttaagatttgatggttttatttattggtagtgtcattggtgcacttgaatatttcatgctctgcctgaaattcatgtcttgcc

SEQ ID NO: 409851 - DNA, 201 bp, Homo sapiens
ttaaaaggttttcccttttttgattagttttcagaagtcaactactcttgaccacattgagtagaagtatatttttaaagagaaagaaaaaagaaaaaaaagggagtccttatctgacaccgcccagcctttctcagccagtgccaccaacttctagcagtagtttggtggtgcacccagcagcagccagccaactcatca

SEQ ID NO: 409852 - DNA, 201 bp, Homo sapiens
aacctggagtatattaaatagcaaggaagatatcaaagactagtcaggtcatgtcaaaagactcaagagctaacttgaagaaatgcccaaagatgtaacartttgagcttcagtaataataatgaccattacaatgggttgaaaccttttaaatatatttaaatccatgagttcatgatacttttttcaaaagaggtcact

SEQ ID NO: 409853 - DNA, 201 bp, Homo sapiens
gtaagtctaaatcttggtaatgggagcactgtggatgttcccagtgtgtctgaatgccaggctgtggtttggcctgaggtaccaagcaggaatgcattcargaattctcttgggtcatgttgattctgactgtgactccagcttattcatctgacctttatccagccaagaccaagctgaagctgagagcagaaatgagga

SEQ ID NO: 409854 - DNA, 201 bp, Homo sapiens
gaaaacttacagctgctgttttcattgtattgggatagaccagtgattcccagactggggctttcagacatttagaggtctatgagtaaaacaagttgtayttttacttgagtaagcctccactcatgcctctgctgggattgtatcaacttgttctaacactgtgtattccgtgtaaatttgaaactccagctattaatg

SEQ ID NO: 409855 - DNA, 201 bp, Homo sapiens
ggctcacacctgtaatcccagcattttgggaggccaaggcgggtggatcacgtgagctcaggagttcaagaccagcctggccaacctggtgaaatcccatmtctactaaaaatacaaaaattagccaggcgtggtgtgacgtgcctgtagtgccagctactcgggaggctgagggcaggagaatcacctgaacctgggagg

SEQ ID NO: 409856 - DNA, 201 bp, Homo sapiens
tgtttaattcagtaacttatgcagtactaaatgcactcaagtcatgggcttttacgaggaatgagattgtggctgcttcagaatgagacagttcattcttragccctgtgggaggatgaagaaggagtgatggggtacaggacaccccgcctaggagcaaacccagggtagggaaatcagcattgagtgagcacctactgt

SEQ ID NO: 409857 - DNA, 201 bp, Homo sapiens
ctccagggcgggttcgtaagggctgcggtagcttcggggcaggtgcagcctcggtctcctcacctgggcagtgggaataaaggggtctattcagattgttsggatgagcagtcagtgaggaggaggatgtgaggtgtgtgggtgctgggcactacaccaagcactcagggcatgcaagccaccagtgtccctgcatcttca

SEQ ID NO: 409858 - DNA, 201 bp, Homo sapiens
gtactatctttgcaacttttctgtaaatctaaaactattccaggccagccacggtggctcatgcctggaatcccagcactttgggaggccaaggtgggcgkatcacttgtggtcaggagttcgagaccagtctggccaacatggtgaaaccctgtctctactaaaaatacaaaaattagccaggcatggtggcgcatgcct

SEQ ID NO: 409859 - DNA, 201 bp, Homo sapiens
aagtcccagttcccttgcccacggttgtgtgacttgaacaaggcacttgaccttcggagccccggtttcttcatctgtacaacggggttaatggcatcgcstgctcagagcgctgttgtgaggactcaatgagagcctgtctataagcagttaacaagggcctggcacatagtcaacctctaagtgaatgccagctgctct

SEQ ID NO: 409860 - DNA, 201 bp, Homo sapiens
caaaatgaagacagtttctgcccacagagagcttttattctaatggtgagacagagtggccaggctgaccaacggcccgagcccagaaaggcttcctcacmtatgtccttggtttgtttttctcttcccaggactatccttcctaccccggcttcccccagagccagtacccccagtattacggctcatcctacaaccctc

SEQ ID NO: 409861 - DNA, 201 bp, Homo sapiens
aaaaaagacaagaaccctaacctgtacccctgttcctccttcccacaggcacaacagggttctatcaaggaggaaatggactgggcaacgcagccggtttygggagtgtgcaccaggtagacatggctccctcccgattctttcctcagttctttctggaaatattccccttacatcagggcacccagagagcccacgaca

SEQ ID NO: 409862 - DNA, 201 bp, Homo sapiens
tgggagggggaggctgaggcaggagaatcacttgaacctgggaggcagaggttgcagtgagccgagatcatgcctttgcactccagcctgggcaacagagyaagactccatctcaaaataaataaaaaaaaataaaaaaaataaaaaaataaaaagtcaaaataagggacgaggcacggtggtgcatgcctataatcccag

SEQ ID NO: 409863 - DNA, 201 bp, Homo sapiens
cagaaagtggctcgagactatgacatttgtgagctactgccatcagtggaagctctttacctgtggaggccacgatgggattaatagcaccctttcccccmacaaagcgggatttctgttccgcacaggtagaggttgttctgggtgtgaacggctacaaaagccttaaaggtgagaaggatgaagctgacatgtggttcc

SEQ ID NO: 409864 - DNA, 201 bp, Homo sapiens
gtgaacggctacaaaagccttaaaggtgagaaggatgaagctgacatgtggttccccaggccagcacctgggcaaaggtctgggcagctcagcccagagarctcactaacgtgagaacatgataaaacttactcactatcatgagaacaggatagaacttactatcatgagaacatgaagccaggggaaaatacaccccca

SEQ ID NO: 409865 - DNA, 201 bp, Homo sapiens
cgtttgagaacagaagggcagaggctttcaaatgttgattctttgtctaagaggggttcaagtatagcgactcagggtcctcaagaattatacaatccttyaaaacatccttaagcatgttcattttttttttctttcaacttgtattttaggtttggggtacacatgcaggtttgttacatgggtaaattgcatgtcgtg

SEQ ID NO: 409866 - DNA, 201 bp, Homo sapiens
tagagctgctttcactaccagcaaagtggacctaagttgccatcaatgactcctccattgaccttgacctcatagcctacatggtccaatatgaatccatyacggcaagttcaagggcagcaacaaggttgagaacagaaagctatgatcagtgggaagtccacctccatctgccagacaccagatcccaaagagggcatt

SEQ ID NO: 409867 - DNA, 201 bp, Homo sapiens
aatctaatgacgtaaataatggtcagctgtagctgaggtctcctgcctctttttcctagtgttcactgtaaaggaatttaagcatatgtgtgtgcacatgygcacgtgcgcgcgcgcgcacacacacacacacacacacacacacacacacacacattcatgcactctttttaaatttcccataaaaactctacttttgaa

SEQ ID NO: 409868 - DNA, 201 bp, Homo sapiens
aatcccagctacttgggagggggaggctgaggcaggagaatcacttgaacctgggaggcagaggttgcagtgagccgagatcatgcctttgcactccagcmtgggcaacagagcaagactccatctcaaaataaataaaaaaaaataaaaaaaataaaaaaataaaaagtcaaaataagggacgaggcacggtggtgcatg

SEQ ID NO: 409869 - DNA, 201 bp, Homo sapiens
cactgccaaggctgtggcaaggtcattcctgagctgaacaggaagcttgctgacacagcctcctatgtccccaccctcagtgtgtctgtccaggatctgayctgccatctagaaaaagctgttgagcacagtgacatcaagaaaatgtgatgcgggcacctggggggtcattgaaagaaattccgggctacactgaagacc

SEQ ID NO: 409870 - DNA, 201 bp, Homo sapiens
gcgttcactttttcaagaataaatctatggccgggcacagtggctcacgcctgtaatcccagcactttgggagcccaaggcgggtggatcacttgaggtcmggagtgcaagaccagcctggccaacatggtgaaaccctgtctctactaaaaatacaaaaaattacctgggtgtggtggagggcacctgtaatcccagcta

SEQ ID NO: 409871 - DNA, 201 bp, Homo sapiens
gaggaatgtgggctggaatgttccaagcctgcccctgggaaaactttgtaaaaatggaaccatagttaatctgtgctcatccaaaattaccacaattcaayggctttaggctcatcagatatattattagaccaactaatgttttggttacgggatcagtcattgtaactttatttagtagctgcttccaaggtgtctctc

SEQ ID NO: 409872 - DNA, 201 bp, Homo sapiens
gaagcttgaaaaggagctgggtgaggcaaacatgcaaatcatgccatggagattggcagaaaagacgcttgcctccaatttatggaatgccaagttaattygagcccataggaatgttgttcccatagatttagatttttatgaatatatacatatttatgaaagaaaacatttaaagtgtttaattcagtaacttatgca

SEQ ID NO: 409873 - DNA, 201 bp, Homo sapiens
gggcatgcaagccaccagtgtccctgcatcttcagggcactttctgaacctcagcaccttcctctccaaaatgagaaaaacagcacccgctccatagtgtygttgagaggattcaacaagctccttgctacaaagcccccagtaggacctggcatataattcctgttttgaaaatgtttgtgtatgtctcacatcttacct

SEQ ID NO: 409874 - DNA, 201 bp, Homo sapiens
agttcagagtgtagggggaagagccccttgtaaaacgatcagacatagtgacaacccacccacccaccacaagaacagcatgggggaaaccacccctatgrtccaatcacctcccacgaggttcctccaccaacacaaggggattacaatttggattatgattcaagatgagatttgggtggggacacagagccagaccat

SEQ ID NO: 409875 - DNA, 201 bp, Homo sapiens
aagaggatgtttttttcatctcatctttgccttccctcactgggcattgtatcagccagaaggaagaaagaggtcagtgtttcacattccagcaccaagcygggtctgtttgtcaaaaccctccagagaccacaacttgtggcacaagacttcaggggccacgtgcccccttcttcctgggtcctctctggcacaggatgg

SEQ ID NO: 409876 - DNA, 201 bp, Homo sapiens
tcccagtgaactgtccctatgtaaaattatccccgggcaaacgtctctcccagcttaactctgtcaccttttcgtcaccccctgcatatcgcctcccatcratgattggacattgtgtgctgagtgattgggtgttaggtacttgcatcaggagcccaggtgtcatccatctctctgctccaccaccctagatggagctta

SEQ ID NO: 409877 - DNA, 201 bp, Homo sapiens
gacagtctgggtgacagagtgagaccttgtctggaaaaaaaaaaaaaggttgcagttcgcaataggaaggtcctttctttatttgggtagccttagcctcrctggacctcagtttcctcatctgtaaaatggggataattataatacctgcatggcagaggtattgtggattaaatgagagcttttgtataaagtacttag

SEQ ID NO: 409878 - DNA, 201 bp, Homo sapiens
agctcacaacataaatgaaataatcaggcctcgagagagattaagaatgggacagattcaggattcaagcaatatggaggatttaaattcccagggcagartctgattggatgatcttgcatcatgtccccaccccttagctaagagcaggacatcttgattgacagccctgttaaagctgcagtcaattgagaaggtatc

SEQ ID NO: 409879 - DNA, 201 bp, Homo sapiens
aggtgtcatccatctctctgctccaccaccctagatggagcttaggagatgatcgaagtggttccttcccctaaagtgttggggccagctgcacctgcacyccatggactggaagtgaggaggcaggggaggaacatcaaagccatgtcattagaagaagggaaatggaggttggatgagcaaagccagcctgtgtctgcc

SEQ ID NO: 409880 - DNA, 201 bp, Homo sapiens
ccccccgcctaataagcctgctttctggcctcccgtttatcagccaaatggaatgattgtgcaccccccatccccgggtttgcacctccaggctcagtccrtctacttcctccacctggcgtaccctcttttatggtcatgctcaccttccagtctctgcatagctaaatgccaccatcctccaagcctagtgccaccacc

SEQ ID NO: 409881 - DNA, 201 bp, Homo sapiens
gtaggataggctatgctacagtaatcagtaaacctcgacatctcagtggcttcacacaacaaaggtttgtttcttactcacataaagtccagtgtggatgrggtgaaaccctgcaaggcagctctctctcctccacaagctgactcagggatccagggtgtttccgtatcatggctctgtcatctcaacctgtgccctcca

SEQ ID NO: 409882 - DNA, 201 bp, Homo sapiens
caaaagcaggtaaaacacacttagaatggggcctggagcagagtgtcctcagagtcttagctattattttcttctttcttctcttcattcttttttttttwttattcttttctttctccccttcctctgctttcccatgcatagggaatttcttaatttttccctccctttttgccactgtctttctttctcctttcctca

SEQ ID NO: 409883 - DNA, 201 bp, Homo sapiens
taatacctgcatggcagaggtattgtggattaaatgagagcttttgtataaagtacttaggacagtgcctggcagttcgtaagtgctgttttaagagttcrccacattcagccagagtggacagtagactgaccgatttttagaaagcccaaattccctgtgtttaaccagctctaaaacatctcaggaacctaagcagcc

SEQ ID NO: 409884 - DNA, 201 bp, Homo sapiens
acaagattaagtcgtttgtttttcatttcatccgcctacctcgccccccgcctaataagcctgctttctggcctcccgtttatcagccaaatggaatgatygtgcaccccccatccccgggtttgcacctccaggctcagtccgtctacttcctccacctggcgtaccctcttttatggtcatgctcaccttccagtctct

SEQ ID NO: 409885 - DNA, 201 bp, Homo sapiens
agtatataactgaataaaactttatatacaaaaccagacagcagccagaatttggcccatgggccatagtttactgactgccccctccccacccacccaaygtagatgatggggctttgttctacgaactcccttttagttcttccatagatctaaagagtcagttcttcttactgcagttttggcctgtttctacttctt

SEQ ID NO: 409886 - DNA, 201 bp, Homo sapiens
acaggaccgtcttaagctgcccagcgctcctagccgggggacccctcaggaatttcagagggtggggacaagattaagtcgtttgtttttcatttcatccrcctacctcgccccccgcctaataagcctgctttctggcctcccgtttatcagccaaatggaatgattgtgcaccccccatccccgggtttgcacctccag

SEQ ID NO: 409887 - DNA, 201 bp, Homo sapiens
gctgtggtgaggctggctcagaggggatcaggaggagaagcaggaaggcccgttgggagacggatgaagcctggagcaggaaatgttggaggcctggggcraggccatggcagcggacagacacatgtagacagaatcaagagcaactctagaggcagaattgacaggtcctgtcgaggcatcagtccaggcttagtaata

SEQ ID NO: 409888 - DNA, 201 bp, Homo sapiens
gtatataactgaataaaactttatatacaaaaccagacagcagccagaatttggcccatgggccatagtttactgactgccccctccccacccacccaacrtagatgatggggctttgttctacgaactcccttttagttcttccatagatctaaagagtcagttcttcttactgcagttttggcctgtttctacttcttt

SEQ ID NO: 409889 - DNA, 201 bp, Homo sapiens
ggaggggctggtgtttcattatgttttgtttgtttgtttgtttgttgtttttaagtaagctggcgacatggcacaggctctggaaccaagcaccttcactyattatctctgaaaccctggcatgttacttaacctctttggctctcagttttcttctctgtaaaatggaactaatgattatacctcctcatagggttgttt

SEQ ID NO: 409890 - DNA, 201 bp, Homo sapiens
agcgtgagttggcaaactgaggccaacagctcaaacctggccagttgcctgttttgtaaataaagttttattggaaagcagccacacccattcattctgtrttatctatggctgctttcccactacaacagcagagctgagaagtggcgtcagagacctcttggcccccaaagcctaaaatatttcccatctagctcttca

SEQ ID NO: 409891 - DNA, 201 bp, Homo sapiens
ccattaggtgccagtgtgataaccaaaaacgtctccacacattgtcaggtgccctcagggagtcaaactcacctccaattgagaaccactgtcctcagatractaggcatgtcatatatattatcttgagtcaccctgccagctagctgtcatgatgcccactttgtaaatgaagacactgaggctgagagaaggctgaca

SEQ ID NO: 409892 - DNA, 201 bp, Homo sapiens
tatatgtgataagctctcgtattttctatgaacaccagtcaggatcagcttgatgatgctgtggtaacaagtaaccccaaatctgagtgccttaaatcaayagacatttatttattgctcctgctccacgtttgccctggatcactggggatcctgaaggagcagaacatcacacactgatctccaagtgtctgacaagag

SEQ ID NO: 409893 - DNA, 201 bp, Homo sapiens
ccttaaatcaacagacatttatttattgctcctgctccacgtttgccctggatcactggggatcctgaaggagcagaacatcacacactgatctccaagtstctgacaagagtggtactcaccatttctttgaatatttctttggtcaaagcagctcacatgaccataactttcaatagagtgaagaagtgcagccctact

SEQ ID NO: 409894 - DNA, 201 bp, Homo sapiens
gccttggcctcccaaggagctgagactacaagcgggagccactgtacctggccccagatttttaaatctgtatgtgtaatttcaaattaggatgcacggcrtaaaggaagcaaagacttgttttaggttctagggatgggaaaggccttttaaataaggagcgaaattcagctgagaactgagagatagccatgtgcaggc

SEQ ID NO: 409895 - DNA, 201 bp, Homo sapiens
tactcctgtttatattttaaaagatggaatagatatatacgttacatatatatattatatacataagtttgcatatgcacagaacctgtctggaagtgaaytgtgttccataaagctggtaatcgtggttgcctataggcagaagagctggggtttgaggtcagggataggaagagactctttgctttatgccttttgtac

SEQ ID NO: 409896 - DNA, 201 bp, Homo sapiens
gagccccgaagatgattcacctccggtctgcgatgggcccaagctgtccagtgctctcctcttgctaaacagaccatactccctggaggagttaatggctrgggtgtggagagaagaccggtaggaggggagaaagaatgccttaaactcagcaaatgtctaaaacgctcaaaatgtctcagcattgctcaggcacccaca

SEQ ID NO: 409897 - DNA, 201 bp, Homo sapiens
ctgggatcaccacatgttccctgacttgcctttttagtgaccatccacacagatatctgtttgttccatgactcttggactcatgagtcagctcttctgtygggggagaatgggcagaactcacaggcagcctcaaaggctctgtataagacacctgttggtgtgatggctacagaaacacaccatcctctcatccctggg

SEQ ID NO: 409898 - DNA, 201 bp, Homo sapiens
acggggctccgacgcctggctgtgcattctgtaaatcccgggggattacctatgacagaccttggccaacaggtgtgggcatcttttctaacttttttccmctgctgtgctagaaggcttagaatacaatcacacataagttaccccgcttggctgacagccaagaaaaatgaagccatattctttttcacataaaagaga

SEQ ID NO: 409899 - DNA, 201 bp, Homo sapiens
tacctgcccccacgttcccccacatctttgccagggcctgcttaaatgacactccctggagaggcctttcctgacccagctctcaaaagtagacacacaamgctgctttctaccctatctcattctgtttccttcctagcacttaccaggagatgaacttatcttgtttatttcttatctgtgggtttatctgagcctcca

SEQ ID NO: 409900 - DNA, 201 bp, Homo sapiens
tgaagcaatcactgtggccagggggaccttgggtccctctgattggttttcattgtccccaccccgtagtcttttgtttttttgtttttttgtttttttttgagacagagtcttgctctgtcatgcaggctggagcacagtggcgcgatctcggctcactacaacctccacttgctgggttcaagcagttctcctgcttca

SEQ ID NO: 409901 - DNA, 201 bp, Homo sapiens
gtcagcctaccagttagagatgcagagttacttaccaggaggaacagttacaagttgactgtggtcctcctgaagaacagggctggaggtgagattttgcrtaagtatcaattctgcattggtatataaattttaaaatgacatgcatgtactatatgacctttggttaacactaaaacttttaaaaaataaaagacaggt

SEQ ID NO: 409902 - DNA, 201 bp, Homo sapiens
ttttttttttttttttttgagacagaatctcactctgtcgcccaggctggagtgcagtagcatgatctcggctcactgcaacctccacctcccaggttcawgcgattcttgtgcctcagcctcctgagtagctgggattacaggcatgagccaccacatgtggctaattttttgtaattttaatagagacggggttttgcc

SEQ ID NO: 409903 - DNA, 201 bp, Homo sapiens
gtgttctcagggatgaactagggccatatgataaaagattgcaaggatggtttcaacttcacaccatttagagcctctggcactatgaggaggttggctcrtgcagtagtgagtggactgtcctcagaagcatgcaagcagagcccgggtgatgatacagggagtccagctttaagataggacacaggacttgagcagagg

SEQ ID NO: 409904 - DNA, 201 bp, Homo sapiens
ttcaacaagatcctgtcttttcatttttcccatttttcctgcatacctcaagtacctttgcaggtttatttcgaatctcttttttaaataatatttttatktttaattgtggtaaaattaaataatgtaaaattttcaccatcttaaccttttttcttttttttaagatggagtttctctcttgttgcccaggctggaggg

SEQ ID NO: 409905 - DNA, 201 bp, Homo sapiens
ccagtgatagagatttttgtctctatctcactgagatatttgtaattaatttttttcaaaagcagtacatacacacattatccttttttttttttttttttgagacacagtctcgccctgtcacccaggctgaagtacagtggtgcgatcataactcactccagcctcgacctccccaggcttaggtgatcctcccacctc

SEQ ID NO: 409906 - DNA, 201 bp, Homo sapiens
tatatataaaatatggaacctgtgatttcttggtcattattgcttaaggcaagcaaatagttttaaaattgagttgattttttttttttttgagatgtagwcttgctgtgtatcccaggttggagtgcagtggcatgatctcggctcactgcaacctctgcctcccacgttcaagtgattctcctgcttcagcctcctgaa

SEQ ID NO: 409907 - DNA, 201 bp, Homo sapiens
tgaccctactttcaaggtaactgtcagttccaaacttagagacacaagtattatgttcacttctctaagagcactgttcttcattcaagcttgagatgatmgctccataaatgtagtgttgaaatctatacttgtggaaacccaggtcattgtatatctgttttcttcatatatatttattatttattgtgtcagggaaaa

SEQ ID NO: 409908 - DNA, 201 bp, Homo sapiens
ggttccccatcccagggtccccagggcctccagccccccatcccccaaaaccggatgttttcttggagaagaaagaagcttcccctctcttgacccatcawtgtctgatgcggtgccgggcccatagtaggtgtttttatagtcttgggatagacagatcttctcgagcacaggctctgaaaggagatgggtccgggtgct

SEQ ID NO: 409909 - DNA, 201 bp, Homo sapiens
tatggaacctgtgatttcttggtcattattgcttaaggcaagcaaatagttttaaaattgagttgattttttttttttttgagatgtagacttgctgtgtmtcccaggttggagtgcagtggcatgatctcggctcactgcaacctctgcctcccacgttcaagtgattctcctgcttcagcctcctgaatagctgggatt

SEQ ID NO: 409910 - DNA, 201 bp, Homo sapiens
ccaaacttagagacacaagtattatgttcacttctctaagagcactgttcttcattcaagcttgagatgatcgctccataaatgtagtgttgaaatctatrcttgtggaaacccaggtcattgtatatctgttttcttcatatatatttattatttattgtgtcagggaaaatacatgcactatctcatttaattttctca

SEQ ID NO: 409911 - DNA, 201 bp, Homo sapiens
tggccactcttaagcttcgtgaaccttattttcctcatacataaatgggaggagagtagtaatgacatctactatttattaatcacctgctgagcatcagrggctgtgatgagtgccttacaggtctcattttttcctcactggagccctataagataagtactgttttccccattttatagacaaagagactgaggttca

SEQ ID NO: 409912 - DNA, 201 bp, Homo sapiens
gtagtcctagctactccggaggctgaggttgaaggatcccttgagcccaggagttagaggctgcagtgagccgaggtggcaccactgcactccagtttggmcaacagagcaagaccgctgtctcaagcaaacaaacaaagccatgactatttaggaggaaaagagaatgagaaggatacatatgtgcggtaaaggtagcaa

SEQ ID NO: 409913 - DNA, 201 bp, Homo sapiens
cccatgaacataaaatgtcacctagtctcctgggtttgtgtgtcgtgtgggtgtgtgtgcggtcttctaggtttgtgtgtgtgtcgtggggggggggtgcrgtgtggtcttaattgttaatgcatttgtttattaatttaaccagtatttgttgagttactgcatataccaggcactgtttcaggtgcagaggatacaata

SEQ ID NO: 409914 - DNA, 201 bp, Homo sapiens
ggatgtttacttctcagtgtctgactttctcattctgaacttgtaactgatgcatggaccacagtctggacaacagacttaggggacgaaggccctcgtgygcctttgccattttcatattctcttctctttctcatggattagaattttatgatccaaccccttcagcaaacaaaagaagagatgaaaaactttattttc

SEQ ID NO: 409915 - DNA, 201 bp, Homo sapiens
gagcactgttcttcattcaagcttgagatgatcgctccataaatgtagtgttgaaatctatacttgtggaaacccaggtcattgtatatctgttttcttcrtatatatttattatttattgtgtcagggaaaatacatgcactatctcatttaattttctcaaaaattgcaggaggtgggtgctaatgttattcgcattgt

SEQ ID NO: 409916 - DNA, 201 bp, Homo sapiens
agcaaagtctgctgtgagcatgtgtctctgatctttcaagtactgctttggccactcttaagcttcgtgaaccttattttcctcatacataaatgggaggrgagtagtaatgacatctactatttattaatcacctgctgagcatcaggggctgtgatgagtgccttacaggtctcattttttcctcactggagccctata

SEQ ID NO: 409917 - DNA, 201 bp, Homo sapiens
tccttgtccttggtcttgcctctgtgagctcctcggccttggcccgggccctgtccgcggctatgaccccagccccggatgcccctgctgaagcctccacrgaagccaccgtggttccccatcccagggtccccagggcctccagccccccatcccccaaaaccggatgttttcttggagaagaaagaagcttcccctctc

SEQ ID NO: 409918 - DNA, 201 bp, Homo sapiens
gccagcatctgcatgcctgggcccaaggggcttttctagaaccagtgcacggggcaggcaggaagtgcctgggaattaaagccccctgggtgcagctctcraagaccaacaagttgatgtataaacccctccactcccttgacccgtgggagaggcagttctgagatgtggattttagaccatctcagcttttcctcatag

SEQ ID NO: 409919 - DNA, 201 bp, Homo sapiens
gtcactgctttggttaatgctctggttacaaagtggcattgctgtggggcagtcagctgtaaccctacttcttcccataagctctctgattttagtgcacrggtttgcataactcatggcctttcaagaaagcattatcacatgatggcagaaacacttgtctatattcttttcacagataacatactatgcacactcttc

SEQ ID NO: 409920 - DNA, 201 bp, Homo sapiens
gaagcaacatatgcaaaggctttgagtccaaagacatggttgcagtttgtctgtatcatctatttaaaatggacaatgtaggtacccttagaggcagcaayttttgtcttgtatccaaccaagacaaacactctgacattgcttgaggaagtatgtacatttcatcttggattgtgatagtaaaaactggaatcaacctgg

SEQ ID NO: 409921 - DNA, 201 bp, Homo sapiens
atttggctatggtgtctctgggacatgccaccacataccaagacctactcaagtgcaaggtctttaaatgctattggcagttgaggccatgttttaagtcstcttagaaagacactatattgtgcttcataagatgatacaaaacatacatgagccggttccttttatgggaaaatctgaagttaacagtgagattgggga

SEQ ID NO: 409922 - DNA, 201 bp, Homo sapiens
atcacactaatgaaagtggctgtggagggtggtagggatagaaatgagacttttccactatatctctttataattttaatttttgaattatgtgactgccrtgcctaattaaaaataaatgcaacaccttgggtgtgggagcagagttgccgtgggctcactggttgctgcacacgttgctctgcatgtcctgggttcctt

SEQ ID NO: 409923 - DNA, 201 bp, Homo sapiens
aatcagttgagcccaagagatcaaggctgcagtgagccatgatctgcattccagcatggacaacaaactgagactccatctctaaaattaaaaaaaaaaaattaatgaaacgaaattcagctgggcacaatggctcatgcctgtaatcccaacactttgggaggctgaggtgggtggatcgcttgagcccagtagtttgag

SEQ ID NO: 409924 - DNA, 201 bp, Homo sapiens
cccagcttggggatagacgtccactccttgtccttggtcttgcctctgtgagctcctcggccttggcccgggccctgtccgcggctatgaccccagccccsgatgcccctgctgaagcctccacggaagccaccgtggttccccatcccagggtccccagggcctccagccccccatcccccaaaaccggatgttttcttg

SEQ ID NO: 409925 - DNA, 201 bp, Homo sapiens
tgcctggcacagagtaagctcccagtaatcaaaagagccatcaatccaggctcgtttaaaggtggtggtggacagggcaagggtttctcccaggataacaygtagtgaagcatggagttgagtgatataaaaaataatcactttcctagagtctgggagaactgaattattatttcccagctgccactaatctgcaggggg

SEQ ID NO: 409926 - DNA, 201 bp, Homo sapiens
gagcggtgtaaaatatggccgcaggaccaggggccttgactgtttccgctgacagtgttgttaatatctccattttagtgggtgatttgtctccacctctycacgagtgatgaatccactggcactctggaacctttaggcctggggtaaaggcggctagaacattctctttcttctacctttgctcattctctcccagaa

SEQ ID NO: 409927 - DNA, 201 bp, Homo sapiens
tttgactcctagggtgacatcctagaaagacatgggctacaagtaagtgaggggaaaggctgggagcagagagagatggttctgagcccttcgggggcagstaaaatgagctgatttccaatcgcggccaaggtgtctggttcccgcagagccattcccggcctttggcaggcagcaaatggcagctgacaaggaagggat

SEQ ID NO: 409928 - DNA, 201 bp, Homo sapiens
atggagttgagtgatataaaaaataatcactttcctagagtctgggagaactgaattattatttcccagctgccactaatctgcagggggaccttgcagcratgttcccctctcagacagagactcaattttcacaaccataaaataatctaaggagtctcaagtacccttctagccctgatattctaagagtctgtgact

SEQ ID NO: 409929 - DNA, 201 bp, Homo sapiens
tgacttaaaaaacaaacaaaagaaatgttctagaccaaaggaatctgaagggataggacaactaaatacagtacccagttctagactggattctagatagmgggggagatgtgatacaggaaattattggtgaattgacaaattgtactgtggagaatggattggttaaaatattgtatcagtgttaaagtgattgaagtg

SEQ ID NO: 409930 - DNA, 201 bp, Homo sapiens
agagctgtgtctgaagctggaaagataagcagacagtcctggagggcttaatcctgggactgggttgagtccaatgcttaagatgtcagaattcaagcttsttagagcaagggccgtaggcttcgtgtttctatctggaaggactgaccgtggcatcccacctgcaagacccttgacaagagcgaaacagacagctagcgt

SEQ ID NO: 409931 - DNA, 201 bp, Homo sapiens
taccagttataacctacatcctgggtctgctggacaagcagaagagtgccagtcactgaggattagaacaaagttcccacaacagccctgaagggcaaccrggctatgcacttctacatcatgggccaccagggagctgagtaataaaaccactctcaggcgtcagaggactcagattcttgtcccagctcccccactaac

SEQ ID NO: 409932 - DNA, 201 bp, Homo sapiens
gggcggatcacttgaggccaggagtttgaaaccagcctgggcaacatggtgaaaccctgtctctactaaaaatacaaattagccaggcgtggtggcagacrcctgtaataccagctactcagaggctgagacatgagaattgcttgaacctgggaggcagaggttgcagtgagccaagatcgtgccactgcactccagcct

SEQ ID NO: 409933 - DNA, 201 bp, Homo sapiens
ctctagaagcaatttgtaaacacacaaaagcaatattaatgcacccatcagtccccaccccaccccctcaaaattaggctgaatctcttataaaaaaaaaagttaattaattaacttagtgaatttgttaaccaggccaccagaaattcttcagaaacacatctaaagtgccactaactgttctcaactgaacagttagtt

SEQ ID NO: 409934 - DNA, 201 bp, Homo sapiens
cactgaggattagaacaaagttcccacaacagccctgaagggcaaccgggctatgcacttctacatcatgggccaccagggagctgagtaataaaaccacwctcaggcgtcagaggactcagattcttgtcccagctcccccactaacctgctgtgggaccttatacaggtaattttcgtcatctgaacttcaagtgacta

SEQ ID NO: 409935 - DNA, 201 bp, Homo sapiens
ggaacattccatttcaaaaaaaggtaccttcttcttcaaaaatgccgatgttgcaaagtacagaaaaagactgaagaaatgttctagatgaggccgggcayggtggctagtgcctgtaatccaagcactttgggaggctgaggcgggcggatcacttgaggccaggagtttgaaaccagcctgggcaacatggtgaaaccc

SEQ ID NO: 409936 - DNA, 201 bp, Homo sapiens
attagaacaaagttcccacaacagccctgaagggcaaccgggctatgcacttctacatcatgggccaccagggagctgagtaataaaaccactctcaggcrtcagaggactcagattcttgtcccagctcccccactaacctgctgtgggaccttatacaggtaattttcgtcatctgaacttcaagtgactaatctgtgg

SEQ ID NO: 409937 - DNA, 201 bp, Homo sapiens
ctgattttagtgcacgggtttgcataactcatggcctttcaagaaagcattatcacatgatggcagaaacacttgtctatattcttttcacagataacatmctatgcacactcttctgcacttcgttttcctcatttagctatataccttggaaagaacttgctaagtcaatatatagaaagagcttcttcattctttttc

SEQ ID NO: 409938 - DNA, 201 bp, Homo sapiens
acaaagttcccacaacagccctgaagggcaaccgggctatgcacttctacatcatgggccaccagggagctgagtaataaaaccactctcaggcgtcagargactcagattcttgtcccagctcccccactaacctgctgtgggaccttatacaggtaattttcgtcatctgaacttcaagtgactaatctgtggcccagg

SEQ ID NO: 409939 - DNA, 201 bp, Homo sapiens
tttacactccccccagcagtgtctgggagtagtacctgttttcacaaaaactcatcgacccagtgtcatcttacggttgaagtttttgccaatctgatgcrtgaagaaatggtgtctcagggcagtagtaatttctaagtcttgtcccacaagtgaggttgagcatcttttcagacccttgactgatttgtatttcctttc

SEQ ID NO: 409940 - DNA, 201 bp, Homo sapiens
atcaaaggtggccttggtgaagtttcccagggtggcagtgcagctgcggcgtagcagtcatagatacccgccatcagcagcagcttttgggcatggggacygagacgatgccagtgcccctgggtgcagggatgaagtgcaccagcacagagccacagtggcctgtcaccttacaagggacggtgtggggcttgccgatct

SEQ ID NO: 409941 - DNA, 201 bp, Homo sapiens
atgcaaaggctttgagtccaaagacatggttgcagtttgtctgtatcatctatttaaaatggacaatgtaggtacccttagaggcagcaatttttgtcttgtatccaaccaagacaaacactctgacattgcttgaggaagtatgtacatttcatcttggattgtgatagtaaaaactggaatcaacctggagttcatcat

SEQ ID NO: 409942 - DNA, 201 bp, Homo sapiens
tatgcaaaggctttgagtccaaagacatggttgcagtttgtctgtatcatctatttaaaatggacaatgtaggtacccttagaggcagcaatttttgtcttgtatccaaccaagacaaacactctgacattgcttgaggaagtatgtacatttcatcttggattgtgatagtaaaaactggaatcaacctggagttcatca

SEQ ID NO: 409943 - DNA, 201 bp, Homo sapiens
atatgcaaaggctttgagtccaaagacatggttgcagtttgtctgtatcatctatttaaaatggacaatgtaggtacccttagaggcagcaatttttgtcttgtatccaaccaagacaaacactctgacattgcttgaggaagtatgtacatttcatcttggattgtgatagtaaaaactggaatcaacctggagttcatc

SEQ ID NO: 409944 - DNA, 201 bp, Homo sapiens
cccccaaagtactgggactacaggcatgagccaccgtgccaaaatatttttaattagaagccttttccattgttttttctctagagcaaaaaataaaaaaataaataatttatagtactttggcagcattttcttggagcaattttggttttactgaagttctacgtccaaacattatatgaaagtgccttttgattttaa

SEQ ID NO: 409945 - DNA, 201 bp, Homo sapiens
catatgcaaaggctttgagtccaaagacatggttgcagtttgtctgtatcatctatttaaaatggacaatgtaggtacccttagaggcagcaatttttgtcttgtatccaaccaagacaaacactctgacattgcttgaggaagtatgtacatttcatcttggattgtgatagtaaaaactggaatcaacctggagttcat

SEQ ID NO: 409946 - DNA, 201 bp, Homo sapiens
tgccactgaactttctcgcagtagacagtggtggctcctgcatgtccacacttgggagaattggactcctcaaactctcacttgtacactttccaaatatwttttttttttgatatggagtctcactctgtcgcccaggctggagtgcagtagcgtgatctcggctcatcacaacctctccctcccaggttcaagcaattc

SEQ ID NO: 409947 - DNA, 201 bp, Homo sapiens
acagagtgaaatcctgtctcaaaaaaaaaaagtagttacatatttattttaatatgcatttatatctacatatatatatatgtgtatgtgtacaaatatawatataatatatataaaatatggaacctgtgatttcttggtcattattgcttaaggcaagcaaatagttttaaaattgagttgattttttttttttttgag

SEQ ID NO: 409948 - DNA, 201 bp, Homo sapiens
aaggtccctgttttcaaagagtttatattcagtgagtggaggaaacagaccatcaacaagtgagcaaatcacttaaattctttttttttttttttttttttgagatggagtcttgctctgtcacccaggctggaatacagtggcatgatctcggctcactgcaacctctacctcccaggttcaagtgactctcctgcctca

SEQ ID NO: 409949 - DNA, 201 bp, Homo sapiens
aatggcaaagaattttcattgtctctggctttgtaaaaagccactccagaacttagtggcttaaaataacactgacgtattatttctgtgggctggccagktgggcctgctgctggtctcccacagtccctctcatgctgctgtgctcgcagcaggtgggctggggctgcctagatggcacagtggggcctctctctcatg

SEQ ID NO: 409950 - DNA, 201 bp, Homo sapiens
caaggtccctgttttcaaagagtttatattcagtgagtggaggaaacagaccatcaacaagtgagcaaatcacttaaattctttttttttttttttttttttgagatggagtcttgctctgtcacccaggctggaatacagtggcatgatctcggctcactgcaacctctacctcccaggttcaagtgactctcctgcctc

SEQ ID NO: 409951 - DNA, 201 bp, Homo sapiens
gatttggggttctgttccacgtgagactggaagccactagagggtttataagcagtgggtaataggatgcaacttaggtgggttttttttaattttattcktatttttattatttttagagacagggtctggctctgtcttccaggctggagtgccatggtgcaatcatagctcactgcaccctccacctcccaggctcaa

SEQ ID NO: 409952 - DNA, 201 bp, Homo sapiens
gagcaggaggaagagaggggggtggcaagtgcgaaactcggtctcaaaaaaaaaaaagaacaaattagtaccaagtggcagtagaggtggtctgaatataygccagaaagtggctcgagactatgacatttgtgagctactgccatcagtggaagctctttacctgtggaggccacgatgggattaatagcaccctttccc

SEQ ID NO: 409953 - DNA, 201 bp, Homo sapiens
actttcttcttgaagtaacaggattcagagcactgcagcctccaattcccggcctcaagcaatcctcccgcctcagcctcccaaagtgctgggattacaarcgtgggccacagtgcccaggcaagaacaaatttttaaaaaggaatcgctttcccattgtgcaatttaacaccatgtcagtgcaccgcctaagaccacgct

SEQ ID NO: 409954 - DNA, 201 bp, Homo sapiens
ccgattctggctttccatcccgtcactaaaacagagtgtctgagcatatggcttgggcagagggagcgaaggagcccaggaaaggcagtgaggtcggaggrgtgggcagagcccatgcagggccttgggggtcactgcagagtttagattttactttaggtgcacagtgaggcagactgtacccaatgcaacgttaacgac

SEQ ID NO: 409955 - DNA, 201 bp, Homo sapiens
caccacacccagctaatttttgtatttttagtagaggcaggatttcaccatgttggccaggctggtcttgaactcccgacctcaggtgatgcactcgcctmagcctcccaaagtgctgggattagaggcatgagccaccgtgcctggcctgttgtttctttaaaacaactcctttgaaataaattcattttaaaaggatga

SEQ ID NO: 409956 - DNA, 201 bp, Homo sapiens
tcaccagcaggcagagtctgcagtgacccaagattacaccactgcaccccagcctgggcaacaaagtgagaccccgtaaaaaaaaaaaaaaaaaaaaaaacgtgcagggtctcaggcctcatcctgggcaactgactcagaatctgctttaaaaaatttttttttatttttgagacaaggtcttgctatgctgcccaggct

SEQ ID NO: 409957 - DNA, 201 bp, Homo sapiens
cacttgaacctgggaggcagaggttgcagtgagccgagatcatgcctttgcactccagcctgggcaacagagcaagactccatctcaaaataaataaaaawaaataaaaaaaataaaaaaataaaaagtcaaaataagggacgaggcacggtggtgcatgcctataatcccagcactttgggaagccaaggtaggaggatc

SEQ ID NO: 409958 - DNA, 201 bp, Homo sapiens
agtacctatgctttaggtaagcatgccgagttttgctgaagcagaaggcagatttgtaactgtggccttgggattagcaggtccccccgtgagattggagrgtgtcttacagttaagtgatatcatctttgcagaggaagggtggttcatttcacacctttgcccaaaatcctaatggacatttaagccatacacagcact

SEQ ID NO: 409959 - DNA, 201 bp, Homo sapiens
tcaagctcagagtttcacgtgcttctcctcctccagcagtcttcgtaaggaggcagctgcctccaaatatttggttgtattcattagcatacatatatatwtttttttctttttcttttttttgaggctgactttcactcttgtcacccaggctggagtgcaatggtgtgatctcagctcactgcaacctccacctcccag

SEQ ID NO: 409960 - DNA, 201 bp, Homo sapiens
tgtacaaaatatgagaccttcttggcctgcctttcccttccccacttttgatagggtcctaggatgtaccaaaacaaatcacaactgcaatgagaaaatarcacgttaaaaccagcctcaaagtcctgcagatggaatggaatctatgatgacctgggaaacacctgaattgggagcccacaggggcagcttgtggtcaca

SEQ ID NO: 409961 - DNA, 201 bp, Homo sapiens
ttgatagggtcctaggatgtaccaaaacaaatcacaactgcaatgagaaaatagcacgttaaaaccagcctcaaagtcctgcagatggaatggaatctatsatgacctgggaaacacctgaattgggagcccacaggggcagcttgtggtcacatgggttgcagacatggtgttactagaccatcttgtcattcaaaaaga

SEQ ID NO: 409962 - DNA, 201 bp, Homo sapiens
tctgttctggtgcccccttgggagcatgctggagttgatgcatggagcagggggctggtggctgtaattatggggatccccattctgctgtttccctttayataagctgctaaaaattaccatcaagggtctgaaagggtaaaatgataagatggtgggctgatgtgtgattgtacttttttttgagatggagtcttgcta

SEQ ID NO: 409963 - DNA, 201 bp, Homo sapiens
aattatggggatccccattctgctgtttccctttatataagctgctaaaaattaccatcaagggtctgaaagggtaaaatgataagatggtgggctgatgwgtgattgtacttttttttgagatggagtcttgctatgttgcccagactgggctcaagtgattctgccacctcagcctcctgagtatctaggaccacagct

SEQ ID NO: 409964 - DNA, 201 bp, Homo sapiens
cgtcctcaaaagcaaggaaagcctgagaaactgtcacaaaccagagaagcctaaggagacaggacaactacgtgtcatgtgatatccaccttggatcctgraacagtccaagaacagtacagggaaagccttaaaaatctgaataagtaattgacagtagttaacacagcactatctgcttattagttttgacaaatgcag

SEQ ID NO: 409965 - DNA, 201 bp, Homo sapiens
tgagaaagtgagaggcctttttctagcggggctgctttccatatgctctggtccacccttccaagaaccacagatagcccatgaacccttcttagacttaytcattcattcagcatatgttgggtgacacccactgtgtgccaggcattgttccaggcactagagatgcatccgtggacaaagtagacaacagtcaatact

SEQ ID NO: 409966 - DNA, 201 bp, Homo sapiens
aagtttttataacacttcttccaagtttcattcaccccatctctttttcttttttctacaacacataattgaacatcgttaaatattcaattaagaattaytgaacacagtacagttacaattgaacatattacaatagcattcttacaaagttctatgtatgttaaagccctgaaaaaaaattctgcttgtaaaatggac

SEQ ID NO: 409967 - DNA, 201 bp, Homo sapiens
ctccagtttctctggtgccacttcctctaaatgatgagatttcctggactccttcaggactccaggaactgtcctaatgtctgcacataaacatgcggctyaatctccccagtagccccgtgacatgagcactgccactgccctcatcttacaggtggagaaactgaggcataaaatgtttcagtcacttacccaaggtca

SEQ ID NO: 409968 - DNA, 201 bp, Homo sapiens
acgactaagcatacatgtatattgaacacttttatacagatggtaaaaacctaaccctaaacctaccaggactcataagcttgtagcaactgccaacggtytgttctggtctgctctttttatcactgagttgcagtgccaggttctgaattctgtctgagagaactggaccaatcaaggaagccactggcaaatttcatt

SEQ ID NO: 409969 - DNA, 201 bp, Homo sapiens
aataaacagggagatgtaacaaagagaaaccaggaaggacgccaggctctctgaggaagtgacagtggagctggcacttgcaaattcggaagagccagccrtgggtcacaagtgtcgccagcagataggaggccaagtggctgaggagccaaggggagaggggtggggaatgagttggccggtgctcaggcaccgggaagc

SEQ ID NO: 409970 - DNA, 201 bp, Homo sapiens
gcctttgcagagttgtttattttctttattttaagttcaccctggggtttttatagctgaagtgtgtttcttatgggtttgattttttttctttttggctycttctggtaaaacactgctattcacagaaataaccacaaagattaaaaagagggggaaaaaaatctccagagtgtgttataagaagtttctggtgccaca

SEQ ID NO: 409971 - DNA, 201 bp, Homo sapiens
atgtctcggagatctctcaaagtcggttcaaacaaacccactttagtctcttgtttggcctctgcagacgctgcagtactgcatcgagaaagccagatgcyggggttgaatctccgcctctgcactcactggctgtgagacttgattttctcatctgtgaaatggggtttataggagtagcttttgtgaagcctgggacaa

SEQ ID NO: 409972 - DNA, 201 bp, Homo sapiens
acaacctctccctcccaggttcaagcaattctccggcctcagcctcctgagtagctgggattgcaggtgtgcaccaccacacctagctaatttttgtatttagtagagatggggtttcaccatgttggccaggcttgtctcgaactcctgacctcaggtgatccacccgcctcggcctcccaaagtactgggattgcaggt

SEQ ID NO: 409973 - DNA, 201 bp, Homo sapiens
caggttcaagcaattctcctgcctcagcctccggagtagctgggattacaagtgcccaccaccacacccagctaatttttgtatttttagtagaggcaggrtttcaccatgttggccaggctggtcttgaactcccgacctcaggtgatgcactcgcctcagcctcccaaagtgctgggattagaggcatgagccaccgtg

SEQ ID NO: 409974 - DNA, 201 bp, Homo sapiens
gcctaagaccacgctggtaccaacagaggcgagagggtcaaacagcgaacacgctgggcagtgctggataagcctgtcagagcaggctctgaatagaaatrgttggccatactggtgggtactggccagatgtgggtctgccagcaacgtcaggtgccccatagtttgggaagtccccacatgctagacttaactgggttg

SEQ ID NO: 409975 - DNA, 201 bp, Homo sapiens
cagaggttgcagtgagccaagattgcaccactgtactccagcctggaagacagagtaagtctctctctctctctctctctctctctctctctctctctctmtctctctatatatatatatatatatatatatatatatatggggcaaaaaaaaaatacagaataaaaataatatatgttttaaaacaatgcatataacaac

SEQ ID NO: 409976 - DNA, 201 bp, Homo sapiens
ctcgggaggctgaggtaggagaatcacttgaacctgggaggcagaggttgcagtgagccaagattgcaccactgtactccagcctggaagacagagtaagwctctctctctctctctctctctctctctctctctctctctctctctctatatatatatatatatatatatatatatatatggggcaaaaaaaaaatacag

SEQ ID NO: 409977 - DNA, 201 bp, Homo sapiens
gggattacaagcatgaggcaccacaccctgcctgcactgtggttttagatcctcccacatcgccatacatacaactctatcactctaacacaatagttttyaaccagaggaagttttggcccccaggggacatttgacattccccatttttggggaatgggatactactggcatctagtgggtagaagccagggatgctgc

SEQ ID NO: 409978 - DNA, 201 bp, Homo sapiens
tttcatctgctacatccagtctgtagttcaactgatctattgagttcttaattttaattatttcatttctcagttctgtaatttcctttttttttttttttgagatagagttttgcttgtgtcacccaggctggagtgcaatggtgcaatctcggctcactgcaacctccgcctcctgggttcaagcaattctcctgcctc

SEQ ID NO: 409979 - DNA, 201 bp, Homo sapiens
tcccaagtagctgggaccacagatgtgcaccaccatgcccagctaattttttgtatttttagtagaggtggggtttctccatgttggccaggctggtctcraactcctggcctcaagtgatccacccgcctcagcctcccaaaatgctgagattacaggtgtaagccaccacacctggccctttggttttttgtttgtttt

SEQ ID NO: 409980 - DNA, 201 bp, Homo sapiens
gggctctagtaatcctcctgcctcagcctcccaaagtgctgggattacaagcatgaggcaccacaccctgcctgcactgtggttttagatcctcccacatygccatacatacaactctatcactctaacacaatagttttcaaccagaggaagttttggcccccaggggacatttgacattccccatttttggggaatggg

SEQ ID NO: 409981 - DNA, 201 bp, Homo sapiens
tactctctatcttcatgagatctacttttttagctcccacatgtgattgagaacatgccatatttgtctttctgtccttggcttatttcacttaacataaygacctccagttccatccatgttgctgcaaatgacaggatttcattgttttttatggctgaataatattctagtgtatatgcataccacattttctttatc

SEQ ID NO: 409982 - DNA, 201 bp, Homo sapiens
ggcaggagaatcgcttgaacccaggagatggaggttgcagtgagccgagatcaccccactgcactccagcctgggtgacaagagtgaaactctgtctcaamaaaaaaaaaaggaaactgaagaccttgctgtgttacctgagcccaggaacgatgacacccttgtagcaatgaggatactcagataacagtttctaatacc

SEQ ID NO: 409983 - DNA, 201 bp, Homo sapiens
cccacgctagtctcgaactccagggctctagtaatcctcctgcctcagcctcccaaagtgctgggattacaagcatgaggcaccacaccctgcctgcactrtggttttagatcctcccacatcgccatacatacaactctatcactctaacacaatagttttcaaccagaggaagttttggcccccaggggacatttgaca

SEQ ID NO: 409984 - DNA, 201 bp, Homo sapiens
caggcggggaggagcacagtaggctgggtatattttgaaggcagaccagccacagataaagaaggtaaagggagtcctaattctcaccaccaagctgcaamgatgccctgttttccatccagggtctccccctgaagagacctgattgcttctacccctgttggcaaccagccaattcctcctgaacaaattcctcaagct

SEQ ID NO: 409985 - DNA, 201 bp, Homo sapiens
cattttagagatggagaacaggttagtggttgccaggagttaagggttttgggtcgggtgggtctggggtgggtgtgcctatgaaggagcagcacagggaratctttgtggtgatggaatcgttctctagattgccgtggtggttacgcagagctgcacgtgtgataaaatgacacagagctacacacacactgcaccaac

SEQ ID NO: 409986 - DNA, 201 bp, Homo sapiens
cttaaacccaggtggcagaggttgcagtgagcctagatcatgccactgtactccagcctggacaacagagtgagactctgtatcaaaaaaaaaaaaaaaaagaaagaaagaaatgcaaggccaggcatggtggtgtacccctgtaatcccagcactttgggaggttgaggcaggaggattgcttgaggccagaagttcaag

SEQ ID NO: 409987 - DNA, 201 bp, Homo sapiens
tgagtttaggaaagctcattagatgagtctgagtatttttgcagtgtttttgaaattctccataaagttgctacacacacacacacacacacacacacacatgcacacacacgtaaatgcactgaagaagatctggtgggagataagagatggtgagtagatagaaaaatacagacagatgtagatttggctctgtgtaac

SEQ ID NO: 409988 - DNA, 201 bp, Homo sapiens
gagggcagatcacttgaggtcaggagttcgagaccagactggccaagatggtgaaacctcatctctactaaaaatacaaaaattagccaggcatagtggtrcacgctgtagtcccagctactcaggaggctgaggcagaacaatcacttgaacccaggaggcggaggttgcagtgagccgagattgcacaactgcactcca

SEQ ID NO: 409989 - DNA, 201 bp, Homo sapiens
agacagtggatcatttgcggtcaggagttcaagaccagcctcgccaacatggcaaaaccccatctctactaaaaatacaaaaaaaaaaaaaaaaaaaaaaattagccaagcagggtggcgtgcacctgtaatctcagttacttgggaggctgaggcagcagaaaccaggaggcggaggttgcagtgagccgagatcacacc

SEQ ID NO: 409990 - DNA, 201 bp, Homo sapiens
ctcttaggttttgcttcctggcacacgtggcagggtagggaggcctctgaaaacccccttccatccttcagttgttggaagtcaggacaagaaaccagtgycactcgctcaccatcccaaggccaaaaagctcaaaatctgctaccttatgaatgggaggctggaaaacagggaactgagggagcagagagtaacaactca

SEQ ID NO: 409991 - DNA, 201 bp, Homo sapiens
ggtaaaacactgctattcacagaaataaccacaaagattaaaaagagggggaaaaaaatctccagagtgtgttataagaagtttctggtgccacagagttkttaagagttctggacctggcctgtggtcagtcctggcagtaccccacacacaatggcatgagttggggaagcacatggacttctctgtgcctcagtttcc

SEQ ID NO: 409992 - DNA, 201 bp, Homo sapiens
atgagtttaggaaagctcattagatgagtctgagtatttttgcagtgtttttgaaattctccataaagttgctacacacacacacacacacacacacacacatgcacacacacgtaaatgcactgaagaagatctggtgggagataagagatggtgagtagatagaaaaatacagacagatgtagatttggctctgtgtaa

SEQ ID NO: 409993 - DNA, 201 bp, Homo sapiens
  misc_feature (1)...(201): n = A,T,C or G
cacaagttcagtaccagcccacttaatgcaaccctgacgacacccttcggaatagagcactgggattttgtcaccttcactttgggggtgggaaagctganggacggaggctgcatctggtccaagatccttcaggccacaaatggcgcggggtggacgtgggggcggaattctcttacccacagccagaggctctcacag

SEQ ID NO: 409994 - DNA, 201 bp, Homo sapiens
gagacagtggatcatttgcggtcaggagttcaagaccagcctcgccaacatggcaaaaccccatctctactaaaaatacaaaaaaaaaaaaaaaaaaaaaaattagccaagcagggtggcgtgcacctgtaatctcagttacttgggaggctgaggcagcagaaaccaggaggcggaggttgcagtgagccgagatcacac

SEQ ID NO: 409995 - DNA, 201 bp, Homo sapiens
tttctggtgccacagagttgttaagagttctggacctggcctgtggtcagtcctggcagtaccccacacacaatggcatgagttggggaagcacatggacytctctgtgcctcagtttcctcacctgtgaaactggtatcatagtgagagaggtgacaacatgaggctttgggagactaaataacatgattcatgggcacc

SEQ ID NO: 409996 - DNA, 201 bp, Homo sapiens
tgagacagtggatcatttgcggtcaggagttcaagaccagcctcgccaacatggcaaaaccccatctctactaaaaatacaaaaaaaaaaaaaaaaaaaaaaattagccaagcagggtggcgtgcacctgtaatctcagttacttgggaggctgaggcagcagaaaccaggaggcggaggttgcagtgagccgagatcaca

SEQ ID NO: 409997 - DNA, 201 bp, Homo sapiens
ttcacaagttcagtaccagcccacttaatgcaaccctgacgacacccttcggaatagagcactgggattttgtcaccttcactttgggggtgggaaagctragggacggaggctgcatctggtccaagatccttcaggccacaaatggcgcggggtggacgtgggggcggaattctcttacccacagccagaggctctcac

SEQ ID NO: 409998 - DNA, 201 bp, Homo sapiens
ctgagacagtggatcatttgcggtcaggagttcaagaccagcctcgccaacatggcaaaaccccatctctactaaaaatacaaaaaaaaaaaaaaaaaaaaaaattagccaagcagggtggcgtgcacctgtaatctcagttacttgggaggctgaggcagcagaaaccaggaggcggaggttgcagtgagccgagatcac

SEQ ID NO: 409999 - DNA, 201 bp, Homo sapiens
  misc_feature (1)...(201): n = A,T,C or G
tccagccagtttgtcctggaaattgtgcggacagtttatgaggcagcttctccaacaaaagctgccctttggggtcagcccaggtttaaaaattcctatgncattttcctttgccatgtgaaaatttaattagcttccccttctattgtcttccatgccttttcttccaacgtttgaagcaatcaacatttacttgatagg

SEQ ID NO: 410000 - DNA, 201 bp, Homo sapiens
  misc_feature (1)...(201): n = A,T,C or G
atttaattagcttccccttctattgtcttccatgccttttcttccaacgtttgaagcaatcaacatttacttgataggaaatacacttgttgtcttcagcngtctcccttcctaagacagtgggctatggtgcagccaaagccagtaattctagctagaaaacgaggtaaagtacttttcttcttccctgttgtttatcct

SEQ ID NO: 410001 - DNA, 201 bp, Homo sapiens
ttactaacttccttattctctatacttaacacatctttacattttgcccatatcacccaagctccttgcctactcactaagtttttataacacttcttccragtttcattcaccccatctctttttcttttttctacaacacataattgaacatcgttaaatattcaattaagaattattgaacacagtacagttacaatt

SEQ ID NO: 410002 - DNA, 201 bp, Homo sapiens
tgacacatcagtgagttacatgttttgtaactaaagataatgtttttcgagacttcttttcctccaagggaatgaatttctgcagacattaagtcagatgyacgtgagtccatttttctccattctcttcctctctttcatcacagcgtgtgttcgtgtgggacttggatgagacaataattatttttcactccttactca

SEQ ID NO: 410003 - DNA, 201 bp, Homo sapiens
ggggtcagcctcacctcaaccaccagggactgagagtgaggaagaggtgatcacctcaaaaaacctagagcattgtaactacaagaagacagaagagacamtgggtgagcaaaaacaataaatgtccacaaccttgatatggatgccacctacactatgagcaacatgtggcagagtccatgtcctgacccctctgtggtc

SEQ ID NO: 410004 - DNA, 201 bp, Homo sapiens
cctgccagatctcagtgaccccattcagaaaattctagaattattacaacttatccttttactcccagaggaatgaaggcccagagcacggctttgatgamgttgcttttgtgtcacttgtttcttatttcatttgtttatcatttttatttctgacgtttcgatgaaatgagaactgggcccacaaccaaggtctgcacc

SEQ ID NO: 410005 - DNA, 201 bp, Homo sapiens
ctagaggatattgttttcaaattggaattctgtacccagagaaactatagagaaaaataaagataacttcagatattcgagaattcaggaagattactttycatgtaccatttcaggaaaagcaacttaaggatgtattcaagcaaaacaaggaagaaaaccaaggaagagagacttgggatccagaaaacagtggatcca

SEQ ID NO: 410006 - DNA, 201 bp, Homo sapiens
cctgggttctattatatttcttccagtcttttttttaatgctgttcattaaactttcactaaaaggattataacctgcacttttacaaaaacgtatttaawctttacaacaatcctatcaggtatataagcccattttacagatgagaaactgagacacactgaagttaagtaacttgtaagaagtggaactggccttgat

SEQ ID NO: 410007 - DNA, 201 bp, Homo sapiens
aaaaacaataaatgtccacaaccttgatatggatgccacctacactatgagcaacatgtggcagagtccatgtcctgacccctctgtggtcacagaacttrgtatgtaacatccctatgcaactaatgcaccagcctgtggattcattcattcattccccagacctgctatgcacatcttctcttttacaaggtggttttg

SEQ ID NO: 410008 - DNA, 201 bp, Homo sapiens
ctgaaacacagagacatcaagcaagttgcttgaggtcacacaggtaagaagcttgggtctcagctcagcctttctggctgaaagtcaatgctgttatcacwgtaactacactagaacttgtcttgaactgtccctagaaatgggagtgtctgggggttaggggggaggttaaaaaaccaaaacctgtaaaccactgtgact

SEQ ID NO: 410009 - DNA, 201 bp, Homo sapiens
caaggaggagccctttataaaaccatcagatctcatgagaactcgctcactatcatgagaacagtatgggggaaaccacccccatggctcaattacctccwccaagtctctcccttgacacctggggattatggggattgaggattataattcaagatgagatttgggtggggacacaaagcctaaccatatcagtgggaa

SEQ ID NO: 410010 - DNA, 201 bp, Homo sapiens
aaagaaaaaaaaggtaaaacctacaaggactgaggaacagtgaaataccagatttctcatcagtgaccctggacacttaaaaaaaatgatgaaagaattcyttcaaagatctagaggatattgttttcaaattggaattctgtacccagagaaactatagagaaaaataaagataacttcagatattcgagaattcaggaa

SEQ ID NO: 410011 - DNA, 201 bp, Homo sapiens
tgtccaggttgtccagtaatagactatccttttaaccacagacttaaatctgtgtttttggagacagggcactaggaaagtgttcatagggcatgctggtwtggacaaagttggatactgttaatcagcacagcccttcccactggagctctgcttttgattttacacaactccagggggcaccattcacatcaaagtcat

SEQ ID NO: 410012 - DNA, 201 bp, Homo sapiens
ggcattattacgtgttgcattgttatgtgttgcattgtattattagttttccatgacttctataacaaattaccacaaacttcgtggcttaaaacaacatraatttgttatcttaccattttggatgtcagaagtcttactgggctaaaatcaaggcatcagcagagcttctggagcctctaggggagcatctgttccctt

SEQ ID NO: 410013 - DNA, 201 bp, Homo sapiens
gatagcccatgaacccttcttagacttactcattcattcagcatatgttgggtgacacccactgtgtgccaggcattgttccaggcactagagatgcatcygtggacaaagtagacaacagtcaatactcacagtgagaaagacagacaaaaatcaatatttgtaatagaataaataagtacattgtattgtagggtgaga

SEQ ID NO: 410014 - DNA, 201 bp, Homo sapiens
gaactgtatgcaccactttgtgcaacagatttctggaacttttccatcttgccaaactgaaactatatccattgaacaactagtccccgttccccgcacgyagcccctggcagccaccgaggacttcctgtttctaagagtgtgagtactttagatacctcacgtaagtggaatcgtacagtatttgtctcctgaggggct

SEQ ID NO: 410015 - DNA, 201 bp, Homo sapiens
tagggtgagaaacgctatgaatgaggaacaaagtagagtctttcgggggggtgggggcaatagcaagttgcactgttcaaccaggtggtcaggctgggtckcactaagaagttggcgttgagcacatggttcattcagcgatcacatttttgtagaacgctgttcattttttaattccttcactcagcaaacatttattga

SEQ ID NO: 410016 - DNA, 201 bp, Homo sapiens
gtggctcatgcctgtaatcccagcactttgggaggccaaggcaggcaggtcacctgaggtcaggagtttgagatcagcctggctaacatggtgaaaccccrtctctactaaaaaatacaaaattagctgggtgtggtggcatgtgcctgtaatcccagctactcgggaggctgagtcaggagaatcgcttgaacccaggag

SEQ ID NO: 410017 - DNA, 201 bp, Homo sapiens
gcaatttaacaccatgtcagtgcaccgcctaagaccacgctggtaccaacagaggcgagagggtcaaacagcgaacacgctgggcagtgctggataagccygtcagagcaggctctgaatagaaatagttggccatactggtgggtactggccagatgtgggtctgccagcaacgtcaggtgccccatagtttgggaagtc

SEQ ID NO: 410018 - DNA, 201 bp, Homo sapiens
gagtcagaggctccatctgtcttcctccgctactggattgccaggaatttttttttgttttttgtgttttgtttttggttttttgtttgtttgtttgtttktttgacacttagtcacccagactggagtgcagtgatgcaatcttggctcactgcaacctccgcctcctgggctcaagccatcctcctgcctcagcctccc

SEQ ID NO: 410019 - DNA, 201 bp, Homo sapiens
acacgctgggcagtgctggataagcctgtcagagcaggctctgaatagaaatagttggccatactggtgggtactggccagatgtgggtctgccagcaacrtcaggtgccccatagtttgggaagtccccacatgctagacttaactgggttgacttctcacatgccctctaaccacgggcgtggaatccgggggcagggg

SEQ ID NO: 410020 - DNA, 201 bp, Homo sapiens
agggtgttagctctgggagtcagaggctccatctgtcttcctccgctactggattgccaggaatttttttttgttttttgtgttttgtttttggttttttktttgtttgtttgtttttttgacacttagtcacccagactggagtgcagtgatgcaatcttggctcactgcaacctccgcctcctgggctcaagccatcct

SEQ ID NO: 410021 - DNA, 201 bp, Homo sapiens
tttcagcctgggaggtcaatgctgcagtaagccgtgatcatgccactgcactccagcctgagcaatagagcaagaccctatctttaaaaaaaaaaaaaaaaaatgctgggcatggtggtgtgcacctgtagttccagctactcaggaagctgaggtggaaggattgcttgagcccaggagttcaaggttgcagtgagctat

SEQ ID NO: 410022 - DNA, 201 bp, Homo sapiens
ggaaggcaggttttcattctcttctctcttctttttcattcttttgctgcattattcatttccttccacactcgttcatgcagtcatttttttttttttttgagatggagtttcactcttgttgcccaggctggagtgtaatggcgcgatctcggctcaccgcagcctccgcctcctgggttcaagcaattcccctgcctc

SEQ ID NO: 410023 - DNA, 201 bp, Homo sapiens
gctgagacagtggatcatttgcggtcaggagttcaagaccagcctcgccaacatggcaaaaccccatctctactaaaaatacaaaaaaaaaaaaaaaaaaaaaaattagccaagcagggtggcgtgcacctgtaatctcagttacttgggaggctgaggcagcagaaaccaggaggcggaggttgcagtgagccgagatca

SEQ ID NO: 410024 - DNA, 201 bp, Homo sapiens
gggaggtagaggttgcagtgagcctagatcaagccactccactccagcctgagtgacagtctgggtgacagagtgagaccttgtctggaaaaaaaaaaaaaggttgcagttcgcaataggaaggtcctttctttatttgggtagccttagcctcactggacctcagtttcctcatctgtaaaatggggataattataatac

SEQ ID NO: 410025 - DNA, 201 bp, Homo sapiens
ggaggctggggcaggagaatcactggaacccaggaggcggaagctgcagtgagcagagatcgccccactgtactccagcctgggcgacagagcaagactcygtctcaaaaaaaaaaaaaaagaataaaaaaaaatggtccgggacacagaaggtgccacatgcagctgtatcttaggatattctgcacgcatgtcccaagt

SEQ ID NO: 410026 - DNA, 201 bp, Homo sapiens
ggatctcttgagcccagtagtttgagaccagcctgggcaacatggcaaaaccccgtctctacaaaaaatacaaaaattagccaggcgcggtggtgcctgcrtgtagtcctagctactcaggaggctggagcaggaggatcacgtgagcctgggaggtagaggttgcagtgagcctagatcaagccactccactccagcctg

SEQ ID NO: 410027 - DNA, 201 bp, Homo sapiens
ggcgcctgtaatcccagctacccaggaggctggggcaggagaatcactggaacccaggaggcggaagctgcagtgagcagagatcgccccactgtactccrgcctgggcgacagagcaagactctgtctcaaaaaaaaaaaaaaagaataaaaaaaaatggtccgggacacagaaggtgccacatgcagctgtatcttagg

SEQ ID NO: 410028 - DNA, 201 bp, Homo sapiens
acggagtttcaccatgttggccaggctgctctcaaactcctgacctcaagtgatctgcccgcctcggcctcccaaagtgctgggattatgggcgtgagccwgcgctcccggctggttctctgaattaatcggtgcagagcagtgattcccaaccaggagtgactctgcccccgaggggacatttgacagcatctgtagaca

SEQ ID NO: 410029 - DNA, 201 bp, Homo sapiens
atcacttgaacccaggaggcagaggttgcagtgagctgagatcaagccactgtattccagcctgggcgacagattgaaactccatcttaaaaaaaaaaaaagtaaaaaagaaaagaaatgtggaggcagagagaccagccaagaggctactgcaatagtccaagcaagagaagaaaatggactggatccaggtggtaggaa

SEQ ID NO: 410030 - DNA, 201 bp, Homo sapiens
tgtcagatgtcttgggggcctggtggaatcccaacccccagcctcactgcaaagcccatcgctgtaaccccggcactttcctgcctcctctgcttctgctstcacgtctgtgtccccagtcgggcctttctgaggcccactgaagggagtaaactcctgagacccatctctccaagtggggagtgaatgatggcaccggcc

SEQ ID NO: 410031 - DNA, 201 bp, Homo sapiens
tcttgctgtcgcctaggctggagtgcaatggcacgatctcggctcactacaacctcctcctccccggttcaagcgattctcctgtctcagcctcctgagtwgctaggattacagacacgtgctaccacgtctggctaatttttgtatttttagtagagacggagtttcaccatgttggccaggctgctctcaaactcctga

SEQ ID NO: 410032 - DNA, 201 bp, Homo sapiens
ctccaacgtgaagaaggggttttggctgataaaaggatcagtaaggaaatcttctggctttgtaaattatgttcaccttattggttcaacagattgaaaartaaaggcaaccggccgggcgcggtggctcacgcctgtaatcccagcactttgggaggccgaggcgggtggatcacaaggtcaggagatcgagaccatcct

SEQ ID NO: 410033 - DNA, 201 bp, Homo sapiens
ttaatgggtgcagcacaccagcatggcacatgtatacatatgtaactaacctgcacattgtgcacatgtaccctaaaacttaaagtataataataataaamtaaaaattaaaaaaaaaaaagtgttctgacccagggcaacactgtgttacttgactcctgagttagccttgcttttctgaggctattccagacttttctg

SEQ ID NO: 410034 - DNA, 201 bp, Homo sapiens
agcgcgtattctcactcataggtgggaattgaacaatgagaacacatggacacaggaaggggaacatcacactctggggactgttgtggggtgtggggagrggggagggatagctttaggagatatacctaatgctaaatgacgagttaatgggtgcagcacaccagcatggcacatgtatacatatgtaactaacctgca

SEQ ID NO: 410035 - DNA, 201 bp, Homo sapiens
ccccgcacgcagcccctggcagccaccgaggacttcctgtttctaagagtgtgagtactttagatacctcacgtaagtggaatcgtacagtatttgtctcstgaggggcttttgtgaagagagtaggggcttctcgaacaggagaaaaacaaacaaaaaaacattgatctttttcacagctactgggccttaggagatgaa

SEQ ID NO: 410036 - DNA, 201 bp, Homo sapiens
ttgcaacagaaacctataattgtctgtttctccttggttttctgggttgagagtccaatgcacacatttcatcatgccttgatttttttttttttttttttgtcctttttaaatccaacctttcaggacgtacttccagcaaggcaatttggaattcttgaattccagagagacctttccggccacattagctaacagagg

SEQ ID NO: 410037 - DNA, 201 bp, Homo sapiens
tcaccaccaaatttttttttcttttagtttcttgctctctgcaaccctggaaaaacatttcctacttggataaactatgcagccataaaaaatgatgggtycatgtcctttgtagggacatggatgaaattggaaatcatcattctcagtaaactatcgcaagaacaaaaaactaaacagcgcgtattctcactcataggt

SEQ ID NO: 410038 - DNA, 201 bp, Homo sapiens
tgagcaacccaggcctgctgagttaaccctttcctgcacagccagcctctaaatctttatagcagaccccaaatgaaatcagctaaatggctcttcccaaktaaagaccaccagatagcgtagatgtctggtgcacttggagattccacagaggggacagcacatcccttctgcccagtcatgcagctgagccatggaagg

SEQ ID NO: 410039 - DNA, 201 bp, Homo sapiens
tttttccttaactgcacagagacgaagtgcacccagaaagggctccgaactcctcaagaagaagagtgctgagatgtggcgcctcagataagcatctgtgrtggagaaagccgcgggcagcacccctccaagtctgctcctgcttaagtggtgtctgaagtcaccacctctgcagaacatcaccctaatcgctaaaactct

SEQ ID NO: 410040 - DNA, 201 bp, Homo sapiens
gcacttaaacagtcattaatttattgtttttaattttttttacatggtcacagtaagaaatacattttacactataacccaccacatacacacacacacamaaacacacacacaccccaactggaataggtgttcaccattgctgtgtatgatagattctgatagttcgttgtctattgtaggaattaacaaacttttcct

SEQ ID NO: 410041 - DNA, 201 bp, Homo sapiens
ttgatgtccagggtcttattgggggtcagtgacataggcatgcgacacctaagtaactgacctcagccactcagacaccagcaccccagagcaaaaatagrcattcaccataaactacattcttagcctaaactatctcaagtggaagtgcatggtgtggcccaagggcttggagctcatgcaccaggaactggccaaggg

SEQ ID NO: 410042 - DNA, 201 bp, Homo sapiens
agtttgagacaagcctggccaacatggtgaaaccctgtcttcattaaaaaatacaaaaattagccgagcatggtggcatgtgcccatagtcccagctactyaggaggctgaggcaggagaatcacctgaacccaggaggcggaggttgcagtgagccaagatcatgccactgcactccagcctgggtaacacagcaagact

SEQ ID NO: 410043 - DNA, 201 bp, Homo sapiens
tccctgaaatggctgggcttagcaaaaaaccagagcagatgtcgaaatcacacacacacacacacacgcgcgcacaattctataatgtgagtttctaactrttttgacctagaccaggtgtaggctaactaaaaccctcaggccaaatctgcctgctgtctgtttttgtaccacccatgagcttaaaatgggttttacatt

SEQ ID NO: 410044 - DNA, 201 bp, Homo sapiens
ccctcaatgggggatcttgggcaagctccttccacagtctgagcctcagttttctggtctgtcgaaggggaattgctgtacctctcctgtaaagccaaacwgaggactagtgagaaaacgccgagttggggctcagcacggggccagccctcagggacattcagcactgttttcattatttcctgttctgttacacgctct

SEQ ID NO: 410045 - DNA, 201 bp, Homo sapiens
cttgaggtcacacaggtaagaagcttgggtctcagctcagcctttctggctgaaagtcaatgctgttatcactgtaactacactagaacttgtcttgaackgtccctagaaatgggagtgtctgggggttaggggggaggttaaaaaaccaaaacctgtaaaccactgtgacttagggcttatgtagccagcatcttatca

SEQ ID NO: 410046 - DNA, 201 bp, Homo sapiens
cacacctgccgagaaccactgccctaaaacagattcatggatgatatactcaaaataaccgcatttggcaattttataattgcatgctgtggtgggcagamaaatggcaccccaaagacgtccacatcctagtccccagaatctgtggctgttaaccttctatggccaaagggactttgcagctgtgattatgtgtcccta

SEQ ID NO: 410047 - DNA, 201 bp, Homo sapiens
catacaatcggagaacagcagaacctagttctaaatccaggactgagacactgccaaggaagcataaatacactgcttctcactgtactcatctagagagrgaaaacaatactaaacagatcatcatgtacctaattatatcattgcaattgtggtaattgctatgaaggaagagtacaaggggctttgaggaactgtaac

SEQ ID NO: 410048 - DNA, 201 bp, Homo sapiens
cttagttagaaagctggtttcattaacaagttagaaagttagtttcattgcccactctgtaattccaaagttaatttactaacactaaggaccaagctttktcattattttaaaaatcatttagaggagtgattctcaactaggggtgatcttgtccctcagaggacatttggtgacgtctggagacatttttgactgtca

SEQ ID NO: 410049 - DNA, 201 bp, Homo sapiens
atttgctgatatagagggcagaatctgaacatctcatgttacttaagagaaaaaccaaatcattggttacttaaggatttttttctttttacatttttaartatgatacaaattatctaaaaagaagttgaaggattttttaacttctaagatcaacttcctttgccaagagaagaagaatttttttaatctctcaagaag

SEQ ID NO: 410050 - DNA, 201 bp, Homo sapiens
aggactgagacactgccaaggaagcataaatacactgcttctcactgtactcatctagagagggaaaacaatactaaacagatcatcatgtacctaattayatcattgcaattgtggtaattgctatgaaggaagagtacaaggggctttgaggaactgtaactgggcctggggaaatactaagcccagtgtatggactgg

SEQ ID NO: 410051 - DNA, 201 bp, Homo sapiens
ttaggtttgttttttttcatttagttcatctcttagttagaaagctggtttcattaacaagttagaaagttagtttcattgcccactctgtaattccaaasttaatttactaacactaaggaccaagctttttcattattttaaaaatcatttagaggagtgattctcaactaggggtgatcttgtccctcagaggacatt

SEQ ID NO: 410052 - DNA, 201 bp, Homo sapiens
taaggactgttgtgattccactgggcccactcagagaatccaggatcatctccccatctcgaagtccttaagtcagtcacatcaagaatatttattttttwaaaaaagaatatttattgcagcagcatcatagcaaaaggctggaaacaacctggataccatgccattaacaggaaacaggttaaatcaatcatggtgcat

SEQ ID NO: 410053 - DNA, 201 bp, Homo sapiens
ccttcccactggagctctgcttttgattttacacaactccagggggcaccattcacatcaaagtcatcatagactcagtcatcagaccattttcaacatawggcgttaaggtgtcttgagaaagtgagaggcctttttctagcggggctgctttccatatgctctggtccacccttccaagaaccacagatagcccatgaa

SEQ ID NO: 410054 - DNA, 201 bp, Homo sapiens
tcactgtactcatctagagagggaaaacaatactaaacagatcatcatgtacctaattatatcattgcaattgtggtaattgctatgaaggaagagtacarggggctttgaggaactgtaactgggcctggggaaatactaagcccagtgtatggactggtgattgctgtgtaacaaaacaccccaaaatgcagtggctta

SEQ ID NO: 410055 - DNA, 201 bp, Homo sapiens
tacacatacagggatcagaagagttcttgacagccatatttgaaggtcagcctaccacatcctgtccttaaaatgtctcacaagtttctagagtaactggrgcacagtgcttccatggatttgttaccgtgaagacgttctgcctgaagctgcccctgtcttcttcctcaactcttttcatatccgtctacatgagcaatg

SEQ ID NO: 410056 - DNA, 201 bp, Homo sapiens
gacagccatatttgaaggtcagcctaccacatcctgtccttaaaatgtctcacaagtttctagagtaactggggcacagtgcttccatggatttgttaccktgaagacgttctgcctgaagctgcccctgtcttcttcctcaactcttttcatatccgtctacatgagcaatggaattgctatggaaccaagagaactttt

SEQ ID NO: 410057 - DNA, 201 bp, Homo sapiens
gacacccttcggaatagagcactgggattttgtcaccttcactttgggggtgggaaagctgagggacggaggctgcatctggtccaagatccttcaggccwcaaatggcgcggggtggacgtgggggcggaattctcttacccacagccagaggctctcacagtgtggtcctccaagtagcagcgacagcatcacctgggg

SEQ ID NO: 410058 - DNA, 201 bp, Homo sapiens
ggctttatttgactgggagaagttctgggtcagacagagggttgcctccaagctgtcctctgtgactaaagtcaagacaccaggatggaatatttatggtktatagtagggctgcattcagcaggcagcccaggatgaaactgatggcttttgtcttgtcctcactccagatgtatttcacataaattaatactgagtcac

SEQ ID NO: 410059 - DNA, 201 bp, Homo sapiens
gaaattcaatgcacatcagcttaggccaaaaaggagaatttgttcatgtcaccaagatgtccaaacgtagacctaaagcaaggtgggatccagctccctawatattttcatatgaatctgtgtgcactgtcaggaaggctctgcctgtagggtgacagagatggctgccggcatccttgagcctagatctaccagctcagc

SEQ ID NO: 410060 - DNA, 201 bp, Homo sapiens
tttgcaacagaaacctataattgtctgtttctccttggttttctgggttgagagtccaatgcacacatttcatcatgccttgatttttttttttttttttttgtcctttttaaatccaacctttcaggacgtacttccagcaaggcaatttggaattcttgaattccagagagacctttccggccacattagctaacagag

SEQ ID NO: 410061 - DNA, 201 bp, Homo sapiens
gtttgcaacagaaacctataattgtctgtttctccttggttttctgggttgagagtccaatgcacacatttcatcatgccttgatttttttttttttttttttgtcctttttaaatccaacctttcaggacgtacttccagcaaggcaatttggaattcttgaattccagagagacctttccggccacattagctaacaga

SEQ ID NO: 410062 - DNA, 201 bp, Homo sapiens
cacgtagtaaactctcaataaatgtcaaataaataattattattatgtatttgtaatattatgttgcaatagttcgttatattaatataatatgttataataacatagattatattatattgcaacatcataataataagtattattattcggtagtagtagtttagattgaccatctgcaatctgaaaatctgaaatgca

SEQ ID NO: 410063 - DNA, 201 bp, Homo sapiens
tttgggaggccgaggtgggtggatcacttgaggccagaagtttgagacaagcctggccaacatggtgaaaccctgtcttcattaaaaaatacaaaaattakccgagcatggtggcatgtgcccatagtcccagctacttaggaggctgaggcaggagaatcacctgaacccaggaggcggaggttgcagtgagccaagatc

SEQ ID NO: 410064 - DNA, 201 bp, Homo sapiens
gctggagggagcacagggctattgatggatgagtccctagtaacacgggaagatgggaggcaggagaaaaagcttgtggactgagaaggggcttttttttttgaggaaatttgtgttctcagggatgaactagggccatatgataaaagattgcaaggatggtttcaacttcacaccatttagagcctctggcactatgag

SEQ ID NO: 410065 - DNA, 201 bp, Homo sapiens
ctcctgggttcaagcaattctgcctcagcctcccgaatagctgggattacaggcatgcgccaccacacccggctaatttttgtacttttagtggagacggsgtttctccatgttggtcaggctggtctcgaactcctgacctcaaatgatctacccgcctcggcctcccaaagcactggattacaggtgtgagccactgca

SEQ ID NO: 410066 - DNA, 201 bp, Homo sapiens
cactcctttttttttttttttttttttttttttttgagacggagtcttattctgtcacccgggctggagtgcagtggtgatgtcttggctcactgcaaccwctgcctcccaggttcaagcgatcctcctgcctcagcctccctagtagctgggattataagcatgcaccaccacgcccggctaatttttgtatttttagta

SEQ ID NO: 410067 - DNA, 201 bp, Homo sapiens
tcatctttcccagaagttccaacagaatcccatattggccctcattggcccaagttgggccatgtggcaatgcttatagcaaggcaaggagaacagggtgwtggagataaggaagctgaagcctatggattatctttgaaggaggggtggttttcttaaaggaaaacagagtggtagtatcagaagaaggagaaatggatg

SEQ ID NO: 410068 - DNA, 201 bp, Homo sapiens
ctgcccaggggcaacaactcttgctgctgcctttaaaaatgtaacctccaaattatttttattttattttatttttttggtacggagtttcactcttgttkcccaggctggagtgcagtggcacaatctcggctcaccacaacctcctcctcctgggttcaagcaattctgcctcagcctcccgaatagctgggattacag

SEQ ID NO: 410069 - DNA, 201 bp, Homo sapiens
agccacctctctcccacctcaccacccaattccagccaccttcacctccaactcggcttcctatctggtctcccagcttctactcttgcccactgcagccycctacattggagtcatcctgaaatgcaagcttggccatatcactctccagccgaaaaatcttcagtggcttccccattgacaagcctgcccccagcctcc

SEQ ID NO: 410070 - DNA, 201 bp, Homo sapiens
ctactcaggaggctgaggcaggagaatggcgtgaacccaggaggcggagcttgcagtgagccgaaatcgcgccactgcactccagcctggccaatagagcragactccatctcaaaaaaaaaaaaaagccccaagtgggtaattcctttcctctaaggcagtaaccagaataaacccttctctatcaccaatgcatgatgc

SEQ ID NO: 410071 - DNA, 201 bp, Homo sapiens
ttaaaagatcattatttactccaacggaaaacaaaaggcatgagaagtgatcatagtttactacctggcttagctgtgttatcagttagctacaaaacaaatcaccccaggacttagtggcataaaacaataagcatttattattcagcccatgagattttgagttggcagagaggttctactgagctagactgggctctt

SEQ ID NO: 410072 - DNA, 201 bp, Homo sapiens
gagagaattaccaaactgtgacacagagacatgaaaatgacactgataaacttgctcaatgtaggattgccacaaaactttaatttgtttaaaaaaaaaaacagtatctgcaaagtacaataaagcaaagcaataaaacgaggtcttcctgtatttgctttattgcggtgatctggaaccaagcccacgatatctccaagg

SEQ ID NO: 410073 - DNA, 201 bp, Homo sapiens
tgtttgagtccaggagttcaaggctgcattgagctatggtcacaccactgcaccccagcctgggtgacaggggagaccctgtctcaaaaaaaaaaaaaaaagaacttcatcaagaatgcataatagttatattactgagctgccatccaggtccatagcctctctcctgaagggcagttccaactcgaaacctcttcacca

SEQ ID NO: 410074 - DNA, 201 bp, Homo sapiens
tgttatttttgcctttaaatttatatcctagaaaaatactttaaaagctgctagacatgtccagctgaaagaacattcttcaaagattaaaaaaaaaaaaattctaagaggctgaatagttgcacaaaaccccaaaagaggaaccggtttcaacatctttctttgttctcttaaatttgaccatgatttcatcatttgtca

SEQ ID NO: 410075 - DNA, 201 bp, Homo sapiens
gccttaagtagagcagaactcctctggctgccaagagaacagactgcaggggtcagagggtggggcaggaaaaccgttaagagactgttcagacagggaggtgacggtgacttggaccagggtggtggcagtaggatcagggagaagagttggattctagatatgcttttaagatagagccgatagaatttgctgagggat

SEQ ID NO: 410076 - DNA, 201 bp, Homo sapiens
ctagctacttgggaggctgaggcaggaggactgtttgagtccaggagttcaaggctgcattgagctatggtcacaccactgcaccccagcctgggtgacasgggagaccctgtctcaaaaaaaaaaaaaaaagaacttcatcaagaatgcataatagttatattactgagctgccatccaggtccatagcctctctcctga

SEQ ID NO: 410077 - DNA, 201 bp, Homo sapiens
gctgagacaggagaatcacttgaacctgggaagcggaggttgcaatgagctgagatcacgccactgaactccagcctgggcgacagagcaagactctgtcycaaaaaaaaaaaaaaaaaaggaacctgcccaaatgtttcctcatcaaaccacctgatgcgttaaatatgtattatttattacctgccctctccaacacac

SEQ ID NO: 410078 - DNA, 201 bp, Homo sapiens
tgccttaagtagagcagaactcctctggctgccaagagaacagactgcaggggtcagagggtggggcaggaaaaccgttaagagactgttcagacagggaggtgacggtgacttggaccagggtggtggcagtaggatcagggagaagagttggattctagatatgcttttaagatagagccgatagaatttgctgaggga

SEQ ID NO: 410079 - DNA, 201 bp, Homo sapiens
ggtgcacaacattgtaccctagattccactgaagtgttcactttaaagtggttcattttcacacctgtaatcccagcatttcaggaggctgaggtgagagratagcttgagcttaggagtttgagaccagcctgggcaacatagtaagagcttgtcgctacagaaagaaaaataagtaaaataggccgggcacagtggctc

SEQ ID NO: 410080 - DNA, 201 bp, Homo sapiens
gtctctactaaaaacacaaaaattagctgggcatgatggcaggcacctgtaatcccagctactcaggaggctgagacaggagaatcacttgaacctgggargcggaggttgcaatgagctgagatcacgccactgaactccagcctgggcgacagagcaagactctgtctcaaaaaaaaaaaaaaaaaaggaacctgccca

SEQ ID NO: 410081 - DNA, 201 bp, Homo sapiens
ctgccttaagtagagcagaactcctctggctgccaagagaacagactgcaggggtcagagggtggggcaggaaaaccgttaagagactgttcagacagggaggtgacggtgacttggaccagggtggtggcagtaggatcagggagaagagttggattctagatatgcttttaagatagagccgatagaatttgctgaggg

SEQ ID NO: 410082 - DNA, 201 bp, Homo sapiens
gcacttgctgttgttccctgtgccaggaatgcccatctccccattttctacatggctcctttattcacgaatctgcccagtggctgggcgtggtggcccaygcctgtaatcccagcactttgggaagctgaggcaggcagatcacttgaggccaggagttcgaaaccagcctgtccaacatgatgaaaccctgtctctact

SEQ ID NO: 410083 - DNA, 201 bp, Homo sapiens
ggtgtttccatgctatacaatgggtatggaaatctttgttgagcctgagaaccttgaaatatttgctacaattctttggttgcaagcaacagaaaccagtwccgggcccagcacagtggctcacgcctataaccttaccactttcagaggccgaggtgggcagattgcttaagtccagtaatttgaaaccagcctgggcaa

SEQ ID NO: 410084 - DNA, 201 bp, Homo sapiens
cctgagaggtggagtttgcagtgagccgagatcgtaccattgcactccagcctgggcgacagacgtgagactccgtctcaaaaaaaaaaaaaaaaaaaaaacgctgaaagctttagcaaccctgggcccccacattccccgattccccgctggctgccaccagtaggagctgagaggctgctgtcctgtagatgaatcccc

SEQ ID NO: 410085 - DNA, 201 bp, Homo sapiens
agatgctctcgcctatataatctcatttacttctcagattgacagctctcagcaggtaaagcttaaaaggcttgcatttaatagagaagtggcggggcacrgtggctcacgcctgtaatcccagcactttgggaggccgaggcaggtagatcacctgaggtcaggagttcgagaccagcctgaccaacagggtgaaacctc

SEQ ID NO: 410086 - DNA, 201 bp, Homo sapiens
atatcagggtgggattctgtcatcagatcaaaaagtccatgtacagaaagtacttcctatgtgcaagcctgagataagggctttcttatttaaaaattatwaagtgtttcaggcatacaaagatgggtaaaacatacaaaagtagggtacccagcatcctgcttaactgatacaggggttggcaaacttttgctgccagat

SEQ ID NO: 410087 - DNA, 201 bp, Homo sapiens
tgggtttcaccatgttggccaggctggtctcgaactcctgacctcaggtgatccacccacctcagcctcccaaagtgctgggatcataggcatgagccacygcgcccggcccaccatccttcttaaaaggctggaattgaaacctcattataacagattctgtcaatctcccctcccccattattcccgtagcactctgct

SEQ ID NO: 410088 - DNA, 201 bp, Homo sapiens
gaaattggtttcacacagaccttattttagacatttcttagataactagcatttacccctctttttaatatttgcctgttttaatggggggggcaaacaaatgttttctaagcccagtagccttaaactaccaagtgaaccaggaaagaccttatttacattgctcttcagcatctgtgaattgagaagaaattctttttc

SEQ ID NO: 410089 - DNA, 201 bp, Homo sapiens
tccagtcacctcctaccaggccccgcctctaacactaaggattacaatttgacaggagatttgggcggggacacagatccaaaccatatcactcctcattstcaagaatgtgtacgtttgggtaaaggcctgggtttttctgtttgtttttttgttgtttttttttttggtacccctgcgaaattggtttcacacagacct

SEQ ID NO: 410090 - DNA, 201 bp, Homo sapiens
acgttatggtactcaacacattaaatgtattaattcatgtggttctcacaatggccctggaagatgggtgctatttgaagacccattttgcagatggagamactgaggcacagaggcactaagtcacttgcacagggtcacatagccagtaaatagcagattcaaactcagtcagtccctattctgtttctttttaacttt

SEQ ID NO: 410091 - DNA, 201 bp, Homo sapiens
tcctgcttaggacagactggcacacagtaggtgctcaggaaacgtcagtgaaacgattgaaaggagtcaccgaccttgctctgttgttttcctttttggcrgaggataagctaggataaccacagctcggggctcagcatagtgcccggcacagagcagatgcccagcaatcagtaactattgctaatgtcaactcattca

SEQ ID NO: 410092 - DNA, 201 bp, Homo sapiens
tcacacatattcatatattcatttaaaataaaaaaatggccaggcacggtggctcatgcccataatcccagcattttgggaggccgaggtgggtggatcasttgaggccagaagtttgagacaagcctggccaacatggtgaaaccctgtcttcattaaaaaatacaaaaattagccgagcatggtggcatgtgcccatag

SEQ ID NO: 410093 - DNA, 201 bp, Homo sapiens
ttattttaagaaagatttttgtatactcttatcctctccctttcatccaagaaatacaaccatacatcccaagatagtgatccacgaggcagatctttggrccgcctacgtggtgaaaggccccaccaacctcctataattcagagaactttgcctgtaattccagcactttgggaggctgaggcaagaggatcacttgaa

SEQ ID NO: 410094 - DNA, 201 bp, Homo sapiens
tctgccttaagtagagcagaactcctctggctgccaagagaacagactgcaggggtcagagggtggggcaggaaaaccgttaagagactgttcagacagggaggtgacggtgacttggaccagggtggtggcagtaggatcagggagaagagttggattctagatatgcttttaagatagagccgatagaatttgctgagg

SEQ ID NO: 410095 - DNA, 201 bp, Homo sapiens
ggcattgctatggggaaaaagtaagtagaggggagggaggttgatgggaaacattgaggtagaacagggaagaggaatttttaatttttttttttttttttctttttttttgagacggagtctcgctctgtcgcccaggccggactgcggactgcagtggcgcaatctcggctcactgcaagctccgcttcccgggttcac

SEQ ID NO: 410096 - DNA, 201 bp, Homo sapiens
gctgggcagtgctggataagcctgtcagagcaggctctgaatagaaatagttggccatactggtgggtactggccagatgtgggtctgccagcaacgtcargtgccccatagtttgggaagtccccacatgctagacttaactgggttgacttctcacatgccctctaaccacgggcgtggaatccgggggcaggggcggg

SEQ ID NO: 410097 - DNA, 201 bp, Homo sapiens
tggcattgctatggggaaaaagtaagtagaggggagggaggttgatgggaaacattgaggtagaacagggaagaggaatttttaatttttttttttttttttctttttttttgagacggagtctcgctctgtcgcccaggccggactgcggactgcagtggcgcaatctcggctcactgcaagctccgcttcccgggttca

SEQ ID NO: 410098 - DNA, 201 bp, Homo sapiens
cgaaattggtttcacacagaccttattttagacatttcttagataactagcatttacccctctttttaatatttgcctgttttaatggggggggcaaacaaatgttttctaagcccagtagccttaaactaccaagtgaaccaggaaagaccttatttacattgctcttcagcatctgtgaattgagaagaaattcttttt

SEQ ID NO: 410099 - DNA, 201 bp, Homo sapiens
ctacagacaaaagggggaaagtgggttctgaagccttttacaagaggagattggaaagttgagtaattcaatgggggtgcaggtgggaggcagtaaggaamgctccaggagctttttaagacctgagatgcctacattgacaatactgaaatcatcgtcggcctccccagccccaaagctgggcttaagcaaaatcccagc

SEQ ID NO: 410100 - DNA, 201 bp, Homo sapiens
cttgaaccagggaggtggaggttgcagtgagccaagatcatgccaccacactgcagcctgggtgacagagcaagagtccatctcaaaaaaaaaaaaaaaaatcgtggaacaactgattatctatacttcatacctcacatgacacacaaaaaaaatgcaaaatagatcatagacttaaatataaaactgtaatcttctaca

SEQ ID NO: 410101 - DNA, 201 bp, Homo sapiens
gacaaatgaaagactaagagaagaaatttacagcattcgaaaaacacattgaatacctagactctgtaatgcactccagcaaatcagtaagaaaaaaaaaatagaaaacccagtagaaaaatgggcaagcataaaagatctgaacagacaatttccaaacattcatatggcccacaattatgtgaatatatgctcaaactc

SEQ ID NO: 410102 - DNA, 201 bp, Homo sapiens
ctgctcagcttctgggaaggcctcaggaaatttgcaatcatggcggaaggtaaaagggaagcaggcacgtcttacatagccagagcaggaaaaggagggggtcaggggaggtgccacacatttttaaacagccagatctcatgagaactcactcactgtgcggtacctggggaggggagatggtgctaaaccattcatgag

SEQ ID NO: 410103 - DNA, 201 bp, Homo sapiens
tgtaataagcatgtagttaggtttttaaagtcagtctggtgatctttgtctttcaagtgttgtatttattctgtttgcatttactgtaactaatgtaatawaaacatacatgaaatgtttacatttattattattctttaagtggttatcctaaatattataggatacattcttgatatatctaaaagtttactataaatt

SEQ ID NO: 410104 - DNA, 201 bp, Homo sapiens
caggaggtggaggttgcagtgagccgagatggtgccactgccagcctgggtgacagagggagactccatctgaaaacaaacaaacaaacaaacaaacaaamgtgtgcctggagcgactgtctatgcaaactctgacatcagctctaggctctagtttcatgattttcattttatttcttgttcccttctttacattgggga

SEQ ID NO: 410105 - DNA, 201 bp, Homo sapiens
agaggtttaattgtctcatcattcctcaggctgtacaggaagtatggtgctggcatctgctcagcttctgggaaggcctcaggaaatttgcaatcatggcrgaaggtaaaagggaagcaggcacgtcttacatagccagagcaggaaaaggagggggtcaggggaggtgccacacatttttaaacagccagatctcatgag

SEQ ID NO: 410106 - DNA, 201 bp, Homo sapiens
ccaggaggtggaggttgcagtgagccgagatggtgccactgccagcctgggtgacagagggagactccatctgaaaacaaacaaacaaacaaacaaacaamcgtgtgcctggagcgactgtctatgcaaactctgacatcagctctaggctctagtttcatgattttcattttatttcttgttcccttctttacattgggg

SEQ ID NO: 410107 - DNA, 201 bp, Homo sapiens
actctaaatatgtctagtttattgtatgtcagttgtgcctcagtaatgcgttaaataagtaaacacattaaaagagagaaagaaaaagaatgaaattactycaagaaaggtttacataaattgtgctatcctgtggatctctgactgtgaccttgaacttttactctgtattagtctgttctctcattgctataaagaaat

SEQ ID NO: 410108 - DNA, 201 bp, Homo sapiens
gtttttcagttttaaactggggggcccagcagtttttccttggggtatcacttctagagaactccaggcacgtgcacccaagaagacctgctccagtcattgtggaattcgttctcataacaacaacatggaacccctgaggactggacaggtgaactgtggaatagacatacctgcagataccatgcagcagtgagaaag

SEQ ID NO: 410109 - DNA, 201 bp, Homo sapiens
cttttgccaggtgaagtacctgctcccacttggccttctgccatgaataaaagctccctgaggcctccccagaagctcagcagttgcctgtgctgtgcttrtacagcctgcagaactgtgagccaattaaacctcttttctttatagattaccctggctcagatatttctttatagcaatgcaagaatggactcacaaaga

SEQ ID NO: 410110 - DNA, 201 bp, Homo sapiens
ctagtgttcactgtaaaggaatttaagcatatgtgtgtgcacatgtgcacgtgcgcgcgcgcgcacacacacacacacacacacacacacacacacacacmttcatgcactctttttaaatttcccataaaaactctacttttgaaattatccaggatatccttgagtggttggttccaaactccagaggctctagaggtt

SEQ ID NO: 410111 - DNA, 201 bp, Homo sapiens
ccgattttggaaatgtcttcctgtagccttgctgtcattcctttgtgcttatttttagtgaattagttttggggattttcttttgtttttaagaaaacacagagttgtaagacttgtttgggaatcacaggttttattgaacacttattatttattgaatatttattatgtcccaggcattgtgctgtggaaatactttat

SEQ ID NO: 410112 - DNA, 201 bp, Homo sapiens
cctgccccagtctcatgttaaattataatccccagtgctagaagtggggcctggtgggaggtgttgggatcatgggtgcggatccctcatggcttgtgagratcccacatggcttcacaatagtgagttcttgtgagatctggtcatttaaaagtgtgtggcacttctccgccactctccccctcttgctcctgcttttgc

SEQ ID NO: 410113 - DNA, 201 bp, Homo sapiens
agctcccacttataagtaagaacatgtggtatttggttttctgttcctgtgttaattcacttaggataatggcctctagccctatccatgttggttcaaargacatgatcttattttttatggctgcgtagtattccatggtgtatatataccacattttctttatccagtttgccattgatgggcatctaggttgattct

SEQ ID NO: 410114 - DNA, 201 bp, Homo sapiens
gataaagctttccaatcagggagtaaaaacagcacaagggatgaagacatgggacattccgtggggaatatagattggactcaccgctctgaggagcgacatgcaaacgggtttttcagttttaaactggggggcccagcagtttttccttggggtatcacttctagagaactccaggcacgtgcacccaagaagacctgc

SEQ ID NO: 410115 - DNA, 201 bp, Homo sapiens
cccgattttggaaatgtcttcctgtagccttgctgtcattcctttgtgcttatttttagtgaattagttttggggattttcttttgtttttaagaaaacacagagttgtaagacttgtttgggaatcacaggttttattgaacacttattatttattgaatatttattatgtcccaggcattgtgctgtggaaatacttta

SEQ ID NO: 410116 - DNA, 201 bp, Homo sapiens
tcatgcctgtaatcccagcattttgggaggcacaggcacgtggagcacctgaggtcaggagttcaagaccaacctggccaacatggcgaaaccccgtctcyactaaaaatacaaaaattagccaggcgtggtgccacacgcctgtgatcccagctactcaggaggctgaggcaggagaatcacttgaacctgggaggcaga

SEQ ID NO: 410117 - DNA, 201 bp, Homo sapiens
ataatattaccagctgggcacggtggctcacacctgtaatcccagcacttttggaggctgaggcgggtggatcacctgaggtcaggagttcgagaccagcytggccaacatgatgaaaccccatctctactaaaaatacagaaattagcctgagtcatggcaggcacctgtaatcccagctactagggcggctgaggtagg

SEQ ID NO: 410118 - DNA, 201 bp, Homo sapiens
attgaaataaaaaggccgggcatggtggctcatgcctgtaatcccagcattttgggaggcacaggcacgtggagcacctgaggtcaggagttcaagaccarcctggccaacatggcgaaaccccgtctccactaaaaatacaaaaattagccaggcgtggtgccacacgcctgtgatcccagctactcaggaggctgaggc

SEQ ID NO: 410119 - DNA, 201 bp, Homo sapiens
tatttgcacctcctccccatgaacataaaatgtcacctagtctcctgggtttgtgtgtcgtgtgggtgtgtgtgcggtcttctaggtttgtgtgtgtgtcrtggggggggggtgcggtgtggtcttaattgttaatgcatttgtttattaatttaaccagtatttgttgagttactgcatataccaggcactgtttcaggt

SEQ ID NO: 410120 - DNA, 201 bp, Homo sapiens
caccagtagcatactatacagctgttaaaaagaataagttagatatatttgtgctactatgggtttctctttgagctattgtgataggttaaaaaaaaaaagcaggaggcagaattacatgggtaatgtgagcctgagttttttaaaagtttaagtgtagcttaatacccatatttactcatattccataaggaatttcta

SEQ ID NO: 410121 - DNA, 201 bp, Homo sapiens
tcccgagttcaagcagttctcctgcctcagcctccctagtagctgggattacaggcacacaccaccacgcctggctaatttttgtatttttagtagagacrgaatttcaccatgttggccaggttggtctcgagctcctgacctcctgatcctcccgtctcagcctcccaaagtgctgggattacaggtgtgagccactgt

SEQ ID NO: 410122 - DNA, 201 bp, Homo sapiens
ctcccgagttcaagcagttctcctgcctcagcctccctagtagctgggattacaggcacacaccaccacgcctggctaatttttgtatttttagtagagayagaatttcaccatgttggccaggttggtctcgagctcctgacctcctgatcctcccgtctcagcctcccaaagtgctgggattacaggtgtgagccactg

SEQ ID NO: 410123 - DNA, 201 bp, Homo sapiens
gtgccgctgagtaatccctccttaggggtgagggagctggggtctttataccccacatatgccagaaagagccttcaggtaaaacattgcacttgctgccrtttggaagttggatggttttcatggaaatggtatttgccgaagggatttaggcaaggtagtgacagcatcagccacgcagggcacagggcatccttgttg

SEQ ID NO: 410124 - DNA, 201 bp, Homo sapiens
gaaacagaataaagtccagaaataaaccttctcatttatggtcagtttatctttggcaaatgtaccaagtaattcagtgggggaagaaatggataccccttctccatgatgtgtttatatcatatttcatacttatatcaaaacatctcatgtaccccataaatatatacacctactgtgtacccacaaaaattttaaaaa

SEQ ID NO: 410125 - DNA, 201 bp, Homo sapiens
ctcagtctcaaaaaaaaaaaaagaaagaaaagaaaaaaagaaactgggggtgggtgggaggcagagattgcattgagccaaaatcacaccacttcactccmgcctgggtgacacagttgagactctgtctcaaaagaaaaaaaaaagaaagaaactgggggttggggtagttggttgtcacatgaagggaaagcactgttt

SEQ ID NO: 410126 - DNA, 201 bp, Homo sapiens
ggtgatggagcaagactcagtctcaaaaaaaaaaaaagaaagaaaagaaaaaaagaaactgggggtgggtgggaggcagagattgcattgagccaaaatcrcaccacttcactccagcctgggtgacacagttgagactctgtctcaaaagaaaaaaaaaagaaagaaactgggggttggggtagttggttgtcacatgaa

SEQ ID NO: 410127 - DNA, 201 bp, Homo sapiens
cttagtcatttggggctttccccaaactctccagaattttggccatggttgtggaatcttactcagtgctagtctatttgtagtgctgaaggctcatccgrttctccatcatcaggacccaggccactgtcttggtctaggaggcccctttgggtctggactcttcacatctgtgtctttgccacactgaggacccaggaa

SEQ ID NO: 410128 - DNA, 201 bp, Homo sapiens
agagatcacaacctggaagcccacagccccctctacactacaaacacagttttgtttattttgttttgtttttggttttattttttggtccaactaactcrtatttgttacctgcatttaaaactcaggagattttacatacaaatccagaagccctggctacattagactcacattcttatggggcagaggttggctgga

SEQ ID NO: 410129 - DNA, 201 bp, Homo sapiens
tccacacagatcttgcccacgtgtcctcccccgccagccttccacagccatggcagcctacggccagacgcagtacagtgcggggatccagcaggctaccycctatacagcttacccacctccagcacaagcctatggaatcccttcctacagtgagtagtaaacaagtccttactctcctcctcaggtccccaaatcatg

SEQ ID NO: 410130 - DNA, 201 bp, Homo sapiens
caaaatttactcctatccctttgcctagaactcatcatgtggccacatttagccatagggaatctgggaattgtagtttttattctaatcagccatgtgcycagcttagaaacagattctattaatatgagagagaaggggtgaatcaatattaggggaccctccaggagacctgccaccatcaccttaagaggatgtttt

SEQ ID NO: 410131 - DNA, 201 bp, Homo sapiens
ccagatgtgggtctgccagcaacgtcaggtgccccatagtttgggaagtccccacatgctagacttaactgggttgacttctcacatgccctctaaccacrggcgtggaatccgggggcaggggcggggccataaccttgtggctggtgttctgtgtttcagcacaacatgcctttctggcggatatcctgccacgcagac

SEQ ID NO: 410132 - DNA, 201 bp, Homo sapiens
gaaattgggaaggctcttccgtgtaatttggcaacatctaacaaaatttaaaatgcatagaccttttaactcaactattcgacatctaagaatttatccgraagataaactttgacctaggtacaaacacttaagtaaaaagaatacttatttttttcactgattaaaaatttattaatactattatgcaaataattttag

SEQ ID NO: 410133 - DNA, 201 bp, Homo sapiens
gcatgcgccaccacacctggaatttttttttttccaagatggagtcttgctctgtcacccagagctggagtgcagtggcacagtcttggctcgctgctacytccgcctcccgagttcaagcagttctcctgcctcagcctccctagtagctgggattacaggcacacaccaccacgcctggctaatttttgtatttttagt

SEQ ID NO: 410134 - DNA, 201 bp, Homo sapiens
ggagataagagatggtgagtagatagaaaaatacagacagatgtagatttggctctgtgtaacaaagagcttaaataacagtggcataaataacctaggartttatttctctctcatctaagagtctgagcagcagctctgctctgcaaagtcatcagcagcccagattcctttcaacttgtttcctcatccttaaggtgc

SEQ ID NO: 410135 - DNA, 201 bp, Homo sapiens
gtaaattttatgttgtatatataccacaattttttaaataaataatttttattttttattttatttactgttttctagagacagggtcttgccgtgttgcrcaggctggagtgcagtggtgagattgtagtttactgcagcctcaaactcctaggttcaagcaatccccccgcctcagcctcccaagtagctggaactata

SEQ ID NO: 410136 - DNA, 201 bp, Homo sapiens
ggatgctgccggcctcggactcttcatgcacagaagtgaagggtccacagctgctcatcttcatcaatcgctctctctctcttttttttttttttttttttggaaatggggttttgctcttgttgcccaggctggagtgcaatggtgtgatcttggctcactgcaacctctgcctcccaggttcaagtgattctcctgcct

SEQ ID NO: 410137 - DNA, 201 bp, Homo sapiens
gctatgttttcaaaaaaagggtctttttttagagagagacttacacggaaatattgacaaatgaaatgatattatggggtttgcttcaaaatactatgacagggggaaatagatggagtggaaatggggcaggactggccatgagtgctggggctgtgtgatgagtttaggaaagctcattagatgagtctgagtattttt

SEQ ID NO: 410138 - DNA, 201 bp, Homo sapiens
tggatgctgccggcctcggactcttcatgcacagaagtgaagggtccacagctgctcatcttcatcaatcgctctctctctcttttttttttttttttttttggaaatggggttttgctcttgttgcccaggctggagtgcaatggtgtgatcttggctcactgcaacctctgcctcccaggttcaagtgattctcctgcc

SEQ ID NO: 410139 - DNA, 201 bp, Homo sapiens
ttggatgctgccggcctcggactcttcatgcacagaagtgaagggtccacagctgctcatcttcatcaatcgctctctctctcttttttttttttttttttttggaaatggggttttgctcttgttgcccaggctggagtgcaatggtgtgatcttggctcactgcaacctctgcctcccaggttcaagtgattctcctgc

SEQ ID NO: 410140 - DNA, 201 bp, Homo sapiens
aaggatccagcatcacatcctgcaagggaggccaggaatgcaagacttagtcttcatcagcctgggcagagggaagctatcaggggagcgaggaatcaggcatgcctgttgggaggccaagtggtatctgccacaaaccgctgctccctaaatacagcttggcattccagtttgccacagtccccaccatcccctgttgct

SEQ ID NO: 410141 - DNA, 201 bp, Homo sapiens
agttctttctgctgctctgccccacgtccctcagatgtgtgactccgggactcacttgggggacatgcagccagtctcctagctatgccaggccctgcttytgtctctctcttgctgttacctatgaacttttgattcagtttggactctcgcacacaagtaaaataaaacccagcctaaactgacttaatatttttacag

SEQ ID NO: 410142 - DNA, 201 bp, Homo sapiens
tcaacctgggaggcggaccttgcagtgagtcggtatcatattgtgccactgcactccagcctgggcgacagagcgagactccatctcaaaaaaaaaaacttgtgaaacagtacattttatttaactcaagatgtcaaaaaatattatcatttcaatacatcatccatacttttaagattactaatgcattattttactttt

SEQ ID NO: 410143 - DNA, 201 bp, Homo sapiens
cagcctccacatccacactcggggctgtctgctctgaaaggtgggtagcgctgtagcctggagcttagaaacgaacctcagatcacacactttgtattcayccactgcaaaggtcattcccaggctgagatttctccagagagagaaatgcccagcatctgccaccagcacacccctccttaagggaaacccactctcctg

SEQ ID NO: 410144 - DNA, 201 bp, Homo sapiens
gtcctctgctgagatttgcagtgcccttttgtaaaccgctacaaggcaaaataggtcgttttaggagtcctgcttctttctttttatcttttttctttttytgagacagggtctcattctgttgcccaaactggagtgcagtggtgtgatcacagctcactgcagccttgacctctgggttcaagcaatcctcctgcctca

SEQ ID NO: 410145 - DNA, 201 bp, Homo sapiens
gtgtcaacctgggaggcggaccttgcagtgagtcggtatcatattgtgccactgcactccagcctgggcgacagagcgagactccatctcaaaaaaaaaaacttgtgaaacagtacattttatttaactcaagatgtcaaaaaatattatcatttcaatacatcatccatacttttaagattactaatgcattattttact

SEQ ID NO: 410146 - DNA, 201 bp, Homo sapiens
ccagcgtaggctctgttgcaggcagcatgctaagcatgggccacgcagccccaggctgacagtcaagccacaccttcatggaattcatatcccagggagaggatacaggcggtgcatgagtctagttaacctgccataacaaaataccatggtcttggtggcctagacaacagaactttattttctcacagctctgggagc

SEQ ID NO: 410147 - DNA, 201 bp, Homo sapiens
aagccacctgcagtgggggcaggcagttccccatgaggaacctaaggagcttttagcagaaagaatgagaatggatgagaggcagaaaccatgggtgctcwtgccaggagcagagccagcctccacatccacactcggggctgtctgctctgaaaggtgggtagcgctgtagcctggagcttagaaacgaacctcagatca

SEQ ID NO: 410148 - DNA, 201 bp, Homo sapiens
accagcgtaggctctgttgcaggcagcatgctaagcatgggccacgcagccccaggctgacagtcaagccacaccttcatggaattcatatcccagggagaggatacaggcggtgcatgagtctagttaacctgccataacaaaataccatggtcttggtggcctagacaacagaactttattttctcacagctctgggag

SEQ ID NO: 410149 - DNA, 201 bp, Homo sapiens
ctgggattataagcatgcaccaccacgcccggctaatttttgtatttttagtagaggtgggggtttcaccatgttgaccgggctggtcttgaacccccgayctcaagtgatacgcccacctcagcctccccaagtgctgggattacaggtgtgagccaccgcaactggcagattttacgtccaaatgcaacaaaggctagc

SEQ ID NO: 410150 - DNA, 201 bp, Homo sapiens
gcatgcaccttttaatcacagctactcgggaggctgaggcaggagaattgcttgaacctgggaggcagaggttgcagtgagccaagatcacgccattgcaygccagtctgggcgacaagagtgaaactctgtctcaagaaaataaataataaaatactgtgcagcagttccctggcagatattatgaaatgtgccaggctg

SEQ ID NO: 410151 - DNA, 201 bp, Homo sapiens
agtagagacggagtttcaccatgttggccaggctgctctcaaactcctgacctcaagtgatctgcccgcctcggcctcccaaagtgctgggattatgggcrtgagccagcgctcccggctggttctctgaattaatcggtgcagagcagtgattcccaaccaggagtgactctgcccccgaggggacatttgacagcatct

SEQ ID NO: 410152 - DNA, 201 bp, Homo sapiens
aatttattttttattttatttttctgcgacagggtctcactctgtcactcgctgaagcacagtggtgcaaacacggctcactgcagcctcaacttcctggkatcaagcaatcctctcagctcagcctcttgtgtagctgggaccacagacatgcactaccatgcccagctaattttttatgtttttttgtgagacagggat

SEQ ID NO: 410153 - DNA, 201 bp, Homo sapiens
gttctcaaactgaagcagcatcagaatcacctggggggtgggggatggtgcttttgaaatcagggattgctgggcctcagcccaagagtttccaattcagyagatctggggcagggcatgagaatttacgtttctgacaagcccccagatgattatgatgctctggattgaggaccacactctgagagtccctgataaaga

SEQ ID NO: 410154 - DNA, 201 bp, Homo sapiens
gtcaccaatgggcaatttaagggacttccaagggcagttttcatcctacgagatctttgcctctggtgctgccttggaacccactgctttggagctagacrgtgctgttgggatatttcccaggaggagacacccagcaaagcttctgatttgtccaccattccctttcttacgccaggtgaatacaacacacacaatgga

SEQ ID NO: 410155 - DNA, 201 bp, Homo sapiens
taggtggttactagagcacatgaggccactagaagacggtggctttactcagagggccaggggaagccagtgggttttaagtgaaaagcacagctctgatwgttgttttaaaaagagcactctggctgctgtgtggacaacagacatgggggacaagggaggctagctgcctttatagtggcccagcacacagaggggctc

SEQ ID NO: 410156 - DNA, 201 bp, Homo sapiens
gggttttaccatgttggtcaggctagtctcaaactcctgacctcaagtgatccacccaccttggcctcccaaactgctgggattacagacatgagccaccrcacccagcccaacttcatctctttactctccttcttcccttgtctcttgtcctaccccatttccctagccttgaagaattgccctcctttaagaaaatca

SEQ ID NO: 410157 - DNA, 201 bp, Homo sapiens
tggctaatttttgtatattaagtggagatggggttttgccatgttggccaggctggtctcaagctcctgagctcaggcagtctgcccacctcagcctcccraagtgctagtacaggcatgagccaccatgcccagcctgggtctttttctgataacttccatgtctctacttaacatgtccaatctttcttctggcttctt

SEQ ID NO: 410158 - DNA, 201 bp, Homo sapiens
gatctgctgctaattacatccatgtcatttttcatcccatacatcattttcatctccagaagtttgattttgggtgtttttttttgttttgtttttttttttgaagacagagccttgctctgtcacccaggctggagtgcagtggcgtaatctcggctcattgcaacctctgcctccagggttcaagcgattcttatgcct

SEQ ID NO: 410159 - DNA, 201 bp, Homo sapiens
tgtagtatctgatctgctgctaattacatccatgtcatttttcatcccatacatcattttcatctccagaagtttgattttgggtgtttttttttgttttktttttttttttgaagacagagccttgctctgtcacccaggctggagtgcagtggcgtaatctcggctcattgcaacctctgcctccagggttcaagcgat

SEQ ID NO: 410160 - DNA, 201 bp, Homo sapiens
gtgtggcccggaagcggtgctgtgccgatgttaggggcctctacctctgaactacaagcaaattctcccctccaacaagagcacattgtgttctggccccrgtctcccactaaggctactttaaatgcagatccttctgccaacagctacttttagcaagggcagactatcataaggagagaaacttgcaagaaaatagca

SEQ ID NO: 410161 - DNA, 201 bp, Homo sapiens
cttctgtagtatctgatctgctgctaattacatccatgtcatttttcatcccatacatcattttcatctccagaagtttgattttgggtgtttttttttgktttgtttttttttttgaagacagagccttgctctgtcacccaggctggagtgcagtggcgtaatctcggctcattgcaacctctgcctccagggttcaag

SEQ ID NO: 410162 - DNA, 201 bp, Homo sapiens
cttccatgaagccttccctgattccttcaggcagagtgggtgaggatttcctctgggctcctcattgccttgactaccttgtcgcatcctaccacgtaacrgcaaagtctgattttccctttacatgcctgaagcagacactctcagggccttgcccacatccccactcttactgcttcagtgcacagctggactgtgggt

SEQ ID NO: 410163 - DNA, 201 bp, Homo sapiens
tcttctgtagtatctgatctgctgctaattacatccatgtcatttttcatcccatacatcattttcatctccagaagtttgattttgggtgtttttttttkttttgtttttttttttgaagacagagccttgctctgtcacccaggctggagtgcagtggcgtaatctcggctcattgcaacctctgcctccagggttcaa

SEQ ID NO: 410164 - DNA, 201 bp, Homo sapiens
tctgcactctcatgttcattgcaacgctattcacaatagcccagatatggaatcaacctaagtgtccatcagcaatgaatggaaaaagaaaatgtggtagrtacatatacacaatggagtactattcagccataaaaaggaacaaatcctgccattctcagcaacatgaatgagcttgagggacattgtgttaagtaaaat

SEQ ID NO: 410165 - DNA, 201 bp, Homo sapiens
cagtgattccagctactgggaatttacctaaaagatagacttgcacatgtgcacaaaatgtgtgtgtgtgtgtgtgtgtgtgtgtgtgtgtgtgtgtgtggtgtgatgactataagctgcagcaaatacatatgtatatgcatataggtacatctatatgttaaatatattttctgcatgtatatatgtgtgtatatatac

SEQ ID NO: 410166 - DNA, 201 bp, Homo sapiens
tcagtgattccagctactgggaatttacctaaaagatagacttgcacatgtgcacaaaatgtgtgtgtgtgtgtgtgtgtgtgtgtgtgtgtgtgtgtgtkgtgtgatgactataagctgcagcaaatacatatgtatatgcatataggtacatctatatgttaaatatattttctgcatgtatatatgtgtgtatatata

SEQ ID NO: 410167 - DNA, 201 bp, Homo sapiens
caagaggcttggggccaagaactgtgtcctgtccctgaaatggctgggcttagcaaaaaaccagagcagatgtcgaaatcacacacacacacacacacgcrcgcacaattctataatgtgagtttctaactattttgacctagaccaggtgtaggctaactaaaaccctcaggccaaatctgcctgctgtctgtttttgta

SEQ ID NO: 410168 - DNA, 201 bp, Homo sapiens
ctcagtgattccagctactgggaatttacctaaaagatagacttgcacatgtgcacaaaatgtgtgtgtgtgtgtgtgtgtgtgtgtgtgtgtgtgtgtgtggtgtgatgactataagctgcagcaaatacatatgtatatgcatataggtacatctatatgttaaatatattttctgcatgtatatatgtgtgtatatat

SEQ ID NO: 410169 - DNA, 201 bp, Homo sapiens
cgcaagaggcttggggccaagaactgtgtcctgtccctgaaatggctgggcttagcaaaaaaccagagcagatgtcgaaatcacacacacacacacacacrcgcgcacaattctataatgtgagtttctaactattttgacctagaccaggtgtaggctaactaaaaccctcaggccaaatctgcctgctgtctgtttttg

SEQ ID NO: 410170 - DNA, 201 bp, Homo sapiens
tgcaaaggctttgagtccaaagacatggttgcagtttgtctgtatcatctatttaaaatggacaatgtaggtacccttagaggcagcaatttttgtcttgtatccaaccaagacaaacactctgacattgcttgaggaagtatgtacatttcatcttggattgtgatagtaaaaactggaatcaacctggagttcatcatc

SEQ ID NO: 410171 - DNA, 201 bp, Homo sapiens
gacacccagcaaagcttctgatttgtccaccattccctttcttacgccaggtgaatacaacacacacaatggaccttccacaccagcgaaagagggagacrcagacaggccgcaccgggcctccgacgggaagctccgaggccggtctaagaggagcagtgacccgtccccggcaggggacaatgagattgaggtaatcca

SEQ ID NO: 410172 - DNA, 201 bp, Homo sapiens
ttctgatttgtccaccattccctttcttacgccaggtgaatacaacacacacaatggaccttccacaccagcgaaagagggagacacagacaggccgcacygggcctccgacgggaagctccgaggccggtctaagaggagcagtgacccgtccccggcaggggacaatgagattgaggtaatccaaaggggctctgtgtg

SEQ ID NO: 410173 - DNA, 201 bp, Homo sapiens
ccaccattccctttcttacgccaggtgaatacaacacacacaatggaccttccacaccagcgaaagagggagacacagacaggccgcaccgggcctccgaygggaagctccgaggccggtctaagaggagcagtgacccgtccccggcaggggacaatgagattgaggtaatccaaaggggctctgtgtgacctggtgaat

SEQ ID NO: 410174 - DNA, 201 bp, Homo sapiens
tccttgcacttgaatccttgccccggggtctgcttctgggaaaccaaaatgaagacagtttctgcccacagagagcttttattctaatggtgagacagagyggccaggctgaccaacggcccgagcccagaaaggcttcctcacatatgtccttggtttgtttttctcttcccaggactatccttcctaccccggcttccc

SEQ ID NO: 410175 - DNA, 201 bp, Homo sapiens
caaacttctgtaaaggaccagatagtaaatatttttggctttgcacatcatagtggacctgtctcagctactcagttctcctgcagtagcacaaaagctgyagcagacaggatgtaattgcatgaacatagatgtgttctaataaaactttatttacacaaacaggcgacaggccagatttggcccctgggttatagctta

SEQ ID NO: 410176 - DNA, 201 bp, Homo sapiens
gtttttcttaaaaatatgctggccaagtcaaatgtctataggctcactttggctgacaagccaccagtttgcaactcctcatttggaagctgataaaattrcatgctgtcttgacccagtagctcttttgtgggtgacaaggacgcatcctaatcatgtgtccttggtccttttttttccccctcttccttcaaaggcatc

SEQ ID NO: 410177 - DNA, 201 bp, Homo sapiens
ggcactgtgagggcaagagccagatttcatccttgaagcctcccctctctttttttttttcaagcttaattcactttatttttcttgtataaaaaccctaygttgtagccacagctggagcctgagtcctctgcacagagactctgatggggtcttgacaaggtagtcagtgaattcctgacctgaattcctgaattctag

SEQ ID NO: 410178 - DNA, 201 bp, Homo sapiens
tttatatgacattgaagagagaccaaaatataatttttctaatggcaaaatacagcaagaaggaggggaatgttttaatcaactgggtgtattctccagcrgggagcaagaacttcattttaatttctcatttccctttgatgaaaagttgagtgaatttttatcatgtagaatttataagaagtctgggtttaggtaatc

SEQ ID NO: 410179 - DNA, 201 bp, Homo sapiens
attcctgaattctagggagacttggtgaatacagtctccttccagaggttgggggtcgggtagctgtaggtcttagagatagcatcaaaggtggccttggygaagtttcccagggtggcagtgcagctgcggcgtagcagtcatagatacccgccatcagcagcagcttttgggcatggggaccgagacgatgccagtgcc

SEQ ID NO: 410180 - DNA, 201 bp, Homo sapiens
gggtgaatcagtcagtggatggattaatctatcaatctgttgatctcaggataagattgagagaagccactggattgaagtttactttgggttgtcatctkattttaaccctcagggtacagtagctagattcctgttccctaccttcatcccccagatctttctaatacgatgactacatctttatttcctttgtccaca

SEQ ID NO: 410181 - DNA, 201 bp, Homo sapiens
cctctgcctccaccaccctcagcctattgggcagccaaacaactgcttcaagaggcaaatgggattgtgccaccttctccatcctcacccggtggagaacyctgcagtgatgctcactgcccttaaggcaaactctttgccatgactttccaggccccgggcggtccagcccctgccaaccttgccaactttcaccttgat

SEQ ID NO: 410182 - DNA, 201 bp, Homo sapiens
aggtggccttggtgaagtttcccagggtggcagtgcagctgcggcgtagcagtcatagatacccgccatcagcagcagcttttgggcatggggaccgagaygatgccagtgcccctgggtgcagggatgaagtgcaccagcacagagccacagtggcctgtcaccttacaagggacggtgtggggcttgccgatcttgctc

SEQ ID NO: 410183 - DNA, 201 bp, Homo sapiens
cctttgatgaaaagttgagtgaatttttatcatgtagaatttataagaagtctgggtttaggtaatcagttgtaatatttatactcttagggaaagaaatmggaatcattagcaagcatgcataattaatgaataaattatatttccctttgttttctttcaggtacaaggaaatggtagaactagtgatctcacccagcc

SEQ ID NO: 410184 - DNA, 201 bp, Homo sapiens
cacctccttcatttcagcctcctccgccctctccacgggtctggacagctgcctccctgcttcccctctgcctccaccaccctcagcctattgggcagccraacaactgcttcaagaggcaaatgggattgtgccaccttctccatcctcacccggtggagaaccctgcagtgatgctcactgcccttaaggcaaactctt

SEQ ID NO: 410185 - DNA, 201 bp, Homo sapiens
tcccccagtagcctctgcacatggggacaatggagagctagcccaggatgatggccccgcggatggcgtggccacctccttggagcacttaacacccagaycgacataccattatagtcaccgatgacaataaatcccttgagcctggtgcgctggctggcgtgggtctgcttttgtactggcatgatcttcaaaacctca

SEQ ID NO: 410186 - DNA, 201 bp, Homo sapiens
agtgaatttttatcatgtagaatttataagaagtctgggtttaggtaatcagttgtaatatttatactcttagggaaagaaataggaatcattagcaagcrtgcataattaatgaataaattatatttccctttgttttctttcaggtacaaggaaatggtagaactagtgatctcacccagcctcactgtaaacagcgat

SEQ ID NO: 410187 - DNA, 201 bp, Homo sapiens
gcttgaaaatgcaaatcaggccctgcaatgaccccctcttgctgccagggaagcagactgctcccaaggaccccctgcccagctcatcgctgccgtcttcwgccgtcttccctggccatacaggtgcctttgctcacccagggcatcaaattcccaactgtctgggcctctgcgtatgctattctgaattcttagaatatt

SEQ ID NO: 410188 - DNA, 201 bp, Homo sapiens
cttgggatagacagatcttctcgagcacaggctctgaaaggagatgggtccgggtgctggctcctcttcccctcgccttgggcacatctgagtttgcttgrgctgccattacaaagtcccacagactgggtgccttaaacaagagaaacttactgtcccacagttcatgagacgagaagtccaagatcaaggttggttcct

SEQ ID NO: 410189 - DNA, 201 bp, Homo sapiens
catgagcaatggaattgctatggaaccaagagaacttttgtcaggaatttgcaggggcctgtttttgagaatttttttcagcatcaatggtatatgcgggyttgggagtagtgttagggtatatttccagcttctataacaaagatcaaaactaacaatggtttgatgaagtagcggtttatttctctcttatgtaacagt

SEQ ID NO: 410190 - DNA, 201 bp, Homo sapiens
taagaagtctgggtttaggtaatcagttgtaatatttatactcttagggaaagaaataggaatcattagcaagcatgcataattaatgaataaattatatytccctttgttttctttcaggtacaaggaaatggtagaactagtgatctcacccagcctcactgtaaacagcgattgtctggataaactgaagtttaaccg

SEQ ID NO: 410191 - DNA, 201 bp, Homo sapiens
caggggcggggccataaccttgtggctggtgttctgtgtttcagcacaacatgcctttctggcggatatcctgccacgcagacctggaggcactgaggcaygccctggagctggagtatttatagcaggatcagcagcatctccacctgccatctcaccctcagaccccctcgccttccccacctccccaccgagaactcc

SEQ ID NO: 410192 - DNA, 201 bp, Homo sapiens
ctcaagtgatccacccgcctcagcctcccaaaatgctgagattacaggtgtaagccaccacacctggccctttggttttttgtttgttttagtttttcttycagtggccacttgtgtatgttgactgtggtctcttcttccatcttcaaagcacatgactccagtcaccctctcctttctgtcatcagatcactgtctctc

SEQ ID NO: 410193 - DNA, 201 bp, Homo sapiens
gtctgccagcaacgtcaggtgccccatagtttgggaagtccccacatgctagacttaactgggttgacttctcacatgccctctaaccacgggcgtggaayccgggggcaggggcggggccataaccttgtggctggtgttctgtgtttcagcacaacatgcctttctggcggatatcctgccacgcagacctggaggcac

SEQ ID NO: 410194 - DNA, 201 bp, Homo sapiens
atggggatgacttaggcagggagacaaaatgagcctggttgcaataaagtttggtgattttttaaatgaatctgagctcacgtgtaattatgaaaaaaaaacatgaacatgttatatagtttttcactgatggctggtatgaagatagtagcattatggaaatgagagacaacttgtccatgaggaaccctcattttttta

SEQ ID NO: 410195 - DNA, 201 bp, Homo sapiens
ctgtgaacacatggcctctcctctttgggttcacaagagagagaaatctccggtgtctcctttttttgaaagacagggtcttgctctatagcccagactgkagtgcagtggtgcaatcgtagtcactataacctcgaatgcctggactcaagcgatcctctcgtctcagcctcctgagtagctgagactacaggtgcacac

SEQ ID NO: 410196 - DNA, 201 bp, Homo sapiens
gaagtcccagatggaggtgccagcagattctcttccttgtgagggcttgcttgtatatgctcgctctgtgaacacatggcctctcctctttgggttcacaagagagagaaatctccggtgtctcctttttttgaaagacagggtcttgctctatagcccagactggagtgcagtggtgcaatcgtagtcactataacctcg

SEQ ID NO: 410197 - DNA, 201 bp, Homo sapiens
tgaagtgtttggaactacggctggcaagtggtatgaattatatcagtgtcagctacagttattattattatttatgaatttgacctgaagcaaattacttagactctttgggatgataataataatagtaacaacaataataaaataacttttcatagtgccattgtgagaatataaatgaggcgatacatggaaaacact

SEQ ID NO: 410198 - DNA, 201 bp, Homo sapiens
gccccaaatgagatcacagttgttcttataggagagaggcagaaggagatttcacacacacacacacacacacacacacacacacacacacacacacacamgaagacaatgtgaagacaggacagagatttgaagatggtggccttgaagcttggagtgatgcagccacaaaccaaggtttgctggtggacaccagaggct

SEQ ID NO: 410199 - DNA, 201 bp, Homo sapiens
ctcagcaaacattcaccagcgtaggctctgttgcaggcagcatgctaagcatgggccacgcagccccaggctgacagtcaagccacaccttcatggaattyatatcccagggagaggatacaggcggtgcatgagtctagttaacctgccataacaaaataccatggtcttggtggcctagacaacagaactttattttct

SEQ ID NO: 410200 - DNA, 201 bp, Homo sapiens
tggccccaaatgagatcacagttgttcttataggagagaggcagaaggagatttcacacacacacacacacacacacacacacacacacacacacacacacaagaagacaatgtgaagacaggacagagatttgaagatggtggccttgaagcttggagtgatgcagccacaaaccaaggtttgctggtggacaccagagg

SEQ ID NO: 410201 - DNA, 201 bp, Homo sapiens
ggagaggtggctgtggtgtaggaatgaacatctgtcattcactcagcaaacattcaccagcgtaggctctgttgcaggcagcatgctaagcatgggccacrcagccccaggctgacagtcaagccacaccttcatggaattcatatcccagggagaggatacaggcggtgcatgagtctagttaacctgccataacaaaat

SEQ ID NO: 410202 - DNA, 201 bp, Homo sapiens
agcaggctctgaatagaaatagttggccatactggtgggtactggccagatgtgggtctgccagcaacgtcaggtgccccatagtttgggaagtccccacrtgctagacttaactgggttgacttctcacatgccctctaaccacgggcgtggaatccgggggcaggggcggggccataaccttgtggctggtgttctgtg

SEQ ID NO: 410203 - DNA, 201 bp, Homo sapiens
agaaaagctgtctacgtggtgatcggtgatggtgtggaagaggagcaaggagcgaaaaaggtacttcttccacctctcagactgcgttttcctgctctttygagcacccctcgtggtcttcaagggctccttccatgatttcctccactccccgtggctggctgggtcctccttcccaggctccttgcttgccagtccatt

SEQ ID NO: 410204 - DNA, 201 bp, Homo sapiens
atgcagagattcggcagaaaagctgtctacgtggtgatcggtgatggtgtggaagaggagcaaggagcgaaaaaggtacttcttccacctctcagactgcrttttcctgctctttcgagcacccctcgtggtcttcaagggctccttccatgatttcctccactccccgtggctggctgggtcctccttcccaggctcctt

SEQ ID NO: 410205 - DNA, 201 bp, Homo sapiens
ttttgagacagagtcttgctctgtcatgcaggctggagcacagtggcgcgatctcggctcactacaacctccacttgctgggttcaagcagttctcctgcytcagcctcccgagtagctgggattacaggcagctgccaccacgcccagctaatttgtgtattttagtagagacagggtttcatcatgttggccaggctgg

SEQ ID NO: 410206 - DNA, 201 bp, Homo sapiens
cagagagaggtgtttccccaaggaaactgagtgggaaacagcatggcattggagtttgttcaatggcaagccctggggatagtgcctggcacatagtaagygctcagtaaatgatgatcacagatcatgaggcacagcaggtgtccctccaggagccaatacttgaagagcacagggtttactaagcagatgtaggcagga

SEQ ID NO: 410207 - DNA, 201 bp, Homo sapiens
gaagtggggtgggagaggagggctgcttataaggacaaggtgtgcctgcctccagccagaactgggacttttgcatctcagactcaaaaatcacaactagscgggtgtggtggctcatacttgtaatcccagcactttgggaggtcttagcaggaggatcacttgagctcaggagttcaaaaccagcctgagcaacatagt

SEQ ID NO: 410208 - DNA, 201 bp, Homo sapiens
ttggggagtcaaaaatgcccattgattgactgattgattatcaagttatccttctactaggaagtggggtgggagaggagggctgcttataaggacaaggwgtgcctgcctccagccagaactgggacttttgcatctcagactcaaaaatcacaactagccgggtgtggtggctcatacttgtaatcccagcactttggg

SEQ ID NO: 410209 - DNA, 201 bp, Homo sapiens
ataggattgtgaccagatccacgttgatgacgtctcatcagatgacaatggccaagatttaaggtgggaatttggggagtcaaaaatgcccattgattgaytgattgattatcaagttatccttctactaggaagtggggtgggagaggagggctgcttataaggacaaggtgtgcctgcctccagccagaactgggactt

SEQ ID NO: 410210 - DNA, 201 bp, Homo sapiens
gggaggttgaggctgccatgagctgtgatgacaccactgcactccaacctgggcaacagcgcaagaccctgtctcaaaaaaataaaaattaaaaaataaaygaaaggcaaatggatgtggatcaggtaagagcaaaagacaccacttttcttggggaagctaatgaaagctgtggtcctgctgccccccaaatgcacactc

SEQ ID NO: 410211 - DNA, 201 bp, Homo sapiens
gggctcatggacacccaaaagcccacccgtgggtcccacagagcctgtggtctcccagggaagatgccctgcacccccctgcactaacactgtccctcccstcctctctccgcagcacatacaacttctccgctgacggcttccacagttcggccccaggagccaacctgtgcctgggctctggcgtgcacggcggcgtgg

SEQ ID NO: 410212 - DNA, 201 bp, Homo sapiens
cagcaccctgtgcatttcgaggggctcatggacacccaaaagcccacccgtgggtcccacagagcctgtggtctcccagggaagatgccctgcaccccccwgcactaacactgtccctcccctcctctctccgcagcacatacaacttctccgctgacggcttccacagttcggccccaggagccaacctgtgcctgggct

SEQ ID NO: 410213 - DNA, 201 bp, Homo sapiens
  misc_feature (1)...(201): n = A,T,C or G
agttcagtaccagcccacttaatgcaaccctgacgacacccttcggaatagagcactgggattttgtcaccttcactttgggggtgggaaagctgaggganggaggctgcatctggtccaagatccttcaggccacaaatggcgcggggtggacgtgggggcggaattctcttacccacagccagaggctctcacagtgtg

SEQ ID NO: 410214 - DNA, 201 bp, Homo sapiens
gtcctccaagtagcagcgacagcatcacctggggatgtgttgaaaatgcagattctctggccctacctcaggcctagcaaatctgaaactctgcgctgggrcccagaatctgtgttttcacagccctggaatccccccttggattctggaattccagaatccccctggaatcgggaggacctgtgccttgagtctttgcat

SEQ ID NO: 410215 - DNA, 201 bp, Homo sapiens
cctttcttcctcctctaccattcacacatcactcctcagtacctaaccccacactgagccctagaaactcagagatggatgagatgcagtctctgcccccrgagagctagtccatattgatggatgagacaccttccaggactggggctgacatctccagctcaaatgagtttcttatgcattttgcagcaggttccccca

SEQ ID NO: 410216 - DNA, 201 bp, Homo sapiens
aggttcccccaaataaccctttatcgtggcagtagtctaaaagaaagaagggcatagggacatctgtttataattccataaacttttgcattcacctgctrtgaggcctcaggtggaagaggaactctggaagcaaacaggctttagcaaaagtgatgtaaccaaaatggaatcagatacagattggggaatctcatcaac

SEQ ID NO: 410217 - DNA, 201 bp, Homo sapiens
ttcagggtgttctagaaacattgatctctccagcaaagttctgcgtgtccttcttggttgggaagggagcggagaggaaggagccccgaggagaatcgtgyacctttggccttttgtgtgactcctagagtagagggaagcctccgctgctcggaaggtgtcacgtggtataacaagttgtgacttgtgcctgtgttgtca

SEQ ID NO: 410218 - DNA, 201 bp, Homo sapiens
ttgacagataataattgtacacattcatggggtacatggtgatgtttcgatgcatataaagtataatgatcagatcagggtaattaacatatccaccatcrcaaacatttctcatttctttgtgttgggaatgtttaatatcctccttctagctatttgaaactatatattattattaaaatattgtcatgagtggggcaa

SEQ ID NO: 410219 - DNA, 201 bp, Homo sapiens
gggaggctggaaaacagggaactgagggagcagagagtaacaactcacatctcgcccatgttcttgttggcggatacatcagatccttgagggagcgaacyggagtagaagggagtgtttggaaaagggaggaatttgcagttgtcacggtgatgggaggcacaacaaacccgtgaatcaacccaccaagataccattagt

SEQ ID NO: 410220 - DNA, 201 bp, Homo sapiens
gtggtggcatgcaccttttaatcacagctactcgggaggctgaggcaggagaattgcttgaacctgggaggcagaggttgcagtgagccaagatcacgccrttgcatgccagtctgggcgacaagagtgaaactctgtctcaagaaaataaataataaaatactgtgcagcagttccctggcagatattatgaaatgtgcc

SEQ ID NO: 410221 - DNA, 201 bp, Homo sapiens
aaaaaaaacgtgcagggtctcaggcctcatcctgggcaactgactcagaatctgctttaaaaaatttttttttatttttgagacaaggtcttgctatgctrcccaggctggtctcaaactacttctggcctcaagtgatcttcccacctcagcctcccaagtagctgggattagaggcatgcaccacctgcctggcccaga

SEQ ID NO: 410222 - DNA, 201 bp, Homo sapiens
ggtgagccctagccggctgcctgacctttaggtcagtggagtatttttgatcgcttaggagcaagagaagagagccaagaggaggcaaataccgaagcctrctagagacaacccaggatcccagaagtgtatttctagaaggggtgatagagatcatctaggtcaggggtcagtccaaataggaaaaacttcaggctttgc

SEQ ID NO: 410223 - DNA, 201 bp, Homo sapiens
ttgctctcagttttgcttgggagcctcgggttcccctgcgtcttctactgtccctggagctttcccatccgttctttgggacagacttcccgtcgtgttcrtggctgcggtgctaatgcagcccacgtgctaagcgcggtcctggcagtagctaatgtttaaggagcactcgctctgccagttttgccaccgttttcatgg

SEQ ID NO: 410224 - DNA, 201 bp, Homo sapiens
gaggttaagtaacctgcccagcgtcacacagcccaggcagaagggccacagtggagtcccaggctgggtgactgcaccacctctgcccttcagggccacayttggtggcctctcagatgtgagtgtgttgattgcaggagtgaagcagcaagctctggtcaggtcccagcctttgtacccagccctgcacggagggaggag

SEQ ID NO: 410225 - DNA, 201 bp, Homo sapiens
aggcgtcagccagtgaggagcccacagccagcggcatgccggtctccttccccaacccagctgttcctgcatcacagaactagccaggtgcatggccgtgscttccagcccagggatcaccacagatccccacgattccaagtgttttagaaggtacactcggaagaaaggcatctgcaaaatacagaatagagaaaatgc

SEQ ID NO: 410226 - DNA, 201 bp, Homo sapiens
atcacagaactagccaggtgcatggccgtgccttccagcccagggatcaccacagatccccacgattccaagtgttttagaaggtacactcggaagaaagscatctgcaaaatacagaatagagaaaatgcttagtaaatcaccatctaggaggcaggggttgaaatcaggggccttagcctgatgtcatccttccatcta

SEQ ID NO: 410227 - DNA, 201 bp, Homo sapiens
agtggctcacgcctgtaatcccagcattttgggagtccaaggcaggtggatcacctgaggtcaggagttcaagatcagcctggccaacatgatgaaacccygtctctactaaatatacaaaaaaatagccaggcttggtggcgcacacctgtaatcccagctacttgggaggctgaggcaggagaatcccttgaaccaggg

SEQ ID NO: 410228 - DNA, 201 bp, Homo sapiens
acaaggattcatgccaggatgttgtgaattcacacaggaaaggtgctcagaacggcatctgacacacataagctctcattaagtggcacttttgttatctsgggaaggtgggaaggaggccaagcctggaggaaaacgccgaggaaacagcttgaagcacacttcccagcgtggagcaaagtaggggtggttgggcagcca

SEQ ID NO: 410229 - DNA, 201 bp, Homo sapiens
gccgaggaaacagcttgaagcacacttcccagcgtggagcaaagtaggggtggttgggcagccagctacacaagacagcacgttgggaagccctttgtcarctgaaaagtgctgagccttgtgagtttgtattgttactgagggttccagctaagggtctgtggggaaggtgcagagacagaggaaaaccagaggccgtgt

SEQ ID NO: 410230 - DNA, 201 bp, Homo sapiens
gggcagccagctacacaagacagcacgttgggaagccctttgtcaactgaaaagtgctgagccttgtgagtttgtattgttactgagggttccagctaagsgtctgtggggaaggtgcagagacagaggaaaaccagaggccgtgtgttctcctagagttgatagactaatgagaagatgggacatgtagcagtaagaaga

SEQ ID NO: 410231 - DNA, 201 bp, Homo sapiens
ttttcaaagagtttatattcagtgagtggaggaaacagaccatcaacaagtgagcaaatcacttaaattctttttttttttttttttttttgagatggagkcttgctctgtcacccaggctggaatacagtggcatgatctcggctcactgcaacctctacctcccaggttcaagtgactctcctgcctcagcctcccgag

SEQ ID NO: 410232 - DNA, 201 bp, Homo sapiens
aagaatagagtcccggttctcaaactggacagaacacacttccagtcgcagctctacaactttctagctatgtggccttaggcaacatacatacggtcatsttaatgagccttagtctttaaatctatgaaatggagaatacaaatacttctgcttccctggattattgagagatttattgttagtgcatacaaaaggcat

SEQ ID NO: 410233 - DNA, 201 bp, Homo sapiens
tgtgataagtgtccttgcaacgctgaacactgttgcaatcccagggtcattttccaggagatttaaatactggaaagggtaaaaagaaatggtgaaaactrgaagtgagatcccggaagctgtacaacatgattatcacaccggcctcacacagagactcattttaggccacgcgtgagccgagcagatgaggaaaaacca

SEQ ID NO: 410234 - DNA, 201 bp, Homo sapiens
cgtgctgtctgatttaatcctcactgcaatgttaggtcttagagggatcaggctggacttgaaggggtcagtggcccgaaagagcatggtgtgaaagctgyctattttaggctttatttgactgggagaagttctgggtcagacagagggttgcctccaagctgtcctctgtgactaaagtcaagacaccaggatggaata

SEQ ID NO: 410235 - DNA, 201 bp, Homo sapiens
ttcctgctgggttcgcagaaacgattctttgcttaaaggctcaaggaaggggactgggggattttgacaataaccaatgcttgtggagtgcctgctgcagyccaggcctgggctaggtgcttccacacgtgctgtctgatttaatcctcactgcaatgttaggtcttagagggatcaggctggacttgaaggggtcagtgg

SEQ ID NO: 410236 - DNA, 201 bp, Homo sapiens
tcgagtgtttggagctgtacctcctatgtagtaaagagtttttgtagataagcaaatgacacttttttttttaattgacagataataattgtacacattcrtggggtacatggtgatgtttcgatgcatataaagtataatgatcagatcagggtaattaacatatccaccatcacaaacatttctcatttctttgtgttg

SEQ ID NO: 410237 - DNA, 201 bp, Homo sapiens
acaataaccaatgcttgtggagtgcctgctgcagtccaggcctgggctaggtgcttccacacgtgctgtctgatttaatcctcactgcaatgttaggtctyagagggatcaggctggacttgaaggggtcagtggcccgaaagagcatggtgtgaaagctgtctattttaggctttatttgactgggagaagttctgggtc

SEQ ID NO: 410238 - DNA, 201 bp, Homo sapiens
ctcagctccgcatcagcacagacagagctgtgacgagcaacctttatggactgctctgagctttacaccctctctctcatttaatccccaccatgaatctrtaaggcccagctgctccctttatactcatttccagagaaactgaggcccagagaggtgatgtgacttagtcaaggtcacccagcttaggagggatgaaag

SEQ ID NO: 410239 - DNA, 201 bp, Homo sapiens
catgtgacctcagacaagtcactttgccttcctgtgcctcagttttcacctctgtagcatggatgtaataacaataatactcaccttatagggtcactggrggaggattacatgagttaatacatgtcgagtgtttggagctgtacctcctatgtagtaaagagtttttgtagataagcaaatgacacttttttttttaat

SEQ ID NO: 410240 - DNA, 201 bp, Homo sapiens
caggaggatcacttgaggccaagaattcaataccagcctgggcaacataaggagaccctgtctctacaaaaaaaaaaaaaaaaaaaaaacaacaaacaaamaaaaaactaattaattaattaattagctaggtatggtggtgcaagcctataatcctagctactcaggaggctgaggtgtgaggatcaagaagatcaaggc

SEQ ID NO: 410241 - DNA, 201 bp, Homo sapiens
acctatgacagaccttggccaacaggtgtgggcatcttttctaacttttttcccctgctgtgctagaaggcttagaatacaatcacacataagttaccccrcttggctgacagccaagaaaaatgaagccatattctttttcacataaaagagaaaactagccctgttcccagacaaaacatggcatcagatggaaatcaa

SEQ ID NO: 410242 - DNA, 201 bp, Homo sapiens
gaaatctttgttgagcctgagaaccttgaaatatttgctacaattctttggttgcaagcaacagaaaccagtaccgggcccagcacagtggctcacgcctrtaaccttaccactttcagaggccgaggtgggcagattgcttaagtccagtaatttgaaaccagcctgggcaacatggcaaaacaccatctctaccaaaaa

SEQ ID NO: 410243 - DNA, 201 bp, Homo sapiens
gatatataaatgttatagattagaatttcatgccaaacagcaacattaggcatcaagaataaaggggatatgaaaagggactaacgggctgggtacggtgrctcacgcctgtaatcccagcactttgggaggccgaggcaggcagatcacttgaggtcaagagttcaagaccagcctggccaacatggtgaaacccccgtc

SEQ ID NO: 410244 - DNA, 201 bp, Homo sapiens
taaaacatctgtgcgtaagcagcaacacagctctgatgctggctttaggacctgggtcggggacagtgctgcttcacttgttggtgaccactagacaatcrccggtgggcacaagtgtgacagcctctcagtggggccacacccaggagcaccccaaagtgagaagcagcaaggacccacattctgtgctgcgtctctcac

SEQ ID NO: 410245 - DNA, 201 bp, Homo sapiens
gaccttgctatgttccaggcatggttttaagcacttaaacagtcattaatttattgtttttaattttttttacatggtcacagtaagaaatacattttacmctataacccaccacatacacacacacacacaaacacacacacaccccaactggaataggtgttcaccattgctgtgtatgatagattctgatagttcgtt

SEQ ID NO: 410246 - DNA, 201 bp, Homo sapiens
gtcatgcagctgagccatggaaggcagacgctccctcagagcaaaaaagccatgacaggggtggtggcctaaccagaggattatggagtctggagtcagaktagacctgagttcagtgccaacactttctcttacaagctaagcaacattgaacaagctacacagtaataatagtaacagtaatagcaatataaacagtag

SEQ ID NO: 410247 - DNA, 201 bp, Homo sapiens
aaatattttcatatgaatctgtgtgcactgtcaggaaggctctgcctgtagggtgacagagatggctgccggcatccttgagcctagatctaccagctcarccaccccaggaaaaaaaggtgcctctcccaggagtcatagctaaagtcctcaggccaatgcccattggctcataatcatccttgaatcaatcactatgat

SEQ ID NO: 410248 - DNA, 201 bp, Homo sapiens
gggcctccacctgggttttcccttcttggaaactctatcctggggcaatcatacagctcaccatctgtttctcctcttgcaaggatcactgtccatgcctraggcccaatgtcttggaaacctagttttcaaactgtttcagctgggagggtaaatccagaccttgttactcagtcttggccagaagtgaaaattccactg

SEQ ID NO: 410249 - DNA, 201 bp, Homo sapiens
agttcgcaataggaaggtcctttctttatttgggtagccttagcctcactggacctcagtttcctcatctgtaaaatggggataattataatacctgcatrgcagaggtattgtggattaaatgagagcttttgtataaagtacttaggacagtgcctggcagttcgtaagtgctgttttaagagttcaccacattcagcc

SEQ ID NO: 410250 - DNA, 201 bp, Homo sapiens
cacgcctcatagctcctgagtctgacctaagcgtgccttcttcccagcgtgcagaactgtttgcctgggcgtaggttggagacaggtgaccccacctggtkggttcaggcccacgcttgttcagcctcctagacgctctgagtcttggcctcctgactcctctggggttggcgcagccttgcttgccttggctcccgtccg

SEQ ID NO: 410251 - DNA, 201 bp, Homo sapiens
atgaactcttctgctgcctcttagctcgtggagcacagggactgggtctgatgtgttcacagctttatcccaatacccagcacagtacctggcacctccaytggacaaatatttgttgaataaacaaataaacaaagggctgccaggtagggagttttcacttgtgtgatggcaaatacagcagaaataagattccagggc

SEQ ID NO: 410252 - DNA, 201 bp, Homo sapiens
gtgctgggcactacaccaagcactcagggcatgcaagccaccagtgtccctgcatcttcagggcactttctgaacctcagcaccttcctctccaaaatgaraaaaacagcacccgctccatagtgttgttgagaggattcaacaagctccttgctacaaagcccccagtaggacctggcatataattcctgttttgaaaat

SEQ ID NO: 410253 - DNA, 201 bp, Homo sapiens
tgaatgggaggctggaaaacagggaactgagggagcagagagtaacaactcacatctcgcccatgttcttgttggcggatacatcagatccttgagggagygaaccggagtagaagggagtgtttggaaaagggaggaatttgcagttgtcacggtgatgggaggcacaacaaacccgtgaatcaacccaccaagatacca

SEQ ID NO: 410254 - DNA, 201 bp, Homo sapiens
gccctacacttggtcagcctcccgagatctaccagtagccttgatccatgctagagacctggtgcagagcaagtgttcccactgttcctggggccattctyagtccagggaattctgtccttgctttttgccttgttcttaaagctccatcctttccccaaatagaggagattttgcacaatcccttcagtgggtttaggc

SEQ ID NO: 410255 - DNA, 201 bp, Homo sapiens
gtactgggattacaggtatgagccaccatgcccggctttaaattcttaattcagtcatttcgaggatgatcacacctattgaagaaacagatatggcagaragcccagcgtgggcagtggtggccaggggatacttggaatagtagacccagagtccatctctcaggaagggctatttgaactcagtattctaaatattct

SEQ ID NO: 410256 - DNA, 201 bp, Homo sapiens
actccggggctcaagtgatcctcccacctcagcctcccaaagcattggaattacagaaaaatctgaggccaccacacctggcctcaaattttttaaaaacrtaattattaaggaccaggatctgggtagtgggcactatctcacttatttctcaccatagccctttgaaaaggacaccgtttattttcttcatctatccag

SEQ ID NO: 410257 - DNA, 201 bp, Homo sapiens
ggatccttctttctttttttttttttgagacagagtctcactctgccacctaggctggagtatagtggcacaatctcggctcactgcaacctccgcctccygagttcaagcaattctcctgcctcagcctcccaagtagctgggaatacaggcgcctgccaccacacccggctaatttttgtatttttagtagagatagag

SEQ ID NO: 410258 - DNA, 201 bp, Homo sapiens
tcactaatgcggatagacagaaaatgagcacattcacccctctttgcccagcacccaacacttgacacctgggcagcccaggacttgaccccaggacatcycatacagagttctttctgctgctctgccccacgtccctcagatgtgtgactccgggactcacttgggggacatgcagccagtctcctagctatgccaggc

SEQ ID NO: 410259 - DNA, 201 bp, Homo sapiens
  misc_feature (1)...(201): n = A,T,C or G
tctaggctataagcaccataagggcagagaccatgaacatttttttttatttccccaaccacgcgcagtacacagggcagaattgctcaataaatatttgntgaatgaatgaatcagggtgatcccctagaatgttaagctgcacgaggacagggacctttggtttggtttggtttggtttggttttgttcatagctttat

SEQ ID NO: 410260 - DNA, 201 bp, Homo sapiens
gccaaacacatcgtcacacagatacacttaaaattagagttgtgagaagtgctgtgaagaagagctacagtgtgttgggagaatataaactaaagggaccwgacccagcctggagagatcaggttagaccttccagaacaaatgacatttaagatgaggccgtaaggcaggatgcagaggttcacacctgtaattccagca

SEQ ID NO: 410261 - DNA, 201 bp, Homo sapiens
ttcattggcattattacgtgttgcattgttatgtgttgcattgtattattagttttccatgacttctataacaaattaccacaaacttcgtggcttaaaayaacataaatttgttatcttaccattttggatgtcagaagtcttactgggctaaaatcaaggcatcagcagagcttctggagcctctaggggagcatctgt

SEQ ID NO: 410262 - DNA, 201 bp, Homo sapiens
aattcccctactcatcagcaggttgttgtagtgattaaatgagtcaaaactcatgcaacactgagaatagacatggcgcaaaagaagcactccgtgttcaytggcattattacgtgttgcattgttatgtgttgcattgtattattagttttccatgacttctataacaaattaccacaaacttcgtggcttaaaacaaca

SEQ ID NO: 410263 - DNA, 201 bp, Homo sapiens
tattattaattccctgtctccaccataacaatataagctctataatctgcatatttttgttcatatctgtacattcagtgcctattacaatatcaagtacytagaaggtactcctgaattttttgttggatgcatggatggatggatatggggtagatgggtggttgggtggataggtgggtgggtagatgggtggatggg

SEQ ID NO: 410264 - DNA, 201 bp, Homo sapiens
aagcttcaataatcaaagcaacatgcttctagtgtgaatacactcaccgatcaatagaggagaacaaatggtctcagagagagacccacacatttagtacrtggagaaggtgatgtcttgagtcagtgggaaaatatgaactattgaatgaatggcattggaacagctagttagccatctggagaaaagtatccattccta

SEQ ID NO: 410265 - DNA, 201 bp, Homo sapiens
ctaagggtttctctatcactgttgttgttgttacgtgccttgatgtagttttctttatgattctcgtgctctgtgttcattgagactcttagatctgtggrtttatcatttccatcaaatttggaaatttttcagccaatatttcttcaaatttttgtctgatgttccacaccactacctcccactccaagttcataaatc

SEQ ID NO: 410266 - DNA, 201 bp, Homo sapiens
tcgcagtagacagtggtggctcctgcatgtccacacttgggagaattggactcctcaaactctcacttgtacactttccaaatattttttttttttgatayggagtctcactctgtcgcccaggctggagtgcagtagcgtgatctcggctcatcacaacctctccctcccaggttcaagcaattctccggcctcagcctc

SEQ ID NO: 410267 - DNA, 201 bp, Homo sapiens
tagattttgataaagcctgtgacagacaaaaacatggtggcatgctggaccgtgagcagtggtatggaccaggagtggtgatcggcattcagcaggtggtsaggggcctcccgatggaaaggaggctgccacaggaggggccagagctgggccgggccgtacaggcagcgggaacgcaagagcaaaggccccgcggcagga

SEQ ID NO: 410268 - DNA, 201 bp, Homo sapiens
gtagagatggggtttcaccatgttggccaggcttgtctcgaactcctgacctcaggtgatccacccgcctcggcctcccaaagtactgggattgcaggtgygagccaccactcccagcccaaatatttaataaagcttaagtgcacaaggctcagtggataccttggagcatagctgagctaatagcggcagagacttttc

SEQ ID NO: 410269 - DNA, 201 bp, Homo sapiens
tccaggtttctggattctcccaaaagatgagaactggcatgcaggctccagcttactctattccccacctctccctcttgtcctacacttgttccatatcrctcatttacattacccgcaactatttaagtgtatggcccttgcaataaacatttgctttttatataagaaaagtattccccccatactacatttcactat

SEQ ID NO: 410270 - DNA, 201 bp, Homo sapiens
agagaataagtgtacattgtttaaagccactaagtttgtgctaatgtgttatggcagccacgggaaactatattacatgtgtttatattcatggtgacttyccatttatggtgactacaccaggttttctatttatgatcatgataacaagtttctttctaaactaaaatgcacttagattttgtttttgtctttgaaaca

SEQ ID NO: 410271 - DNA, 201 bp, Homo sapiens
aacgcagccctgcagacacctctcatctctagaactattagagaataagtgtacattgtttaaagccactaagtttgtgctaatgtgttatggcagccacrggaaactatattacatgtgtttatattcatggtgacttcccatttatggtgactacaccaggttttctatttatgatcatgataacaagtttctttctaa

SEQ ID NO: 410272 - DNA, 201 bp, Homo sapiens
actccatctcaagaaaaaaaaaatcaaaaatactctatgtttacttctataaaggagttagattctaggctcagatcattagaaacaggtttttcacaacrtgagtgttcatcaggagatatgaaagtcacatgggttgtgggacaatttttctttctgtacaacttcctacagtgcattagaagacattaatatccttgg

SEQ ID NO: 410273 - DNA, 201 bp, Homo sapiens
attaaaaccattaaattctttcttttaatgacaactttattattaaaagctaaccacaaggaggagatttaactggcaaagctctctgttgtgtgttaatscattcctgacctctggctgacacttccaagagataaaccccacagaatagggagctggtttaatgaacagctttaattaatacttttcttccttgtggca

SEQ ID NO: 410274 - DNA, 201 bp, Homo sapiens
gttcttgccctactgacctcataagacaagcccgagaatgattctgtttcccaaagggcactgagagtgctctggaaggaacgcacacggtctggagatasctaaagatgaatattttttacttggaaattcagataggactttttgttagttcttgagtttgaattttatactgtcatcatctggttttggtgtccagat

SEQ ID NO: 410275 - DNA, 201 bp, Homo sapiens
atcaaattcctagatgggtttttttttttttgtggatatgctgtggtttcaagggggagatctccactgtgcttctggggtttcttatttaaatggaactrggtgtcattcaaagtagcagtggctgggatcaccacatgttccctgacttgcctttttagtgaccatccacacagatatctgtttgttccatgactcttg

SEQ ID NO: 410276 - DNA, 201 bp, Homo sapiens
aatccacattgcccatagtgggatcaaataatgcctcaaagtgaaaaatcaaaaagccatgtaattataaccatgcaatttagagacagggcagtgagtaycaagataatgaatgaaggaaagagttgaaggtggtgacaaagggggcatgagagggtgtgtcagggaaactgcagtcttataacaagccttgtggaactt

SEQ ID NO: 410277 - DNA, 201 bp, Homo sapiens
gttctgctaacagtcagttcttactacgaggcattctcagagccaaggggaagctgggttggtggtctgcagctgaaaatctttggcagaaaatttactcraggtttttcatgtgtgtcatttgccttgattttgggagtagggaagaagcactatcagtatctttggccattcgtaaggtcaaaatggatgtcggcacgt

SEQ ID NO: 410278 - DNA, 201 bp, Homo sapiens
ctattgagaacatctacagtgcaaccaagacaggtagggagaagccacacctcggcggggatacagggttggagggtggggttagctttccatcctgggartggggtgtttaaggaacatgacaccacagaaatggatggagtgtgcctatggccatgactcagattcccaaaacagcccccatagaccacatgccttaac

SEQ ID NO: 410279 - DNA, 201 bp, Homo sapiens
ccaaaggggccacagtagtaagttgcctgctaagtcgtggtgttttatggttttcctaaccactcctgtaaagtcacctcccctgagacacaggcactcaytcatcttgcccttagaggcagcctgctgtgaagttccatagctccgtgcaacaactcacttagtatggattgtgtagggatgtgtgatcttgggtatgat

SEQ ID NO: 410280 - DNA, 201 bp, Homo sapiens
gctatgtacattacattctactcacttcctgttagccccagcttagtcacgtggccacaagtagctgccagggaagctgggaaatgtagtccatagctgastgattcatactgtcactcaatctggaatgcagtggcgagatcatagctcactacagcctcaaactcccagcctcaagcaatccttccacctcagccccca

SEQ ID NO: 410281 - DNA, 201 bp, Homo sapiens
cctaagacagtgggctatggtgcagccaaagccagtaattctagctagaaaacgaggtaaagtacttttcttcttccctgttgtttatcctagtgtctccrgcagatgaatttaattttccttctgtttttttgagacaagggggaggcattgtcagctccagtgtggatcttagcaatcgttttgcaaatgtatcatcaa

SEQ ID NO: 410282 - DNA, 201 bp, Homo sapiens
cagcctcaaactcccagcctcaagcaatccttccacctcagcccccaaagtactgggactacaggcatgagccaccgtgccaaaatatttttaattagaarccttttccattgttttttctctagagcaaaaaataaaaaaataaataatttatagtactttggcagcattttcttggagcaattttggttttactgaagt

SEQ ID NO: 410283 - DNA, 201 bp, Homo sapiens
attctaattggttttcatataaaaactcaagatcttgcatccataaaataaaaagtggaggctactgggaaaggaatactcagagggaaaaaaagttattkgaaatcttttaattactgcaaaaatcaaaaatttaataagggttataagagaaagtttaagaaatctcccagaacacagatcaaaaagacagatttatta

SEQ ID NO: 410284 - DNA, 201 bp, Homo sapiens
aacccctgcgctgcctcctcctgctgtgttgccctgggcaagctactgaccctcgctgtgtttccggctgtcatcatccttcatgtggggatgataacagkgctcacctcagaagtttgctcaagaacgaaatgatgaataccgggcctttgggagcacagctgcaggcaccaagctcttaatgagcgggtattggctgca

SEQ ID NO: 410285 - DNA, 201 bp, Homo sapiens
ttaaaatacaaaacaaaacaaaacaaaaaaccactttgttaaatgtatggctttttcttactcgtgttttaggggaaaaatgaccagtacatcaaaccagygatgtcataggtaatgatgcccaggatgaagcgtaggtttgtgaaagagcatcagtgtaaagataaatgaggaggccaagcgcagtggctcatgcctgta

SEQ ID NO: 410286 - DNA, 201 bp, Homo sapiens
tgctgatttttaaaagttctattactgaaatttctaaatttaatttcctaagttcaaccccagtgaattcagataagttaggacttggcatatttgaatckcagaaggtccttctcaaacactgattttcaaacatttttaccatgacccgtaataagaaatatacttactatgatggcccagcatatatatgcacataaa

SEQ ID NO: 410287 - DNA, 201 bp, Homo sapiens
atcatccttcatgtggggatgataacagggctcacctcagaagtttgctcaagaacgaaatgatgaataccgggcctttgggagcacagctgcaggcaccragctcttaatgagcgggtattggctgcaatccggggtcctcacagagcgttttttctttccttcctgtgtgcgtgcagggaaggagagctgcttcgagag

SEQ ID NO: 410288 - DNA, 201 bp, Homo sapiens
gcactaaatttgaaaatatttgctgatttttaaaagttctattactgaaatttctaaatttaatttcctaagttcaaccccagtgaattcagataagttargacttggcatatttgaatctcagaaggtccttctcaaacactgattttcaaacatttttaccatgacccgtaataagaaatatacttactatgatggccc

SEQ ID NO: 410289 - DNA, 201 bp, Homo sapiens
tgcggcagggaacaaagtccattaaaaactctgccctcatggagctgatatccttggggagaggaaggaagatgataagcaagatacatagaaatgcaagyggccaggcacagtgacacacgcctgtaatcccagcactttgggaggctgaggcaagtggatgacttgaggccaggagttcgagaccagcctgcccgttat

SEQ ID NO: 410290 - DNA, 201 bp, Homo sapiens
gctaacatcatcattgtactcaatcctccaaaaactcctacaaagtgggtatcattgcatccctttttttttttttttttttttagagatagggtctcackctggcacctaggctggagtgcagtggcacaatctcagcttactgcagcctctacctactggactcaagcgatcttcccacctccgcctctaagtagctgg

SEQ ID NO: 410291 - DNA, 201 bp, Homo sapiens
ctcaccatcccaaggccaaaaagctcaaaatctgctaccttatgaatgggaggctggaaaacagggaactgagggagcagagagtaacaactcacatctcrcccatgttcttgttggcggatacatcagatccttgagggagcgaaccggagtagaagggagtgtttggaaaagggaggaatttgcagttgtcacggtgat

SEQ ID NO: 410292 - DNA, 201 bp, Homo sapiens
ccaaaaactcctacaaagtgggtatcattgcatccctttttttttttttttttttttagagatagggtctcactctggcacctaggctggagtgcagtggyacaatctcagcttactgcagcctctacctactggactcaagcgatcttcccacctccgcctctaagtagctggagctatggacaggcactaccatacctg

SEQ ID NO: 410293 - DNA, 201 bp, Homo sapiens
tgcttcctggcacacgtggcagggtagggaggcctctgaaaacccccttccatccttcagttgttggaagtcaggacaagaaaccagtgccactcgctcascatcccaaggccaaaaagctcaaaatctgctaccttatgaatgggaggctggaaaacagggaactgagggagcagagagtaacaactcacatctcgccca

SEQ ID NO: 410294 - DNA, 201 bp, Homo sapiens
tgagctagtcaggcaagagtagagtcagccaaagaagactaggtacacacccaccacacacagaactcccataaaagtcccagtgtctgaggcagaagccycagaacgttagtgagaaacagtgtccaccagcagctctctcagcctgacaaatggaagtcattagcccaggccaccggacatctgagcggtgtaaaatat

SEQ ID NO: 410295 - DNA, 201 bp, Homo sapiens
agttagaggctgcagtgagccgaggtggcaccactgcactccagtttggccaacagagcaagaccgctgtctcaagcaaacaaacaaagccatgactattyaggaggaaaagagaatgagaaggatacatatgtgcggtaaaggtagcaagaagaaaatccacattgcccatagtgggatcaaataatgcctcaaagtgaa

SEQ ID NO: 410296 - DNA, 201 bp, Homo sapiens
tcacttttgagaagccgaggtgggcagatcacttgagcccaggagtttgagactagcctgggcaaaacagcaaaatcccatctgtacaaaaaaaaattttyttttcaaaaaattagccaggcgtggtggtgtgcacctgtagtcctagctactccggaggctgaggttgaaggatcccttgagcccaggagttagaggctg

SEQ ID NO: 410297 - DNA, 201 bp, Homo sapiens
gtttttttgtgagacagggatctcactttccccaggctggtctcgaactcctgggcttaaatcccaaagtgctgtgattacaggcgtgagccaccatgtcyggccgctccactgctcttaaccacgtaacatgtccctagtgatccatgtgactgtctcgagggtaaaaattaaaagcctctggaatgaactcttctgctg

SEQ ID NO: 410298 - DNA, 201 bp, Homo sapiens
ttctaggccctggggatgcggcagggaacaaagtccattaaaaactctgccctcatggagctgatatccttggggagaggaaggaagatgataagcaagayacatagaaatgcaagcggccaggcacagtgacacacgcctgtaatcccagcactttgggaggctgaggcaagtggatgacttgaggccaggagttcgaga

SEQ ID NO: 410299 - DNA, 201 bp, Homo sapiens
tctcttaggttttgcttcctggcacacgtggcagggtagggaggcctctgaaaacccccttccatccttcagttgttggaagtcaggacaagaaaccagtsccactcgctcaccatcccaaggccaaaaagctcaaaatctgctaccttatgaatgggaggctggaaaacagggaactgagggagcagagagtaacaactc

SEQ ID NO: 410300 - DNA, 201 bp, Homo sapiens
cctgatgcgttaaatatgtattatttattacctgccctctccaacacacacacatttgaatgtaaactctatgaaaacaagcaccagggccaggattagcmttttgtaggcacaaaatttaagtgggtactgagaaacagagtaatcaagctcaatcatattttaatgcaatattttacaaatcaaaattgatgccaaaaa

SEQ ID NO: 410301 - DNA, 201 bp, Homo sapiens
actctcttaggttttgcttcctggcacacgtggcagggtagggaggcctctgaaaacccccttccatccttcagttgttggaagtcaggacaagaaaccartgccactcgctcaccatcccaaggccaaaaagctcaaaatctgctaccttatgaatgggaggctggaaaacagggaactgagggagcagagagtaacaac

SEQ ID NO: 410302 - DNA, 201 bp, Homo sapiens
tttacaaatcaaaattgatgccaaaaaatcgatcatgaaagaaaatcaaaatgtaaacaaagacagatggttgtgtgtgttactgccctgcgttattgtgygatgggaacagtttccaatcagcccctgactccctggcctgagtgactgttacctctccacagggcaggtttatgagccttggcaatggcaggaacagat

SEQ ID NO: 410303 - DNA, 201 bp, Homo sapiens
aaagggaagaggaggcagagagaaaagagagaggacatcccccaagtttacatattgcccattgcttcaaaaaaatttaaacatgcaatgagctaagtagrtatgtctccaggccagtttgcaggctcttccctaactgaacttatcaacacagtagacaagctgccggcctggctccctcacccctctagagcagcgctg

SEQ ID NO: 410304 - DNA, 201 bp, Homo sapiens
tagatatgtctccaggccagtttgcaggctcttccctaactgaacttatcaacacagtagacaagctgccggcctggctccctcacccctctagagcagcrctgtccagtagagatttctgcaatgataaaatatctgcagcgttcactgcaataaccactggctacatgtagctcttgagcacttgaagtaggactaaag

SEQ ID NO: 410305 - DNA, 201 bp, Homo sapiens
tgcaggctcttccctaactgaacttatcaacacagtagacaagctgccggcctggctccctcacccctctagagcagcgctgtccagtagagatttctgcratgataaaatatctgcagcgttcactgcaataaccactggctacatgtagctcttgagcacttgaagtaggactaaagaactgaacctttaatgttattt

SEQ ID NO: 410306 - DNA, 201 bp, Homo sapiens
cagtgtctgaggcagaagcctcagaacgttagtgagaaacagtgtccaccagcagctctctcagcctgacaaatggaagtcattagcccaggccaccggamatctgagcggtgtaaaatatggccgcaggaccaggggccttgactgtttccgctgacagtgttgttaatatctccattttagtgggtgatttgtctccac

SEQ ID NO: 410307 - DNA, 201 bp, Homo sapiens
tacattgtatacctgtatcaaaatatcacactgtaccctataaatatatacaattattatgtgtcaattaaaagttttttttttaaagattgggccattcyacataggcccaggtgcctgcctcagccctggagaaagagaggggcataaagaaatctaagttgctttctcctcagtctacttaatccctgacaaaacctg

SEQ ID NO: 410308 - DNA, 201 bp, Homo sapiens; identical to SEQ ID NO: 92343

SEQ ID NO: 410309 - DNA, 201 bp, Homo sapiens
ccaacaaagctaaaatgattggggaatgattcaaaataggttgtttgaattttaagacagaaactgggctcccgttctgttcccaatcaagggatgtgctrcttgaggctgtcatctcttcacttcctttccatttcttcctccccagtgctcagagccagaacatccctttggtagctgtatctcccagcatcttgtgga

SEQ ID NO: 410310 - DNA, 201 bp, Homo sapiens
aagaaccagcagcactttgcttgtggccatcatgctgcataccatgcaggaagccaaaatcattaatagtaccagccagagtggggacttgctgttttttsggggaactaagcccaacaaagctaaaatgattggggaatgattcaaaataggttgtttgaattttaagacagaaactgggctcccgttctgttcccaatc

SEQ ID NO: 410311 - DNA, 201 bp, Homo sapiens
gtgtgctatacatatagtatcttttaaagagctgcatctttagaagcacattgctggttatgtaagatgttctatctgaggaagtgtgctgaagtgtgackactactaataataagcagaaagcacgtggtgttgatggggatgttgtcaatgctgatggcagcagcgggcacttgctgggcatcaaaccctgttctgagt

SEQ ID NO: 410312 - DNA, 201 bp, Homo sapiens
caccggtttatacttctttgaaaaaggcagtcagttgctggcctgagtgtgctaggtgtctcggtaggattgtcagtgccaggcagttcaagtacaccagygtcacatccctatttataatctgtatactttatgcggcagctgcaatgctcagccacaaactcaaacacactgagaaagatcacctttgtcatttcctta

SEQ ID NO: 410313 - DNA, 201 bp, Homo sapiens
tgtttggccaggcttgtctcgaactcctgacctcaagtgatccacccaccctggcctcccaaagtgctggaattacacgcatgagccaccgtgccccgccrgaattcaatgttttcgtaggggtagttatttcatcttgggtgagtttgggtagtttatggtcttcaaggaattgattcatttcattcgttgtcaaatttg

SEQ ID NO: 410314 - DNA, 201 bp, Homo sapiens; identical to SEQ ID NO: 92335

SEQ ID NO: 410315 - DNA, 201 bp, Homo sapiens
cgccacactcagctaatttttgtatttttagttgagacagagtttcaccatgtttggccaggcttgtctcgaactcctgacctcaagtgatccacccaccytggcctcccaaagtgctggaattacacgcatgagccaccgtgccccgccggaattcaatgttttcgtaggggtagttatttcatcttgggtgagtttggg

SEQ ID NO: 410316 - DNA, 201 bp, Homo sapiens; identical to SEQ ID NO: 92336

SEQ ID NO: 410317 - DNA, 201 bp, Homo sapiens
cccagtggcctagcttgggtcttaccccttaattgacagccccaccaaaatagcacacaatggggaaggaaaactaggatgctcttttcagaagccctgargttggaagctaggggtggggaccgggacctccaagcaacacatgctgacttcagcatgttcagggcatttgatatttagccagtggtccctagttcacct

SEQ ID NO: 410318 - DNA, 201 bp, Homo sapiens; identical to SEQ ID NO: 92337

SEQ ID NO: 410319 - DNA, 201 bp, Homo sapiens
aagagtggggacagagttttctccaagtacgaggcggagaatcgcccttcgtgttttacaaagcatgagcagggaagcatgaggttgtccaagcaggtagycctggggccaggacagaagagaggttctcaaactgaagcagcatcagaatcacctggggggtgggggatggtgcttttgaaatcagggattgctgggcct

SEQ ID NO: 410320 - DNA, 201 bp, Homo sapiens
tatttaacaaaaatccctaatacaatataactttgttaactctaattcttgtgttgcacattagatctctatacttgtcatttgttatgcaagtgtagtaktattggccaggtactgacattttcccaaaaacaaaacattatgcctaggggagggtaccagtagaaataggcaaaatggatgccccaaaaccggaagtaa

SEQ ID NO: 410321 - DNA, 201 bp, Homo sapiens
cctgtgctagatgctctcgcctatataatctcatttacttctcagattgacagctctcagcaggtaaagcttaaaaggcttgcatttaatagagaagtggyggggcacagtggctcacgcctgtaatcccagcactttgggaggccgaggcaggtagatcacctgaggtcaggagttcgagaccagcctgaccaacagggt

SEQ ID NO: 410322 - DNA, 201 bp, Homo sapiens
agtactttgattctcttggtgtcacttacaaagtgaattaagagttcgcatctgctcaaagtgtgcagtaactctgctgtgtgtacaccttccctgtacamctaaaattatttcaaaacaaaaggttcacctgctttcaggctaccatttaaaacagaaccaccctggggtagatgggctttaggaatatttaacatattt

SEQ ID NO: 410323 - DNA, 201 bp, Homo sapiens
aaagtgagaaaatgggatgggatgtcctcgaaggttcacgctgttttacagttctgtcactcacgagtgacaaggacaggtccaaattttagttctggctytgccactcatttgcagactcacatggtccagtaagtcacctcactaaacctgagttacctcgttagctaaataaggatagtaaagtacaatcaaaagcca

SEQ ID NO: 410324 - DNA, 201 bp, Homo sapiens
caggggactgtgatgcactgattggtccaggctcagtcacgtgatgcatccctgccaaattctcaccagggaagtgtaagccatctcgaacctcattgccytgcatgggactgtatcagtgaaaatctctctctgacgtgtataacttgtttcagaaactctggtctttatgggttaccattcccgaggagatcctctgca

SEQ ID NO: 410325 - DNA, 201 bp, Homo sapiens
ggtgttggcagggctgcttccttctgcaggctccatgggaggattcattttccctgctgcccgcattccttggcttgtagcctctttctccatccatctcsctcccagcctcccaaagtgctaggattacaggcatgagccaccgcgcccctgcctccctcttagtaagacaattgtgattatattgggctcactgataat

SEQ ID NO: 410326 - DNA, 201 bp, Homo sapiens
acacagatccaaaccatatcactcctcattctcaagaatgtgtacgtttgggtaaaggcctgggtttttctgtttgtttttttgttgtttttttttttggyacccctgcgaaattggtttcacacagaccttattttagacatttcttagataactagcatttacccctctttttaatatttgcctgttttaatggggggg

SEQ ID NO: 410327 - DNA, 201 bp, Homo sapiens
tttaagcacagaaggccatcttttctacagtattggttctatctgctaaattcatttcatacacactagcaggtcttacccagtttgcaaatactgttccrtaaagaagtgggaacggtcttggcagtctttgaagaatggtatgttccacttagagcctgtctccgtatctccctcaatgggggatcttgggcaagctcc

SEQ ID NO: 410328 - DNA, 201 bp, Homo sapiens
cagtgggaattcccctactcatcagcaggttgttgtagtgattaaatgagtcaaaactcatgcaacactgagaatagacatggcgcaaaagaagcactccrtgttcattggcattattacgtgttgcattgttatgtgttgcattgtattattagttttccatgacttctataacaaattaccacaaacttcgtggcttaa

SEQ ID NO: 410329 - DNA, 201 bp, Homo sapiens
tggtcagctgtagctgaggtctcctgcctctttttcctagtgttcactgtaaaggaatttaagcatatgtgtgtgcacatgtgcacgtgcgcgcgcgcgcrcacacacacacacacacacacacacacacacacacattcatgcactctttttaaatttcccataaaaactctacttttgaaattatccaggatatccttg

SEQ ID NO: 410330 - DNA, 201 bp, Homo sapiens
ctctctcagccctgggtagtttcgttacacccatgtgctcatcagttctcaggtggccactcaaggggaactgtgagcaaacctccagagcgctcccagcrcaactttctttttctgggagttctgctctgccaattccagccacattagcctccgctgacttgcagctccatctccccagctcagagagaccacgggcct

SEQ ID NO: 410331 - DNA, 201 bp, Homo sapiens
ggtaaaacattgcacttgctgccgtttggaagttggatggttttcatggaaatggtatttgccgaagggatttaggcaaggtagtgacagcatcagccacrcagggcacagggcatccttgttgcttgtaaggattctggcaagtgtgataaggtcatgaggctggcacattagtggaatggtttcctgatagagatatcc

SEQ ID NO: 410332 - DNA, 201 bp, Homo sapiens
gtttctcctaggctgaccggaggggtgtcccgtcccccgctttccctcgacggttctgtaactccccagaaggccatcccagctggcactttagttttgcrattcggggatttcttttctgcctcatgcctggaataatttgtggctccatttacaagagcagagcccttgtgttcaagcccgctcgggtcccagaagcag

SEQ ID NO: 410333 - DNA, 201 bp, Homo sapiens
aagggttaccctggcaatgcacgcattcccaggcccctgatggtcagcctggatttctttttctgctctgagcttttgctcccgttgctgcctgtattgamctttctcatgctccatctaggggcatggcagtaacatcgggtacacacagaggttgcacactggcaatcaagatgtgttttgtttggtctgcagatcatt

SEQ ID NO: 410334 - DNA, 201 bp, Homo sapiens
cccagccgcttatgacagatgcctttctgggcagagagagaagagagcctgtggctgtcaggagaaaatgaagggagtggaggtgccttctttagacacaygcctttcctaagtatccacgcacatgatcgcagagcggaggagtggaagttgcgactggggtagagttttgtctttgctgggcaggcctccttcatacaa

SEQ ID NO: 410335 - DNA, 201 bp, Homo sapiens
gagacttttgataaagggagaattcgcctaatgatgtggttccccttatctgtgaggtttgtgagggtgaaggagttggttagtctgttacctccaaaggstggactttctgactaagactgggttttgttggtggaaggaaccgggttttttgggtttttgtgttggtttttttttttttttggttgtttttgtttttgt

SEQ ID NO: 410336 - DNA, 201 bp, Homo sapiens
gttgtttatcctagtgtctccggcagatgaatttaattttccttctgtttttttgagacaagggggaggcattgtcagctccagtgtggatcttagcaatsgttttgcaaatgtatcatcaacaaattatgtcggggaaccatctagttagaattctaggcaaatgctattggctgaatcgtggtggatggaagagacctt

SEQ ID NO: 410337 - DNA, 201 bp, Homo sapiens
tctaagcccagtagccttaaactaccaagtgaaccaggaaagaccttatttacattgctcttcagcatctgtgaattgagaagaaattctttttccagagraaagtctttgctcactcaatgtttgggaatctctcatgctgcatcctgaagactctggggaggtggaaaacacccagccatcctgacagcgcaaaatcat

SEQ ID NO: 410338 - DNA, 201 bp, Homo sapiens
ggacaagacgatagcctgtttatttccaaacctgccctgagtcatcattcagaaggttcatgcaaaagaaaagagaaatcagaagagaaaacactgcagtsaggagtcttctgagacaggtggcttcctaagcttttgcaagtagggtcaccatggtaaccagaaccaaacagatgacctcgaatggaatagactgaccta

SEQ ID NO: 410339 - DNA, 201 bp, Homo sapiens
cttttgcttctctgcaaagtatgccttatccatgtgcaatacaagctttggctcaaaacatttctgctatcatttcctttggaggaagatgctgaatttgsatggttttaaatgcacagaacacagttattttctgaacctgccctgacgttttttgccactgtcgtttgaaatggggaaacaaaatcatattaaatattc

SEQ ID NO: 410340 - DNA, 201 bp, Homo sapiens
accccaaatgcaagggcttgcaaaagagtcaaagctgatttctccctagtagaacagacagaggtgagtgatccaggctggtggggtgaccctgtcctcaragacatccagaaacccaggtctctcccgttttatttttccaccatttcttatggttttattctcatgtatggggtcaaatcagagtcctagcccatcctc

SEQ ID NO: 410341 - DNA, 201 bp, Homo sapiens
agcaagctctggtcaggtcccagcctttgtacccagccctgcacggagggaggaggggagcaggagggctgactcaggtgagacagggatggggttggccrccagagagcatctgttccccatccaggttaaggcccaggaaatgccagggctttgtcaggctgctctgctcacccatagctgaggggagagcacccaagg

SEQ ID NO: 410342 - DNA, 201 bp, Homo sapiens
attataagtattaggcagtgtcttcaggtcttaggtgtatgctgtgtgtgtgtgtgcaaaggcttggggagaaggattggtgtcacgtgcggggcagtgtraaaaacttaactgcttcccacctgggcacaaaatgaaaagaaagactgcctggcctgacataaattccttgggagagaggagaacctgctcccccagaga

SEQ ID NO: 410343 - DNA, 201 bp, Homo sapiens
ttaagtaacctgcccagcgtcacacagcccaggcagaagggccacagtggagtcccaggctgggtgactgcaccacctctgcccttcagggccacacttgrtggcctctcagatgtgagtgtgttgattgcaggagtgaagcagcaagctctggtcaggtcccagcctttgtacccagccctgcacggagggaggagggga

SEQ ID NO: 410344 - DNA, 201 bp, Homo sapiens
gcagtggtgcaatcgtagtcactataacctcgaatgcctggactcaagcgatcctctcgtctcagcctcctgagtagctgagactacaggtgcacaccagsctgctgctgcttataaagacaccagttattaccttgtaactcttatgacctcatttaatcttcattactactctggaggccctgtttccaaatacagtca

SEQ ID NO: 410345 - DNA, 201 bp, Homo sapiens
ctgttctcggtgctctcatgcagcatctcgcttctcctcacctcatctggaggtgggttcagttatcaggtccatttatcagtcaggcctctggggttcaygagggtcatgcccctcactcaaggtcacacactgggaagcggttggatccaggatccaggcccaggcagtcagattccagagcctgcaccctgaaccagt

SEQ ID NO: 410346 - DNA, 201 bp, Homo sapiens
cgaactcctgacctcaagtgatccacccacctcagcctcccaaagtgctgggattacaggcgtgagccaccgtactgggccaaattaaaatgttttaaaarcatactaaatacaagtctggagaaatggccttagatgtcagaacaatgccaagttgctgcaaaagtttcaggatgtttacttctcagtgtctgactttct

SEQ ID NO: 410347 - DNA, 201 bp, Homo sapiens
tcaagtttaccggaaggtgctggatcgctatgggtgggtgttgtttcgggttagattttaaacatttggagagcaaagaataatttggaacaggtggtgcygagagtcaggtagctggaatgatttatctttgcctctttgaacgttaagggaggccactggttgcctgaatctggaaccagcaggctgcgggtcagtggg

SEQ ID NO: 410348 - DNA, 201 bp, Homo sapiens
ggactccacccggtgccattcaggaatggtctccgtgttgctaggtgttctgatttttcaaaatctgaatttttaagagaaatgtcccgcttttaaaatcwctatgaggaaccaccagaaatatacctccaggctcatagtgtacgatccctctcccaaacatcgacacagaccctgggaatcaaatttcagtgaaaaggc

SEQ ID NO: 410349 - DNA, 201 bp, Homo sapiens
gggcttgtctgtacccattcattaacccttacaacaaccacagagggcaggtactgttatgtatccccatgttagagatggggaaactgaggcacagagckgttcacttgtgcgacagctgacgcatatcaagctcttcttttgcaccaggcattgcgcatgaaccatctcaccgcatcctcacagcagccctgcaaagga

SEQ ID NO: 410350 - DNA, 201 bp, Homo sapiens
cggaagctgtacaacatgattatcacaccggcctcacacagagactcattttaggccacgcgtgagccgagcagatgaggaaaaaccaaaactgcttttcrgcagtggaatgggaccaaaagggtagctaagattcctcaggctccgcgtgcatgtgattttccccttctctgcctcgcaggacaccacgacgtccgtgcg

SEQ ID NO: 410351 - DNA, 201 bp, Homo sapiens
tcattttaggccacgcgtgagccgagcagatgaggaaaaaccaaaactgcttttcggcagtggaatgggaccaaaagggtagctaagattcctcaggctcygcgtgcatgtgattttccccttctctgcctcgcaggacaccacgacgtccgtgcgcattggccttatgatggaagagatgatcttcaaccttgcagatac

SEQ ID NO: 410352 - DNA, 201 bp, Homo sapiens
ctaggtgttctgatttttcaaaatctgaatttttaagagaaatgtcccgcttttaaaatcactatgaggaaccaccagaaatatacctccaggctcatagkgtacgatccctctcccaaacatcgacacagaccctgggaatcaaatttcagtgaaaaggcactaagcctctctcccgcactttttttttttttttttttt

SEQ ID NO: 410353 - DNA, 201 bp, Homo sapiens
aactttgctacctccttccctgcttcattcttctttttagcaccataagactctaaatggagtccaaaaaatttaatcatgtttggagaattgtgttagtktgaggttcataagatagcagggaaaagtgtgtgccgctgagtgtgccagggagtcagggagccaatcatgttgtctcttgtgttacccaaaaagtatttt

SEQ ID NO: 410354 - DNA, 201 bp, Homo sapiens
ctatccagtggaaaggacgtagcgttggtggcagggacctgcctgcctgacttcgctgcccctgacctctccaggcctcagtttcctcaattgtaaaattratatgctcgtttcatcttcccacctagaggggtcctgcttgagttgagtgcagaggctgactcttacatttctttcctccctcctcttcctccatacctc

SEQ ID NO: 410355 - DNA, 201 bp, Homo sapiens
taaaatgggtgttttagtccatttagtgttgctataatagagtacctgaggctggataatttataaagaaaaggggtttatttgacttatgattctggggrtcggcaagttcaagattgggtagctgtacctggtgagggcctcaagctgcttccattcatggtggaaagtggaaggggagtcaacgtgtgcaaagatcac

SEQ ID NO: 410356 - DNA, 201 bp, Homo sapiens
tgtccttaattatttatttttataatagaaataatatagcctccagtgaaaaatttaaacaggaaaaggactgtatggagcaaggggacaaggcccctgtygctcctctcccaactcagcccctttgagtcctcagaagcagtgttgttccagaaccagattacctatgttctaatctcagcatttgttagcttgtatggc

SEQ ID NO: 410357 - DNA, 201 bp, Homo sapiens
ctaatggctgtgttcctgggcctgattcttcacagttgtgtgtgtgaagctgagatcaccagctgcatttttttctttctttttttttaagggtcaaaaarggtttatgtccttaattatttatttttataatagaaataatatagcctccagtgaaaaatttaaacaggaaaaggactgtatggagcaaggggacaaggc

SEQ ID NO: 410358 - DNA, 201 bp, Homo sapiens
ggcaggtgggaacaggaactattcccagctccattatgagctctgaagcttgttgcttctgatcttttccagtggttctctctcagccctgggtagtttcsttacacccatgtgctcatcagttctcaggtggccactcaaggggaactgtgagcaaacctccagagcgctcccagcgcaactttctttttctgggagttc

SEQ ID NO: 410359 - DNA, 201 bp, Homo sapiens
tgcctaatggctgtgttcctgggcctgattcttcacagttgtgtgtgtgaagctgagatcaccagctgcatttttttctttctttttttttaagggtcaaraagggtttatgtccttaattatttatttttataatagaaataatatagcctccagtgaaaaatttaaacaggaaaaggactgtatggagcaaggggacaa

SEQ ID NO: 410360 - DNA, 201 bp, Homo sapiens
cccagtatcagtcaatcataacttgagctttaccaatatgcggtatttgccttcttacaactatataaatactcttcacagagaagtcatttggtatgcartaattacttttccttctctgtgtgctggcctgggaggtgacaactttcagaataaatcctttcagcaaacaagtctgggtggcagctccttcttgcttct

SEQ ID NO: 410361 - DNA, 201 bp, Homo sapiens
agcttaaaacaatcttaggaaaatctgaaataataagaatgctccaagagtaggtgggtattctaaaggctcatcatataaacatttgggtgtcttcaatytttagaaaaatgtttaattacatgataagtatttgaatcccttctcttttaaaaaattctagaaggctgggcatggtggctcacgcctgtaatcctagca

SEQ ID NO: 410362 - DNA, 201 bp, Homo sapiens
ccacctctggcttatttcatcagtgaggtatgtttcagagaacttgagtgataggtgtggccatagttgagagtggagcccagtggcctcctcatggtgaratggagtcatttccctatttctctccggtgatggcatctttcaggctgtcccagcccagccagttttgagcagtctaaatcttcctgatctcactgcatc

SEQ ID NO: 410363 - DNA, 201 bp, Homo sapiens
cagccagttttgagcagtctaaatcttcctgatctcactgcatcggtcaagacaggagccagtcttggcatcctatgggttgttggactgaggccgagttycctaatgtgaatcagcaactcttctgcacacaatgaagtgggtgaggtttccccatgcatgtcagcattctcgcccctgtgcaacacctccagcctgggg

SEQ ID NO: 410364 - DNA, 201 bp, Homo sapiens
gtcgtgttcatggctgcggtgctaatgcagcccacgtgctaagcgcggtcctggcagtagctaatgtttaaggagcactcgctctgccagttttgccaccrttttcatggactagctccttcactcttcacagcatgcctgtaaggtaaatgtttttatcaacggtgttgcttgaaagcagaaactgagatgacggaggtt

SEQ ID NO: 410365 - DNA, 201 bp, Homo sapiens
tcaagacaggagccagtcttggcatcctatgggttgttggactgaggccgagtttcctaatgtgaatcagcaactcttctgcacacaatgaagtgggtgargtttccccatgcatgtcagcattctcgcccctgtgcaacacctccagcctggggggtcactctcccctccccttcatgtgtgctggcaggcttgctgcct

SEQ ID NO: 410366 - DNA, 201 bp, Homo sapiens
taactaggggtggtactgcgccctccccaggagacatctgggagtcttcctggttgccacagtgcctggaaccaaccactggcccataagggcagggtttsagtaggtggctaatagtgtctgcaatatacacattggccccaaaaacttctagggccccctccctccattcctagaaagaatagagtcccggttctcaaa

SEQ ID NO: 410367 - DNA, 201 bp, Homo sapiens
tgcctgcttcattttaatcagccattcggaaaatcccttctgcaatcaggactggcaaggagcaaagctccagccccaccaggacttctcacctgatggartaaataaaccccagatcaaggttaattggtcctttccatgaagtcatcgttgggaagcactcttcctttcaaggcagtgagcagcaccgttctgtttcta

SEQ ID NO: 410368 - DNA, 201 bp, Homo sapiens
gccccattaggcaatgcttgtataagggagaggttactcttttcagactacataataacccaggcccttccatggacttggcttaaatcaccttggggtgrgggtagcaagaggtgccatcagaagagaagacagtctttccaaagtgcttcctggcaaagctcgaccattgctaagatgtaaagaaacacttgggcttgc

SEQ ID NO: 410369 - DNA, 201 bp, Homo sapiens
tgtctatggccacattcatggataccttgtgaatgatggaggcaatttgtggtggccatttgggtgagtcccttgccccattaggcaatgcttgtataagrgagaggttactcttttcagactacataataacccaggcccttccatggacttggcttaaatcaccttggggtgggggtagcaagaggtgccatcagaaga

SEQ ID NO: 410370 - DNA, 201 bp, Homo sapiens
ctgctctttaatttattttttattttatttttctgcgacagggtctcactctgtcactcgctgaagcacagtggtgcaaacacggctcactgcagcctcarcttcctgggatcaagcaatcctctcagctcagcctcttgtgtagctgggaccacagacatgcactaccatgcccagctaattttttatgtttttttgtga

SEQ ID NO: 410371 - DNA, 201 bp, Homo sapiens
tcttacagttaagtgatatcatctttgcagaggaagggtggttcatttcacacctttgcccaaaatcctaatggacatttaagccatacacagcactactyagtggagtagtgggctgcaggcttgcatacctaccaagctggcaggtagcatgaagctcacggtggcatgtacaaaatatgagaccttcatacctaccaa

SEQ ID NO: 410372 - DNA, 201 bp, Homo sapiens; identical to SEQ ID NO: 92340

SEQ ID NO: 410373 - DNA, 201 bp, Homo sapiens
cggatattctaaataccctgatttgatcatcacacattgtatgcatgtatcagaatatcacatggaccccccataaatacatacaattgttatgtatcaawaaataatcttgcaaatagaaggtggagcatgggcagtggttgggcttgttggagagtgagcagaaggaccaaatgacctctggatgtctcttatgtctcc

SEQ ID NO: 410374 - DNA, 201 bp, Homo sapiens
gttctagactggattctagatagcgggggagatgtgatacaggaaattattggtgaattgacaaattgtactgtggagaatggattggttaaaatattgtrtcagtgttaaagtgattgaagtgggtaataaaccggagattctataagagaatgttatttttcttgggaaataccattggaatatttacgagtaaaaggc

SEQ ID NO: 410375 - DNA, 201 bp, Homo sapiens
tgagggtggaagcgatgaggcagagagaggttgctcccaaattcagaacaggtagcgccagtgaggtcaggttacacacacacactttctttctcatgggrcaggtggtgagctccagagactctgcaggggacattccaccctggagcatgacccccaagtgctggattatgcctctccccctgcctggcctactgttct

SEQ ID NO: 410376 - DNA, 201 bp, Homo sapiens
tcctttaattaatcccatcttagggatgaggaaacaggctcagaaaggtgaagttacttactttgctgtgcagacagggtgaatttcaggtttttttgacktgagaatccaaaccagatgcatatacacgaagctcagttgtcctctgccagggtgagacttctgtggggcttcaggagaggaagaggatggggggatgtg

SEQ ID NO: 410377 - DNA, 201 bp, Homo sapiens
ggtcaggtccacagtgatgagctgttgagtgttgccacctagagagttgttaatgacacttacgccttttgagcttttctccgtccatgcaagtagtaccrtgtttgtttgtttggagatggagtctcattctgtcgcgaggctggagtgcagtggcgcagtctcgactcactgcaacctctgcctcccgggttcaagcga

SEQ ID NO: 410378 - DNA, 201 bp, Homo sapiens
ggagtgactaccaacatggtgcaagaattagaaatgttttcaattaaaaaatgagaaagaccaaaggagacctcatccctactctcccctgcccgcccccyataacatattataaaaatcatgggtgattcaggagccagtatgttctctcttggtcaggtccacagtgatgagctgttgagtgttgccacctagagagtt

SEQ ID NO: 410379 - DNA, 201 bp, Homo sapiens
ttgcgcttggctctttagattttactctgagcaagccagaagctggcctcatttaacctccttttagaaatcggtgtgatgaatcaatagctttggccgtwtgttcatcagtcattcattcattcaacaaggatttgttgagcacctcctttgtgcagctctgtgcttttctagttcctctgctgaacagtgaagggcaga

SEQ ID NO: 410380 - DNA, 201 bp, Homo sapiens
gaaagtagattagaatgagccgggttggaagtgggagaaatgtccccaaacacaggtttagagttggccttgagaacatcagcggtatggacagatgtacrgacactggggcctgataattcttccttatggcgctgtcctgtgccttgtaggatggttagcagtatccctggcctctccctccccagttcctctccctcc

SEQ ID NO: 410381 - DNA, 201 bp, Homo sapiens
ccttgagaacatcagcggtatggacagatgtacggacactggggcctgataattcttccttatggcgctgtcctgtgccttgtaggatggttagcagtatycctggcctctccctccccagttcctctccctccccagttatgacaaccagaagtgtctctggacattgccaactgtccactgggaagtaaaatcactgcc

SEQ ID NO: 410382 - DNA, 201 bp, Homo sapiens
ctagaatcaacccaaacgtctacctacaggcgaatggataaacaaattctgatgtatccatacaattgaatagtactcagcaatagaaatgaaatattagkctgggcatggtggctcatgcctataatcccagcactttgggaggctgaggtgggcggatcatgaggtcaagagatcgagaccaccctggccaacatggta

SEQ ID NO: 410383 - DNA, 201 bp, Homo sapiens
agggttctggtgcatacgggcattatggtcctgccgtggcagggctaggagggtaagcagacagatttggcaatacagggactgttataaagtcatgcttyttgataatagtgtttttaacttcttccacttgcttcgtaatattggaggatattttgggaaatgcatataagagcatgtatttttccttttgcctcaggc

SEQ ID NO: 410384 - DNA, 201 bp, Homo sapiens
tggttcaggcccacgcttgttcagcctcctagacgctctgagtcttggcctcctgactcctctggggttggcgcagccttgcttgccttggctcccgtccrccgggctgttccctgcacgtacgagtggccctttagaatgtgtttgtctggtcaaggttgacaaacttcctgagcccacgtctgttgacttttgtgggac

SEQ ID NO: 410385 - DNA, 201 bp, Homo sapiens
gaagaaaccctgtgcgtcattcctcaaacaccaggagatgccaccgatagccacctctcctcacagtttcgttctgctcgagactgtgagttcatgtcaaycctgagctgcgtccccagggaaataggttctgctaacagtcagttcttactacgaggcattctcagagccaaggggaagctgggttggtggtctgcagct

SEQ ID NO: 410386 - DNA, 201 bp, Homo sapiens
tatttgccttcttacaactatataaatactcttcacagagaagtcatttggtatgcaataattacttttccttctctgtgtgctggcctgggaggtgacawctttcagaataaatcctttcagcaaacaagtctgggtggcagctccttcttgcttcttgtccagtacatggagggttggtaatcagtgattaggtgcacg

SEQ ID NO: 410387 - DNA, 201 bp, Homo sapiens
actttcagaataaatcctttcagcaaacaagtctgggtggcagctccttcttgcttcttgtccagtacatggagggttggtaatcagtgattaggtgcacraattgctccgtcaaagaggagtgtgtgattgtgcagaggtgaaatgctttggatatgagtaatgcaaaaccttttcccaggtcacacacgattccctcct

SEQ ID NO: 410388 - DNA, 201 bp, Homo sapiens
ccgtcaaagaggagtgtgtgattgtgcagaggtgaaatgctttggatatgagtaatgcaaaaccttttcccaggtcacacacgattccctcctaggccctragaagtttgttttcctcatttgctcttcatttttcactgagtaccctgccccatcgacttccagccaggaccaagagtgctaagctttggctctcggggc

SEQ ID NO: 410389 - DNA, 201 bp, Homo sapiens
gtttgagaggcctgagggacaacaggatttgtaggtctgaagctccagagagaggtctgcactatagctctaagcttggatgtcagagaagtaataaggaygtagaggagaagtgtgagccccattttgcagacagagtgactgagatgagacctacagaagttgtgtagttggtgggatattcatgacagaaccaaaact

SEQ ID NO: 410390 - DNA, 201 bp, Homo sapiens
cccagcaagccccacttttttaaaggccagactcagaagttgcaggcatcacttctgctcttatcctattgggcagaacttggtcagatggcctcatctasctgcaagggagtctgtgaaatgtactctttatttgaggctgtcatggccagttaaaatttagatattctattactctgagagggagaaaagaagaatggg

SEQ ID NO: 410391 - DNA, 201 bp, Homo sapiens
cagaggaggactgccctcttagggggggtggacattctccagcccatcgcagcccccacctggcctggttaacccattcttgggactctctggccccattrgtatctgagtttcaacatccatcctagaattacagaatcatagaagattagagctggaaggacttgagagatcatcatgtccagttagtctccatcgtcc

SEQ ID NO: 410392 - DNA, 201 bp, Homo sapiens
tggtggccgctggccaaattcatactgcagatatttctctttggcccccagagtgtttgaaaaaatgtgaatgtgtcgccaacatttaaaaatcaggagaytgcacagaccaaaacaatctagatttccagctcttcttgaaaaattagaaatctggcaatcctgcattcccctggggccacaatcaacaggagcagagga

SEQ ID NO: 410393 - DNA, 201 bp, Homo sapiens
tgtctcaatcaatcaatcaatcaataaaaagagagccccagggtagagcatcacaaatgctaactgtggaaggtttcttcatatatgtacaggaatggtgmcagttgaggggacgtggagctggggcacactggaagcctctgctataatctaagatgttctagaatgttcttttattaagttaaatcctacttatctttc

SEQ ID NO: 410394 - DNA, 201 bp, Homo sapiens
tgggcaacagagcaagaccctgtctcaatcaatcaatcaatcaataaaaagagagccccagggtagagcatcacaaatgctaactgtggaaggtttcttcwtatatgtacaggaatggtgacagttgaggggacgtggagctggggcacactggaagcctctgctataatctaagatgttctagaatgttcttttattaag

SEQ ID NO: 410395 - DNA, 201 bp, Homo sapiens
gaagctgagaagggaggatcgcttgagcctgtggtgagctatgatcgcaccactgcactctagcctgggcaacagagcaagaccctgtctcaatcaatcamtcaatcaataaaaagagagccccagggtagagcatcacaaatgctaactgtggaaggtttcttcatatatgtacaggaatggtgacagttgaggggacgt

SEQ ID NO: 410396 - DNA, 201 bp, Homo sapiens
tttcctcgtggcctaagaagtgttcctttcaaggagagagacccgtctttagtcctccatttggaactggcgtgccatttggaactggcacactgtgaaargtgggcagcactgtaccctggggcttagaaacgagcccagatcatttctgctgcattctgtcagcaaaagtaaacataagccagcccagatttaaacaga

SEQ ID NO: 410397 - DNA, 201 bp, Homo sapiens
cccactgcagccccctacattggagtcatcctgaaatgcaagcttggccatatcactctccagccgaaaaatcttcagtggcttccccattgacaagcctrcccccagcctccaaggctcttcatgagtagcctcctgccccattctccagcctcctttcctgctcttaccctgagttgtttttggtccttgaacctgcca

SEQ ID NO: 410398 - DNA, 201 bp, Homo sapiens
tagattgtatcttctcttttttaaccacagtgaatgtcttagaggaggggctggtgtttcattatgttttgtttgtttgtttgtttgttgtttttaagtamgctggcgacatggcacaggctctggaaccaagcaccttcacttattatctctgaaaccctggcatgttacttaacctctttggctctcagttttcttctc

SEQ ID NO: 410399 - DNA, 201 bp, Homo sapiens
aacaacatcaacatagtctctctctctcaccccgtccccactcacccatgtctcttggctctgttttcctctgtgtcaccttcctcctggccagcttcctycgtcgtggtggtccccagcccttctaggtgttcatcatcctgaggactggcagtggcagcagaaagagggctcctctttcccagtagctctcccagaatt

SEQ ID NO: 410400 - DNA, 201 bp, Homo sapiens
aaggagactgagaaatgcagcgtagatctgtgttcaggaggaagaatatctggatttggtgggcacataagcatccctgcctgtattagtctgttctcacrctgctaataaagacatgcctgagactggataacttataaagaaaaagaggtttagtggactcacaggcctcagaatcatgaaaggcaaaaggcatgtctt

SEQ ID NO: 410401 - DNA, 201 bp, Homo sapiens
ttgggtggggacacagagccaaaccatatcactttctctaaaattaaatgacttacttgaggtaaagcagttacaacagggcctggtatgtaggaagcacwcaataaatgcacctctgctattgcaagcttgtattttttaagtattctatgatactgtcatgtccttgggacctctggtcagctctttacccctgcgggt

SEQ ID NO: 410402 - DNA, 201 bp, Homo sapiens
ggcaagcctatcaattatacacacttgctaaaatttcactctaaaaactagtcaataccaggctgaataagatatcaggaagatgtcaggttcttatcackggaaactgtacatgtcaccttatgtggcaaaaatactttgcagatgggattcagttaaggatcttgagatgggggattatcttggattatccaggttggc

SEQ ID NO: 410403 - DNA, 201 bp, Homo sapiens
cagagcctgggcccatcaccaccccctggactctgtgccctccgggagctgttgcaaagatgagagttatttttctgtgtggtgcctggcacacagtgccrgtgtgcaaaatcaccaacgcttggattgtcgatgtaacatttgctcacggaaagctgacctcacccatgttgaagctccctttcctcatctgctgagtca

SEQ ID NO: 410404 - DNA, 201 bp, Homo sapiens
atatttaataaagcttaagtgcacaaggctcagtggataccttggagcatagctgagctaatagcggcagagacttttcagggcccaacaggtttccaggyttctggattctcccaaaagatgagaactggcatgcaggctccagcttactctattccccacctctccctcttgtcctacacttgttccatatcactcatt

SEQ ID NO: 410405 - DNA, 201 bp, Homo sapiens
tgagatcacagttgttcttataggagagaggcagaaggagatttcacacacacacacacacacacacacacacacacacacacacacacacaagaagacartgtgaagacaggacagagatttgaagatggtggccttgaagcttggagtgatgcagccacaaaccaaggtttgctggtggacaccagaggctgaaatgga

SEQ ID NO: 410406 - DNA, 201 bp, Homo sapiens
cacacacacacacacacacacacacacaagaagacaatgtgaagacaggacagagatttgaagatggtggccttgaagcttggagtgatgcagccacaaaycaaggtttgctggtggacaccagaggctgaaatggattctcacctggagcctctggatggaatatggccctgtagacacctggattgtggcccagcaata

SEQ ID NO: 410407 - DNA, 201 bp, Homo sapiens
gggttactgtgagaaattcaatgcatttctatgtgtaaagtgcctggacttcagtaaacactattaaaagaagcagtaacagagtggttaaaggctctgayatttacctgctgtgtgatgttgagcaagttaccttccctctctgtgcctcagtttcctcacatgtatcatggagatactcatgcccttatcttaaaggct

SEQ ID NO: 410408 - DNA, 201 bp, Homo sapiens
ttgggtatatacccagtaatgggattgtgagtcaaatgttatttctgtctttaggactttgaggaatcgccacactgtctgaggaaccttcatttgttggraaccacccaacacagagtagatgctcaggaaataaatatgcagtggatgagtaatatgtgcagaatgacctgactgagtcacaaagacctttctggttgc

SEQ ID NO: 410409 - DNA, 201 bp, Homo sapiens
caaggttacaccgctgataacgacatagctgggatttgaacccctggagcagataacacgtctggtgctctgactgggtagcttagtagactttagagctrgatgggccctgagttgaaattgtgatccagagctatttgcaagctgtggttaagagcacagatctggagccagatcacctggttgagaatcctgactcta

SEQ ID NO: 410410 - DNA, 201 bp, Homo sapiens
cagtctaccacactgtgtatacagaaaggaggcactttcattgcacaagtgtgcaaattcatacgttatgctgtgttgcagcttgcttttgttacttagtrctgtatctcttgatgacagtttcatatcagtaactccagaatgacttcgtttgtataatggctgcctagttttccctcctatgaatgtaccatagtgcct

SEQ ID NO: 410411 - DNA, 201 bp, Homo sapiens
tgtgtgggcattggtgaacatagctgccttccaggctaacagaataaatatccagaatacttgcagccttgtgaagtgagaaaagagagtgcatggggaartgtgcactggctcctaaaaacttctgatcaaaagtgaaacataacttttgcccacatatcactggccaaagcaagttgcatggtccaatttctaagtaac

SEQ ID NO: 410412 - DNA, 201 bp, Homo sapiens
tgctttagctgatcgcagtgaggccctgtccctttgcagaactttattccattcccgcctcccacggcatcctcctcagcttcctcctgcatcactctgcygttggcatccccccaacacatacgcacacaaacgtgcacacatgcacgcacacgcacgcacacgcacgcacgtactttccttcaattgctccccatctgg

SEQ ID NO: 410413 - DNA, 201 bp, Homo sapiens
cccccaacacatacgcacacaaacgtgcacacatgcacgcacacgcacgcacacgcacgcacgtactttccttcaattgctccccatctggcttatgaaastgacagagaataaagcttctctcttaccctctcccaacccccacgtcgttgtcctgcacctggctggccatccagggctcatctcttttctctgaaattc

SEQ ID NO: 410414 - DNA, 201 bp, Homo sapiens
catcctgccatccaagctgtggggccccttccctgctggagcagcagcacatcaaagaacgtaaacgagtgggcatttctgcagcccccagaaagcaagcyggcatcccaggaggtgcctgggaggctctctgagaaggctgactccccacctccaccatgtttcctggaggtttggctgataattaggccagtcctatta

SEQ ID NO: 410415 - DNA, 201 bp, Homo sapiens
tgctgggattatgggcgtgagccagcgctcccggctggttctctgaattaatcggtgcagagcagtgattcccaaccaggagtgactctgcccccgagggkacatttgacagcatctgtagacatttggctgtcacatctagaggggaggcgtgctgcgggcgcctagtgggtagaggtcagggttgctgccaaacatcct

SEQ ID NO: 410416 - DNA, 201 bp, Homo sapiens
gtggcttgaaaccctttgcacacttgtatcttttcctgcgctctctttttcttttatatctctccctctctctccccctttctttctcattaaaaagatgmcttttctctcaagtgcaagaagctgacttgtgccaaaaacaagcagggtggatgctgaaagttcccagggttagcctggagcctcccaaccctagacctt

SEQ ID NO: 410417 - DNA, 201 bp, Homo sapiens
aaatgagttaatacttataaagtggcacagagaaagcacttcatagatattagccaggaatattagccaggaatattattaacagtgtgttttatatcctyctagactagtggttcttaaccttgactgcatattgaaatctagactagtggttcttaaccttgactgcatattgaaatcacctggggagctttaaacttc

SEQ ID NO: 410418 - DNA, 201 bp, Homo sapiens
ggggagtcccaggaatggccaggacagagggagccaggtgagggcctggctgctcccaggaaagagaggatgtcatggtcctgttttggccaagcaggtcstgttttggccaaccagtgctcccgtgcgcagatccctgtggtgatgggagacaattgcaagggtcaggattcgagacaagatgctcaaaagtcccttcca

SEQ ID NO: 410419 - DNA, 201 bp, Homo sapiens
atgctaattaccccaatacattgtatacctgtatcaaaatatcacactgtaccctataaatatatacaattattatgtgtcaattaaaagttttttttttwaagattgggccattccacataggcccaggtgcctgcctcagccctggagaaagagaggggcataaagaaatctaagttgctttctcctcagtctacttaa

SEQ ID NO: 410420 - DNA, 201 bp, Homo sapiens
aattgcagaagcatcctgagtaatttccttctacaaatccccctctctgcctctggctgctgcccctggtagccctggattgtttctgggacaactgttcrggagcctagagacgctccggcagggcaggctggtggggggccagtgcacgtgcatgtgttttatttaatacttactgatcatatgttccagcaacccttc

SEQ ID NO: 410421 - DNA, 201 bp, Homo sapiens
ttttgaaacttttatttgaagttttataaaggtgtacactgcactgcattgcaaaacaggtttcttactgtgagtcttggttgaagaattcgaaagccacygtttttagtccctgtgaaagtttggaatttagcccaaggggcagtggggagcaattaaagaggttttagtggggggcatgacaaggtcagatgtatgttt

SEQ ID NO: 410422 - DNA, 201 bp, Homo sapiens
cgccatagacagtatataactgaataaaactttatatacaaaaccagacagcagccagaatttggcccatgggccatagtttactgactgccccctccccrcccacccaacgtagatgatggggctttgttctacgaactcccttttagttcttccatagatctaaagagtcagttcttcttactgcagttttggcctgtt

SEQ ID NO: 410423 - DNA, 201 bp, Homo sapiens
cagtgcggctctagagtctgtgtgccccagcatctgctgcagtcatgtgggagccaagctgcttgggtttgaatttaggggataatacactgagtactctsgtgaggatttagtaagggacggtcagtgagtaatacattcagggcagtaagggcctggagcttaggacgtgctagataaatgagagtgagttgtgccact

SEQ ID NO: 410424 - DNA, 201 bp, Homo sapiens
agtctatcccaggagttggcaaactttttctggaaagggccaaatgctaactatttttggctttgcgggccataccatctctgtcacaactattcagtgcwgcagttgtcacgtaaaaacagtcagagacaacatgtaaacaaatgggcttatctgtgttccagtaaaacattatttataaaagcaggcggtgggctgggt

SEQ ID NO: 410425 - DNA, 201 bp, Homo sapiens
tatgaatctgtgtgcactgtcaggaaggctctgcctgtagggtgacagagatggctgccggcatccttgagcctagatctaccagctcagccaccccaggraaaaaaggtgcctctcccaggagtcatagctaaagtcctcaggccaatgcccattggctcataatcatccttgaatcaatcactatgattctagccaggg

SEQ ID NO: 410426 - DNA, 201 bp, Homo sapiens
ggccttgtctatgccgcaaacacccgtttttgcttggaattggcacgttgcatgctgagttaagaatcttttgattataagcgacagaaattcaatgcacrtcagcttaggccaaaaaggagaatttgttcatgtcaccaagatgtccaaacgtagacctaaagcaaggtgggatccagctccctaaatattttcatatga

SEQ ID NO: 410427 - DNA, 201 bp, Homo sapiens
agaagagaagacagtctttccaaagtgcttcctggcaaagctcgaccattgctaagatgtaaagaaacacttgggcttgctcagcaggccttgtctatgcygcaaacacccgtttttgcttggaattggcacgttgcatgctgagttaagaatcttttgattataagcgacagaaattcaatgcacatcagcttaggccaa

SEQ ID NO: 410428 - DNA, 201 bp, Homo sapiens
agggtcattttccaggagatttaaatactggaaagggtaaaaagaaatggtgaaaactggaagtgagatcccggaagctgtacaacatgattatcacaccrgcctcacacagagactcattttaggccacgcgtgagccgagcagatgaggaaaaaccaaaactgcttttcggcagtggaatgggaccaaaagggtagcta

SEQ ID NO: 410429 - DNA, 201 bp, Homo sapiens
gtacgagtggccctttagaatgtgtttgtctggtcaaggttgacaaacttcctgagcccacgtctgttgacttttgtgggaccttctggctacctggctgycgcggatgcttcgctcaagccctgtcttctctcttggggtgtggagtcagctaagagggcagcagagctggctgtgttcacggaatccagtgtctggaga

SEQ ID NO: 410430 - DNA, 201 bp, Homo sapiens
accagtacatcaaaccagtgatgtcataggtaatgatgcccaggatgaagcgtaggtttgtgaaagagcatcagtgtaaagataaatgaggaggccaagcrcagtggctcatgcctgtaatcctagcacttttggaggctgaggcgggaggatcacttgagcacaggagtttgagaccagcctgggcaacatgacaaaacc

SEQ ID NO: 410431 - DNA, 201 bp, Homo sapiens
ccaccacatccagctaatttttgttttgttttgtttttagttgagatggggtttcaccatgttggtcaggctggtctcgaactgctgacctcaagtgatcygcccacctcggcctcccgaagtgttgggattacaagctggagccactgcacctggcccacatctcaatttaaactagccacatttcaagtcacctgtggc

SEQ ID NO: 410432 - DNA, 201 bp, Homo sapiens
atgaagcgtaggtttgtgaaagagcatcagtgtaaagataaatgaggaggccaagcgcagtggctcatgcctgtaatcctagcacttttggaggctgaggygggaggatcacttgagcacaggagtttgagaccagcctgggcaacatgacaaaaccccatatcttcaaaaaatacaaaaaaaaacaaaacaaaattagcc

SEQ ID NO: 410433 - DNA, 201 bp, Homo sapiens
atggtagtaaatgtcatgattgacaagttcagagtgcagtggaaattaatccagtcagggaggatggtgatagcagtaatggtatcagggaaggcttcctrgaagcagtgactttgtgatttttatgcagaaacctaaagtggggtgaaggggaaggatgagcattcaggacagagggaacagctgtgagcagaccccaag

SEQ ID NO: 410434 - DNA, 201 bp, Homo sapiens
gtttgtgaaagagcatcagtgtaaagataaatgaggaggccaagcgcagtggctcatgcctgtaatcctagcacttttggaggctgaggcgggaggatcasttgagcacaggagtttgagaccagcctgggcaacatgacaaaaccccatatcttcaaaaaatacaaaaaaaaacaaaacaaaattagccgggcatggtga

SEQ ID NO: 410435 - DNA, 201 bp, Homo sapiens
cataccatctctgtcacaactattcagtgcagcagttgtcacgtaaaaacagtcagagacaacatgtaaacaaatgggcttatctgtgttccagtaaaacwttatttataaaagcaggcggtgggctgggtttggctcataggctgtgggttgccaaccctggtctactctatttcttttttgaaaaacactggtcacagc

SEQ ID NO: 410436 - DNA, 201 bp, Homo sapiens
acattattgtttaattcgtaaaaggttgaccctactttcaaggtaactgtcagttccaaacttagagacacaagtattatgttcacttctctaagagcacygttcttcattcaagcttgagatgatcgctccataaatgtagtgttgaaatctatacttgtggaaacccaggtcattgtatatctgttttcttcatatata

SEQ ID NO: 410437 - DNA, 201 bp, Homo sapiens
tgggtctggggtgggtgtgcctatgaaggagcagcacagggaaatctttgtggtgatggaatcgttctctagattgccgtggtggttacgcagagctgcaygtgtgataaaatgacacagagctacacacacactgcaccaacctcagtttcctggctttgacattgtactatggttatgtaagatgtaatcacagggtgg

SEQ ID NO: 410438 - DNA, 201 bp, Homo sapiens
gttttcttcatatatatttattatttattgtgtcagggaaaatacatgcactatctcatttaattttctcaaaaattgcaggaggtgggtgctaatgttaytcgcattgtacagatgaggaaactgcagctcagaggaatatgcccagtgtcttggagctcaagactggtagagatgggattggagcagagtctctgactc

SEQ ID NO: 410439 - DNA, 201 bp, Homo sapiens
aaaaggtctttcacacagggttttctgtccccctttaagggtgacgtttttagcctttcctcttcagaaggcatgaaaagcttcagccttggccggccacrgtggctcatgcctgtaatcccagcacttgggaagctgaggctggtggatcacctgaggtcaggagttcgagaccagcctggccgacatggtgaaaccccg

SEQ ID NO: 410440 - DNA, 201 bp, Homo sapiens
ggactccctaggactcagtccgcttggctgaaggatggtgctctgaataggctgctggggaggcatattgcttatgcaattgcttatgtaagctgagtgcrgcggctcatgcctgtagtccctgcacctcgggaggccgaagtaggaggatcacttgaacccaggagttggagaccagcctgggcaacaaagtgagatgcc

SEQ ID NO: 410441 - DNA, 201 bp, Homo sapiens
cacctgtagccctagctactcaggaggccgaggtgggaggattgcttgagcccaggaggtggacaccaggattttgctaggcaacacaacaaggccctgtmtctataaaaatagaataactgtttatgtcttcctaagagagtttttgggttttgtttgtgtgtttatttgttttgttttgtttgaaatggagtctcactc

SEQ ID NO: 410442 - DNA, 201 bp, Homo sapiens
attgaagtcagcaggctttgatttctcagcccgtgaaggatgctgggagtgaccctctccaaagtccccttagccgactggccatctgtcctctgcatctracagacagggccaccatcctcagccaaggtagctggtgtactcacgggggtgtggaaaggtgagcggcccacccgcctgggaccctccatctgcttttga

SEQ ID NO: 410443 - DNA, 201 bp, Homo sapiens
tccaaaccactgtctaggcggaggtgccacacctgccgagaaccactgccctaaaacagattcatggatgatatactcaaaataaccgcatttggcaattktataattgcatgctgtggtgggcagacaaatggcaccccaaagacgtccacatcctagtccccagaatctgtggctgttaaccttctatggccaaaggga

SEQ ID NO: 410444 - DNA, 201 bp, Homo sapiens
aaggtctttaaatgctattggcagttgaggccatgttttaagtcctcttagaaagacactatattgtgcttcataagatgatacaaaacatacatgagcckgttccttttatgggaaaatctgaagttaacagtgagattggggagtggggagggtttaacactttaacagctgtcctgctaagtgtgagagtaagtcagg

SEQ ID NO: 410445 - DNA, 201 bp, Homo sapiens
ctcttcccaagtaaagaccaccagatagcgtagatgtctggtgcacttggagattccacagaggggacagcacatcccttctgcccagtcatgcagctgarccatggaaggcagacgctccctcagagcaaaaaagccatgacaggggtggtggcctaaccagaggattatggagtctggagtcagattagacctgagttc

SEQ ID NO: 410446 - DNA, 201 bp, Homo sapiens
tgagccacaccctctaaggcacatagtaggtgctcaccaaatatttattgaatggatggactgctcaagattggcttaaaagcttgatacttttatgtagstgttaggttggtatgcattttaagatttgtgtgtatctgtctgtgtgtagcccagaggttaagagtggaagcacattgctttggttgcaacccttggctg

SEQ ID NO: 410447 - DNA, 201 bp, Homo sapiens
ttgagtgatataaaaaataatcactttcctagagtctgggagaactgaattattatttcccagctgccactaatctgcagggggaccttgcagcgatgttyccctctcagacagagactcaattttcacaaccataaaataatctaaggagtctcaagtacccttctagccctgatattctaagagtctgtgacttgatga

SEQ ID NO: 410448 - DNA, 201 bp, Homo sapiens
ggaataggtgttcaccattgctgtgtatgatagattctgatagttcgttgtctattgtaggaattaacaaacttttcctataaagggataataaatatttyaggatttcagctaggtcctgtggtgactactcaactatgccattgtaccatgaaaacagccataaataaacattaagtgatcaaatgggcactgctaggt

SEQ ID NO: 410449 - DNA, 201 bp, Homo sapiens
tcaaaagccatgcatttaaaacatctgtgcgtaagcagcaacacagctctgatgctggctttaggacctgggtcggggacagtgctgcttcacttgttggkgaccactagacaatcgccggtgggcacaagtgtgacagcctctcagtggggccacacccaggagcaccccaaagtgagaagcagcaaggacccacattct

SEQ ID NO: 410450 - DNA, 201 bp, Homo sapiens
ctcccaaagtgctgggattacaagcgtgggccacagtgcccaggcaagaacaaatttttaaaaaggaatcgctttcccattgtgcaatttaacaccatgtyagtgcaccgcctaagaccacgctggtaccaacagaggcgagagggtcaaacagcgaacacgctgggcagtgctggataagcctgtcagagcaggctctga

SEQ ID NO: 410451 - DNA, 201 bp, Homo sapiens
gactcatttttctcagaataacctggcggggagggtattattttctccatcttatagaactgaggctcagataagtgaaataacttgcccaaggttacacygctgataacgacatagctgggatttgaacccctggagcagataacacgtctggtgctctgactgggtagcttagtagactttagagctagatgggccctg

SEQ ID NO: 410452 - DNA, 201 bp, Homo sapiens
agactcatgtctactagacacagcactggcctaatttcagtgaagagggatttgaggcacagaagagaagggaagcaagttgaggctggaacctgcgtttyctaacacctgttctagtgcattttccacttggagcatcctcaccagctttcagtttggagaacagtttttaatacccaggacatcatcaccccggaggac

SEQ ID NO: 410453 - DNA, 201 bp, Homo sapiens
aaaagattcccaatgacctcatttgagcacctggatccagctgttcctgaagctagataccatgtgttattcccttatattagccaatacattatttcttktttacttaaagaagtttgaatggagtcttctcccaattgctataaactaatacaggtggttttgcatttactaagttgccctgcttcctctgatcacagt

SEQ ID NO: 410454 - DNA, 201 bp, Homo sapiens
gggagctgagtaataaaaccactctcaggcgtcagaggactcagattcttgtcccagctcccccactaacctgctgtgggaccttatacaggtaattttcrtcatctgaacttcaagtgactaatctgtggcccaggcaggagaggatgggggcgagagtgtggatttcaggatcagatgggccaagttcaacctctcaga

SEQ ID NO: 410455 - DNA, 201 bp, Homo sapiens
tcttagtaggggcgccttctcagtggggaggctgacacagggctgtggagacttggagccagcaatgcgccggccctcgcctcagagagcttggagcctcrtaggtgagaccaggcaagcacagatgtttccttgggactggattctaggccctgttgagggctggagggtaacctcttaggcttgcatagtatattacag

SEQ ID NO: 410456 - DNA, 201 bp, Homo sapiens
gggggtgagaaatgcaatggagaagaactccgccgagcaatggggcaggagtagtgagggaccctccttaaggtagggtggtcagggaggtctctctggcwgaggcctgagaggggcagggagagccgtgggcatgtctgaaaggagagcatgcttggtgggggatggggcttgagggaccaccactaggaggccagtgtg

SEQ ID NO: 410457 - DNA, 201 bp, Homo sapiens
ccacatctcaaggatgtgtcctgggacctctccagagggccagagcctgcccttactgattttccagggagctcaggactcatcatctctctgggagaaaytggtgccacccaggatggccttggttagtacggcatctcttcatgggctctgctcacctcttttggtttcagcacaatgcagctttcctttccattttct

SEQ ID NO: 410458 - DNA, 201 bp, Homo sapiens
ttttatgtaagaggttgcattcccaattatcttaagatgcaaagtgaaggtgttttgcccagggaaactctctatcaggagtcgttgcacatctaaacacrtgaaaaatgagacttcctgaaacattcctatttcaccctgtgacagttttgcacagctcatagagttcaattttcaaatgtcatcccactctgagagacc

SEQ ID NO: 410459 - DNA, 201 bp, Homo sapiens
gtgacaattgagggtctcagtcatggccactccctttagccagagcatgtcttcatcagttcaccacagtccccgcccctccctctagtacccccggaccygggggctcaatgtcacttgtcatcatggcgctttccctcccagttctataggggtgcagttaagagaaaagtgaagtatttcttgaaactgtgtctctat

SEQ ID NO: 410460 - DNA, 201 bp, Homo sapiens
aatatttgaagtcgtggaaatctatctttaaaaatacttttaacagcattattcctaatattaaaacttggaaaacacgaaagggagatacttgagttgtsatcatagcaaatgttcctataatatttagtgtgtgtcactgatgctttacatattctaattcgtttcatcttcatgactaccctctgaggcagatgtact

SEQ ID NO: 410461 - DNA, 201 bp, Homo sapiens
ctgggtggcagaacgtggatgttatctaggccagcctttgcattatacaggtggggaaactgaggctcagacaggccaaggaggagccccacatgggaagytggtctcagagccttggtgatacccccagatctcttgattccaggcccactttcttccttcttcatcagaggtcacaaatgggcaggctgcagccacctc

SEQ ID NO: 410462 - DNA, 201 bp, Homo sapiens
ctgtgccttgtaggatggttagcagtatccctggcctctccctccccagttcctctccctccccagttatgacaaccagaagtgtctctggacattgccarctgtccactgggaagtaaaatcactgccattcagaaccaccagcacagatgctaagatcatgggtggcatttttctttcctttttcttttctgtggtttc

SEQ ID NO: 410463 - DNA, 201 bp, Homo sapiens
gctggagtatggggacagggggccgtgcgtgggacatcgtgcttgagagctttgcagtttggccttttcttttctctaccggagatgggaggcctctgtcygtgtttctgctgtgttcaccaggaggccagtctggggcaattactgctccccatctcccaaaggagccacatcagcctcatagcagtgtctctagcttcg

SEQ ID NO: 410464 - DNA, 201 bp, Homo sapiens
attcagaaccaccagcacagatgctaagatcatgggtggcatttttctttcctttttcttttctgtggtttccaactttccttgaataggcatagatcgcrtgaataagtaggagcaaaggagctctcgttgggatgaccatgccactctcctgttcagaaccttccagcaaattcccaatacacttagcttccccagggc

SEQ ID NO: 410465 - DNA, 201 bp, Homo sapiens
agagagggaattagaaagttgggttcagttttaggcaaaagctgacctgccttcaaagctggagtatggggacagggggccgtgcgtgggacatcgtgctkgagagctttgcagtttggccttttcttttctctaccggagatgggaggcctctgtccgtgtttctgctgtgttcaccaggaggccagtctggggcaatta

SEQ ID NO: 410466 - DNA, 201 bp, Homo sapiens
tcctgtttattgtaggtcacccctactagagcatcatctccagggggactgagacattgtttaatttgctgttccatgcctcactcctagaacaacgatcrgcacatagtaaaagttcaataaatatttgtggaagaagggaaacagacagggaggaaggaaggggggcaaataagaaaaataaaatcggtaaatttagga

SEQ ID NO: 410467 - DNA, 201 bp, Homo sapiens
ttgagagagggaattagaaagttgggttcagttttaggcaaaagctgacctgccttcaaagctggagtatggggacagggggccgtgcgtgggacatcgtrcttgagagctttgcagtttggccttttcttttctctaccggagatgggaggcctctgtccgtgtttctgctgtgttcaccaggaggccagtctggggcaa

SEQ ID NO: 410468 - DNA, 201 bp, Homo sapiens
atgccaccgatagccacctctcctcacagtttcgttctgctcgagactgtgagttcatgtcaatcctgagctgcgtccccagggaaataggttctgctaayagtcagttcttactacgaggcattctcagagccaaggggaagctgggttggtggtctgcagctgaaaatctttggcagaaaatttactcaaggtttttca

SEQ ID NO: 410469 - DNA, 201 bp, Homo sapiens
tccagcggttaacgctggacacacatcaggtctgctcagtggatctgtcacccacatttttccctgacaaatttgttggattaacctcatgaagatgaatrttccacagtagaactcacacttaaaaaaataggagtcagtggcataaaggctttgatttttctgtggacacaggcttaaatccagattctaccgcttgat

SEQ ID NO: 410470 - DNA, 201 bp, Homo sapiens
ttcttttgctgcattattcatttccttccacactcgttcatgcagtcatttttttttttttttgagatggagtttcactcttgttgcccaggctggagtgyaatggcgcgatctcggctcaccgcagcctccgcctcctgggttcaagcaattcccctgcctcagcctgtagctgggattacaggcgtgagccaccaggcc

SEQ ID NO: 410471 - DNA, 201 bp, Homo sapiens
agtctttgaaatgcatgtttcccctaaaataaaagggaagtaatgggaaggaaaaaaatgaggttcttgctcccctcaacaagccttaatgaattggaaamgaaaaacaaaatatttctcatttttctcctgctactcgatcctgccaaagacgcacggcccctcccaaccctggctttgaatggtgcccactcagaacct

SEQ ID NO: 410472 - DNA, 201 bp, Homo sapiens
acttgcagcctttgttctgctgggttctttttccttcctcaccaggttatatcagacttccagggagctcacaaagcacccagggattgggtgagagtccrtggacccacgagtcctctgtccacttacgacactgctgacatgtatctggttcctgtccctaggggtgcttcaggtctggtgggatctggaatctcagtg

SEQ ID NO: 410473 - DNA, 201 bp, Homo sapiens
tctgaaggcactgaaggcgaggctggctcagccgtagtctagagaattctggagttctctagaacagaggtttttaactaggggtggtactgcgccctccycaggagacatctgggagtcttcctggttgccacagtgcctggaaccaaccactggcccataagggcagggtttgagtaggtggctaatagtgtctgcaat

SEQ ID NO: 410474 - DNA, 201 bp, Homo sapiens
ctaggtgcttccacacgtgctgtctgatttaatcctcactgcaatgttaggtcttagagggatcaggctggacttgaaggggtcagtggcccgaaagagcrtggtgtgaaagctgtctattttaggctttatttgactgggagaagttctgggtcagacagagggttgcctccaagctgtcctctgtgactaaagtcaaga

SEQ ID NO: 410475 - DNA, 201 bp, Homo sapiens
agtgcggtgtctataagctattgatcagttgagtcattttaggtatcgagagaatgttgggcagtggtcgatagcacaggccctggactcagacagatctrgcctgagcctgagtcagtccatcactcacggactgccatctccagcaggggtctgaccctctcaacgtcccagacatcggagacagcagttaactgttcc

SEQ ID NO: 410476 - DNA, 201 bp, Homo sapiens
atcttaattttggtttgtttcattttgattttgtcttcattttgaagtatttttttgctggcatagaattccacagtggcagatgaaattccattgttttstggtttccatcaattctgctgagaagctgcttctcagtcttattataccttctttaaagattgtcttttattccccctctgactgcttttaagattaatt

SEQ ID NO: 410477 - DNA, 201 bp, Homo sapiens
ttgggattcacagaacttcttgattccatgacttgatatctgtcatccatctggcaaggtcttctgtcagtttctctttaaatattgtttctgacttgctstctctctcctctccttctgtggctcctattacatgtgtgctagatcttttaccatgtaccatgtttcttttatgctcttttaaacctgtttttcaacctt

SEQ ID NO: 410478 - DNA, 201 bp, Homo sapiens
aaagagcctagatttttttagcagcattctcatcttaaatcaatttttttattatattatcacagttgctagggactccgtgtttgacaacttcaatagcwgaatctcgtgaggtttttgtttttgttttttgtcttggtttttgatcatttggttttgtctttttgcatgcctggtaatttttttattgtgtataaaaca

SEQ ID NO: 410479 - DNA, 201 bp, Homo sapiens
gctgccctttgctgaaatggggacagtggagggaggagcaggttgggaaaggagatgggagcacctcgtgtggacctggcattgagccaggtgtttgaatrtatgatcatctccttctgtccattttatcacgcccattttggaaaggatgtgacagagagttgaggttaatcagcatgcccaaggtggccctgctggtac

SEQ ID NO: 410480 - DNA, 201 bp, Homo sapiens
tataacttgccaacccctgacctttttgtcttccacatttttcttcatacttttgtgttcctaaacagatgtattcaggtttggtgtttagtttggtttargttttttgtgggagcaggtggcaggaagaatcactgattgttttttaaaaataatacattacacctgcttagcatctgattttttgcccatcagtgatat

SEQ ID NO: 410481 - DNA, 201 bp, Homo sapiens
gtagatttaagacagaaaagaaatctttcctatatctagatctccattagaagtatgaaaatgaagtgtaaaccaaggtggtccttggtatttacaaaaargagaaagcatctgtcttcaggtaacacagggtttctcaactttggcactattaagatttggagctggataatttgtgtgtgtgtgtgtgtgtgtgtgtgt

SEQ ID NO: 410482 - DNA, 201 bp, Homo sapiens
aaaaaaaaaggaaactgaagaccttgctgtgttacctgagcccaggaacgatgacacccttgtagcaatgaggatactcagataacagtttctaataccaygctgcaagaaaaaggaaccagagctccatggagaaatggctgattctagggctgggccaagaactatatgattatcccagagcatcttttagcaccgtaa

SEQ ID NO: 410483 - DNA, 201 bp, Homo sapiens
tccattgcataggtctttctccctatagtgtctcagaggcaagtccaatcagcaggtagatgagaaaagagagggaagggtctggtatccaaggtcttaayggccagccctacacattgcacacatctcttctgctcatggtccattagccggaactcagtcactggctggacctaactgcaaggagactgagaaatgcag

SEQ ID NO: 410484 - DNA, 201 bp, Homo sapiens
ggcactccagccaagcataggacatgcgctgggcttcagaggataagtgagagatgaatcaggatcactaggagtagaagggttaccctggcaatgcacgmattcccaggcccctgatggtcagcctggatttctttttctgctctgagcttttgctcccgttgctgcctgtattgaactttctcatgctccatctagggg

SEQ ID NO: 410485 - DNA, 201 bp, Homo sapiens
gtggagctgtggatggagtgagagaaaggtagatttccaaagtgaaatcggcagcattttctggaagtgtgggtggactggttccttatatcccccaaaaytgtacctataggtatgccttctccacccctctcctcctggactacagtgctgcttatgaaatttgtgctttttccaggcacgatgttatactctttgtgt

SEQ ID NO: 410486 - DNA, 201 bp, Homo sapiens
gcagaaggagatttcacacacacacacacacacacacacacacacacacacacacacacacaagaagacaatgtgaagacaggacagagatttgaagatgktggccttgaagcttggagtgatgcagccacaaaccaaggtttgctggtggacaccagaggctgaaatggattctcacctggagcctctggatggaatatg

SEQ ID NO: 410487 - DNA, 201 bp, Homo sapiens
tcttgtgaataaaatgtataagcttctcaacttgcaatttgtcccaaactacattccctgctctccctaccaactgccttcccagtggtcatgagctctaycatccactcagagttcactctgaaagcctggaagacttgctggcctcttcccaatccctcccctgctgtatcaaagttgatcgctaagacttatcaccat

SEQ ID NO: 410488 - DNA, 201 bp, Homo sapiens
caggccctactctggacgtggggaatgcagtcaagaacaaaaatgaccaaagtctccttccttgtggagccacagttaagtaggagagagaaaataaacayatatgtatataaggtacgcagaatatcaaatgataagtccatggagaaaaaaggtcaagagaagctgacgagaacatgcccaggggaggcgagaggaatg

SEQ ID NO: 410489 - DNA, 201 bp, Homo sapiens
ctcagagttcactctgaaagcctggaagacttgctggcctcttcccaatccctcccctgctgtatcaaagttgatcgctaagacttatcaccatggctccraaatagctcttgatccactggaacactttattctcaccatcacaccctcgcttgcagtgatggcattttttgcttaagctagaactcgagtctggtaaat

SEQ ID NO: 410490 - DNA, 201 bp, Homo sapiens
ttccatgtctccacatgagaagttaccgagctaagtcctcaacaggcagcctacaagccattgatgttagaatctgtccaggtgaggaagcagcagcctgygggagggtcttgcccatggccacatggccagtctgtggcagagtggggactccccaccctctttcaagacgagtgagggatcttgggtagcatgggtcag

SEQ ID NO: 410491 - DNA, 201 bp, Homo sapiens
ctgactggatccaggggatcagatcgcatgctcatggcatccccctctccagctcgcagccctgctttcctcagcagctcccggcttaatccaccattcarcagccccagggaagagacagcacctcttccaaaagtgccagccaacgtccccgggctggttcccattggcccaccttagaccacatgttcatccttgaag

SEQ ID NO: 410492 - DNA, 201 bp, Homo sapiens
tttggagtgaaaaagaagggaaaaccgcctgagctgtgaggttcaagctggaaaatagctcaggtttttccagatgccttaagactgagccaaagagaccrgctttccatgtctccacatgagaagttaccgagctaagtcctcaacaggcagcctacaagccattgatgttagaatctgtccaggtgaggaagcagcagc

SEQ ID NO: 410493 - DNA, 201 bp, Homo sapiens
attagccaggcgtagtggctcaccatgccagcactgtgggaggccaagtggggaggattgcttgcattcaggagttcaagaacagcctgggcaacatagcragaccctgtctctacaaaaagaaagatcaaaaattagccaggcatggtgccacatgcctgtagtcccactactcaggaggctgaggtgggaggatcgctt

SEQ ID NO: 410494 - DNA, 201 bp, Homo sapiens
tgatttccattcctttgggtatatacccagtaatgggattgtgagtcaaatgttatttctgtctttaggactttgaggaatcgccacactgtctgaggaamcttcatttgttgggaaccacccaacacagagtagatgctcaggaaataaatatgcagtggatgagtaatatgtgcagaatgacctgactgagtcacaaag

SEQ ID NO: 410495 - DNA, 201 bp, Homo sapiens
actacagaagccagtctctccacgttcaaatccactgtctaccacttactagccttgggcttccttcacctctctcagcctcagtttccccattgatgacrtgaaaataacggactctgcataacaaatgcattgaagaccacgagacacacacagtgattgttaaaagctattgattacctgtggaagaaaaattaagtc

SEQ ID NO: 410496 - DNA, 201 bp, Homo sapiens
gctaaagtcctcaggccaatgcccattggctcataatcatccttgaatcaatcactatgattctagccagggatgggttatgagatcaccctgaaagaccsataatgggtgttatttttactaaaaattattaactgctaatttacggatgtgactgctcattctcagagagattgggtatctccacaatagcatgctgcc

SEQ ID NO: 410497 - DNA, 201 bp, Homo sapiens
ccctgtccccaccaaagttaaaaggaaaactgaggaatgccagtaagtcaacagaattgcctggatgtgtttcctaagactgtcataacaaagcaccacartctgggtcactttgaagaatataagtttattgtctcacagttctggaggatagaagtctgaaatcaaggcattggcaaggttggtaccttctggaagctc

SEQ ID NO: 410498 - DNA, 201 bp, Homo sapiens
gcacgcacacgcacgcacgtactttccttcaattgctccccatctggcttatgaaagtgacagagaataaagcttctctcttaccctctcccaacccccaygtcgttgtcctgcacctggctggccatccagggctcatctcttttctctgaaattctccaagcatccctgtcattgtcctgcacctggccggccagccag

SEQ ID NO: 410499 - DNA, 201 bp, Homo sapiens
tttctcctaggctgaccggaggggtgtcccgtcccccgctttccctcgacggttctgtaactccccagaaggccatcccagctggcactttagttttgcgrttcggggatttcttttctgcctcatgcctggaataatttgtggctccatttacaagagcagagcccttgtgttcaagcccgctcgggtcccagaagcagt

SEQ ID NO: 410500 - DNA, 201 bp, Homo sapiens
tcagtgcacagctggactgtgggtttctagctgccaacacctgtgtacctttacccatgggccttctctcaccaccagagagcctgctttgcctgcctgcrtggcaagtccaaagcaccagagtgaatgcctctgttccctggcaccagccttcagccagtgcctcacaggagtgggtgtataaataccactgctccctcg

SEQ ID NO: 410501 - DNA, 201 bp, Homo sapiens
tctgttccctggcaccagccttcagccagtgcctcacaggagtgggtgtataaataccactgctccctcgctctacccctccaccccgtgggatgacggcragtggcgttttctacactgactcgcacagtgcctcagcaggactaagccccagttgcccatggtggtaacttgcttgatgacacaccctgtatcggctcc

SEQ ID NO: 410502 - DNA, 201 bp, Homo sapiens
tgctcttaaccacgtaacatgtccctagtgatccatgtgactgtctcgagggtaaaaattaaaagcctctggaatgaactcttctgctgcctcttagctcrtggagcacagggactgggtctgatgtgttcacagctttatcccaatacccagcacagtacctggcacctccactggacaaatatttgttgaataaacaaa

SEQ ID NO: 410503 - DNA, 201 bp, Homo sapiens
ctgactcgcacagtgcctcagcaggactaagccccagttgcccatggtggtaacttgcttgatgacacaccctgtatcggctccttctgtttctcttatcrcatccccagtcccctactggtgtttctcaggatcatctcccaaataaactgcttgccctggaatccttgtctcagtgtctgctcctagggagccctcatc

SEQ ID NO: 410504 - DNA, 201 bp, Homo sapiens
caagggtctgcccacggctccaggtaggcatcttccagggcttgtgtgcagcaggagagaacgtctcttctccagcagttcatcttgggcctcccgttggycccaggtggctcacgtgaccaccaccctggagccaatcactgtagaccgaggaatgggagatgctaattgccaggctcagagcttgttagtagggtcagt

SEQ ID NO: 410505 - DNA, 201 bp, Homo sapiens
tgtgatccatatggtctttattacaactactcagctctgccattgtggcgtgaaagtagccagactgaatgtaaacgaatgggtatgtctgtgttccaatraaactttatttacacaaacaggcagtggaccagatttggtccatgaccctgatctagatgaagggcttcctcaccagggcccaccccaagagaaatgctc

SEQ ID NO: 410506 - DNA, 201 bp, Homo sapiens
caatttttgccttcctgtaattaggcaactgcaaaaaagctctgcttaatttcttgcctttatagctaccccctttttgcttggtttctctgcctctcacygcacccagcttggatatcagcaaatgcctcaaggctaataactttcaacaatatgagactcatacctctgtggttctcatatttctacaatctttgctcc

SEQ ID NO: 410507 - DNA, 201 bp, Homo sapiens
ggcaagtgtcttgaggggaaaattgatagaggtcaaacttggtctgtttttcatctctctgggatcttgttccctcaggacctgccttggttgacttccartcccttaagacaatattttatagctgttatttttgatcatgatagtgaggttgactaaaaatacaagctatcccgtcgtagctgggaggtgcactcagtt

SEQ ID NO: 410508 - DNA, 201 bp, Homo sapiens
aaagaaattattaggtaaatatgtaaggattttttgttctacaaaagataatagaaataaagaaaacagacaaatgaaagactaagagaagaaatttacarcattcgaaaaacacattgaatacctagactctgtaatgcactccagcaaatcagtaagaaaaaaaaaatagaaaacccagtagaaaaatgggcaagcata

SEQ ID NO: 410509 - DNA, 201 bp, Homo sapiens
gaggggtctggactataattggtatcatttatttgacacctgccccttgcctcgtaacacacctgcaagcagatagaataaccatattttgtaattttttwaaaaacactgaagactgtctgggtgcagtggctcacgcctgtaatttcagcactttggaaggcccaggtgggtgggattacctgaggtcaggagtttgag

SEQ ID NO: 410510 - DNA, 201 bp, Homo sapiens
tatactccataacacagaaatcctccaccttggctataaatacattttaggaatgtgtgtgtatacatatatatagggagagatactgcattttaaaaaawgaagatgaatggagatgttcattgcagcattgtttataaggtggctgagagataaaggctacctagctgttcaccaccagggcaatgcataaattcaata

SEQ ID NO: 410511 - DNA, 201 bp, Homo sapiens
tcccaaaagatgagaactggcatgcaggctccagcttactctattccccacctctccctcttgtcctacacttgttccatatcactcatttacattacccrcaactatttaagtgtatggcccttgcaataaacatttgctttttatataagaaaagtattccccccatactacatttcactatgtcaggcagcttcaggc

SEQ ID NO: 410512 - DNA, 201 bp, Homo sapiens
ccaagtccatcaagtaattgatagcaaaagtggcacacagccatggcagagttcatgagggaagtttcagaaacacgaatctgatgatgtgaagctttccytgtgatctattcatttaaaataaaacattttagttttaaaactcatccccgcaggctgcgtacgacaaattccacccaaatacccagaaccttttactaa

SEQ ID NO: 410513 - DNA, 201 bp, Homo sapiens
ctttagagttctgtctctatcttattatgcatttggaaaagatataaaaagcatttgaaacaaatggttttacaattttttactgcttaagacaaaaatgrtttaaaaaccaagtccatcaagtaattgatagcaaaagtggcacacagccatggcagagttcatgagggaagtttcagaaacacgaatctgatgatgtga

SEQ ID NO: 410514 - DNA, 201 bp, Homo sapiens
agcaaggttctatgacttgcccaaggtcgtgtggctgggctcccgtcgtccagctcttaaaccctctgctctagtgcaggggaggaggcaaaccatgtctmaaaggccaaatccaatccactgcctatttttgtaaataaagtcttattagaacacagtcatcccattcatttatatgcagctgctttcacagttcaatcg

SEQ ID NO: 410515 - DNA, 201 bp, Homo sapiens
gcacattccttactgttcttcaggtagctaccgtttggggactttagacattctggaagaatctgttagtctctgaagggcagacttctttttaatgatgygggcaccctttccacattaacttgaaatgtacatggacattttttttctttagagttctgtctctatcttattatgcatttggaaaagatataaaaagca

SEQ ID NO: 410516 - DNA, 201 bp, Homo sapiens
caaggttctatgacttgcccaaggtcgtgtggctgggctcccgtcgtccagctcttaaaccctctgctctagtgcaggggaggaggcaaaccatgtctaawaggccaaatccaatccactgcctatttttgtaaataaagtcttattagaacacagtcatcccattcatttatatgcagctgctttcacagttcaatcgca

SEQ ID NO: 410517 - DNA, 201 bp, Homo sapiens
tcagaaccttccagatctgatatgctatatgagcaaacctaatctaagttgtaacattgtagtcttcaccaggttttacagatggcggattgtatcactgsgaatccagaatggggagcccaaattcctaggttcaagtcctagttctgcctcagtttccctattcacaaaatagagacagtcctcctactgcataaagtg

SEQ ID NO: 410518 - DNA, 201 bp, Homo sapiens
cttggtctcaagcgatcctcctttctctgcctcccaaagttttggaattacaggcatgagcgaccgtgcccagtcagagcagattttgaatgtccccaacrtaaagaaatgataaatgtttgaggtgataggtatgctaattaccccaatacattgtatacctgtatcaaaatatcacactgtaccctataaatatataca

SEQ ID NO: 410519 - DNA, 201 bp, Homo sapiens
atgaggttcttgctcccctcaacaagccttaatgaattggaaaagaaaaacaaaatatttctcatttttctcctgctactcgatcctgccaaagacgcackgcccctcccaaccctggctttgaatggtgcccactcagaaccttccagatctgatatgctatatgagcaaacctaatctaagttgtaacattgtagtctt

SEQ ID NO: 410520 - DNA, 201 bp, Homo sapiens
cgaaaataccagagtgtgttgcacatgaggtcagtgtggttttttgaaacttttatttgaagttttataaaggtgtacactgcactgcattgcaaaacagrtttcttactgtgagtcttggttgaagaattcgaaagccactgtttttagtccctgtgaaagtttggaatttagcccaaggggcagtggggagcaattaaa

SEQ ID NO: 410521 - DNA, 201 bp, Homo sapiens
gtctgcaacatgggaggatcctgggaggttgaaaggcaacatttcaagctttgcctccaacccctccctgggatgaccacctacttgtcacctgtcctgtracgcaggtatcccaggcatggcagataatagactctgattttaacacttcctgtttgccagacactctgctaaatgctttcaaaactcatgtaatgccct

SEQ ID NO: 410522 - DNA, 201 bp, Homo sapiens
tgagttaataaacatgaagtgtttggaactacggctggcaagtggtatgaattatatcagtgtcagctacagttattattattatttatgaatttgacctraagcaaattacttagactctttgggatgataataataatagtaacaacaataataaaataacttttcatagtgccattgtgagaatataaatgaggcgat

SEQ ID NO: 410523 - DNA, 201 bp, Homo sapiens
gtgaccaccaccctggagccaatcactgtagaccgaggaatgggagatgctaattgccaggctcagagcttgttagtagggtcagtcccagccaagccacrtggactgagagtcatggggagacctagggaaattaaataactcacaaacacctgtaaaaactgttacagtgactggtgtgtgtgatagagggccatgggc

SEQ ID NO: 410524 - DNA, 201 bp, Homo sapiens
gagagaaagctggtgcccatggcggctgggactggcaagtgaaaacttgaaattccatgaatgtagcacctggtgattctttggagaactttaaaatgcarcatgagtataaactgttcttaacaaccaggatatgaacgaggcaacctcttacagtctttttttctttttcttttttgggatgggatatccctctgttac

SEQ ID NO: 410525 - DNA, 201 bp, Homo sapiens
ataggacttaccagtgccccaggcttactcggccgacagcaactctctgcttccctcaatgcgttgtgcagaatgaggaggaatgtagagaatcagacttyccaaacctcagcctgggtactgactttcagcctcgagattaagagcttgagtccaggagccaggctgctcaggttacacttcccctcagtgttaacctac

SEQ ID NO: 410526 - DNA, 201 bp, Homo sapiens
ttattcattaaattaaaacacatgccacacataaaacaacatggcatcatttataaggaaacatttacatatttaatatgtcagagtcattgtctagggcrtggtggaaaataaggataaatgggaacttttaaaaatcttgttggaagaaggtgatggctcaaataagatttccttcctccctgtctctctctccctctg

SEQ ID NO: 410527 - DNA, 201 bp, Homo sapiens
ccagccctatataccggggtagccccaccccattaaagctggttattgcgatgccatagattattcaaaatttaaattaaaaaaaaacaaatgccagaaaycttttataagaaatttcccaattaaaaagacttaaattggtagcaacaaatttttaaaataaaataaaacttactgtgcaagccaaagcacatgtacaga

SEQ ID NO: 410528 - DNA, 201 bp, Homo sapiens
tgaaaacttgaaattccatgaatgtagcacctggtgattctttggagaactttaaaatgcagcatgagtataaactgttcttaacaaccaggatatgaacraggcaacctcttacagtctttttttctttttcttttttgggatgggatatccctctgttactcaggctggagtgcagtggtggcatcatagccttgagct

SEQ ID NO: 410529 - DNA, 201 bp, Homo sapiens
tatgcctggttcagtaagagcagtgcctcggcttctgcacctgaaaccgcactaggcatataggacttaccagtgccccaggcttactcggccgacagcarctctctgcttccctcaatgcgttgtgcagaatgaggaggaatgtagagaatcagactttccaaacctcagcctgggtactgactttcagcctcgagatta

SEQ ID NO: 410530 - DNA, 201 bp, Homo sapiens
tattcattaaattaaaacacatgccacacataaaacaacatggcatcatttataaggaaacatttacatatttaatatgtcagagtcattgtctagggcakggtggaaaataaggataaatgggaacttttaaaaatcttgttggaagaaggtgatggctcaaataagatttccttcctccctgtctctctctccctctgc

SEQ ID NO: 410531 - DNA, 201 bp, Homo sapiens
tttcttttttgggatgggatatccctctgttactcaggctggagtgcagtggtggcatcatagccttgagctcctgggttcacgtgatcctgccgcctccrcatcccaaagtgctgggattacagggatgagccactgtgcccagcataccgttcattcatttgttaattcagcaaaatactattcatcacatattctgtg

SEQ ID NO: 410532 - DNA, 201 bp, Homo sapiens
aagagttcgcatctgctcaaagtgtgcagtaactctgctgtgtgtacaccttccctgtacacctaaaattatttcaaaacaaaaggttcacctgctttcargctaccatttaaaacagaaccaccctggggtagatgggctttaggaatatttaacatatttagatctgaggaatacgcaatttcttttccagtgagaatc

SEQ ID NO: 410533 - DNA, 201 bp, Homo sapiens
cataaacacattcctgctctgcttaaaatcaacaaatgctgttttggatgtgtaagagctcttaaggatgacagcaacactcagtaaagtaaataagctaygtgactgaggccagaagtgtcacactgccgtctctttccttagcaggcttttctgataatacatatgacatagctctcaaatgcaaatgcctatagggac

SEQ ID NO: 410534 - DNA, 201 bp, Homo sapiens
cagttagggcattggagttgaactcatgtacatgaatctatgggaggaacttcatcgagaaaaaggagtttataatcgtcatacatttttaatttacaagratttgttctgagactgcctgagatcacagtttcctaagctgtgtgtccttgagccagttgcttcacttctctgtgtctcatctgtatagtgggaagagtg

SEQ ID NO: 410535 - DNA, 201 bp, Homo sapiens
ttttgtttttaaccacatttggtcagttggctaacaatttgctgcttctaatactctcatagcatctggatatctggaaactagtgatattttttaacctyattgtttatttttttaacctttcattatttgcacataccgaaaagaatgaagggaatgagtttagataagatgcaaatttctggcacctgtagccagata

SEQ ID NO: 410536 - DNA, 201 bp, Homo sapiens
aatctatgggaggaacttcatcgagaaaaaggagtttataatcgtcatacatttttaatttacaaggatttgttctgagactgcctgagatcacagtttcytaagctgtgtgtccttgagccagttgcttcacttctctgtgtctcatctgtatagtgggaagagtgagtactcacttttgggttgttgtaaaaattaaat

SEQ ID NO: 410537 - DNA, 201 bp, Homo sapiens
aagaaaacaggcacccaggatgcatgtatacgtggggacattttaggactcaacatttatataaacactggagatatatatataatatatctctatatatstaatgtatatattatatattatatataatatctctatatatctaatgtatatatatacacattagatatattatatattatgtattatatatcgatatat

SEQ ID NO: 410538 - DNA, 201 bp, Homo sapiens
cacgtggtataacaagttgtgacttgtgcctgtgttgtcaacagagttttagccccgtccagacatgaaaaagaatggagccccgaagatgattcacctcyggtctgcgatgggcccaagctgtccagtgctctcctcttgctaaacagaccatactccctggaggagttaatggctggggtgtggagagaagaccggtag

SEQ ID NO: 410539 - DNA, 201 bp, Homo sapiens
tttcttgacccaaaatgagaaaacacggggaattctcaaaagctttttacaggctgctattacgagaagagaagccaaaccaacatgtattaggtcatgcrcttgaagtgcataaataagccctatgaaggtcaccaaacagggtgaaaaccactagttctcgttaccttggccacctctaaattcctgcctgttagacgt

SEQ ID NO: 410540 - DNA, 201 bp, Homo sapiens
taagtgacgttgcaccctcagtgcatctttccaggggctgcacgatgctgatgtcttattattggtgatgttaaccttgatcatcatgctcgagtgcctcrtaagatcacaaatcctgtatctgtctgtcccaatggggcaaggagtctcgtagaaatctgcatggttctcaggtatgcctgccggagagcttggctttct

SEQ ID NO: 410541 - DNA, 201 bp, Homo sapiens
aacctctacgctaaaagatgttttcctgccagtcacctgggtcgctctgtgtccttgttcaggttaacgtttctgaacctctctttcctcttctgtaaaaygaggggacagtattacgtatctcatgggttattttaaggattaaatcaaccagtgtatggaaagcagctaacagtgctgagtgcataatgagcacttgct

SEQ ID NO: 410542 - DNA, 201 bp, Homo sapiens
aagaattaatcccagagttaagaaaacacagcctgttgacagaaaacacacacacacacacacacacacacacaccacaattcttcactcactcccaaccytcttccctgatctccatcccccaatgtcataacagcttcctgaatggcccacttctccccactatcatttgtggcagttcaaacagtcctaaacatacaa

SEQ ID NO: 410543 - DNA, 201 bp, Homo sapiens
agcctatgccggactttccctctcgttgagcactggctgccaaggactcatcacagcacgttctgcatcgcttcgccattgcagtgtatgcacggtgcacrtggctggcatcgcagaacgccatcaaaacagccccataggcggccatctgctgtgaagaaatcagaagtatgtgcaccacatacatctaggtgcattggg

SEQ ID NO: 410544 - DNA, 201 bp, Homo sapiens
tgtccttgttcaggttaacgtttctgaacctctctttcctcttctgtaaaatgaggggacagtattacgtatctcatgggttattttaaggattaaatcarccagtgtatggaaagcagctaacagtgctgagtgcataatgagcacttgctcggtgtgatgatttgacctacacggctctttcttgtctgttttcagcta

SEQ ID NO: 410545 - DNA, 201 bp, Homo sapiens
aggtgtatgctgtgtgtgtgtgtgcaaaggcttggggagaaggattggtgtcacgtgcggggcagtgtaaaaaacttaactgcttcccacctgggcacaaratgaaaagaaagactgcctggcctgacataaattccttgggagagaggagaacctgctcccccagagacttttgataaagggagaattcgcctaatgatg

SEQ ID NO: 410546 - DNA, 201 bp, Homo sapiens
caccctcagcccctcctgactcatgtcagctccacagaggcagggatttcatcagtatcctgcttaggacagactggcacacagtaggtgctcaggaaacrtcagtgaaacgattgaaaggagtcaccgaccttgctctgttgttttcctttttggcggaggataagctaggataaccacagctcggggctcagcatagtg

SEQ ID NO: 410547 - DNA, 201 bp, Homo sapiens
acgttgttggatcctccgtgacaagatgactcctttcccacaaagaagaaaccgtttccttattttttcagttacttttccaaagacaacttgcatcgggygcaagagagcagagttatgcagaaatccaaccgtaaccagctcagagcgaggactcattctctctccttccaccagatgttttttaggtgtcctcagctg

SEQ ID NO: 410548 - DNA, 201 bp, Homo sapiens
gaggccaggagtttgagaccaacctgggcaatatagcaagatcccaatctctagaaaaataaatatccaggtatggtggtgcacacctgtagtccctgctrcttgggaggctgtgggaggagaatcaattgagcccaggaattcagagctgtggtgagctatgatcgtgccactgcaccccagcctgggcaacagagcaag

SEQ ID NO: 410549 - DNA, 201 bp, Homo sapiens
cagtgaacatcatatatttgtgccattgacgtagtcattgtttaaagcttcccacattttctttaccctttcctttctctgtaaatttttgtgaaaccatragagttacttgcaaacatgatgattcttcaccccaaaatacttcagcatgtgcagtagtatctattactgcataacaagttaccccaaactttaatagat

SEQ ID NO: 410550 - DNA, 201 bp, Homo sapiens
gcaatatagcaagatcccaatctctagaaaaataaatatccaggtatggtggtgcacacctgtagtccctgctacttgggaggctgtgggaggagaatcarttgagcccaggaattcagagctgtggtgagctatgatcgtgccactgcaccccagcctgggcaacagagcaagacctagtctcttaaaaaagaatgcaaa

SEQ ID NO: 410551 - DNA, 201 bp, Homo sapiens
gcagtgatgcaatcttggctcactgcaacctccgcctcctgggctcaagccatcctcctgcctcagcctcccaaagtgctgggattacaggcatgagccaycgtgcccggccgattgccaggaattaaatcagtgctggcacatagtaggttctctgtagtatttgttgactgaataagtgacttaaatccctttgattag

SEQ ID NO: 410552 - DNA, 201 bp, Homo sapiens
agaccaacccaggtactgtgtgggaggggactacacgggggtgtgaagaccagggaggcagagaccactggagtatcttggatgctggtgaccacagtgtrtttctctgaatgatgaggacattctcctacaaaacaaccgtactatgaccacacattaatactgtactactacctaacattcactctgtattcaaattct

SEQ ID NO: 410553 - DNA, 201 bp, Homo sapiens
gtaaaaaaacccaaactgtgaataacctggatgtacattggtggggggatggttaaataataaactctgctacattatttcagtggaatactatgcagacrttgaagaagaagcaggcggctccatgtgtactgatgtcgaaaactgtccaggatgtatttttaaatggaaataaaaacaaacacaacagagtttttgtta

SEQ ID NO: 410554 - DNA, 201 bp, Homo sapiens
agtctagatccattccactttcttgacataagaacaggttgattgcccttttgggaaacactccttccccactctcagtccacctagttcaggaggggccrattctgatgccccagccatgggtaggcttatggctcagatccagctagtgaacactcagcattgccctggtgacagcgattggttcagggatcagcatgt

SEQ ID NO: 410555 - DNA, 201 bp, Homo sapiens
tataatatctatatatataatatataatatatctaatgtgtatatatatacattagatatatagagatatatatatctctctccaatataaagatataaayaatagagctgatttgtgtattagcccattttgcgttgctgtaaaggaatacctgatactgagtaatttatttcaaaaagagatttatttggctcacggtt

SEQ ID NO: 410556 - DNA, 201 bp, Homo sapiens
tctttcccagaagcccccttggccaaaactagataatatgggccattctgaagaaggatccagcatcacatcctgcaagggaggccaggaatgcaagactyagtcttcatcagcctgggcagagggaagctatcaggggagcgaggaatcaggcatgcctgttgggaggccaagtggtatctgccacaaaccgctgctccc

SEQ ID NO: 410557 - DNA, 201 bp, Homo sapiens
tagtctttattctgggtagctgagtgccctgctaagaatcagttgtttgtagaagagagaagagaaagaatactggggatcacctaacaatctctaccacrgtgtactcaaactgtgaatgataattagtacagatcagtgggactatggggaacttatcttttcacattatatgttgctctgactgttttaccattagca

SEQ ID NO: 410558 - DNA, 201 bp, Homo sapiens
tgatgccccagccatgggtaggcttatggctcagatccagctagtgaacactcagcattgccctggtgacagcgattggttcagggatcagcatgtgaccsaagctgggccaatcagaataattcctgaattttagctgggactgttaaggaaaaggcaccatctcaccactagggttgcagagctggtagggtcagatta

SEQ ID NO: 410559 - DNA, 201 bp, Homo sapiens
tgctaagaatcagttgtttgtagaagagagaagagaaagaatactggggatcacctaacaatctctaccacagtgtactcaaactgtgaatgataattagyacagatcagtgggactatggggaacttatcttttcacattatatgttgctctgactgttttaccattagcatgtgtattttctcttttgtaaagagaatt

SEQ ID NO: 410560 - DNA, 201 bp, Homo sapiens
gagccatcttttctagcagcttgcaggagaggcttcctgagaatgaactcaaggtggtagaaagcaaacctgagtgatagagatggggggaggggagacaragagagataatgactttatttttatttttttattttttttcaaaaatcccttgatcaagctatgtctgaagctaactacccctaggggttccagttatgt

SEQ ID NO: 410561 - DNA, 201 bp, Homo sapiens
tctaaactcctaatgaaagaattgattcaggccacaaacattagtggatgaaaccatcagatcggaggttaatggggaactttataatggaggaagcaggyggtgctacctgaacacaagggccctcgtggtgtcactaggagggacacacctgggactcctgatgagatgcaatggtgagagcccagcacaaattccaga

SEQ ID NO: 410562 - DNA, 201 bp, Homo sapiens
aggactgatattcttagaaattagagttgttttgtctcctctatttgtaagagtctaacagatgacacagcaaaatctccagccctcctaccttccataaygggtttgctcatccatggaagttcatgaagttccagttatgccacttattactgctgtgaccttggctaagtcatttaacctctctaagcctcagtttac

SEQ ID NO: 410563 - DNA, 201 bp, Homo sapiens
actgtgcagacttcgtttagattccgtatcttacaatccacccttacaaaggcatgttgagacaattggggaagattgaatgtggactgtgttcacgatgrcacaaggagtgagtgtgaattttgttagatgtgataatagaaaatctccatagttttaaatgaagtgtggtggagagaagagacttcaagtttgaatttg

SEQ ID NO: 410564 - DNA, 201 bp, Homo sapiens
ctacctgaggatgtcagaaatcttcatggaggaagaaaggctcaatctggcccttccaggattcactcaaatttaaaaacataagcagatgaatagaggtrggcttcctacaaagaatgtgcaggaacacaagtcaataataagaacagctgagatgtattgagcacttactgtgtgccaggcatagctgtaagtgctttt

SEQ ID NO: 410565 - DNA, 201 bp, Homo sapiens
ttgcaacctttttacaatgggatctgagtttataagcaccacaccagcgatcgctacgttgtgtttcattaaccaagtaataactgatcttgccaaggatraccttatgataacgacgtgctcacaataaatttagcctttctctgaagacaactgcaggttaaatgttactggttgtagttcagaccttggaaaattgct

SEQ ID NO: 410566 - DNA, 201 bp, Homo sapiens
ggagagccaggattcagaccccaggtgcctgaattcagagcccgcatccttaactgctctgccaacgctactgttgcttataaaacgtaagtgataacaaygacggcagttacagaggccacatatctatgccacagatacaaaacccaaatgatatggatatcaaagaaaaggcacaaaggccacccatgcagccaggac

SEQ ID NO: 410567 - DNA, 201 bp, Homo sapiens
ttacaggcatgtgccaccacacccggcctgtttttctctcttaaccacagtcaactccacgttctccccaagcctctggcttttggaaatctaaatccaarcgctccctctctgcctgtctgtctctttctcagctgggaagttgccctagtttgctctggctcatttatatgacattgaagagagaccaaaatataattt

SEQ ID NO: 410568 - DNA, 201 bp, Homo sapiens
cacccccaggcctctcaccagcaagacctccacagctgtcagaggggaacagtgcttgccatccacgggcaacccgcagaacggggccagtgaccccgggrtgaaaggtttgcctgccgggcccctagcctcctgactccatctgtctcgccacctgcaagcaccatttctgactttttcctttggtataaatggggaggc

SEQ ID NO: 410569 - DNA, 201 bp, Homo sapiens
ggaatcccagcccactgcttctcagccaaatgatctcaggcaaactgtttaacttttctgagcctcagttttctcacctgtcaaatgggggcataatggcrtacttcatagggtgctgattgcaagaaggaagtgaggtgatgggatgtaaagtgtctggcacaccttgggggcatggtgcatggttaaatgtaccattcc

SEQ ID NO: 410570 - DNA, 201 bp, Homo sapiens
ggtttgcctgccgggcccctagcctcctgactccatctgtctcgccacctgcaagcaccatttctgactttttcctttggtataaatggggaggcaactaygaaatcaacagtgggaaaggtgcaagaggccccatcttcccagagcccgagcctgctggctgttgagacgtataggctgagaaggctggacaggggacgc

SEQ ID NO: 410571 - DNA, 201 bp, Homo sapiens
gactcacagttacagttattacagtaaaaggacacagattaaaatctgcaaggggaagaggcacatggggtgaaatccaggaaagaccaggcacaatcttycgggagtcctctcccaggggagcacggacactccacctaattctcccagcaacaatgtgtgcgaacacatgccaagtgttgccaaccagggaagcccact

SEQ ID NO: 410572 - DNA, 201 bp, Homo sapiens
acaatggagtactattcagccataaaaaggaacaaatcctgccattctcagcaacatgaatgagcttgagggacattgtgttaagtaaaataagcgaggarcagaaagataaataccacatgttctcactcgtagttggaagctaaaaaagttaatctcatggaagcagaaagcagactggtggttactagaggctgagaa

SEQ ID NO: 410573 - DNA, 201 bp, Homo sapiens
caaacactcggcacttgtcgtgtcccagcattgctctattaactcatttaatcttcacaactctaaaaagtgggtactgttattatccccattttacagaygaggaaaccaaaatgcagagaggttaagcagcttgattgagatggcacaggtgatagcccagatttgaacctagatagtctgacttcagagtttattctc

SEQ ID NO: 410574 - DNA, 201 bp, Homo sapiens
ctgcacctggctggccatccagggctcatctcttttctctgaaattctccaagcatccctgtcattgtcctgcacctggccggccagccagggctcatctyttctctctgaaactctccaagtagccactgaagtcagcaggaactcccaaagcagagacatgccgtggggggaatatgggaatctgtcgcctgatttttc

SEQ ID NO: 410575 - DNA, 201 bp, Homo sapiens
atctgctgtttcctctgtctggaccagtcttcacccaggctctgcaggaccagccctccctcagttctcatcagagaggtctttcctaatgaaaggaactrccccttccttcattcatttgttcattcatttattgaacaaatgtttaatcagccatgtgcttggcatggttttaagtactagggagacagcatagaaaac

SEQ ID NO: 410576 - DNA, 201 bp, Homo sapiens
actctgctaaatgctttcaaaactcatgtaatgccctcagaacaaccccattggtaagtactgttaggattcccgtttcacagatgaggaaactgagaccragaaaggatgttacttgcccaaggtcacagcgatcatcaagctgtgtagctggcactccagccgggcagtgcggctctagagtctgtgtgccccagcatc

SEQ ID NO: 410577 - DNA, 201 bp, Homo sapiens
acctcaggtcctcccagactctcaggaggacttggaacctcaagagccaggataactcatttctgctgttccttctttccaccttgctatgccccagcttrggctccatgatccacgatgggactgtctgggaggaagaatcccaaggcagcgtctcaaaacatcaccctgacacatttgccttcctgcctgaatcctggg

SEQ ID NO: 410578 - DNA, 201 bp, Homo sapiens
tttcgaactgaaaatattttgaagatcccaaatctcacccagattctgagcagctctggcacatgagctgttttgtgatctcagatctcgggttcgtgttrcatgggagggccgggcccagcttgtcctccctctgtccagaagagccttctgcggtgaatctcagcagcctggttaacgttgagtcataatattgccaat

SEQ ID NO: 410579 - DNA, 201 bp, Homo sapiens
taacaacagggtctcactcccattgcccaggctggagtgcagtggcgccatctgggcttgctgcagcttcaacttcccaggctcagatgatattcctaccwcagcctccagaagagctgggactacaagcatgcatcaccatgcccggttaattttttgtatttttagtaaagatgggatttcaacatgttgcccaggctg

SEQ ID NO: 410580 - DNA, 201 bp, Homo sapiens
attggggaagattgaatgtggactgtgttcacgatgacacaaggagtgagtgtgaattttgttagatgtgataatagaaaatctccatagttttaaatgargtgtggtggagagaagagacttcaagtttgaatttgttttaaacacttcagcaaagagaaaagtaaacaaaccaaaattctgagaagagacacatttgga

SEQ ID NO: 410581 - DNA, 201 bp, Homo sapiens
gctggagtgcagtggcgccatctgggcttgctgcagcttcaacttcccaggctcagatgatattcctaccacagcctccagaagagctgggactacaagcrtgcatcaccatgcccggttaattttttgtatttttagtaaagatgggatttcaacatgttgcccaggctgatctcaaactcctgggctcaagtgatccac

SEQ ID NO: 410582 - DNA, 201 bp, Homo sapiens
gtggagagaagagacttcaagtttgaatttgttttaaacacttcagcaaagagaaaagtaaacaaaccaaaattctgagaagagacacatttggaaaaacygtgaacattgttgagtctaagtaatgggtgcacagaagttcattccactattctgtctgcttttgtatatgttggaaatttttcattaaaaaaacttcta

SEQ ID NO: 410583 - DNA, 201 bp, Homo sapiens
atggctgaaccacattttgtttatccgttcagccgtcagtggacacttggatcatttccacctttcagccactgtgagtagtgctcctgtgaacttttgcrtacaagtttttgcttaaatacttgttttcaattattttgggtataaacccagaagtacaattgctgagtcatatggtagttttgtatgtacctttttgag

SEQ ID NO: 410584 - DNA, 201 bp, Homo sapiens
agattctattaatatgagagagaaggggtgaatcaatattaggggaccctccaggagacctgccaccatcaccttaagaggatgtttttttcatctcatcyttgccttccctcactgggcattgtatcagccagaaggaagaaagaggtcagtgtttcacattccagcaccaagccgggtctgtttgtcaaaaccctccag

SEQ ID NO: 410585 - DNA, 201 bp, Homo sapiens
agctggccttccgctaccggcgggtgaaggagatgtacaatacctacaagaacaacgttggtggtgagtactgtgagccttgggcctccgaggaagggaarctcattgggatggatgctgtcagtgtccctgctgtgccaggcgccaggcagagaggttcacaagttcagtaccagcccacttaatgcaaccctgacgaca

SEQ ID NO: 410586 - DNA, 201 bp, Homo sapiens
gggcccctagcctcctgactccatctgtctcgccacctgcaagcaccatttctgactttttcctttggtataaatggggaggcaactacgaaatcaacagygggaaaggtgcaagaggccccatcttcccagagcccgagcctgctggctgttgagacgtataggctgagaaggctggacaggggacgctgactaggggac

SEQ ID NO: 410587 - DNA, 201 bp, Homo sapiens
cagttcatcttgggcctcccgttggccccaggtggctcacgtgaccaccaccctggagccaatcactgtagaccgaggaatgggagatgctaattgccagsctcagagcttgttagtagggtcagtcccagccaagccacgtggactgagagtcatggggagacctagggaaattaaataactcacaaacacctgtaaaaa

SEQ ID NO: 410588 - DNA, 201 bp, Homo sapiens
tcagcactgtttgccttccctctttgtgcctcagtctccccatttggaccataaagaatttggcatggactattggttctcaattctcagtgtgtactagratctcccagaaaggtttgttgttgttgttgttgttttcatatactgatgcctggcccaactctagactaactcaaatcagactctctgtgggaagggccc

SEQ ID NO: 410589 - DNA, 201 bp, Homo sapiens
ggaaaggtgcaagaggccccatcttcccagagcccgagcctgctggctgttgagacgtataggctgagaaggctggacaggggacgctgactaggggaccyccgtgctggatggtgccatgggtagggctgtcttggaatcccacagacccacattcaaatcctggctttgcccctaagagctgcctgagctcaggtgagc

SEQ ID NO: 410590 - DNA, 201 bp, Homo sapiens
cagacagggccaccatcctcagccaaggtagctggtgtactcacgggggtgtggaaaggtgagcggcccacccgcctgggaccctccatctgcttttgatmcctcccagcctttgaagctgcccctgcccccaccctccagctgtcatctctcgggctcccccacttcttcccagtccccagggacaggggtggtgacaag

SEQ ID NO: 410591 - DNA, 201 bp, Homo sapiens
taaagaatttggcatggactattggttctcaattctcagtgtgtactagaatctcccagaaaggtttgttgttgttgttgttgttttcatatactgatgcytggcccaactctagactaactcaaatcagactctctgtgggaagggccctcagactgcttttttgttctgttttgttttttgtttcaagttctttgggag

SEQ ID NO: 410592 - DNA, 201 bp, Homo sapiens
agagtgactgagatgagacctacagaagttgtgtagttggtgggatattcatgacagaaccaaaactcatggcctcagcttctggctcacagttctttctstctgtacttccccagcactgcagccatgtgaaacttgttattaatagctgtcatcaagtatgacattcagtttgaagtacagcatatttaagctgcaaag

SEQ ID NO: 410593 - DNA, 201 bp, Homo sapiens
gagcctgctggctgttgagacgtataggctgagaaggctggacaggggacgctgactaggggacccccgtgctggatggtgccatgggtagggctgtcttkgaatcccacagacccacattcaaatcctggctttgcccctaagagctgcctgagctcaggtgagccatgcaccctatcacatctctcctctgtaaaatgg

SEQ ID NO: 410594 - DNA, 201 bp, Homo sapiens
aatctcagctgccctttgttgaatacccactcactcgtgccttctctgactcatttttctcagaataacctggcggggagggtattattttctccatcttrtagaactgaggctcagataagtgaaataacttgcccaaggttacaccgctgataacgacatagctgggatttgaacccctggagcagataacacgtctgg

SEQ ID NO: 410595 - DNA, 201 bp, Homo sapiens
tgcaagagtggagggttgcagtttttgttagggtggctagaaaagaggtccctgagaagataacacttaagacctgtaggaggtaagggagggtgccacayggctacacagaacaagagccgtatgcacagagaagacagcaagtgcaaaggccctgaggcagcagtgtgctcaaaaaactttacatatattaatacaaac

SEQ ID NO: 410596 - DNA, 201 bp, Homo sapiens
tggtgccatgggtagggctgtcttggaatcccacagacccacattcaaatcctggctttgcccctaagagctgcctgagctcaggtgagccatgcaccctrtcacatctctcctctgtaaaatgggcacagcccacctcacagaggagctggaaggatgtaatgaggtgccttcagtttccctcaaggtctaggagggtgt

SEQ ID NO: 410597 - DNA, 201 bp, Homo sapiens
ctctgaagacaactgcaggttaaatgttactggttgtagttcagaccttggaaaattgctacgccatgtacagtggtgtgtgcgttaaccagaaaccttaytttctaaacccagtgggtgggaatttattaatatttattttgagacagggtctcactctgtcacagaggctggaaggcagtggcacgattagagctcact

SEQ ID NO: 410598 - DNA, 201 bp, Homo sapiens
aattcattttaaaaggatgacttaagccagttccagaaatgaaacgttatgactttgatggtcttgttgtgattctaatgtacataaaattaatttgcaaygatttcaatcaaagagggagtatttatagactccctaaaatcatcgcagtctgggacttgcagcctcattcctttctgtcctcagtggcacctcccgcaa

SEQ ID NO: 410599 - DNA, 201 bp, Homo sapiens
atgtagttcttccagctgaaactgtttctccctgaaggatttcaagcacgacatatacccaaactaaagaggatggcagcaaaacgtgcagaaggaagctrggttggattcagcctccgtgctcccgccttgctcatctccaaagctgtaagaatttaagggaaacttaccccatgttttgttgcctcatttgtgcataat

SEQ ID NO: 410600 - DNA, 201 bp, Homo sapiens
atgtcatggtcctgttttggccaagcaggtcgtgttttggccaaccagtgctcccgtgcgcagatccctgtggtgatgggagacaattgcaagggtcaggrttcgagacaagatgctcaaaagtcccttccagtggtgggcacctgactccagggcgggttcgtaagggctgcggtagcttcggggcaggtgcagcctcgg

SEQ ID NO: 410601 - DNA, 201 bp, Homo sapiens
gaactgggtggaagcttgaaaaggagctgggtgaggcaaacatgcaaatcatgccatggagattggcagaaaagacgcttgcctccaatttatggaatgcsaagttaattcgagcccataggaatgttgttcccatagatttagatttttatgaatatatacatatttatgaaagaaaacatttaaagtgtttaattcagt

SEQ ID NO: 410602 - DNA, 201 bp, Homo sapiens
ttttggccaagcaggtcgtgttttggccaaccagtgctcccgtgcgcagatccctgtggtgatgggagacaattgcaagggtcaggattcgagacaagatrctcaaaagtcccttccagtggtgggcacctgactccagggcgggttcgtaagggctgcggtagcttcggggcaggtgcagcctcggtctcctcacctggg

SEQ ID NO: 410603 - DNA, 201 bp, Homo sapiens
tgtttagtcccgcacttacagacggctcgctgggcgacatgatcttcttccattcctacaagaacccgggcctggtcctggacatcgttgagggtgaggckctagggccacagaggagaggggaaggagggctggctgagtccaaggcctgacttcggcgctcttcccccagacctgaggctcatcaacacacaggccatc

SEQ ID NO: 410604 - DNA, 201 bp, Homo sapiens
aatggcggcgacctggtttacaggggctaaaaatggtcacgtgataaaccaacttccggtctttcgcccaaagcacgttccctacttcctgtgctcttgcrgagacgcgcgcgtcggggtttaacgcgtttctgggccgccgtaagcccggcctaggggcagctttgactcgagagccggctataggcgcatggaaggttc

SEQ ID NO: 410605 - DNA, 201 bp, Homo sapiens
catgggccctgtctgggagcgaatgtctgtgaagggcttccttcatctgggacacacctctcagcctgtttggctacggtgtcctccctctgtgtctgtcbcctgtgactggctgactgggcccaccgtgcccccgcctccccacagcggaacggggccgactacgctgtttacatcaacacagcccaggagtttgatggc

SEQ ID NO: 410606 - DNA, 201 bp, Homo sapiens
ctgttctcaggatcggaaacctgctggtgcccaatgagaattactgcaagtttgaggactggctgatgcccattctggaccagatggtgatggagcagaayacagaggtggggctggggcaacctggaggggccagttcagtgggagtcaggggaggcatggcctgaaggtcacatcctctcctagggtgtaaagtggacg

SEQ ID NO: 410607 - DNA, 201 bp, Homo sapiens
acggagttttgctcttgttacccaggccagagtccaatggcgcaatcttggctcacagcaacctctacctcctgggttcaagcaattctcctgcctcagcrtcaagttcccaagtagctgggattataggcatgtgccaccacccctggctaattttgtatttttagtagaggcagggtttctccatgttggtcaggctgg

SEQ ID NO: 410608 - DNA, 201 bp, Homo sapiens
cccattctggaccagatggtgatggagcagaacacagaggtggggctggggcaacctggaggggccagttcagtgggagtcaggggaggcatggcctgaargtcacatcctctcctagggtgtaaagtggacgccttctaagatgatcgcccggctgggcaaggagatcaacaacccagagtccgtgtattactgggccca

SEQ ID NO: 410609 - DNA, 201 bp, Homo sapiens
agatcgagaagaagctggaaccactgtcacaggatgaagaccagcacgcggacctgacccagagccgccgcccacttaccagctgcaccattttcctgggrtatacatccaacctcatcagttcaggcatccgtgagaccattcgctaccttgtgcagcacaacatggtggggacctggtgaggccgtggccttggcctct

SEQ ID NO: 410610 - DNA, 201 bp, Homo sapiens
actcacagatcgagaagaagctggaaccactgtcacaggatgaagaccagcacgcggacctgacccagagccgccgcccacttaccagctgcaccattttyctgggatatacatccaacctcatcagttcaggcatccgtgagaccattcgctaccttgtgcagcacaacatggtggggacctggtgaggccgtggccttg

SEQ ID NO: 410611 - DNA, 201 bp, Homo sapiens
cctgagtctgggatttaaggccagtgcttaacttgacttggcccttactcacagatcgagaagaagctggaaccactgtcacaggatgaagaccagcacgsggacctgacccagagccgccgcccacttaccagctgcaccattttcctgggatatacatccaacctcatcagttcaggcatccgtgagaccattcgctac

SEQ ID NO: 410612 - DNA, 201 bp, Homo sapiens; identical to SEQ ID NO: 92381

SEQ ID NO: 410613 - DNA, 201 bp, Homo sapiens
gacttggcccttactcacagatcgagaagaagctggaaccactgtcacaggatgaagaccagcacgcggacctgacccagagccgccgcccacttaccagytgcaccattttcctgggatatacatccaacctcatcagttcaggcatccgtgagaccattcgctaccttgtgcagcacaacatggtggggacctggtgag

SEQ ID NO: 410614 - DNA, 201 bp, Homo sapiens; identical to SEQ ID NO: 92384

SEQ ID NO: 410615 - DNA, 201 bp, Homo sapiens
agtgcttaacttgacttggcccttactcacagatcgagaagaagctggaaccactgtcacaggatgaagaccagcacgcggacctgacccagagccgccgsccacttaccagctgcaccattttcctgggatatacatccaacctcatcagttcaggcatccgtgagaccattcgctaccttgtgcagcacaacatggtgg

SEQ ID NO: 410616 - DNA, 201 bp, Homo sapiens
cctcgcggcttccgtattacggaacacacgcacaaaaatggcggcgacctggtttacaggggctaaaaatggtcacgtgataaaccaacttccggtctttygcccaaagcacgttccctacttcctgtgctcttgcggagacgcgcgcgtcggggtttaacgcgtttctgggccgccgtaagcccggcctaggggcagctt

SEQ ID NO: 410617 - DNA, 201 bp, Homo sapiens
gcggaatttctagggacgcggaggggcgtggcttgtagaaccaacgcggtactagacgggggcagcgtttccagtggaggggatatgtcttttatttgagytgcccaatagttggaggaaggcgggacctattctgggcgggagtttctgtcctgggaaggggattttgcactctggtagttacatgctggtacggtaacc

SEQ ID NO: 410618 - DNA, 201 bp, Homo sapiens
caaggtaagcgctggctgggtggggcatagggtctctgggacgatgagtgtgggtcccatggcttacccaggttcccccctacccaggtctatgctgacgyctccctggtcttccccctgcttgtggctgaaacctttgcccagaagatggatgccttcatgcatgagaagaacgaggactgagcggctgcggtcccagga

SEQ ID NO: 410619 - DNA, 201 bp, Homo sapiens
cctgagtggtgttgggcaggggagctggaccaagggtcctggggcctgatgcctacatgcctcctgttctcaggatcggaaacctgctggtgcccaatgasaattactgcaagtttgaggactggctgatgcccattctggaccagatggtgatggagcagaacacagaggtggggctggggcaacctggaggggccagtt

SEQ ID NO: 410620 - DNA, 201 bp, Homo sapiens
ggtggggctggggcaacctggaggggccagttcagtgggagtcaggggaggcatggcctgaaggtcacatcctctcctagggtgtaaagtggacgccttcyaagatgatcgcccggctgggcaaggagatcaacaacccagagtccgtgtattactgggcccagaaggtgaggacctaagcgggagcaaagtagccagact

SEQ ID NO: 410621 - DNA, 201 bp, Homo sapiens
acttcaaccgcggtgtgaattaccgcgcactgctggaggccttcggcaccaccggcttccaagcaaccaacttcgggcgcgctgtacagcaagtcaatgcyatggtgaggaccgggcggaatttctagggacgcggaggggcgtggcttgtagaaccaacgcggtactagacgggggcagcgtttccagtggaggggatat

SEQ ID NO: 410622 - DNA, 201 bp, Homo sapiens
tttacaggggctaaaaatggtcacgtgataaaccaacttccggtctttcgcccaaagcacgttccctacttcctgtgctcttgcggagacgcgcgcgtcgrggtttaacgcgtttctgggccgccgtaagcccggcctaggggcagctttgactcgagagccggctataggcgcatggaaggttccctggaacgggaggcg

SEQ ID NO: 410623 - DNA, 201 bp, Homo sapiens
gtccggggctacgacttcaaccgcggtgtgaattaccgcgcactgctggaggccttcggcaccaccggcttccaagcaaccaacttcgggcgcgctgtacrgcaagtcaatgccatggtgaggaccgggcggaatttctagggacgcggaggggcgtggcttgtagaaccaacgcggtactagacgggggcagcgtttcca

SEQ ID NO: 410624 - DNA, 201 bp, Homo sapiens
tctgcctcataggcctcctctcgccagcactggacgctgcctcccatggcggtcagcaggcagggctctgttgggtggtaggccagcgactgcaccacacyggaacccacaggcagggccagagccagcgcaccctgtggagcgaggggtagggagtggttatctgtggctgggctgtaccctggtttctgaggtccctgg

SEQ ID NO: 410625 - DNA, 201 bp, Homo sapiens
gggaggcatggcctgaaggtcacatcctctcctagggtgtaaagtggacgccttctaagatgatcgcccggctgggcaaggagatcaacaacccagagtcsgtgtattactgggcccagaaggtgaggacctaagcgggagcaaagtagccagactttggcatgtgttaacttatttcatctttccagcctcctggggatt

SEQ ID NO: 410626 - DNA, 201 bp, Homo sapiens
cccctccccccaccccacgacagtccccggtgtgtgatgttccccttcctgtgtccatgtgttctcattgttcaattcccacctatgagtgagaacatgcrgtgtttggttttctgtccttgcgatagtttgctgagaatgatggtttccagcttcatccatgtccctacaaaggacatgaactcatcattgtttatggct

SEQ ID NO: 410627 - DNA, 201 bp, Homo sapiens
cgaaagtttaataagcaaaagaagaaagctctccacagaggagagggaagcccaagcgggttgccatttttacagttgattccaaaagcttttttttttawaaattatttatttatttattttttattattatactttaagttttaggatacatgtgcacaacgtacaggtttgttacatgtgtttacatgtgccatgttg

SEQ ID NO: 410628 - DNA, 201 bp, Homo sapiens
gctgttctctcctcctggaacactgttccctcagattgcctcatggctttcttgttcccctccttgaggtctctgctgaggtatcacctcttcaaaggggmcttccttgccatcctacgtgaaatactcatgcccacccgctcaactccaggttccccagtccccatctctgccagtccaatagaaatgcaggctggggcc

SEQ ID NO: 410629 - DNA, 201 bp, Homo sapiens
gcgaaagtttaataagcaaaagaagaaagctctccacagaggagagggaagcccaagcgggttgccatttttacagttgattccaaaagcttttttttttwaaaattatttatttatttattttttattattatactttaagttttaggatacatgtgcacaacgtacaggtttgttacatgtgtttacatgtgccatgtt

SEQ ID NO: 410630 - DNA, 201 bp, Homo sapiens
cttgacctcctgggctcaggtgatcctcccgcctcagcctcctgagtagctgggactacaggtgtgtgccaccatacctggctgttttttttttttttttkttgttgttgtttgtttgtttgttttgaggcggagtcttgctctgtcgcccaggctggagtgccgtggcgcaatcttggctcattacaacctccacctcct

SEQ ID NO: 410631 - DNA, 201 bp, Homo sapiens
acccttgacctcctgggctcaggtgatcctcccgcctcagcctcctgagtagctgggactacaggtgtgtgccaccatacctggctgtttttttttttttkttgttgttgttgtttgtttgtttgttttgaggcggagtcttgctctgtcgcccaggctggagtgccgtggcgcaatcttggctcattacaacctccacct

SEQ ID NO: 410632 - DNA, 201 bp, Homo sapiens
tgcacccttgacctcctgggctcaggtgatcctcccgcctcagcctcctgagtagctgggactacaggtgtgtgccaccatacctggctgttttttttttktttttgttgttgttgtttgtttgtttgttttgaggcggagtcttgctctgtcgcccaggctggagtgccgtggcgcaatcttggctcattacaacctcca

SEQ ID NO: 410633 - DNA, 201 bp, Homo sapiens
acggctcactgcacccttgacctcctgggctcaggtgatcctcccgcctcagcctcctgagtagctgggactacaggtgtgtgccaccatacctggctgtkttttttttttttttgttgttgttgtttgtttgtttgttttgaggcggagtcttgctctgtcgcccaggctggagtgccgtggcgcaatcttggctcatta

SEQ ID NO: 410634 - DNA, 201 bp, Homo sapiens
cacggctcactgcacccttgacctcctgggctcaggtgatcctcccgcctcagcctcctgagtagctgggactacaggtgtgtgccaccatacctggctgktttttttttttttttgttgttgttgtttgtttgtttgttttgaggcggagtcttgctctgtcgcccaggctggagtgccgtggcgcaatcttggctcatt

SEQ ID NO: 410635 - DNA, 201 bp, Homo sapiens
tgacaaacagccacccagctctctccccacttcctctcatccttttccaattttctccaccaagaatccagaatgaccttataaaaactcaggttgggccrggagcggtggctcacgcctgtaatcccctgcctttgagaggccgaggtgggtggatcaccagagatcgggagttcgagaccagcctggccaacatagtga

SEQ ID NO: 410636 - DNA, 201 bp, Homo sapiens
cccggcagagacccccttggagccccaaaccccagtccccggggccctcccggccatccgccccagggcccaccttcctctccctgctccgcacccccgtycccccaggcttctgctttctgctggcagacatgatcatgcagagcaccgacgccatcagtggattccccgtgtgtctgtgactgcagcctgcctggggca

SEQ ID NO: 410637 - DNA, 201 bp, Homo sapiens
cagagtcgcagcccctctgcctggcatttgggatgctttgtggtccagcctcctcttcatggtctgcttcagccgtccacttccctccttggaccctcccwtaccctttgtgcttctgccactgtgacctgctcctcctgtcctgacagaccaggccgcggctcgcccgttccatgccttcttccagcaccaccctcctac

SEQ ID NO: 410638 - DNA, 201 bp, Homo sapiens
gaggtcagcagttcaagaccagcctggccaacatgttgaaaccctgtctctactgaaaatacaaaaattagctgggcgtggtgttgggtgcctgtaatccyagctactcaggaggctgaggcaggagaattgcttgaacccaagaggcggaggttgcagtgagccaagattgtaccattgcactccagcctgggtgacaga

SEQ ID NO: 410639 - DNA, 201 bp, Homo sapiens
gagacagggtttcaccatgttggccaggctggtcttgaactcctgacctcaagtgatccacccgccttggcccctcaaagtgctgggattacaggcatgarccactgcgcctggccaaattatcagtatttaaatttaaataaaatgtaaaaattcattcctcagctgcactggctggacagccacacgcagccagtggct

SEQ ID NO: 410640 - DNA, 201 bp, Homo sapiens
ctaacattttaataggtatttggcaactcagtaacaccctgtcctgttcaggggcacattttacaggaagctgatgaagcttaaccttcagggcctctttyaagaccccaggagaaaggctgggcctggtggctcacgcctgtaaacacacactttgggaggctgaggtgggtggatcacgaggtcaggagttcaagacca

SEQ ID NO: 410641 - DNA, 201 bp, Homo sapiens
ttgctatgttagccaggctggtctagacctcctgacctcaggtaatccacccgcctcagcctcccaacgtgctgggattacaggtgtgagccactgtgacyagctgcaataagtgtttttattgggagtagtagtaatggatgtttagttagtcatttattcaaaacataacaaatgctgtgctcagagtgtattcgtgtg

SEQ ID NO: 410642 - DNA, 201 bp, Homo sapiens
aaataagcccttggaacagtgcctggcacacagtggtttgttttgttttattttttgagacggagtctatctctgttgcccaggctggagtgcagtggcaygatctcagctcactggaacctccacttcccaggttcaagcaactctgcctcagcctcctgagtagctgggattacacgtgtgagccaccacgcctggcta

SEQ ID NO: 410643 - DNA, 201 bp, Homo sapiens
taagcctcatttttctactctgtacaatggggatgatggtactatctactttattgagttgtaatgaaaattaaataagcccttggaacagtgcctggcayacagtggtttgttttgttttattttttgagacggagtctatctctgttgcccaggctggagtgcagtggcatgatctcagctcactggaacctccacttc

SEQ ID NO: 410644 - DNA, 201 bp, Homo sapiens
agacctcagactccaagcccagcgcctgcgtccacttcctgctgtgtgaccttgaggaaattgcttcaccactctaagcctcatttttctactctgtacartggggatgatggtactatctactttattgagttgtaatgaaaattaaataagcccttggaacagtgcctggcacacagtggtttgttttgttttattttt

SEQ ID NO: 410645 - DNA, 201 bp, Homo sapiens
aatttgagctccaggtgtgggggagacagtttgatgtggtcactgcttcctgagacagtgggtgcactactagaatagtgcagacctcagactccaagccsagcgcctgcgtccacttcctgctgtgtgaccttgaggaaattgcttcaccactctaagcctcatttttctactctgtacaatggggatgatggtactatc

SEQ ID NO: 410646 - DNA, 201 bp, Homo sapiens
ctggaatttgagctccaggtgtgggggagacagtttgatgtggtcactgcttcctgagacagtgggtgcactactagaatagtgcagacctcagactccamgcccagcgcctgcgtccacttcctgctgtgtgaccttgaggaaattgcttcaccactctaagcctcatttttctactctgtacaatggggatgatggtac

SEQ ID NO: 410647 - DNA, 201 bp, Homo sapiens
cccggccatccgccccagggcccaccttcctctccctgctccgcacccccgtccccccaggcttctgctttctgctggcagacatgatcatgcagagcacygacgccatcagtggattccccgtgtgtctgtgactgcagcctgcctggggcagaataaaggaacggctttttttagcgctgcggctccgcgtgcttttct

SEQ ID NO: 410648 - DNA, 201 bp, Homo sapiens
ggtaatggcagtaaccaacctcacaggctactaggatggtcaaacgagttaatgcatataaaacccttgactcgttgtctgcatgggtcagtgctgctttwaaaaaaattttttttttcttttctttttttttttttgagatagaatctggtctgtcacccaggctggagtgcattgatgtgatccctgctcactgcaacc

SEQ ID NO: 410649 - DNA, 201 bp, Homo sapiens
aaccagggaggcggaggttgcagtgaaccgagatcgtgccactgcactccagcctgggtgacagagggagactccgtctcacaaaaaaaaaaaaaaaaaaaaaaacccaggagaggctgggcaattttgtattcattatctgggattcattttcttagagatgaccccacaggatagaaactccaggcccagaaaacgtgt

SEQ ID NO: 410650 - DNA, 201 bp, Homo sapiens
gtaatggatgtttagttagtcatttattcaaaacataacaaatgctgtgctcagagtgtattcgtgtgtgtgtgtgtgtgtgtgtgtgtgtgtgtgtgtgtatgtgtgtccggctgtgtgtatgtttctgggtatgtgcgtgtatctaacattttaataggtatttggcaactcagtaacaccctgtcctgttcaggggca

SEQ ID NO: 410651 - DNA, 201 bp, Homo sapiens
agtaatggatgtttagttagtcatttattcaaaacataacaaatgctgtgctcagagtgtattcgtgtgtgtgtgtgtgtgtgtgtgtgtgtgtgtgtgtgtatgtgtgtccggctgtgtgtatgtttctgggtatgtgcgtgtatctaacattttaataggtatttggcaactcagtaacaccctgtcctgttcaggggc

SEQ ID NO: 410652 - DNA, 201 bp, Homo sapiens
tagtaatggatgtttagttagtcatttattcaaaacataacaaatgctgtgctcagagtgtattcgtgtgtgtgtgtgtgtgtgtgtgtgtgtgtgtgtgtgtatgtgtgtccggctgtgtgtatgtttctgggtatgtgcgtgtatctaacattttaataggtatttggcaactcagtaacaccctgtcctgttcagggg

SEQ ID NO: 410653 - DNA, 201 bp, Homo sapiens
tgccagctgtggtgacagctgacctgaggctcaacgagccccgctacgccacgctgcccaacatcatggtgagcccctggccagcgggcactgagggcctrggggtggcaagcacattgccagcccagtgccccccggtggtcgcacgtggggagggaaggatccaaaggaggtctcgtgcacaggaagccgtcacctgga

SEQ ID NO: 410654 - DNA, 201 bp, Homo sapiens
gtagtaatggatgtttagttagtcatttattcaaaacataacaaatgctgtgctcagagtgtattcgtgtgtgtgtgtgtgtgtgtgtgtgtgtgtgtgtrtgtatgtgtgtccggctgtgtgtatgtttctgggtatgtgcgtgtatctaacattttaataggtatttggcaactcagtaacaccctgtcctgttcaggg

SEQ ID NO: 410655 - DNA, 201 bp, Homo sapiens
ctcactggcagcatcaggacatgggacatcaggacatacaccgtggctctcagggaaaggaaagagaccctctcccaggtgtacaagctcgattctaaacstcatgggaccctgcattgttcgctccctcattcattcactagtccatgcgtgtactcagtagtggcataagcagactgctcgggtcggacctgaattagc

SEQ ID NO: 410656 - DNA, 201 bp, Homo sapiens
gagaagtgtgtttgctagagatgaaagttcaaggagccaacctgactgagctgggggtagctcacattctccatgaaagaggtgggggagggtgctctctgagcgcctggcttgttgtccccagagggaagctggtgtggacagaggtgaatcagacacggtctctcaggcccgtttctctcaatgcttggcctgaactgg

SEQ ID NO: 410657 - DNA, 201 bp, Homo sapiens
tgggacatcaggacatacaccgtggctctcagggaaaggaaagagaccctctcccaggtgtacaagctcgattctaaacctcatgggaccctgcattgttygctccctcattcattcactagtccatgcgtgtactcagtagtggcataagcagactgctcgggtcggacctgaattagcctcacccactctcctcctaca

SEQ ID NO: 410658 - DNA, 201 bp, Homo sapiens
agagaagtgtgtttgctagagatgaaagttcaaggagccaacctgactgagctgggggtagctcacattctccatgaaagaggtgggggagggtgctctctgagcgcctggcttgttgtccccagagggaagctggtgtggacagaggtgaatcagacacggtctctcaggcccgtttctctcaatgcttggcctgaactg

SEQ ID NO: 410659 - DNA, 201 bp, Homo sapiens
gacctgctcctcctgtcctgacagaccaggccgcggctcgcccgttccatgccttcttccagcaccaccctcctacctctgctttctgtcctttgtcctgyccatctccaactcatggattatatcaaaatctagtgattctctgccaggcgcggtggctcacacctctaatccctgtactttgtgaggccgaggcgagtg

SEQ ID NO: 410660 - DNA, 201 bp, Homo sapiens
ctgaggcaggagaattgcttgaacccaagaggcggaggttgcagtgagccaagattgtaccattgcactccagcctgggtgacagagcaagactccgtctsaaaaagaaaaaaaagaaagaaaaagtttgccaacccctgttctagacagaggcctgaatggtccatgagctccactgattgtcatacagtcttctgtctc

SEQ ID NO: 410661 - DNA, 201 bp, Homo sapiens
ctggcagacatgatcatgcagagcaccgacgccatcagtggattccccgtgtgtctgtgactgcagcctgcctggggcagaataaaggaacggctttttttagcgctgcggctccgcgtgcttttctgcgggtcgtggggacgcaggcacggggttgcatagaggctcagggaagacataaggacatgaactcatagggaa

SEQ ID NO: 410662 - DNA, 201 bp, Homo sapiens
tcccaccctctttcccttctcccaaagctgtcagttctccaccccccacccttcttgccctattgtctcttggtgtcattgtctcacctggaccctcaccygggtcctccctcactcccagtctctccctctcagcccacctctacccagccttaggggcgtttctgcacccagagctcaccctgctctcccctgctccca

SEQ ID NO: 410663 - DNA, 201 bp, Homo sapiens
gctgcctggggtgggggccaggtcgcggggagctgagctggagccgggacggacgcgccctggaggcggcggaatcggagggagccgagacgccccggatrcgctcagagggcgaccagctgctcatcgtgcgccctgtgcgcagcgaccacgcccggtacacttgccgcgtccgcagccccttcggccacagggaggctg

SEQ ID NO: 410664 - DNA, 201 bp, Homo sapiens
gacctgaattagcctcacccactctcctcctacactgtccctccccagggcacattcgcctcccaggtgatgctggagggggacaagttgaaagtggagcrggagatcgatgggggcctggagaccctgcgcctgaagctgccagctgtggtgacagctgacctgaggctcaacgagccccgctacgccacgctgcccaac

SEQ ID NO: 410665 - DNA, 201 bp, Homo sapiens
ctaagctaccagtcctgttggactcgtctgacccgggagggatgggtgcagtcctgggtctctctccagtgtcctttcagtgaggccagcaccatggacamcccacaggctctgccactcttcctactcctgggtaagttccctgctcagtcccttccctgtcagtctccctcagcagcctcccccaatgccttcctctct

SEQ ID NO: 410666 - DNA, 201 bp, Homo sapiens
ttagctgggaatgttttctccagcttccccctgggggtggggagggcagggatcaggctgggcctctctgcagatgggaccagctaatgaagagagtgggrtgaggtgggcagctcagccaccacactggggttgaggatcttggcacctccctctgggtctggctcccttcccctcccaggaagctaagctaccagtcct

SEQ ID NO: 410667 - DNA, 201 bp, Homo sapiens
agtggcatgggggtgaagcggagcctccagagtgggggcattctgctcagcctcgtggccaacgtcctcatggtgctctccacggccaccaactactggayccgccaacaagagggccacagtggcctgtggcaggaatgcaaccacggcatctgctccagcatcccctgccagagtgaggctccgcccgcccagatgtca

SEQ ID NO: 410668 - DNA, 201 bp, Homo sapiens
tgtgctaaaacgctcgactaatttttgtatttttagtagagatggggttttaccatgttggccaggctggtctcgaactcctgaccacaagtgatccaccyacctcagccccacaaagtgctgggattacaggtgtgagccgccacgcccagctttgaggctgtttttgatattggtggatatgtcgtctctttaagagaa

SEQ ID NO: 410669 - DNA, 201 bp, Homo sapiens
ggaatgttctccagcatttgcgaagacagtgaagccatcctggaggtgtgaggaagtttgggttagaggaaagagtctgagtttagcgggacacaggccaygtgagggcctcggggatgcggaaatgcagctctagtctcaggatagaggccctggcaggagatagcacctggagacttggttctgagggcaacagagagc

SEQ ID NO: 410670 - DNA, 201 bp, Homo sapiens
accaaaaggatgggtttgccactctgttgcagccagtgaagggcttcctgatttggttacctaaaggaggactgctgcagtagttgggccccccagggccycctagccagcaggagttgtccacaccaggtgtggccctgtgagaagtttcgcgtgtcctggccagtgggtgggtccagagggttcagcccatgggactgg

SEQ ID NO: 410671 - DNA, 201 bp, Homo sapiens
gtctgtcgccccttctggaatttgagctccaggtgtgggggagacagtttgatgtggtcactgcttcctgagacagtgggtgcactactagaatagtgcasacctcagactccaagcccagcgcctgcgtccacttcctgctgtgtgaccttgaggaaattgcttcaccactctaagcctcatttttctactctgtacaat

SEQ ID NO: 410672 - DNA, 201 bp, Homo sapiens
cttagcaactagaaagggagaggaaagtatgtttgctagagatgaaagttcaaggagccaacctaactgagtggagggagtgactcacattctccatgaargaggtgggagcaggggcaccctctgagagcccagcttgtccccagagggaagctggtgtggacactttgtaatccacagtgttgtttacttattgattgc

SEQ ID NO: 410673 - DNA, 201 bp, Homo sapiens
actcagtacatgttccctgtcaggaaggcagggaggcctcactggcagcatcaggacatgggacatcaggacatacaccgtggctctcagggaaaggaaaragaccctctcccaggtgtacaagctcgattctaaacctcatgggaccctgcattgttcgctccctcattcattcactagtccatgcgtgtactcagtagt

SEQ ID NO: 410674 - DNA, 201 bp, Homo sapiens
ttcttgttcccctccttgaggtctctgctgaggtatcacctcttcaaaggggccttccttgccatcctacgtgaaatactcatgcccacccgctcaactcyaggttccccagtccccatctctgccagtccaatagaaatgcaggctggggccaggcatggtgactcatgcctgtaatcccagcactttgggaggccgagg

SEQ ID NO: 410675 - DNA, 201 bp, Homo sapiens
acatcaccttctctgggaggacttccctgcttgcctccttaaaatcacaggccccaggtccctgtgttttgctgtgttttcccctatacttagcaactagraagggagaggaaagtatgtttgctagagatgaaagttcaaggagccaacctaactgagtggagggagtgactcacattctccatgaaggaggtgggagca

SEQ ID NO: 410676 - DNA, 201 bp, Homo sapiens
gggagcacctgctgagggccaggccctcatccctcaaacttcatttctgcctcaaggcctttgcatttgctgttctctcctcctggaacactgttccctcrgattgcctcatggctttcttgttcccctccttgaggtctctgctgaggtatcacctcttcaaaggggccttccttgccatcctacgtgaaatactcatgc

SEQ ID NO: 410677 - DNA, 201 bp, Homo sapiens
cctcggccccccaaagtgctgggattacaggtgtgagccaccgtgcctggccgaccctttgtattattaattccattggatagatgaggaaactgaggccwgtcagatctcccagccagtaagtggcagagttacgatcgaaaccccgggcaagtctggctctagactctgctctcctatctccctcaatgccccctgtcc

SEQ ID NO: 410678 - DNA, 201 bp, Homo sapiens
gtgccaccacacctggctaattttttgtatttttagtagagatggggtttcaccatgttggtcaggctggtctcaaactccagacctcaggtgatccaccygcctgcctcggccccccaaagtgctgggattacaggtgtgagccaccgtgcctggccgaccctttgtattattaattccattggatagatgaggaaactg

SEQ ID NO: 410679 - DNA, 201 bp, Homo sapiens
atagggagggttcagcgcatcatctcagcctatagggagggttcagcgcatcatctcagtctatagggagggttcagtgcatcatctcagcctattgggarccttcagcatgccatctcaaccaaaagtccactgagtcattactaccaaaaggatgggtttgccactctgttgcagccagtgaagggcttcctgatttgg

SEQ ID NO: 410680 - DNA, 201 bp, Homo sapiens
tttgtattatttattatttatttttattttttgagacggagttttgctctttttgcccaggctggagtgcaatggcgcagtcttggctcactgcaacctcmgcctcccgagttcaagcaattctcctacctcagcctcccaggtagctgggattacaggcatgtgccaccacacctggctaattttttgtatttttagtag

SEQ ID NO: 410681 - DNA, 201 bp, Homo sapiens
gagttcaagaccatcctagccaacagagtgaaactctgtctctactaaaaatacaaaaattagctgggcatggcggcgcgtgcccgtagtcccagctactyggggggctgaggcagaagaatcgcttgaaccagggaggcggaggttgcagtgaaccgagatcgtgccactgcactccagcctgggtgacagagggagact

SEQ ID NO: 410682 - DNA, 201 bp, Homo sapiens
tcttgtccttgtccccagccatctccatggtggtggccatggcggtgtacaccagcgagcggtgggaccagcctccacacccccagatccagaccttcttytcctggtccttctacctgggctgggtctcagctatcctcttgctctgtacaggtgactatcctgcccactgccctggggagctttgggagggtccagttg

SEQ ID NO: 410683 - DNA, 201 bp, Homo sapiens
ggaggctgaggtgggtggatcacgaggtcaggagttcaagaccatcctagccaacagagtgaaactctgtctctactaaaaatacaaaaattagctgggcrtggcggcgcgtgcccgtagtcccagctactcggggggctgaggcagaagaatcgcttgaaccagggaggcggaggttgcagtgaaccgagatcgtgccac

SEQ ID NO: 410684 - DNA, 201 bp, Homo sapiens
agtagtggcataagcagactgctcgggtcggacctgaattagcctcacccactctcctcctacactgtccctccccagggcacattcgcctcccaggtgaygctggagggggacaagttgaaagtggagcgggagatcgatgggggcctggagaccctgcgcctgaagctgccagctgtggtgacagctgacctgaggctc

SEQ ID NO: 410685 - DNA, 201 bp, Homo sapiens
actggggcatcgcgagccagcgaattcctgccgaggagctgagccatctctcttgtccttgtccccagccatctccatggtggtggccatggcggtgtacrccagcgagcggtgggaccagcctccacacccccagatccagaccttcttctcctggtccttctacctgggctgggtctcagctatcctcttgctctgtac

SEQ ID NO: 410686 - DNA, 201 bp, Homo sapiens
gtggcggtccccgtcctggctatgaaaccttgtgagcagaaggcaagagcggcaagatgagttttgagcgttgtattccaaaggcctcatctggagcctcrggaaagtctggtcctacatctgcccgcccttccagcccttccccagcccctcctcttgtttcttcattcattcaacaaaatttggctggaatctggttat

SEQ ID NO: 410687 - DNA, 201 bp, Homo sapiens
taggctacaccgtgaagaatgcgtggaagaacaacgtcttcttctcttggtcctatttttctgggtggctggccttacccttctcaattctcgcgggtaamctggacagcgggaagagggtggaggagactgcccagaagaccctcaccccagaggctccccagctgccctcccaggaaaccccggggacctctcggggac

SEQ ID NO: 410688 - DNA, 201 bp, Homo sapiens
agtcattactaccaaaaggatgggtttgccactctgttgcagccagtgaagggcttcctgatttggttacctaaaggaggactgctgcagtagttgggccycccagggccccctagccagcaggagttgtccacaccaggtgtggccctgtgagaagtttcgcgtgtcctggccagtgggtgggtccagagggttcagccc

SEQ ID NO: 410689 - DNA, 201 bp, Homo sapiens
tggcccagaccctgttcatgcagctgcccaggggccacatagggtgggactcctgagaggctttatacagagggcagagacttgacgacagggatgccagrtggccccacatgtccctggacaagtggctgcttatctctgggcccaagtgaggggatcgttctagaccaaaagtcagtgaactatggcccagagcgacct

SEQ ID NO: 410690 - DNA, 201 bp, Homo sapiens
gcgaatttattatctcacgtaaatcaggggcttcaggcacagcttgatccagggtcacatatgagctgtaggctcccctctaccttgtcttcactgtctgyatctccaggctcagatcccaccagcccagtgaccccagcagaaagaaaggagcatctttcccaagggccccagcaaactcccagggctgactcttctttg

SEQ ID NO: 410691 - DNA, 201 bp, Homo sapiens
tccccctagtcccaatccccaaccctgggccccccacctctctggtggtctggcgccggggctcaaaggtgctggcagctgggggcctggggccaggggcwcctctgatcagcctggaccctgctcaccgagaccacctgcgatttgaccaggcccggggggttctggagctcgcctctgcccagctggacgatgcagggg

SEQ ID NO: 410692 - DNA, 201 bp, Homo sapiens
tgttcaaaacaaacttaaaagttttctagtaactgcatttccagtaactgcattgggtatctgtgtttttttgtttgtttgtttgtttttgtttttttttwaaacagcttcgttatttacctacaataaaccgcacatatctaagttgcacaatttgttaagtttgcttttcttaaactcttttatttagatagagatggg

SEQ ID NO: 410693 - DNA, 201 bp, Homo sapiens
gggtcttctcgtaacccccgacctctgccgctttaacccccaaacgtcaaagtcacctgagggcaaaaatccaagagtgaagttctaacatccgatccctycggggtcacggccatgttctcttttccctcgttctggattcactctcttgataactgttcagagtgagttgctttctctatttcttacccactggaagaa

SEQ ID NO: 410694 - DNA, 201 bp, Homo sapiens
tctcttgataactgttcagagtgagttgctttctctatttcttacccactggaagaagtcacggtccctgtttaatgcacggagaaactgaggcacagagmggtcacccagctagagaagggcagagccgagagttctatccaggttcctctgactgctttcacccactaggctgcattacttaccattgtactcttatat

SEQ ID NO: 410695 - DNA, 201 bp, Homo sapiens
ttaaaagttttctagtaactgcatttccagtaactgcattgggtatctgtgtttttttgtttgtttgtttgtttttgtttttttttaaaacagcttcgttmtttacctacaataaaccgcacatatctaagttgcacaatttgttaagtttgcttttcttaaactcttttatttagatagagatgggggtctcactatgtt

SEQ ID NO: 410696 - DNA, 201 bp, Homo sapiens
gggacctggctagaggacggggtcccagaaggtggtttaaggactggtgtggacacacacagttctgttgtctgcccagcggaggggcctcacggggggcygttgggagccagattgtcagcttttggatttaccagctgtgggtggcagtgggcgtgtaactcagcatcttgctgcctcagtttctctcatctgtaaagt

SEQ ID NO: 410697 - DNA, 201 bp, Homo sapiens
gggggcccggactcctgggtctgaggaaggaggggatgggggcctggactcctgggtctgaggaaggaggggatgggggcctggactcttgggtctgaggraggaggggctgcgagccagactcctaggtccccctgaggatagcagccaagtcaagcccctctgtccttggcaggagacgattcgtaccgccctggccat

SEQ ID NO: 410698 - DNA, 201 bp, Homo sapiens
cagctgtgggtggcagtgggcgtgtaactcagcatcttgctgcctcagtttctctcatctgtaaagtggggataataacatttacctcataaagttcctgygaggattcgatgacttgatacatcagttgcttagcgcagggctcagcactcagtacatgttccctgtcaggaaggcagggaggcctcactggcagcatca

SEQ ID NO: 410699 - DNA, 201 bp, Homo sapiens
gaagaaggggatgggggcccggactcctgggtctgaggaaggaggggatgggggcctggactcctgggtctgaggaaggaggggatgggggcctggactcytgggtctgagggaggaggggctgcgagccagactcctaggtccccctgaggatagcagccaagtcaagcccctctgtccttggcaggagacgattcgtac

SEQ ID NO: 410700 - DNA, 201 bp, Homo sapiens
tgggtctgaggaagaaggggatgggggcccggactcctgggtctgaggaaggaggggatgggggcctggactcctgggtctgaggaaggaggggatggggscctggactcttgggtctgagggaggaggggctgcgagccagactcctaggtccccctgaggatagcagccaagtcaagcccctctgtccttggcaggaga

SEQ ID NO: 410701 - DNA, 201 bp, Homo sapiens
atcgtgccactgcgctccagcctgggtgacagagcaagactccatctcaaaaaataataatgataataatgataaaagaaggactcggcctatcatgtaayggcccccaaagctgagatctgaatctaagcagtcactcagttgagagctgcgggggtgtatgcgatggtggtggggggagtgattatccctttaaacagc

SEQ ID NO: 410702 - DNA, 201 bp, Homo sapiens
ttgctgcctcagtttctctcatctgtaaagtggggataataacatttacctcataaagttcctgcgaggattcgatgacttgatacatcagttgcttagcrcagggctcagcactcagtacatgttccctgtcaggaaggcagggaggcctcactggcagcatcaggacatgggacatcaggacatacaccgtggctctca

SEQ ID NO: 410703 - DNA, 201 bp, Homo sapiens
cgcgagccagcgaattcctgccgaggagctgagccatctctcttgtccttgtccccagccatctccatggtggtggccatggcggtgtacaccagcgagcrgtgggaccagcctccacacccccagatccagaccttcttctcctggtccttctacctgggctgggtctcagctatcctcttgctctgtacaggtgactat

SEQ ID NO: 410704 - DNA, 201 bp, Homo sapiens
tgcagaccgccccaggcgggcaggcaggggcgggccctgggtgatggaggggcctggtcgccaggggaggggcttgaggtactcggccaggatccgagggrcagggctggaagaagccgagagaggtgggcggggctcgagacagagttcagagcgggaggagcaggaaggggcctgggccaggggcgggctgagaggcga

SEQ ID NO: 410705 - DNA, 201 bp, Homo sapiens
ctcctgcctgggagcagagcgagactctgtctcaaaaagaaaaaaagaagaaagatccttttgggtgagtttagaggctgggaggccgaggtgatggtcaygtgggggagaatgaggcctcagccaaaggtgacaggacagagcagagacatgatgtggcaggagagactgggcttagcatggggagggagggcagggagg

SEQ ID NO: 410706 - DNA, 201 bp, Homo sapiens
tgatcaagtcagatgtccctggtacccaggaatggctggatgagagaaggagacagggtgacctgcccctgcctacaaactctaacccagttctgtccctrgagctgtgtgaccccggacaaggccctgcccctttccaggctgtcgttgtcctcatccagcctgggagagggttggcgctgaggcccccaccttcttgcc

SEQ ID NO: 410707 - DNA, 201 bp, Homo sapiens
ctctcagggaaaggaaagagaccctctcccaggtgtacaagctcgattctaaacctcatgggaccctgcattgttcgctccctcattcattcactagtccrtgcgtgtactcagtagtggcataagcagactgctcgggtcggacctgaattagcctcacccactctcctcctacactgtccctccccagggcacattcgc

SEQ ID NO: 410708 - DNA, 201 bp, Homo sapiens
aataggagagtggttagtggttcacgctacaccctggtctacaccggaagcctctctccctggcacatgatggtgtccccaggatccagctcagagccagrcacacagtggggcccaggagagacaaaaatgatgtgcagaagcaaatgggtggggtttgccacccacctcccttacctcccttgtctgtttagcaaagag

SEQ ID NO: 410709 - DNA, 201 bp, Homo sapiens
agccatcattatttaaaaaacaaacaagctatcatttttcagccctaccattgtttcctgacttatgtaatataactaaactgtttttgaagcttaaaatyaactcaagcttaattgagaagatgagctagtttgtttcctcaggtgtgtgtgcgtgcgtgtgtgtgtgtgtgtctggaaagttcttaccctttctcctca

SEQ ID NO: 410710 - DNA, 201 bp, Homo sapiens
ccaggcccagctagctcatcttgcggctgggcggggcccaggactgctgctgctgaccgccttgataggctacaccgtgaagaatgcgtggaagaacaacktcttcttctcttggtcctatttttctgggtggctggccttacccttctcaattctcgcgggtaaactggacagcgggaagagggtggaggagactgccca

SEQ ID NO: 410711 - DNA, 201 bp, Homo sapiens
ctcctgggttcaagccgtcctcccacctcagcctcctcagtagctgggactacaggtgcacgccaccatgacctgctaattttgttttttggtagagatgragtctctctatgttgcccaggctggtcttgaaatcctgggctccagtgatcctccttcctcagtctcctaaggtgctgggattacaggcatgagccatca

SEQ ID NO: 410712 - DNA, 201 bp, Homo sapiens
tctctgattccagctggtttcctgaggccctgagttccaacatgtctgggtccttctggtcaaatgtttctgctgagggccaagatttgagcccggtttcmcccttctctgaaacccctggttctgaagtatttcctgatatttcggatcctcaagttcctgccaaagaccccaagccttccttcactgttaagaccccag

SEQ ID NO: 410713 - DNA, 201 bp, Homo sapiens
acctcagggacgagttctctgtctgccccccgccgagttagtgatctgtcactggggtggctccctggccttggctgtcctgcttgctgagtgccctagcrcgtgcccagggactcgcttgacagaaaagcctagaggacagaaccacacaagtccttgagctgtgtcaggggttcaggaagagctgtcgaaaatcacttt

SEQ ID NO: 410714 - DNA, 201 bp, Homo sapiens
tctgagggaggaggaggctggaagtctggacccctgggtctgagggaggatgggctgatagcctggattcctgggtctgaggaagaaggggatgggggccyggactcctgggtctgaggaaggaggggatgggggcctggactcctgggtctgaggaaggaggggatgggggcctggactcttgggtctgagggaggaggg

SEQ ID NO: 410715 - DNA, 201 bp, Homo sapiens
ttctcattgttcaattcccacctatgagtgagaacatgcggtgtttggttttctgtccttgcgatagtttgctgagaatgatggtttccagcttcatccaygtccctacaaaggacatgaactcatcattgtttatggctgcatagtattccatggtgtatatgtgccacattttcttaatccagtctatcattgttggac

SEQ ID NO: 410716 - DNA, 201 bp, Homo sapiens
caaaatgacagagatttggggagggacagacgaggagagagaagcacgggggaatttctctctgctgctccatgtctttcagcctgtcctggagctggccsgtgccagacaccaaaggtcgttggagtcacaggcagggagaaaagaacgaggcagctaccgaggcagctaccaaggccgaaagtgagacatcaatagttc

SEQ ID NO: 410717 - DNA, 201 bp, Homo sapiens
ccaggtattctgtaagctgtaccctgaggtttcctgatgatggctgaaatgctgggaaggccactgtggacccagggcaggaactggagagcagccaccasaggaatgggggtttctaggagccatgggtgttagcgaggggtgcggtgtccctacctgtccctccaacaccagccccggcctgctgtgggagtgttcagc

SEQ ID NO: 410718 - DNA, 201 bp, Homo sapiens; identical to SEQ ID NO: 92498

SEQ ID NO: 410719 - DNA, 201 bp, Homo sapiens
agaaacacatacagagatagagccttacaaagagataggtgcggtggctcacgcctgtaatcccaacactttggaaggccaaggcagatggatcacttgargtcaggagttggagaccagcctggcctacatagtgaaaccccatctctactaaaaatacaaaaaattagccaggtgtggtggtgggcgcttgtagttcca

SEQ ID NO: 410720 - DNA, 201 bp, Homo sapiens
agcagggcaggaattggggatgggataaaactggaagctggcagtgaggatgctgcttgggctcaagctgagtttggtgtggggagtgaggttggaaaaargatatggatgacgattggggctggggctggggaagaagatgggataggcttggagtcaaagacagagttggagccaggttagaggttgcagtgggttttg

SEQ ID NO: 410721 - DNA, 201 bp, Homo sapiens
ggtgtgagccaccacacccggcctggtgtagcaattctaatgcattatattagttttccattgctgcataacaagttaccatatgtttggcagcttgaacraaacacatttattatctcatagtttctatgagcccagagtcagcacagctcaactggatccttttttcaggatatcaccaggttgcaatcaaggtgtcag

SEQ ID NO: 410722 - DNA, 201 bp, Homo sapiens; identical to SEQ ID NO: 92500

SEQ ID NO: 410723 - DNA, 201 bp, Homo sapiens; identical to SEQ ID NO: 92503

SEQ ID NO: 410724 - DNA, 201 bp, Homo sapiens
tttaatcttctctcggaggaggctcatgcgcccgggactcatgccccttcctttcccctctcgctcccagcaggacgcgcccaagcccactcctgcagccygccgctgctccggcctggcccggagggtgctgaccatcgccttcgccctgctcatcctgggcctcatgacctgggcctacgccgccggggtgccgctggc

SEQ ID NO: 410725 - DNA, 201 bp, Homo sapiens
gagttctagactagcctggccaacatggtgaaaccctgtctctactaaaaatacaaaaattagccgagcatggtggcgaatgcctataatcccagctactygggaggctgagggaggagaatcttttgaacccgggaggcggagggtgcggtgagccgagattgcaccattgcactccagcctgggcaacaagagcaaaac

SEQ ID NO: 410726 - DNA, 201 bp, Homo sapiens
cattctttcatccatccatctatccctttatccaatatggagatcattcgttcatttattcattcatttacccattcaatgtagaggcattctttcctttyttcattcacctacgcattccaggaagagacaatttcactcattcttgactcatccattcatctatccatccattcaatatagagattcatttgttcattc

SEQ ID NO: 410727 - DNA, 201 bp, Homo sapiens
cagactacaaaaggcaaggtcggaagcagggaggccactgaggatgccaagtgacacaggggaaggagtctggacactgtcaagtaatgcccaggattctmgtcttgtgtgggcttggctggaaaccatgcagggattgattaatgatgtctgccacaaaacaggaaggaggcctgatggttcccttgagaagttctaata

SEQ ID NO: 410728 - DNA, 201 bp, Homo sapiens
gggaacccgcggcggcgggcgcggtgggcgccggagcctatcgggaggtggaggcggaggatcctgggcggctggcagtggaggcgctggtgaggactcgyaggtgcgtgtgcgtggcgcagcgctggggcggcaagcgcgaggtcatgtacacagccttcaaggcgctcggagattcggtggactacgtgcaggtgagta

SEQ ID NO: 410729 - DNA, 201 bp, Homo sapiens
agggagggagagagagagggaggggagggaaagggaaggagggaaggaaggaaaggatttttaatcttctctcggaggaggctcatgcgcccgggactcaygccccttcctttcccctctcgctcccagcaggacgcgcccaagcccactcctgcagcctgccgctgctccggcctggcccggagggtgctgaccatcgcc

SEQ ID NO: 410730 - DNA, 201 bp, Homo sapiens
taagagatttcaaaacgtggaaaaaagttgtattggaagaaacaaaatcaggctgggcttggtggctcatgcctgtattcatagcactttgggagactggrgcctaggagacatagtgagacccctcctctaattttttttttttttaattagcaaggcatagtgactccagccttgtggtcctagcttcttgggagactg

SEQ ID NO: 410731 - DNA, 201 bp, Homo sapiens
aataaattcattcatcttaaaggcttagagcagggactggtacacagcattttggttttttagtatgtgttattattattactgtctcaaccctaagaaamctttgattgggagataaatcctcattgtatgtgccactaagaaagaggagggaaacgccctagtaattaaattgtgacactccatcgcatgcaatcatcc

SEQ ID NO: 410732 - DNA, 201 bp, Homo sapiens
aactattattcttcttttggctttcaaaaaccatctaaaaacacacacacaaattcttagcctgcaggctgcagcaggtcttagcatgccgacccctgctrcatataagatatgatcatttcaatatgtaatcaatacataaatgttaatgagctattttactttcttttccccagacttggccttcaaaatccagtgtgt

SEQ ID NO: 410733 - DNA, 201 bp, Homo sapiens
agactacaaaaggcaaggtcggaagcagggaggccactgaggatgccaagtgacacaggggaaggagtctggacactgtcaagtaatgcccaggattctastcttgtgtgggcttggctggaaaccatgcagggattgattaatgatgtctgccacaaaacaggaaggaggcctgatggttcccttgagaagttctaatac

SEQ ID NO: 410734 - DNA, 201 bp, Homo sapiens
gaagaaacaaaatcaggctgggcttggtggctcatgcctgtattcatagcactttgggagactggggcctaggagacatagtgagacccctcctctaattktttttttttttaattagcaaggcatagtgactccagccttgtggtcctagcttcttgggagactgaggtgagagaatcgccagagcctaggagttagaag

SEQ ID NO: 410735 - DNA, 201 bp, Homo sapiens
gggagtgaggttggaaaaaagatatggatgacgattggggctggggctggggaagaagatgggataggcttggagtcaaagacagagttggagccaggttwgaggttgcagtgggttttggatggggctgagaatggatatgggattggtgatgagactggggtgggcaggtttgcagtcacagtgggtatagttcaatga

SEQ ID NO: 410736 - DNA, 201 bp, Homo sapiens
aggctgggagagcaagccggagagaagagagagcccggccagacccactgcgatgagacaggtgtgtgtgtgtgtgtgtgtgtgtgtgtgtgtgtgtgtgkgtgtatacagccatgtggggaaaactactgccatatgtgtgaccacgtgtgttggggaactgtgtgtgcatgatttcatgtgtgtatccatgtgcctgac

SEQ ID NO: 410737 - DNA, 201 bp, Homo sapiens
cagggtctgagggaggaggggatgggggcctggactcctgggtctgagggaggaggagatggagtctggactcctgggtctgagggaggaggggatggggyctggactcctgggtctgagggaggaggggatggggcctggactcctgggtctgagggaggaggggatggggcctggactcctgggtctgagggaggcggg

SEQ ID NO: 410738 - DNA, 201 bp, Homo sapiens
tccagggtctgagggaggaggggatgggggcctggactcctgggtctgagggaggaggagatggagtctggactcctgggtctgagggaggaggggatggrgcctggactcctgggtctgagggaggaggggatggggcctggactcctgggtctgagggaggaggggatggggcctggactcctgggtctgagggaggcg

SEQ ID NO: 410739 - DNA, 201 bp, Homo sapiens
ctgggctccagggtctgagggaggaggggatgggggcctggactcctgggtctgagggaggaggagatggagtctggactcctgggtctgagggaggaggrgatggggcctggactcctgggtctgagggaggaggggatggggcctggactcctgggtctgagggaggaggggatggggcctggactcctgggtctgagg

SEQ ID NO: 410740 - DNA, 201 bp, Homo sapiens
tgagggaggaggggatgggggcctgggcctgggctccagggtctgagggaggaggggatgggggcctggactcctgggtctgagggaggaggagatggagbctggactcctgggtctgagggaggaggggatggggcctggactcctgggtctgagggaggaggggatggggcctggactcctgggtctgagggaggaggg

SEQ ID NO: 410741 - DNA, 201 bp, Homo sapiens
cctgggtctgagggaggaggggatgggggcctgggcctgggctccagggtctgagggaggaggggatgggggcctggactcctgggtctgagggaggaggrgatggagtctggactcctgggtctgagggaggaggggatggggcctggactcctgggtctgagggaggaggggatggggcctggactcctgggtctgagg

SEQ ID NO: 410742 - DNA, 201 bp, Homo sapiens; identical to SEQ ID NO: 92499

SEQ ID NO: 410743 - DNA, 201 bp, Homo sapiens; identical to SEQ ID NO: 92502

SEQ ID NO: 410744 - DNA, 201 bp, Homo sapiens
caccctattctacacatgagaacactgaggcctagagaggttaagaaactcgcccccagtggccgtccacagtggtcatttctgcctccagaatcctgccyaggccccagggagcacgcgatgatgccctcattcctcgcccccgtgcaggtacacctccaggtcccgctgctactcagagacgccctcgtccttcctgcg

SEQ ID NO: 410745 - DNA, 201 bp, Homo sapiens
ccagctgcattgcaccccttgatgccttcctctcaagcatcagcctgatgcaggggtctgtgctgatcctggccccttccaccttacaggtctgtgactcrgacacaaggttggaccccatggcactgctggagctcgtgcgggtactggacgaggacccccgggtaggggctgttggtggggacgtgcggatccttaacc

SEQ ID NO: 410746 - DNA, 201 bp, Homo sapiens
tgcaccttgctctttttttttttttttctgattcaggttctcactctgtagcccaggttggactgcagtgatgtaatcatggctcactgcagccttgaccyctcaagctcaagcctcggtcccccaaagtgctgggattacaggtgtgagccaccacacccagccgaccctcatctcttacagaggtaagtctagacttta

SEQ ID NO: 410747 - DNA, 201 bp, Homo sapiens; identical to SEQ ID NO: 92505

SEQ ID NO: 410748 - DNA, 201 bp, Homo sapiens
agggagaagggaagccggatggggctgaggatgtgactggggttgggaacaaagatgcagcagggcaggaattggggatgggataaaactggaagctggcrgtgaggatgctgcttgggctcaagctgagtttggtgtggggagtgaggttggaaaaaagatatggatgacgattggggctggggctggggaagaagatgg

SEQ ID NO: 410749 - DNA, 201 bp, Homo sapiens
ttgtatatccaactgcctccaagacatttctacttggatgcctaataggcatctcaaaccagactcctaatatcttctcgccttcctccctgctaatcccygtgaaacctgctcctccatcagtctatctcagtaaacagaacttcatcctcccagctgctcaggccaaaaaatgctagagctgtaactgtccatcactag

SEQ ID NO: 410750 - DNA, 201 bp, Homo sapiens; identical to SEQ ID NO: 92507

SEQ ID NO: 410751 - DNA, 201 bp, Homo sapiens
acacaagaaataaataagtagaacatacagtatgttcatgatatgtgttatggagataaataatgccgggcaagggtggtggataggaagttttggggttsggggtgaagtgttaagtggagtgcctgaggtaggatggggctcaaggctgagaatagtgtggctggagcactgaactgggggagtattaggagagcagga

SEQ ID NO: 410752 - DNA, 201 bp, Homo sapiens
tacaggtctgtgactcggacacaaggttggaccccatggcactgctggagctcgtgcgggtactggacgaggacccccgggtaggggctgttggtggggaygtgcggatccttaaccctctggactcctgggtcagcttcctaagcagcctgcgatactgggtagccttcaatgtggagcgggcttgtcagagctacttcc

SEQ ID NO: 410753 - DNA, 201 bp, Homo sapiens
tcaccatgttggctaggctggtctcaaactcctgacctcaggtgatctgcccacttcagcctcccaaagtgctgggattacaggtgtgagccaccacaccyggcctggtgtagcaattctaatgcattatattagttttccattgctgcataacaagttaccatatgtttggcagcttgaacgaaacacatttattatctc

SEQ ID NO: 410754 - DNA, 201 bp, Homo sapiens
cccagctactcgggaggctgagggaggagaatcttttgaacccgggaggcggagggtgcggtgagccgagattgcaccattgcactccagcctgggcaacragagcaaaactccgtctcaaataaataaataaataaaagttcttccttacttcattcagtgtagaaattctttttctttactcactcatggatataccat

SEQ ID NO: 410755 - DNA, 201 bp, Homo sapiens
aggattaaagccctggttatccttcctcaaccgcactctggttttagaaacatctggttttatacagctgctccacccgagcagggcggggtgggggctgrgcagccaaatgccccacttctggggaggagcctgcgctgccccctcccactgggcggaggactcaccctccccttctgctctgggctggcctcagatcat

SEQ ID NO: 410756 - DNA, 201 bp, Homo sapiens
gccccctcccactgggcggaggactcaccctccccttctgctctgggctggcctcagatcatctgaggacccatcatcctgacacagccagacaccaggcrgcccggctcccggcaacagcgtcagacacagcccggcccgccctggtgggtgggaagggcgttcgagctccttgggaatgcaccttctccctgacaggcc

SEQ ID NO: 410757 - DNA, 201 bp, Homo sapiens
atcaggctgggcttggtggctcatgcctgtattcatagcactttgggagactggggcctaggagacatagtgagacccctcctctaattttttttttttttaattagcaaggcatagtgactccagccttgtggtcctagcttcttgggagactgaggtgagagaatcgccagagcctaggagttagaagctgcagtgagc

SEQ ID NO: 410758 - DNA, 201 bp, Homo sapiens
tctgagggaggaggggatgggggcctgggcctgggctccagggtctgagggaggaggggatgggggcctggactcctgggtctgagggaggaggagatggrgtctggactcctgggtctgagggaggaggggatggggcctggactcctgggtctgagggaggaggggatggggcctggactcctgggtctgagggaggag

SEQ ID NO: 410759 - DNA, 201 bp, Homo sapiens
tggcagagcactatctgtcccccagggctctcccgagggctagaggtttagagattcagttcctagggttcaaatccaggttcctctgctttccagggacraccttgggcaaattgctgaacctctgtgtgactcagttgcctcatctgtacaacggggataataataacagtacctaccttacagcgctgttgtaaagat

SEQ ID NO: 410760 - DNA, 201 bp, Homo sapiens
tgtgggtggcggggactggcagccgttctatctacctacttttctgtccacttgtctgtttacaaaggaaaaacaaaggtgacactggagaaaccgacacrtttgaggttctaaaaattaaacgagccacaatataaacagtctcacatcttggtacctcaccaaatgtcccctcattttttcctgtttttacgactttcg

SEQ ID NO: 410761 - DNA, 201 bp, Homo sapiens
ctgggctgtgggtggcggggactggcagccgttctatctacctacttttctgtccacttgtctgtttacaaaggaaaaacaaaggtgacactggagaaacsgacacgtttgaggttctaaaaattaaacgagccacaatataaacagtctcacatcttggtacctcaccaaatgtcccctcattttttcctgtttttacga

SEQ ID NO: 410762 - DNA, 201 bp, Homo sapiens
cttccacgggagaggagaccctggcgtgtgtgtggcagaaaagacactgccaaggacctcgtgcctgtgtccggacccagctgctctgtgctgcaggcgtyctaggccgggggtctccaggggttctgtacatagactgtttgctcctggccagcaggcctgtagctgcgctgggagggcctccatggggcctgggctgtg

SEQ ID NO: 410763 - DNA, 201 bp, Homo sapiens
gcgtgtgtgtggcagaaaagacactgccaaggacctcgtgcctgtgtccggacccagctgctctgtgctgcaggcgttctaggccgggggtctccaggggytctgtacatagactgtttgctcctggccagcaggcctgtagctgcgctgggagggcctccatggggcctgggctgtgggtggcggggactggcagccgtt

SEQ ID NO: 410764 - DNA, 201 bp, Homo sapiens
ccacttgtctgtttacaaaggaaaaacaaaggtgacactggagaaaccgacacgtttgaggttctaaaaattaaacgagccacaatataaacagtctcacrtcttggtacctcaccaaatgtcccctcattttttcctgtttttacgactttcgaaacaaaaacctagactacactaagctttaactgttgggttctttct

SEQ ID NO: 410765 - DNA, 201 bp, Homo sapiens
tatcccaccaggtggcccctttggtctcaactcaacgttcacgcgtccactcctctgtctgcggtggctggctctctagcctgacctgactgttagagtgycaatcactgtaagccaccaagctgcgtttacagtaacaaacatacctaattctagttcgacgaggaattcgtgactaggttctggtaagaagtgtgcgcc

SEQ ID NO: 410766 - DNA, 201 bp, Homo sapiens
tcccctcattttttcctgtttttacgactttcgaaacaaaaacctagactacactaagctttaactgttgggttctttcttggcagaatttttccctagaytggtgtaaacagccagacgtgggccttcccaaacccgacctggtcctgttcctccagttacagctggcggatgctgccaagcggggagcgtttggccatg

SEQ ID NO: 410767 - DNA, 201 bp, Homo sapiens
accacagtgtgccaggaggttcaggttggccttccagagcccggcctgtgtgaaatccccacgagcacagaggacagaacgaaacatggtgttgttttgaracagggtgttactgtgtcacccaggctggagtagagtggtgccacattttttgtagagacggggtgtccctgtgtagcccaggctggtcttgaactcctg

SEQ ID NO: 410768 - DNA, 201 bp, Homo sapiens
aatacactatgtcttcaatgcttggggggctgggggtgtcctctgctaccaggtgggccggtcagtgccgactgtccggcgcgcgtcctcggggatctccrgctccccgacctacacaagcagcagcagcagcagcgagtcctgccaacgccgcagtagctgctcatgagaaaagtgcccacgctccccaagccctcctgt

SEQ ID NO: 410769 - DNA, 201 bp, Homo sapiens
ccaggctggagtacagtggaacaagcaaagctcgctataacaactcttgggcccaagtgatcctcccgcttcagcctcccaaagtgctgggattacaggcdcgagccaccgtgcccggccacgccctcactttttaattctgccatttcttcatgtgttagcttgagtccttcccctctgaagtattacgttgtataataa

SEQ ID NO: 410770 - DNA, 201 bp, Homo sapiens
tgtggcctgcagtcacagcctttctggtcctacctttcctccggaaacaggacagcatttggagggagatgggatgagtaagggagggagagagggtgctsgcacagccctggcaagaagggccagtggatgagactaggctggcacataacaggctctaggagtgcctgtcttcttcctgctcttccacgggagaggaga

SEQ ID NO: 410771 - DNA, 201 bp, Homo sapiens
gcaggctggccgcctctgctcctcccgaccgcagcccctacctctctcccagactccagtcgcccgtgcccaccgctgcccacgtggcctctttccaggcrgcagccagggcttctggcacgtcgggcgccagcactgtcgcttgtggccacggcccgcggagcttcagtcccttgagctcctcctccagagcagggccga

SEQ ID NO: 410772 - DNA, 201 bp, Homo sapiens; identical to SEQ ID NO: 92531

SEQ ID NO: 410773 - DNA, 201 bp, Homo sapiens
gggataattttctttttctttttttgagatggagtctcgctgtgtcacccaggctggaatgcagtggtgtgatctcggctcactgcaacctccacctcctrggttcaagcaattctcctgcctcagcctcccgagtagctgggattacaggtgcctgccaccatgtccagctaatattttgtattagtagagacagggttt

SEQ ID NO: 410774 - DNA, 201 bp, Homo sapiens; identical to SEQ ID NO: 92532

SEQ ID NO: 410775 - DNA, 201 bp, Homo sapiens
tcacctgctggctgtgcccacgcttcccccgccaccatcctctgctctcttctttgcctgtgctttcttcttcctcgacagggtagagctggcctctctgmccaagacagctgacagtgcatctcctttcccctgccgtgtttctggaacattgaactttaccagttgtgtttgttactatttagtaaggttatcttctcc

SEQ ID NO: 410776 - DNA, 201 bp, Homo sapiens
gtcatgagcatggatgagtcacctgctggctgtgcccacgcttcccccgccaccatcctctgctctcttctttgcctgtgctttcttcttcctcgacaggrtagagctggcctctctgaccaagacagctgacagtgcatctcctttcccctgccgtgtttctggaacattgaactttaccagttgtgtttgttactattt

SEQ ID NO: 410777 - DNA, 201 bp, Homo sapiens
gatcttggctcactgcaacctacgcctcgcaggttcaagcgattctcctgcctcagcctctcaagtagctgtgatcacaggtgcccaccaccacgcccggctaatttttctattttttagttagtgatggggtttcgtcatgttggccaggctggtcttgaactcctgacctcaggtgatccacctgctttagcctcccaa

SEQ ID NO: 410778 - DNA, 201 bp, Homo sapiens
tactgaagttcagtgataactctgagcagtttcattgtgatcactgtaaatggtaatcagttggaattctcctaaatgtcttccagacactagtaaaaaamgacctgaaaattgtttgtggaacgcttcacttttcttagactgaggacggagctggctttgaatgggaacctccatcccaggagagaagagccttcattg

SEQ ID NO: 410779 - DNA, 201 bp, Homo sapiens
cttctgctgcggaacttcctcaccttccaggcagggcccaggagccacaggagcgtgggcagggcagggtctgccctctgtgcttccgactcgccgcttgygagctggagggacagtcacctcgacctggtgggctgggtgggcctggctgtgctgtgggctgtgcctcactcctgcaagtgggcactcagcggggttggg

SEQ ID NO: 410780 - DNA, 201 bp, Homo sapiens
gccacaggagcgtgggcagggcagggtctgccctctgtgcttccgactcgccgcttgcgagctggagggacagtcacctcgacctggtgggctgggtgggyctggctgtgctgtgggctgtgcctcactcctgcaagtgggcactcagcggggttggggtcacgaggctgaggtcggcttaaagcaggagtgggcagttgg

SEQ ID NO: 410781 - DNA, 201 bp, Homo sapiens
gcttatgtgcttgagcaattcctgcagtcaaatgggccctccaccccccagtacacaaggcccagccagccagattccctccatcttcaccctcctccccygtcccaggggagccaggaaagccatgcatccaccaaggcggatgcgctgtgtccctctgcatcagcctgctgagtcctcctggacctgatgagagacagt

SEQ ID NO: 410782 - DNA, 201 bp, Homo sapiens
gctgtgctgtgggctgtgcctcactcctgcaagtgggcactcagcggggttggggtcacgaggctgaggtcggcttaaagcaggagtgggcagttggcacrtcatgtttctcctgcatcagggctgtggcaggaatgccgggtgactaccgtagacacttgtcaaggttgaggttcagagaaaggtgtggggtatcccgga

SEQ ID NO: 410783 - DNA, 201 bp, Homo sapiens; identical to SEQ ID NO: 92519

SEQ ID NO: 410784 - DNA, 201 bp, Homo sapiens
ggtcggcttaaagcaggagtgggcagttggcacatcatgtttctcctgcatcagggctgtggcaggaatgccgggtgactaccgtagacacttgtcaaggytgaggttcagagaaaggtgtggggtatcccggaggtcaccacagtgtgccaggaggttcaggttggccttccagagcccggcctgtgtgaaatccccacg

SEQ ID NO: 410785 - DNA, 201 bp, Homo sapiens
gtccggacccagctgctctgtgctgcaggcgttctaggccgggggtctccaggggttctgtacatagactgtttgctcctggccagcaggcctgtagctgygctgggagggcctccatggggcctgggctgtgggtggcggggactggcagccgttctatctacctacttttctgtccacttgtctgtttacaaaggaaaa

SEQ ID NO: 410786 - DNA, 201 bp, Homo sapiens
agctctcacctagggacaggttcaggacgtcggggcaggccagatgtgaaggctgctgctccaccagctcaaacatgggcagggcacctccaagcagagayagctgttagtgagacatggccgttaggtgcagcctcaccccagtgcttgctgcggccaagagaaaggggccagccggccacagccagcggacaaacctgt

SEQ ID NO: 410787 - DNA, 201 bp, Homo sapiens
aagggcacagatcgtacctccgagggaccccacctggacttggcagctctcacctagggacaggttcaggacgtcggggcaggccagatgtgaaggctgcwgctccaccagctcaaacatgggcagggcacctccaagcagagacagctgttagtgagacatggccgttaggtgcagcctcaccccagtgcttgctgcggc

SEQ ID NO: 410788 - DNA, 201 bp, Homo sapiens
tgctgtacttgttgtcatatgagatttctgagttgtattgttgggataattttctttttctttttttgagatggagtctcgctgtgtcacccaggctggartgcagtggtgtgatctcggctcactgcaacctccacctcctgggttcaagcaattctcctgcctcagcctcccgagtagctgggattacaggtgcctgcc

SEQ ID NO: 410789 - DNA, 201 bp, Homo sapiens
gttaacacacctggctaatttttgtaaaattttttgtagcgatggagtctcactattgttgcccaggctggtcttgaactcctggacccaagcagtcctcytgccttggtttcccaaagtgctgtgattagaggcatgagccaccctgcctggccttatttttttttaggagaaatgtcttgctctgttgcccaggctgga

SEQ ID NO: 410790 - DNA, 201 bp, Homo sapiens
aaatacactatgtcttcaatgcttggggggctgggggtgtcctctgctaccaggtgggccggtcagtgccgactgtccggcgcgcgtcctcggggatctcyggctccccgacctacacaagcagcagcagcagcagcgagtcctgccaacgccgcagtagctgctcatgagaaaagtgcccacgctccccaagccctcctg

SEQ ID NO: 410791 - DNA, 201 bp, Homo sapiens
ctgggctcaagcaatcctcctgcctctgcctccttgaaagctgggattacaggcgtgagccaccgtgccaggcctgtgattcattttgaatttatgttcgyggagggtatacggtctggtctagatttattctctttcatgaggatgtccagttgttccagcagcgtttattgaggaaaatgcctttgcaccattgcatcc

SEQ ID NO: 410792 - DNA, 201 bp, Homo sapiens
tacaggtgcctgccaccatgtccagctaatattttgtattagtagagacagggtttcaccatgttagccaggatggtctcgatctcctgaccttgtgatcygcccgcctcagcctcccaaagcgctgggattataggggtgagccactgcgcacagcctgttgggataatttaagcttgacagttcaaggcctatgaaaca

SEQ ID NO: 410793 - DNA, 201 bp, Homo sapiens
agcgatcctcctgccttagcctcccaagtagctgggactacaggtgcatgccaccatgctaagttttgtatttcttttttgttttcctcgagacagtttcrttcttgtcgcccagactggagtgcaatggggcgatcttggctcactgcaacctacgcctcgcaggttcaagcgattctcctgcctcagcctctcaagtag

SEQ ID NO: 410794 - DNA, 201 bp, Homo sapiens
cctcagcctcctgagtagctgggattacaggcgcgtacgaccatgcacagctaatttttatgttttagtagagacagggtttcaccatgttggccagggtkgtcttgaactcctgacctcaagtgatcctcccacgtcggcctcccacagtgctgggattacaggcatgagccaccatgcccgaccaatagttcatgtctt

SEQ ID NO: 410795 - DNA, 201 bp, Homo sapiens
gtggcacggtcttggctcactgcagcctctacttcccaggctcaagcgatcctcctgccttagcctcccaagtagctgggactacaggtgcatgccaccakgctaagttttgtatttcttttttgttttcctcgagacagtttcattcttgtcgcccagactggagtgcaatggggcgatcttggctcactgcaacctacg

SEQ ID NO: 410796 - DNA, 201 bp, Homo sapiens
gggccttgggttggacaagcttgtggtgaactgtcttccaaagtggctgcagcatcttgcattctcaccagcagtgaacaagggttgctattgctccagaycctcaccagcatttggtgttgtcagtgtttggatgtttgccattctgataggtgtgtgtggcatctcattgttctagtttgcatttccctgctgacatat

SEQ ID NO: 410797 - DNA, 201 bp, Homo sapiens; identical to SEQ ID NO: 92522

SEQ ID NO: 410798 - DNA, 201 bp, Homo sapiens
tccctgtgtagcccaggctggtcttgaactcctgggtacaagcagtcctccctcgtgggcctcccaaagtgctgggattacaggcgtgggctcccgtgacyagcctggaacgtgctgatgagcctctttttctcctgaaaccccggtgggaacagatggtggatgcttccaaaagcatcgaagctgtccatgaggacatcc

SEQ ID NO: 410799 - DNA, 201 bp, Homo sapiens
tgccttctacgcccctggcagattttctagaatttgctgtcccagaagcttgagaagggtccggtgccacccgacagcagaagccgggatgccgctgagaygccagcgcttctgagtccctctcactgcctgccttctggtggagagaaggctgtcctgcgggcttatgccctccccacgctcctcgcaccgttcacgcca

SEQ ID NO: 410800 - DNA, 201 bp, Homo sapiens
cacgatcgtggctcactgcagccttgacctcctgggctcaggtgatcctcctacttcagcctcctgagtagctaggcctacaggccttcactgtgcctggstaatttttttgtggagacaggatttcgctatgttgccagccaggcttgtcttaaactcctgggctcaagtgatctacctgccttggcctccccaaagtgc

SEQ ID NO: 410801 - DNA, 201 bp, Homo sapiens
gggaagctgccacagaatgccacagcactggaaagggacactctgagggcaggctccagcagcagctccaggacagccagccgcccttctgcccaggccgmccacgctgtgtcctgtgcacgccatcttcaggtttcccacacacccacttcctgaatacttttctccccaaagcaaggaggaacctcgccttcgttcctc

SEQ ID NO: 410802 - DNA, 201 bp, Homo sapiens
ggacttggcagctctcacctagggacaggttcaggacgtcggggcaggccagatgtgaaggctgctgctccaccagctcaaacatgggcagggcacctccragcagagacagctgttagtgagacatggccgttaggtgcagcctcaccccagtgcttgctgcggccaagagaaaggggccagccggccacagccagcgga

SEQ ID NO: 410803 - DNA, 201 bp, Homo sapiens
gagagcagcccagtccttgggcgtggggccgcagtgtggctgccgctcctctcacgccagcctgcacaggtcttctgagactctgactcagggagcgcccmagaaattcatgtctgtgtctgacaacttcaaacaggactttaattccaaaccaaccacagaaccggcgcctgggagcaagtgggactgaggcccaggtgc

SEQ ID NO: 410804 - DNA, 201 bp, Homo sapiens
gggcaattctcagcaaggcaaggacatggggaaggctcctgggagaggcacgccgtccaccctcaagcctgactgtcacaggtggaggccccgccccccccgtcaccacacctggggaagctgccacagaatgccacagcactggaaagggacactctgagggcaggctccagcagcagctccaggacagccagccgccct

SEQ ID NO: 410805 - DNA, 201 bp, Homo sapiens
agaagagcaaacatttatgtagctagagattgtttcacagatagaaccatagttggtatttggattatattttccacacgcttttttttttttttttggggagacagtctctcattctgtcacccaggctggagtgcagtggcacgatctcagctcattgcaacctctgcctcctgagttcaagcgattatcctgcctcag

SEQ ID NO: 410806 - DNA, 201 bp, Homo sapiens
gtgctggagtagaaggcaggcagggtcccccatctgtgggggcagcagctgtgggtctcagcacccttctgtggccaagagacaaacccaggcaaaacaaraggatttcactcttgggtaagcattgccaggggctgtgggatgggcctgggtgaggaaccttcagatgagactttcctggactatccaggtgggcccagt

SEQ ID NO: 410807 - DNA, 201 bp, Homo sapiens; identical to SEQ ID NO: 92527

SEQ ID NO: 410808 - DNA, 201 bp, Homo sapiens; identical to SEQ ID NO: 92528

SEQ ID NO: 410809 - DNA, 201 bp, Homo sapiens; identical to SEQ ID NO: 92520

SEQ ID NO: 410810 - DNA, 201 bp, Homo sapiens
cgggggtctccaggggttctgtacatagactgtttgctcctggccagcaggcctgtagctgcgctgggagggcctccatggggcctgggctgtgggtggcrgggactggcagccgttctatctacctacttttctgtccacttgtctgtttacaaaggaaaaacaaaggtgacactggagaaaccgacacgtttgaggttc

SEQ ID NO: 410811 - DNA, 201 bp, Homo sapiens; identical to SEQ ID NO: 92521

SEQ ID NO: 410812 - DNA, 201 bp, Homo sapiens
ttttcctaaagcatttttcatcccagcttgtttgcagattgctgttattgctcagagaaattcctttggcttccgcagaagatccaagcctgtctagagawttagtaaagtaaaattcaacgtgagacttgagtccgggagaaattcagtccaaactatattgtaatatagagggaaagcctgatctcacttgcattttgt

SEQ ID NO: 410813 - DNA, 201 bp, Homo sapiens
tcgcccgtgcccaccgctgcccacgtggcctctttccaggcggcagccagggcttctggcacgtcgggcgccagcactgtcgcttgtggccacggcccgcrgagcttcagtcccttgagctcctcctccagagcagggccgagggtctcgccccagcccgactggctgtgcctgcagatgatgctggtcacgcagcttttc

SEQ ID NO: 410814 - DNA, 201 bp, Homo sapiens
ttggaagtctcaccactaagcttgacgtaaaggaagaaagggtaggccaggtgcagtggttcacgtctgtaatcccagcacttagggaggctgacgtgggyggatcacccgaggtcaggaatttgagaccggcctggcaaacatggtgaaaacccatctctactaatacaaaaattagctgggcgtggtggcaggtgcctg

SEQ ID NO: 410815 - DNA, 201 bp, Homo sapiens
ctgagtcgaagaatctttccagtcgctctacatcagaagaatctagaaggaacaggacatagcgcatcaggcatcttgggtgggccacctgggtgtgagtyaagggcccttggcgtggggcagactgagcagtgcctgctctgcagcccacagacagctgtccccatgcgggtgtgaacaggtccgggggttgtgcagacc

SEQ ID NO: 410816 - DNA, 201 bp, Homo sapiens
gacgagtcaggcccagtgttgcactggtcctgctgtctggcttctgctgcggaacttcctcaccttccaggcagggcccaggagccacaggagcgtgggcrgggcagggtctgccctctgtgcttccgactcgccgcttgcgagctggagggacagtcacctcgacctggtgggctgggtgggcctggctgtgctgtgggc

SEQ ID NO: 410817 - DNA, 201 bp, Homo sapiens
tccgtcacggtcacacctcatgaaatggttagattcttccaagtgccttctacgcccctggcagattttctagaatttgctgtcccagaagcttgagaagkgtccggtgccacccgacagcagaagccgggatgccgctgagatgccagcgcttctgagtccctctcactgcctgccttctggtggagagaaggctgtcct

SEQ ID NO: 410818 - DNA, 201 bp, Homo sapiens
gtgcggcctctcgctgggcatgggccctgcagcagcacctggccatctaagttcaggagggtgctgtgtgctgcctctcccttcagtcctgcctccttcartctcagcagtcccaggtctggctctgctcccaggacgctggactctcccctcccagtggactcgcaggctggccgcctctgctcctcccgaccgcagccc

SEQ ID NO: 410819 - DNA, 201 bp, Homo sapiens
cccaggctggtcttgaactcctgggtacaagcagtcctccctcgtgggcctcccaaagtgctgggattacaggcgtgggctcccgtgaccagcctggaacrtgctgatgagcctctttttctcctgaaaccccggtgggaacagatggtggatgcttccaaaagcatcgaagctgtccatgaggacatccgcgtgctctct

SEQ ID NO: 410820 - DNA, 201 bp, Homo sapiens
tgtacatagactgtttgctcctggccagcaggcctgtagctgcgctgggagggcctccatggggcctgggctgtgggtggcggggactggcagccgttctrtctacctacttttctgtccacttgtctgtttacaaaggaaaaacaaaggtgacactggagaaaccgacacgtttgaggttctaaaaattaaacgagccac

SEQ ID NO: 410821 - DNA, 201 bp, Homo sapiens
caagcaattctcctgcctcagcctcccgagtagctgggattacaggtgcctgccaccatgtccagctaatattttgtattagtagagacagggtttcaccrtgttagccaggatggtctcgatctcctgaccttgtgatccgcccgcctcagcctcccaaagcgctgggattataggggtgagccactgcgcacagcctgt

SEQ ID NO: 410822 - DNA, 201 bp, Homo sapiens
cctgctcagctacatagctgtgccaggcgggacaaagctccccacggcccagtgaggctgcctgagacctggacgcaggccttcgacccctgcacgccccrctgcctgtctccctgggtggctcagctcggctgtgggtgtggggcggctacaaacctttttgacttgctggcaccaatcattgaagtcatcttcagtctt

SEQ ID NO: 410823 - DNA, 201 bp, Homo sapiens
ttcgacccctgcacgccccactgcctgtctccctgggtggctcagctcggctgtgggtgtggggcggctacaaacctttttgacttgctggcaccaatcaytgaagtcatcttcagtcttacagaaaaacccctaaaacgaaatgacgatgagcagaacacgacacccccatctgcagtcggctaagaggtgggggcttcc

SEQ ID NO: 410824 - DNA, 201 bp, Homo sapiens
caaaaacctagactacactaagctttaactgttgggttctttcttggcagaatttttccctagactggtgtaaacagccagacgtgggccttcccaaaccygacctggtcctgttcctccagttacagctggcggatgctgccaagcggggagcgtttggccatgagcgctatgagaacggggctttccaggagcgggcgc

SEQ ID NO: 410825 - DNA, 201 bp, Homo sapiens
ctttcttggcagaatttttccctagactggtgtaaacagccagacgtgggccttcccaaacccgacctggtcctgttcctccagttacagctggcggatgmtgccaagcggggagcgtttggccatgagcgctatgagaacggggctttccaggagcgggcgctccggtgtttccaccagctcatgaaagacacgactttg

SEQ ID NO: 410826 - DNA, 201 bp, Homo sapiens
gagtctcgctgtgtcacccaggctggaatgcagtggtgtgatctcggctcactgcaacctccacctcctgggttcaagcaattctcctgcctcagcctccygagtagctgggattacaggtgcctgccaccatgtccagctaatattttgtattagtagagacagggtttcaccatgttagccaggatggtctcgatctcc

SEQ ID NO: 410827 - DNA, 201 bp, Homo sapiens; identical to SEQ ID NO: 92534

SEQ ID NO: 410828 - DNA, 201 bp, Homo sapiens
gtgtagggagtcactctccttccgtcacggtcacacctcatgaaatggttagattcttccaagtgccttctacgcccctggcagattttctagaatttgcygtcccagaagcttgagaagggtccggtgccacccgacagcagaagccgggatgccgctgagatgccagcgcttctgagtccctctcactgcctgccttct

SEQ ID NO: 410829 - DNA, 201 bp, Homo sapiens
gccgagatctggtttctgggctcttcagcttctcctcctgccccttctcccgatgctctttcaatggggtcttccagcccccagtggctgggaactttgtsgtgagtaggggcaggcgggtggctgggaactttgtcgtgggtagggacaggcgggtggctgggaactttgtcgtgggtagggacaggcgggtggctggga

SEQ ID NO: 410830 - DNA, 201 bp, Homo sapiens
gcatgcctccccagccctgcatggacaggcctctcggagcacccgctgcagtgggggcgatggcaggcattaggctgactccagaggtggcgtggctgtgkccggtaggctgtgaacaagtcgggcgggttggagaagcttcgccaggcccgaccctcatcccagatctggagggcagggggaggccggtgcccaggtttc

SEQ ID NO: 410831 - DNA, 201 bp, Homo sapiens
cgtttggtgtcagggtgtcagggcccccggacaccccaggctgactccctccccctcccccgcagtatggcatcgtcctggacgctggttcttcacacacrtccatgtttatctacaagtggccggcagacaaggagaacgacacaggcattgtgggccagcacagctcctgtgatgttccaggtgaggcccagcccagcc

SEQ ID NO: 410832 - DNA, 201 bp, Homo sapiens
ctggagggcagggggaggccggtgcccaggtttctggcttctgccactggttccctccatggtaccacacaagggaagatggaagtgggtctgggcaccgsgagtgtgcccaccggagactccaagagaaacgtacgagtcgtcccaggaccggggtggtgagcgaggccccattttgtcctcccagggcctagtctcaga

SEQ ID NO: 410833 - DNA, 201 bp, Homo sapiens
ggggggggagcggtggcaaactggaggaacccaacttcacgtttggtgtcagggtgtcagggcccccggacaccccaggctgactccctccccctcccccscagtatggcatcgtcctggacgctggttcttcacacacgtccatgtttatctacaagtggccggcagacaaggagaacgacacaggcattgtgggccagc

SEQ ID NO: 410834 - DNA, 201 bp, Homo sapiens
catgtcgtgggacggaggagcagggcttgcgtctggggccagctgcgcttcgcctgccccagccgtccccagaagcctgttgctgacccgcaccccaagcytggcctggggaccctcttccttgcctttcaggccacgtagaggccccacctgtttccgtcctggggaagcctcctctggcctccgcagcccaagcctctg

SEQ ID NO: 410835 - DNA, 201 bp, Homo sapiens
gatggagcaggaggaggtctgggggcctggcggacacacccaggcaggcctcaggaggccaacctgggttgaccatgcccagggctttgtcctagcacctrcacccacaccctctcagcaggcagcagccttggtctccgggtggcacctgggcccctttgtctccaacctgggcgtttctgggggcttaagcagggaagg

SEQ ID NO: 410836 - DNA, 201 bp, Homo sapiens
ctctcgggccaggaagagggggtgtttggctgggtgactgccaactacctgctggagaacttcatcaaggtgggcccagcagccagccaaagagccagggrgcgtgggcgccctcggcccctggttgaccccacactcccctctccacagtacggctgggtgggccggtggttccggccacggaaggggacactgggggcc

SEQ ID NO: 410837 - DNA, 201 bp, Homo sapiens
cgtcctcaccttcacctcagtacagggcccaggtgaggtggatctgactgggcctcaagggtagttctggcctgggtcagctgcgtgtctctggagctgamctgcgctggctcagcgccgcaggctggcggatccttgctggccgggagggcatcccgcaggccagcctggtcctcaccagccctgggagttggcgctcag

SEQ ID NO: 410838 - DNA, 201 bp, Homo sapiens
gccactgtgctgtggaaggcttctccaggctgggctttaattggctggaaagacaggtgggagggtcagagcatgagcaaaggcccagtggctgggctggrcctggagaagggagggccagggacggctctcagagggagcctggtcaggggcgttgggatctgtcaagcaggcagtggggagccatggattgcccctgag

SEQ ID NO: 410839 - DNA, 201 bp, Homo sapiens
cgggtggctgggaactttgtcgtgggtagggacaggcgggtggctgggaactttgtcgtgagtagggataggcgggtggctgggaactttgtcgtgggtargggcaggcgggtggctgggaactttgtcgtgagtaggggcaggcgggtggcggcaggtgctctgagccgctggggttcggtcacagtgtgactgcgcccc

SEQ ID NO: 410840 - DNA, 201 bp, Homo sapiens
gtgagccccgctcccactccttcagggctgtgcggaagggctcagcctccgcctccgcatgcctccccagccctgcatggacaggcctctcggagcacccrctgcagtgggggcgatggcaggcattaggctgactccagaggtggcgtggctgtggccggtaggctgtgaacaagtcgggcgggttggagaagcttcgcc

SEQ ID NO: 410841 - DNA, 201 bp, Homo sapiens
ctggtcaggggcgttgggatctgtcaagcaggcagtggggagccatggattgcccctgagcacaaaagtgaagttgccagagtgagacctgtgggaggttygtcaggctggtcctctggagcggtggtggtgccaccctgtcacgctggtgattcccccagacccacggcttccacccctgctggccgaggggcttttcca

SEQ ID NO: 410842 - DNA, 201 bp, Homo sapiens
gcgaggtccagctgcatctctacggccagcactaccgagtctacacccacagcttcctctgctatggccgtgaccaggtcctccagaggctgctggccagygccctccaggtgcccctccaccctggctcacctgcactgcactgttccctcctggagcagagcctggacagccactgtgctgtggaaggcttctccaggc

SEQ ID NO: 410843 - DNA, 201 bp, Homo sapiens
ctttttgcggacttcgatggggctgcccgtggccaccctgcagcagctggaggcagccgcagtgaatgtctgcaaccagacctgggctcaggtgagccccrctcccactccttcagggctgtgcggaagggctcagcctccgcctccgcatgcctccccagccctgcatggacaggcctctcggagcacccgctgcagtgg

SEQ ID NO: 410844 - DNA, 201 bp, Homo sapiens
tctacctgggagccacagcgggtatgcgcctgctcaagtgagtgtgcctgtgccctggccctgtccccatgatggcctttggctgtgaccccttgcagggyggactccgagcacccctacagcaggctcacagccacctggggagaaggcctcttggagttctctgtgttttgcagcctgaccaatccagaggcctcgacc

SEQ ID NO: 410845 - DNA, 201 bp, Homo sapiens
ctgcctccacggccgggggatccccttgctgagtgggcgggaaggggaaggtgggccatagccgcggggcgcccgggctcagacccgggagccggggggcrgtgctggtgactcagccgcgcccgcgtctctcacctgcgcgggccggacggcggaagcttgggagcggaggcgaaacctgtccgcccgtgggcgtggccg

SEQ ID NO: 410846 - DNA, 201 bp, Homo sapiens
gccagccaaagagccagggggcgtgggcgccctcggcccctggttgaccccacactcccctctccacagtacggctgggtgggccggtggttccggccacrgaaggggacactgggggccatggacctggggggtgcctctacccagatcacttttgagacaaccagtccagctgaggacagagccagcgaggtccagctg

SEQ ID NO: 410847 - DNA, 201 bp, Homo sapiens
ataggctcatctctctgcctccctctaggtgggggcatctccagctatgcagacaacccttctggggccagccagagtcttgttggatgcctcgaacaggygcttcaggatgtgcccaaagagagacacgcgggcacacccctctacctgggagccacagcgggtatgcgcctgctcaagtgagtgtgcctgtgccctggc

SEQ ID NO: 410848 - DNA, 201 bp, Homo sapiens
tctgggcggcctttgttccttccttttcaggcatgatgtgcactgtgcgtgcctctccctcctctgggcggtcaggggtggaagaaaggcctggggtgtgkggggggaaactggggcctggggcctggagcttagcaccggcaacacccagagattgcctgctggagccccgccaggctgggctgtgaggctgaggcagca

SEQ ID NO: 410849 - DNA, 201 bp, Homo sapiens
agaggcttccgagaatcagagtgtgctcagccaggaaaggcggaggccacctattcaggaaacggggctgcagctgctgtgctgagcccgggtgggtggcrggtgccagtcctcagttcaccggcctctgcagcttcgtgtctgcctcaccgggagacctggcagggccctccctaggcaactcctcccattcccagtgcc

SEQ ID NO: 410850 - DNA, 201 bp, Homo sapiens
cccagagattgcctgctggagccccgccaggctgggctgtgaggctgaggcagcagagaggcttcccagggttcccacccctccctttggggtcctgagckggaagaaagatgcctttactgggcctgtggcgccagaccctcagcccaggcagcaatcccagcacaattgtcactgcccgttccagaaggccgggcatgg

SEQ ID NO: 410851 - DNA, 201 bp, Homo sapiens
gtgtgtgtgtgtgtgtgtgtcttgctttctcttcaggatgaagatgggaaggcattgtcagatgaggatataagagcagaggctgacaccttcatgtttgsaggtgagggtcccagtgtgggactacagtggagacagaggtccctccatctcaggatccgggtgggtggaccctggatcactccattctgcccatcttcc

SEQ ID NO: 410852 - DNA, 201 bp, Homo sapiens; identical to SEQ ID NO: 92558

SEQ ID NO: 410853 - DNA, 201 bp, Homo sapiens
gtctacagaaatgcatcttcagctttgacagccattgtcaggagtgagttccttcctagggcctgggatatgaatccatggaccaaagggagaaagttggrgagggaggaatgagcaaagtaaccagaagtacctttcgggaggatttgtatcatagctgtgctttgaaggtcgaggaagaggagaaagtgctgtctttcc

SEQ ID NO: 410854 - DNA, 201 bp, Homo sapiens
tgatggtcctcgttcatgtcagctgccattgcacccaaggataatctcttcatcaggttcctgaagccctggctgggtgagtacctgcaggtgaaaggggwtggggacaaccttgcggggagggtaggggaagtgctgctcttgcccattgtccttggctgccctactaggagaagggatactgctgagtggcggtgacaa

SEQ ID NO: 410855 - DNA, 201 bp, Homo sapiens
actgtccctggagctcttccctgggcctcaggtcctcacccttcatcccctctgccctgcaggatgtcgctgctgagcctgccctggctgggcctcagacyggtggcaatgtccccatggctactcctgctgctggttgtgggctcctggctactcgcccgcatcctggcttggacctatgccttctataacaactgccgc

SEQ ID NO: 410856 - DNA, 201 bp, Homo sapiens
cagctgccattgcacccaaggataatctcttcatcaggttcctgaagccctggctgggtgagtacctgcaggtgaaaggggatggggacaaccttgcgggragggtaggggaagtgctgctcttgcccattgtccttggctgccctactaggagaagggatactgctgagtggcggtgacaagtggagccgccaccgtcgg

SEQ ID NO: 410857 - DNA, 201 bp, Homo sapiens
ttcccctgcaaactcccaagaaggtactgagacctgagaattcagtgctcgtgctggggcaccctgagctgcacccagtgggcccaaccccaggttttggytggctgcccaggcacggaagacacacccaggctgtggggattggctgcctcagcccagcccagcccagccccgcctcctacggccttccttagatcaggg

SEQ ID NO: 410858 - DNA, 201 bp, Homo sapiens
caggaagtgacagcccttgacttgctttcagatcactcctacagaggagggcttgaaggactcgacccagatgtcggccacctattcccagggctttacgrtatggctgggtcccatcatccccttcatcgttttatgccaccctgacaccatccggtctatcaccaatgcctcaggtacccatgcagagcttgtggtggt

SEQ ID NO: 410859 - DNA, 201 bp, Homo sapiens
gggccagggccaaagacctcccagcagaagaggagaagaggttgtgtgggacaagctgctcccgacagaaggtaccaggctgggggtggcagggctggaargtcctggcctgggatgaagaggggactgcctaaggctggggtggctccaagatgctggcatgggaaactgggggtttcctggtaaatggactcctagcaa

SEQ ID NO: 410860 - DNA, 201 bp, Homo sapiens
tcagcccatctctttccctttctgtgtggttaccaggttactggaggccacttggttgttggttttggttgggactttctggacttcagatctcagccctygtttactcacccctgagccctccctgccctgcccccagcagttcctgacttcgcccctatacactgtccctggagctcttccctgggcctcaggtcctca

SEQ ID NO: 410861 - DNA, 201 bp, Homo sapiens
tggaattgtcagagttattattttagtctccctgagccaggtttcggaatccattctaatcacgcttgaagaaaactcttggttccacctgggacatgtcygggacatttaagaaatcacatttaaaccctatctggggcctgtctgtggggtacacagaggtcatgtcagactatctcaggtccatgtcaggagatgaca

SEQ ID NO: 410862 - DNA, 201 bp, Homo sapiens
ggaattgtcagagttattattttagtctccctgagccaggtttcggaatccattctaatcacgcttgaagaaaactcttggttccacctgggacatgtctsggacatttaagaaatcacatttaaaccctatctggggcctgtctgtggggtacacagaggtcatgtcagactatctcaggtccatgtcaggagatgacag

SEQ ID NO: 410863 - DNA, 201 bp, Homo sapiens
gacatgtctgggacatttaagaaatcacatttaaaccctatctggggcctgtctgtggggtacacagaggtcatgtcagactatctcaggtccatgtcagragatgacagagagtgctatagcagacagggtgtccgaggtcctttaaaggtattttgtagagtgtggagctgtgttcagttgttgcagaacatgttggga

SEQ ID NO: 410864 - DNA, 201 bp, Homo sapiens
aagaaatcacatttaaaccctatctggggcctgtctgtggggtacacagaggtcatgtcagactatctcaggtccatgtcaggagatgacagagagtgctrtagcagacagggtgtccgaggtcctttaaaggtattttgtagagtgtggagctgtgttcagttgttgcagaacatgttgggatatataggagccatgtca

SEQ ID NO: 410865 - DNA, 201 bp, Homo sapiens
gcctgtctgtggggtacacagaggtcatgtcagactatctcaggtccatgtcaggagatgacagagagtgctatagcagacagggtgtccgaggtcctttraaggtattttgtagagtgtggagctgtgttcagttgttgcagaacatgttgggatatataggagccatgtcaaggcgtgctggggtgtgctatgacctgt

SEQ ID NO: 410866 - DNA, 201 bp, Homo sapiens
cctgctatgctgggcatggagtggggaaagtgctggtaggcagccttgccctatacctgaagttcctctcttgccctctacatggcccctgatggtcctcrttcatgtcagctgccattgcacccaaggataatctcttcatcaggttcctgaagccctggctgggtgagtacctgcaggtgaaaggggatggggacaacc

SEQ ID NO: 410867 - DNA, 201 bp, Homo sapiens
aagggatcactcttggcacaagagcagctgtgggttggggggcagctttgctgatcctggctcagttcattcacgtttggggcttcagtaccttcagactsatctgggatgggctcagctgtgacacctggactttcccccatgtgattctctgcctccagaaggcaccctgttgttcacatggcagagactgggctccga

SEQ ID NO: 410868 - DNA, 201 bp, Homo sapiens
tctattagagttattacatcatcatttcaccacattgtactggccaaagaaagtcgaaagtcaaaagtccagtacagactcaaaggggtgtaaaatagaaygcatctcttaatgggagttgctgaaaaattactgtggaaagggtacgaatacagggagaagtgaagaattgggggtcaggattttgtgaagtgtctagga

SEQ ID NO: 410869 - DNA, 201 bp, Homo sapiens
aagaaagtcgaaagtcaaaagtccagtacagactcaaaggggtgtaaaatagaacgcatctcttaatgggagttgctgaaaaattactgtggaaagggtaygaatacagggagaagtgaagaattgggggtcaggattttgtgaagtgtctaggatttgttttaaatatgcaaactgataagttagcttgttactgtctca

SEQ ID NO: 410870 - DNA, 201 bp, Homo sapiens
cttggacagtctacagaaatgcatcttcagctttgacagccattgtcaggagtgagttccttcctagggcctgggatatgaatccatggaccaaagggagwaagttggggagggaggaatgagcaaagtaaccagaagtacctttcgggaggatttgtatcatagctgtgctttgaaggtcgaggaagaggagaaagtgct

SEQ ID NO: 410871 - DNA, 201 bp, Homo sapiens
ggggcagaggaccaggaggctggttgtgggggagtccatcctgatgtttgggactggggaggggcacaaaggaggcagggcccagctctagctctcttccyttctctggccaggacaagtggcagcacctggcctcagagggcagcagtcgtctggacatgtttgagcacatcagcctcatgaccttggacagtctacaga

SEQ ID NO: 410872 - DNA, 201 bp, Homo sapiens
catctcttaatgggagttgctgaaaaattactgtggaaagggtacgaatacagggagaagtgaagaattgggggtcaggattttgtgaagtgtctaggatktgttttaaatatgcaaactgataagttagcttgttactgtctcatgcattctaacagattcctgggtcagagacaaagggtagttgattactcatggcac

SEQ ID NO: 410873 - DNA, 201 bp, Homo sapiens
tctcttaatgggagttgctgaaaaattactgtggaaagggtacgaatacagggagaagtgaagaattgggggtcaggattttgtgaagtgtctaggatttkttttaaatatgcaaactgataagttagcttgttactgtctcatgcattctaacagattcctgggtcagagacaaagggtagttgattactcatggcacaa

SEQ ID NO: 410874 - DNA, 201 bp, Homo sapiens
gaatttcaacaaagttgccaagaatattcaatggggaaaggacaatctcttcaataaatgatggtgaaagaactgaatgtgtacatgcagaaaatgaaacyagatgcttatctcttaccatattcaaaaatcaaaccaaaatggataaaagacttaaatgcaagacctgaaactatgaattactcgaagaaaacattgggg

SEQ ID NO: 410875 - DNA, 201 bp, Homo sapiens
agggagctggacagagttcaaccagccaggaagtgagctaggactggtggagcagagattctatcctggtttatctggccccaaagcagatcaccttgacygttattgaatatttgacaggtggaacctagaggagggcaatatgttgaccaagggcacatagagcataggagacagagctgagacttgaatgcagttctc

SEQ ID NO: 410876 - DNA, 201 bp, Homo sapiens
ctggtggagcagagattctatcctggtttatctggccccaaagcagatcaccttgaccgttattgaatatttgacaggtggaacctagaggagggcaatakgttgaccaagggcacatagagcataggagacagagctgagacttgaatgcagttctcttgactccaagccatgggtcttcatctcctatactaacagttt

SEQ ID NO: 410877 - DNA, 201 bp, Homo sapiens
ctatcctggtttatctggccccaaagcagatcaccttgaccgttattgaatatttgacaggtggaacctagaggagggcaatatgttgaccaagggcacayagagcataggagacagagctgagacttgaatgcagttctcttgactccaagccatgggtcttcatctcctatactaacagtttctgctcgcatcccagtc

SEQ ID NO: 410878 - DNA, 201 bp, Homo sapiens
tggtttatctggccccaaagcagatcaccttgaccgttattgaatatttgacaggtggaacctagaggagggcaatatgttgaccaagggcacatagagcmtaggagacagagctgagacttgaatgcagttctcttgactccaagccatgggtcttcatctcctatactaacagtttctgctcgcatcccagtctggtcc

SEQ ID NO: 410879 - DNA, 201 bp, Homo sapiens
tgacctcaagtgatccacccacctcggcctcccaatactctgactttctaatgggttttaatatctggcagagtggctttttttgttgttaaatcaacccytgcaaacatttgttgtgtgataaagtgtatgttttatttggattgagggaaatttataatgaaatacagagatttcatgtttctttttaagtttaatcca

SEQ ID NO: 410880 - DNA, 201 bp, Homo sapiens
ctggccccaaagcagatcaccttgaccgttattgaatatttgacaggtggaacctagaggagggcaatatgttgaccaagggcacatagagcataggagasagagctgagacttgaatgcagttctcttgactccaagccatgggtcttcatctcctatactaacagtttctgctcgcatcccagtctggtccttgctggc

SEQ ID NO: 410881 - DNA, 201 bp, Homo sapiens
tcaggagtgagttccttcctagggcctgggatatgaatccatggaccaaagggagaaagttggggagggaggaatgagcaaagtaaccagaagtacctttygggaggatttgtatcatagctgtgctttgaaggtcgaggaagaggagaaagtgctgtctttccaggtagaaatatgtgtgtaaaagcaagaaggttagga

SEQ ID NO: 410882 - DNA, 201 bp, Homo sapiens
tagtgactctgtgcaggtcaccagctctctggctgctgaggtctctttcagttgtgagtgatggaaactcaacttcatgtgctctaagcaaataaagagartcaaaggagtgtaaagttcagggagggtggtcttcaggcatggctgaatccaggtgtcaatgaacattatcagggatctgtctccttttcttaatttcac

SEQ ID NO: 410883 - DNA, 201 bp, Homo sapiens
tgggagacagaggagagaagcatggtgtccaagctatactctaggtgcctaggtgcatggagacagctctctcagagataggatgcagggagagaagacastctagagagtcagtctcatgactgatacccaccatgtatctctaggaccatctatttctagatactcagtttcctgatgggaggtagctcctggctgctg

SEQ ID NO: 410884 - DNA, 201 bp, Homo sapiens
gtcaccagctctctggctgctgaggtctctttcagttgtgagtgatggaaactcaacttcatgtgctctaagcaaataaagagaatcaaaggagtgtaaakttcagggagggtggtcttcaggcatggctgaatccaggtgtcaatgaacattatcagggatctgtctccttttcttaatttcaccatttctctgcatcac

SEQ ID NO: 410885 - DNA, 201 bp, Homo sapiens
tggcctcagaaaatgttgggattacaggcatgagccactgtgcccagctgcttcttctttcttacagggtgagagggagagagagagaggagagagagagrgacagagagacagagagagagagagagaaagagagagagagttggttatgctgggggctggagcagggctgaactggaagaggatgaagtctgagttgtg

SEQ ID NO: 410886 - DNA, 201 bp, Homo sapiens
cttctggactctaatcagcccatctctttccctttctgtgtggttaccaggttactggaggccacttggttgttggttttggttgggactttctggacttyagatctcagccctcgtttactcacccctgagccctccctgccctgcccccagcagttcctgacttcgcccctatacactgtccctggagctcttccctgg

SEQ ID NO: 410887 - DNA, 201 bp, Homo sapiens
gctgccattgcacccaaggataatctcttcatcaggttcctgaagccctggctgggtgagtacctgcaggtgaaaggggatggggacaaccttgcggggakggtaggggaagtgctgctcttgcccattgtccttggctgccctactaggagaagggatactgctgagtggcggtgacaagtggagccgccaccgtcggat

SEQ ID NO: 410888 - DNA, 201 bp, Homo sapiens; identical to SEQ ID NO: 92565

SEQ ID NO: 410889 - DNA, 201 bp, Homo sapiens; identical to SEQ ID NO: 92568

SEQ ID NO: 410890 - DNA, 201 bp, Homo sapiens
  misc_feature (1)...(201): n = A,T,C or G
tggtacttttctaattctctgcttctctaattgttttctgctttttaaaattctcaaatgtttgatccccgtggagtttattttgtgatagggagaaaagntctcatttgcaaatagaaaaggtggagagttgtgtatttgttcccttgataatgactggggctggggtgtttccttagggacgacctggcccagctgccc

SEQ ID NO: 410891 - DNA, 201 bp, Homo sapiens; identical to SEQ ID NO: 92572

SEQ ID NO: 410892 - DNA, 201 bp, Homo sapiens
  misc_feature (1)...(201): n = A,T,C or G
tctgctttttaaaattctcaaatgtttgatccccgtggagtttattttgtgatagggagaaaaggtctcatttgcaaatagaaaaggtggagagttgtgtntttgttcccttgataatgactggggctggggtgtttccttagggacgacctggcccagctgcccttcctgaccatgtgcgtgaaggagagcctgaggtta

SEQ ID NO: 410893 - DNA, 201 bp, Homo sapiens; identical to SEQ ID NO: 92574

SEQ ID NO: 410894 - DNA, 201 bp, Homo sapiens
ctcccacaggcattacctgcctcatcgatattataggggtccatcacaacccaactgtgtggccggatcctgaggtgctgccttccccattcaccaccacyacccccatcctctacttttgtgtgtgtgtgtgtgaattccaaggttcctagtggagggggcagggttttgatgaggaaaatccaacatcacctcacccca

SEQ ID NO: 410895 - DNA, 201 bp, Homo sapiens; identical to SEQ ID NO: 92576

SEQ ID NO: 410896 - DNA, 201 bp, Homo sapiens; identical to SEQ ID NO: 92577

SEQ ID NO: 410897 - DNA, 201 bp, Homo sapiens; identical to SEQ ID NO: 92578

SEQ ID NO: 410898 - DNA, 201 bp, Homo sapiens
gtacctgcaggtgaaaggggatggggacaaccttgcggggagggtaggggaagtgctgctcttgcccattgtccttggctgccctactaggagaagggatmctgctgagtggcggtgacaagtggagccgccaccgtcggatgctgacgcccgccttccatttcaacatcctgaagtcctatataacgatcttcaacaaga

SEQ ID NO: 410899 - DNA, 201 bp, Homo sapiens; identical to SEQ ID NO: 92582

SEQ ID NO: 410900 - DNA, 201 bp, Homo sapiens; identical to SEQ ID NO: 92581

SEQ ID NO: 410901 - DNA, 201 bp, Homo sapiens; identical to SEQ ID NO: 92584

SEQ ID NO: 410902 - DNA, 201 bp, Homo sapiens
ttgtcagatgaggatataagagcagaggctgacaccttcatgtttggaggtgagggtcccagtgtgggactacagtggagacagaggtccctccatctcargatccgggtgggtggaccctggatcactccattctgcccatcttccccctccctccatcctcctgagggcctcaatatctgggcgctgtccaccctctgg

SEQ ID NO: 410903 - DNA, 201 bp, Homo sapiens
acccagtgggcccaaccccaggttttggctggctgcccaggcacggaagacacacccaggctgtggggattggctgcctcagcccagcccagcccagcccygcctcctacggccttccttagatcaggggccagggccaaagacctcccagcagaagaggagaagaggttgtgtgggacaagctgctcccgacagaaggta

SEQ ID NO: 410904 - DNA, 201 bp, Homo sapiens
tggcagggctggaaggtcctggcctgggatgaagaggggactgcctaaggctggggtggctccaagatgctggcatgggaaactgggggtttcctggtaamtggactcctagcaaactcccaaggattcaggtggggcccttctggactctaatcagcccatctctttccctttctgtgtggttaccaggttactggaggc

SEQ ID NO: 410905 - DNA, 201 bp, Homo sapiens
cagcccatctctttccctttctgtgtggttaccaggttactggaggccacttggttgttggttttggttgggactttctggacttcagatctcagccctcrtttactcacccctgagccctccctgccctgcccccagcagttcctgacttcgcccctatacactgtccctggagctcttccctgggcctcaggtcctcac

SEQ ID NO: 410906 - DNA, 201 bp, Homo sapiens
gaggccattattctaagtgaagtaactcaagaatagaaaaccaaataccatatattttcacctataagtgggagctaagctgtgaggacacaaatacatasagagtgatataatgagctttggagactcggagagcaaggttgggagccgggtaagggagaaaagactgcatattggggacagtatacactgcatgggtga

SEQ ID NO: 410907 - DNA, 201 bp, Homo sapiens
ttcatcaggttcctgaagccctggctgggtgagtacctgcaggtgaaaggggatggggacaaccttgcggggagggtaggggaagtgctgctcttgcccaytgtccttggctgccctactaggagaagggatactgctgagtggcggtgacaagtggagccgccaccgtcggatgctgacgcccgccttccatttcaacat

SEQ ID NO: 410908 - DNA, 201 bp, Homo sapiens
tcataaaaaggaatgaaataatgtcttttgccgcaacttggatggagctggaggccattattctaagtgaagtaactcaagaatagaaaaccaaataccayatattttcacctataagtgggagctaagctgtgaggacacaaatacatacagagtgatataatgagctttggagactcggagagcaaggttgggagccgg

SEQ ID NO: 410909 - DNA, 201 bp, Homo sapiens
atgcagagcttgtggtggtgggtgccaggccaagcctctgtgtggtctctgcagtacccaggtccctccttgagtactcgcgcccctcattgaggcttccwtctcaatgtcttctccctccattgccatctgctccctgtcttggtgttctgggcaccactggggctccaagaggcctcaattcagggcgctttctggaag

SEQ ID NO: 410910 - DNA, 201 bp, Homo sapiens
cctgacaccatccggtctatcaccaatgcctcaggtacccatgcagagcttgtggtggtgggtgccaggccaagcctctgtgtggtctctgcagtacccasgtccctccttgagtactcgcgcccctcattgaggcttccatctcaatgtcttctccctccattgccatctgctccctgtcttggtgttctgggcaccact

SEQ ID NO: 410911 - DNA, 201 bp, Homo sapiens
tggcatgggaaactgggggtttcctggtaaatggactcctagcaaactcccaaggattcaggtggggcccttctggactctaatcagcccatctctttccstttctgtgtggttaccaggttactggaggccacttggttgttggttttggttgggactttctggacttcagatctcagccctcgtttactcacccctgag

SEQ ID NO: 410912 - DNA, 201 bp, Homo sapiens; identical to SEQ ID NO: 92564

SEQ ID NO: 410913 - DNA, 201 bp, Homo sapiens
atcccactggcaaaccttctttgtctcacctgcaggtctacgaccccttccgctttgacccagagaacagcaaggggaggtcacctctggcttttattccyttctccgcagggcccaggtaagagcgccctgtgtctgaggcagggatgggatgatgggtgcgggagttaaaaaaagggggacgttgcagatggtcccagt

SEQ ID NO: 410914 - DNA, 201 bp, Homo sapiens
  misc_feature (1)...(201): n = A,T,C or G
ttgcagatggtcccagttccagctctccttccctccattccttcacagtttatgggaaaacgtccatagaatggggatgagtaggtcctagaggggtccgnggagtgctcaaaatccccttctccatctgctggtctgagctgggagctggagtcaggcccagtctccgggacatacaagcccacatgggagtcccaggca

SEQ ID NO: 410915 - DNA, 201 bp, Homo sapiens
tcagcaaatgaacttcccctccactctgtttctgttctcccagaaatatcagttttttcgaaaatcctcacttcttgaatgtttgctcaggtggggagggrgaagttgtttttgtcaattcttccattattgcttagtagtactaggagcagagcacagaggcagaacttggtatccaacctggctagcaggggaaagttt

SEQ ID NO: 410916 - DNA, 201 bp, Homo sapiens; identical to SEQ ID NO: 92571

SEQ ID NO: 410917 - DNA, 201 bp, Homo sapiens; identical to SEQ ID NO: 92570

SEQ ID NO: 410918 - DNA, 201 bp, Homo sapiens
atgtttgctcaggtggggagggggaagttgtttttgtcaattcttccattattgcttagtagtactaggagcagagcacagaggcagaacttggtatccarcctggctagcaggggaaagttttcagacttttgggacagagagtcctagcccgctgagagaactagggacaatatatgaaggcagacgatgacatctaga

SEQ ID NO: 410919 - DNA, 201 bp, Homo sapiens; identical to SEQ ID NO: 92602

SEQ ID NO: 410920 - DNA, 201 bp, Homo sapiens
tgcttagtagtactaggagcagagcacagaggcagaacttggtatccaacctggctagcaggggaaagttttcagacttttgggacagagagtcctagccygctgagagaactagggacaatatatgaaggcagacgatgacatctagacatgttcagtcaatgaattttcccttcactcctttcttgtttactctgaatt

SEQ ID NO: 410921 - DNA, 201 bp, Homo sapiens
ggcttgcagtgactttctgacccatccacctgtttttttgcagattgtcatgaataaaacggtgctgtcacctctgcctgggcctcactgacagcctgcarggggctcttggggactgggaggcttcagggaaggggcctaacctgggtgggttaggcgggatgttttccctgaaaccaagaacctgactgcctctttggc

SEQ ID NO: 410922 - DNA, 201 bp, Homo sapiens
gtcctcgttcatgtcagctgccattgcacccaaggataatctcttcatcaggttcctgaagccctggctgggtgagtacctgcaggtgaaaggggatgggracaaccttgcggggagggtaggggaagtgctgctcttgcccattgtccttggctgccctactaggagaagggatactgctgagtggcggtgacaagtgga

SEQ ID NO: 410923 - DNA, 201 bp, Homo sapiens
gtcctagcccgctgagagaactagggacaatatatgaaggcagacgatgacatctagacatgttcagtcaatgaattttcccttcactcctttcttgtttwctctgaattatcatatttttttcaaacatctttacttcctgaatgtttactcttctgttccctaattcctaccctccggtccagtccagggagtcctaag

SEQ ID NO: 410924 - DNA, 201 bp, Homo sapiens
acatctagacatgttcagtcaatgaattttcccttcactcctttcttgtttactctgaattatcatatttttttcaaacatctttacttcctgaatgtttrctcttctgttccctaattcctaccctccggtccagtccagggagtcctaagggagacctgggggtaaaagtcatctatcttttgtctagaacacctgcat

SEQ ID NO: 410925 - DNA, 201 bp, Homo sapiens
tcccttcactcctttcttgtttactctgaattatcatatttttttcaaacatctttacttcctgaatgtttactcttctgttccctaattcctaccctccrgtccagtccagggagtcctaagggagacctgggggtaaaagtcatctatcttttgtctagaacacctgcatcgttcatccattcagtcttcattcagcaa

SEQ ID NO: 410926 - DNA, 201 bp, Homo sapiens
aagcatggctgggagtacagaaagtgtgatagaaagtgtttcaagccagatctggtggctgtcgcttgtgataccaagtaccgaggaggctgaagtgggakaatcacttgaggtcaggtttaagatcaacctgggcaatatagaaagaacccatttctaaaaaagtaaaaaaccaaaataataaagtgcctcaactgaaac

SEQ ID NO: 410927 - DNA, 201 bp, Homo sapiens
agaaagtctgggcaaaaatgcaaaaagagggagcaggagagagggagaagagggaaagagaggtttgtgtgtcagggaaggagatggttataaagggaggragaagtaagagggaggaaaagtgagggagagcaagataaagagaggagggaagacagaaggagacagagagagaatgagagagaaaggaactgagttgtg

SEQ ID NO: 410928 - DNA, 201 bp, Homo sapiens
ggactttctggacttcagatctcagccctcgtttactcacccctgagccctccctgccctgcccccagcagttcctgacttcgcccctatacactgtcccyggagctcttccctgggcctcaggtcctcacccttcatcccctctgccctgcaggatgtcgctgctgagcctgccctggctgggcctcagaccggtggcaa

SEQ ID NO: 410929 - DNA, 201 bp, Homo sapiens
gcaaaaatgcaaaaagagggagcaggagagagggagaagagggaaagagaggtttgtgtgtcagggaaggagatggttataaagggagggagaagtaagasggaggaaaagtgagggagagcaagataaagagaggagggaagacagaaggagacagagagagaatgagagagaaaggaactgagttgtgatgagataata

SEQ ID NO: 410930 - DNA, 201 bp, Homo sapiens
gagctgccatcctgatggacattagagtcacctctgctcccctggaggctgctgagaatggagggccctcagcatgcaggccctttgtctgtgggaggaaycagtgcccatgtggaccaaccaggacacaaaaggatatggcaaccagctctagggatatgtcctgaggccacactgccgcccacaaacctccttccatgg

SEQ ID NO: 410931 - DNA, 201 bp, Homo sapiens
ggccctttgtctgtgggaggaatcagtgcccatgtggaccaaccaggacacaaaaggatatggcaaccagctctagggatatgtcctgaggccacactgcygcccacaaacctccttccatggggaccttcccatatagcaatccccagattgaaatcaatccataatgagaaaacacatcctcttgagcagacagcttgt

SEQ ID NO: 410932 - DNA, 201 bp, Homo sapiens
tggggacagctccaagagagaaggagcagaagtcagcagaaaccccctgcagctgctgagaatccagacacgctgctcactgcagaggctgcaccacatcyggcggctgcgaggggacttgctgtggctccttctagggaggtgcattagtcagggttctccctagaaacggaatctccttagaaacagatagggtgtttc

SEQ ID NO: 410933 - DNA, 201 bp, Homo sapiens
tcctggtaaatggactcctagcaaactcccaaggattcaggtggggcccttctggactctaatcagcccatctctttccctttctgtgtggttaccaggtyactggaggccacttggttgttggttttggttgggactttctggacttcagatctcagccctcgtttactcacccctgagccctccctgccctgcccccag

SEQ ID NO: 410934 - DNA, 201 bp, Homo sapiens
ctttggcagatgggaagtttccacttattcacatgtccgtctctgacctttttagtcttttgaatgcatccgtttttatggcattgccagactattttttmttactgtgacttttcttttcttttttctttttttgagatggagtctagctttgtcgcccaggctggagtgcagtggtgcgatctcagcttactgaaacct

SEQ ID NO: 410935 - DNA, 201 bp, Homo sapiens
ggagctcttccctgggcctcaggtcctcacccttcatcccctctgccctgcaggatgtcgctgctgagcctgccctggctgggcctcagaccggtggcaaygtccccatggctactcctgctgctggttgtgggctcctggctactcgcccgcatcctggcttggacctatgccttctataacaactgccgccggctccag

SEQ ID NO: 410936 - DNA, 201 bp, Homo sapiens; identical to SEQ ID NO: 92569

SEQ ID NO: 410937 - DNA, 201 bp, Homo sapiens
gtggctccaagatgctggcatgggaaactgggggtttcctggtaaatggactcctagcaaactcccaaggattcaggtggggcccttctggactctaatcrgcccatctctttccctttctgtgtggttaccaggttactggaggccacttggttgttggttttggttgggactttctggacttcagatctcagccctcgt

SEQ ID NO: 410938 - DNA, 201 bp, Homo sapiens
gtacccatgcagagcttgtggtggtgggtgccaggccaagcctctgtgtggtctctgcagtacccaggtccctccttgagtactcgcgcccctcattgagrcttccatctcaatgtcttctccctccattgccatctgctccctgtcttggtgttctgggcaccactggggctccaagaggcctcaattcagggcgctttc

SEQ ID NO: 410939 - DNA, 201 bp, Homo sapiens
ctcaggtacccatgcagagcttgtggtggtgggtgccaggccaagcctctgtgtggtctctgcagtacccaggtccctccttgagtactcgcgcccctcaytgaggcttccatctcaatgtcttctccctccattgccatctgctccctgtcttggtgttctgggcaccactggggctccaagaggcctcaattcagggcg

SEQ ID NO: 410940 - DNA, 201 bp, Homo sapiens
ccaaatgcgggtcttgggcacagtcacagtccccactcccgcctgcaggaactgcatcgggcaggcgttcgccatggcggagatgaaagtggtcctggcgytgatgctgctgcacttccggttcctgccagaccacactgagccccgcaggaagctggaattgatcatgcgcgccgagggcgggctttggctgcgggtgga

SEQ ID NO: 410941 - DNA, 201 bp, Homo sapiens
aggagcagagcacagaggcagaacttggtatccaacctggctagcaggggaaagttttcagacttttgggacagagagtcctagcccgctgagagaactarggacaatatatgaaggcagacgatgacatctagacatgttcagtcaatgaattttcccttcactcctttcttgtttactctgaattatcatatttttttc

SEQ ID NO: 410942 - DNA, 201 bp, Homo sapiens; identical to SEQ ID NO: 92589

SEQ ID NO: 410943 - DNA, 201 bp, Homo sapiens; identical to SEQ ID NO: 92590

SEQ ID NO: 410944 - DNA, 201 bp, Homo sapiens
tccctttctgcccttgctctgcaggaggcccagtgaatatattgccaccatcttggagctcagtgcccttgtagagaaaagaagccagcatatcctccagyacatggactttctgtattacctctcccatgacgggcggcgcttccacagggcctgccgcctggtgcatgacttcacagacgctgtcatccgggagcggcg

SEQ ID NO: 410945 - DNA, 201 bp, Homo sapiens
tgagtttgttaattttttaccgctggcttctgggtgttttcctcagagtatttatttttatctatttggctaaattttctctggtacttttctaattctcwgcttctctaattgttttctgctttttaaaattctcaaatgtttgatccccgtggagtttattttgtgatagggagaaaaggtctcatttgcaaatagaaa

SEQ ID NO: 410946 - DNA, 201 bp, Homo sapiens
agaaagtgtgatagaaagtgtttcaagccagatctggtggctgtcgcttgtgataccaagtaccgaggaggctgaagtgggataatcacttgaggtcaggyttaagatcaacctgggcaatatagaaagaacccatttctaaaaaagtaaaaaaccaaaataataaagtgcctcaactgaaaccctgaatggtgatcagta

SEQ ID NO: 410947 - DNA, 201 bp, Homo sapiens
cccgcctcctacggccttccttagatcaggggccagggccaaagacctcccagcagaagaggagaagaggttgtgtgggacaagctgctcccgacagaagrtaccaggctgggggtggcagggctggaaggtcctggcctgggatgaagaggggactgcctaaggctggggtggctccaagatgctggcatgggaaactgg

SEQ ID NO: 410948 - DNA, 201 bp, Homo sapiens
tcctagcaaactcccaaggattcaggtggggcccttctggactctaatcagcccatctctttccctttctgtgtggttaccaggttactggaggccacttrgttgttggttttggttgggactttctggacttcagatctcagccctcgtttactcacccctgagccctccctgccctgcccccagcagttcctgacttcg

SEQ ID NO: 410949 - DNA, 201 bp, Homo sapiens
ttgaggcttccatctcaatgtcttctccctccattgccatctgctccctgtcttggtgttctgggcaccactggggctccaagaggcctcaattcagggcsctttctggaaggaacccccatgcttaaggacacgggtctagacagagacatttccagcttcatggggtcaggaatgggcaagatagagatgggtatgaca

SEQ ID NO: 410950 - DNA, 201 bp, Homo sapiens
ggcctcaattcagggcgctttctggaaggaacccccatgcttaaggacacgggtctagacagagacatttccagcttcatggggtcaggaatgggcaagakagagatgggtatgacaacacagagaactgggtgtctgctggggcaggctggaatgtttcctggaggaagagttgttggagctatgtctagaccaataagt

SEQ ID NO: 410951 - DNA, 201 bp, Homo sapiens
ctgggcaccagaaagatcttttcagagctactgtggagagaggaccagctgtagaatgaagtcccagtgaagacattctgggacctgagccagggcagggsctggggatggagaggaggcaatggactggacatgtgttttggaggccgtgtcctcccgtccaagcctttgctcagcacagcagtcctaaaaggtggcaac

SEQ ID NO: 410952 - DNA, 201 bp, Homo sapiens
ttctgagtcaacctaaattccatgggggtgacactggtgggcctctacattagcctgctcatgcagtacattgcatgacatacaatgggcattaggcttarggaatctactttaatagtggcagaaacaagcctgatattggtccaggaggagtcattgccttatctctccaggtggttatctgcaaatacaactctgaga

SEQ ID NO: 410953 - DNA, 201 bp, Homo sapiens
aatagacacagtactttttcccaagatggtgggttggaggcaatgtcagtgtgcctctcccatgtggaaggacagaatagtgtgtagagattcacagtgtragctttcttttcccaagaaacaacacagggacttaacaggaaaaccagaagaatccacaaacccttcaaaagaagctacaggctgcattctactctgtga

SEQ ID NO: 410954 - DNA, 201 bp, Homo sapiens
aaacaagcctgatattggtccaggaggagtcattgccttatctctccaggtggttatctgcaaatacaactctgagaaatggctcaggtaagaacatcacrgtcttgcattggtggcatacgcagcaaggatgctcagggctgatgaagaagtgcctcttccaacacagggatatttttgaaatgaatttattacaatgga

SEQ ID NO: 410955 - DNA, 201 bp, Homo sapiens
catgtggaaggacagaatagtgtgtagagattcacagtgtaagctttcttttcccaagaaacaacacagggacttaacaggaaaaccagaagaatccacaracccttcaaaagaagctacaggctgcattctactctgtgagacaggtgaaaaactgtgaatcctcagagtaagagggggagagactgcttcctaggtaca

SEQ ID NO: 410956 - DNA, 201 bp, Homo sapiens
atccacaaacccttcaaaagaagctacaggctgcattctactctgtgagacaggtgaaaaactgtgaatcctcagagtaagagggggagagactgcttccwaggtacacatcttcactggggaatctgaaaattcagaccacaggagaaggccttaactctatccagggcttgaactgatttagggagtggtaagaaatat

SEQ ID NO: 410957 - DNA, 201 bp, Homo sapiens
tccacaaacccttcaaaagaagctacaggctgcattctactctgtgagacaggtgaaaaactgtgaatcctcagagtaagagggggagagactgcttcctrggtacacatcttcactggggaatctgaaaattcagaccacaggagaaggccttaactctatccagggcttgaactgatttagggagtggtaagaaatata

SEQ ID NO: 410958 - DNA, 201 bp, Homo sapiens
agtagaagcagcagcaggaagtcccttgcaggcattcacaatctccagcatggactgagggaagccattccttattgtatctcacaggggaccttggggawgtcagacaactagctcaggtgaggtcacaggttgaacgaaatgcccaaatgaatttcttgatataacctcgagtggggatgaactcccttgaccagaacc

SEQ ID NO: 410959 - DNA, 201 bp, Homo sapiens
tgtaataatgattgcaaatccatctctatattaggtgagtttgatggcactagctttcccacaaatttgccaatagtattattgtattattaaatttaaawtttttgtccatcttcatatttcatcttttaatgagcattttcttaaataagagtgagaaagaacatcctttgcccaagttgataagccatttattttctt

SEQ ID NO: 410960 - DNA, 201 bp, Homo sapiens
gtcccttgcaggcattcacaatctccagcatggactgagggaagccattccttattgtatctcacaggggaccttggggaagtcagacaactagctcaggygaggtcacaggttgaacgaaatgcccaaatgaatttcttgatataacctcgagtggggatgaactcccttgaccagaacccgggaggcaagcaggaagtg

SEQ ID NO: 410961 - DNA, 201 bp, Homo sapiens
ggaaaatatgggaaaatggtaatggcttccattttaacccaaaggcaatggggagccataacaagtggttgagcaggggaggggcaggtcatatctgggcrccagaaagatcttttcagagctactgtggagagaggaccagctgtagaatgaagtcccagtgaagacattctgggacctgagccagggcaggggctgggg

SEQ ID NO: 410962 - DNA, 201 bp, Homo sapiens
caactgcatgggagctagatgaggcttactgccacctgctactctccactcccttgtcaaactcttctgtgaggcagaggcagttatactcacctctggawcattaccccagtgacctaagaaccaccctctgactctcacagggcaaaacaaacaaacaaaaaaacagttgcaaaaaaaaaaaatacctaggaatatact

SEQ ID NO: 410963 - DNA, 201 bp, Homo sapiens
ggggattggctgcctcagcccagcccagcccagccccgcctcctacggccttccttagatcaggggccagggccaaagacctcccagcagaagaggagaasaggttgtgtgggacaagctgctcccgacagaaggtaccaggctgggggtggcagggctggaaggtcctggcctgggatgaagaggggactgcctaaggct

SEQ ID NO: 410964 - DNA, 201 bp, Homo sapiens
agttgtgatgagataataactatggaagtgaaagcagagtctggctgtggaaaatatgggaaaatggtaatggcttccattttaacccaaaggcaatgggragccataacaagtggttgagcaggggaggggcaggtcatatctgggcaccagaaagatcttttcagagctactgtggagagaggaccagctgtagaatga

SEQ ID NO: 410965 - DNA, 201 bp, Homo sapiens
atgaggcttactgccacctgctactctccactcccttgtcaaactcttctgtgaggcagaggcagttatactcacctctggatcattaccccagtgacctmagaaccaccctctgactctcacagggcaaaacaaacaaacaaaaaaacagttgcaaaaaaaaaaaatacctaggaatatacttaaccaaggaggttaaag

SEQ ID NO: 410966 - DNA, 201 bp, Homo sapiens
taatgagctttggagactcggagagcaaggttgggagccgggtaagggagaaaagactgcatattggggacagtatacactgcatgggtgatgggtgcacwaaaacctcagaattcaccactatagaaatcatccatgtaaccaaaccacttatatcccaaatgctattgaaataaaaggaagtaaagaagagacagatct

SEQ ID NO: 410967 - DNA, 201 bp, Homo sapiens
gggactggggaggggcacaaaggaggcagggcccagctctagctctcttcccttctctggccaggacaagtggcagcacctggcctcagagggcagcagtygtctggacatgtttgagcacatcagcctcatgaccttggacagtctacagaaatgcatcttcagctttgacagccattgtcaggagtgagttccttccta

SEQ ID NO: 410968 - DNA, 201 bp, Homo sapiens
ttactgccacctgctactctccactcccttgtcaaactcttctgtgaggcagaggcagttatactcacctctggatcattaccccagtgacctaagaaccrccctctgactctcacagggcaaaacaaacaaacaaaaaaacagttgcaaaaaaaaaaaatacctaggaatatacttaaccaaggaggttaaagctctcta

SEQ ID NO: 410969 - DNA, 201 bp, Homo sapiens
gagcataggagacagagctgagacttgaatgcagttctcttgactccaagccatgggtcttcatctcctatactaacagtttctgctcgcatcccagtctrgtccttgctggcaatgggttcctggggcagaggaccaggaggctggttgtgggggagtccatcctgatgtttgggactggggaggggcacaaaggaggca

SEQ ID NO: 410970 - DNA, 201 bp, Homo sapiens
gagctgggtgcagttgggggtcccaggccaggttcctgggttgatgggacccaaatgcgggtcttgggcacagtcacagtccccactcccgcctgcaggarctgcatcgggcaggcgttcgccatggcggagatgaaagtggtcctggcgttgatgctgctgcacttccggttcctgccagaccacactgagccccgcagg

SEQ ID NO: 410971 - DNA, 201 bp, Homo sapiens
tctaaaaaagtaaaaaaccaaaataataaagtgcctcaactgaaaccctgaatggtgatcagtaggtgtttggatgcagtagtgccctaggtcaaaaagaragtctgggcaaaaatgcaaaaagagggagcaggagagagggagaagagggaaagagaggtttgtgtgtcagggaaggagatggttataaagggagggaga

SEQ ID NO: 410972 - DNA, 201 bp, Homo sapiens
cacctgcaggtctacgaccccttccgctttgacccagagaacagcaaggggaggtcacctctggcttttattcctttctccgcagggcccaggtaagagcrccctgtgtctgaggcagggatgggatgatgggtgcgggagttaaaaaaagggggacgttgcagatggtcccagttccagctctccttccctccattcctt

SEQ ID NO: 410973 - DNA, 201 bp, Homo sapiens
aaaaaagtaaaaaaccaaaataataaagtgcctcaactgaaaccctgaatggtgatcagtaggtgtttggatgcagtagtgccctaggtcaaaaagaaagyctgggcaaaaatgcaaaaagagggagcaggagagagggagaagagggaaagagaggtttgtgtgtcagggaaggagatggttataaagggagggagaagt

SEQ ID NO: 410974 - DNA, 201 bp, Homo sapiens
tttgatgaggaaaatccaacatcacctcaccccaaaacacacacaagtgtctctccaaggctgctggacataggaaatcccactggcaaaccttctttgtytcacctgcaggtctacgaccccttccgctttgacccagagaacagcaaggggaggtcacctctggcttttattcctttctccgcagggcccaggtaagag

SEQ ID NO: 410975 - DNA, 201 bp, Homo sapiens
aagtgagggagagcaagataaagagaggagggaagacagaaggagacagagagagaatgagagagaaaggaactgagttgtgatgagataataactatggwagtgaaagcagagtctggctgtggaaaatatgggaaaatggtaatggcttccattttaacccaaaggcaatggggagccataacaagtggttgagcaggg

SEQ ID NO: 410976 - DNA, 201 bp, Homo sapiens
cagagtctggctgtggaaaatatgggaaaatggtaatggcttccattttaacccaaaggcaatggggagccataacaagtggttgagcaggggaggggcargtcatatctgggcaccagaaagatcttttcagagctactgtggagagaggaccagctgtagaatgaagtcccagtgaagacattctgggacctgagccag

SEQ ID NO: 410977 - DNA, 201 bp, Homo sapiens
aaactgaagaggtcacaaaaaaaaatagaaagacattccatgttggaaggaacattattccaacattagttggaggaactaatattgtgaaaatgactcarctaccaagaacattctacagatttaatgcaatctctgccaaaataccagtgacattctctagagaaatagaaaaaaacagattctaaaatttatatgata

SEQ ID NO: 410978 - DNA, 201 bp, Homo sapiens
gtgagactctttctcaaaaaaaaaaaaacagagcttccttcttaactgtcaccctagtagtttctaccatcaatggttttgtgtgtccctccagaagatgsctatcttgatgcccactttataagaacacagacttcttctatacaaataagagtgtataaaatagacacagtactttttcccaagatggtgggttggagg

SEQ ID NO: 410979 - DNA, 201 bp, Homo sapiens
gatgaactcccttgaccagaacccgggaggcaagcaggaagtgtgctgcagacaggagttcagaagctgggtgcctggccttggacagggacaaaaaaggrcatggcctgaaagcattgctatttctgtgggaaaagcttatggcctggggcagggctgagttctgtgcacagactgcctggatctaaatccagtgctatg

SEQ ID NO: 410980 - DNA, 201 bp, Homo sapiens
atagatgacacaaaccaatgaaaacacatcccatgttcatggattggaagaatcaatattgtgaaaatgatcatagtgcaaagcaatctacagatttaacrcaatgcctatgaaaataccttcatcatttttcacacaactgggaaaagcaattctaaaattcatatggaaccaaaacagagcctgtgtagtcaaagcaat

SEQ ID NO: 410981 - DNA, 201 bp, Homo sapiens
gcagtagaatcacttgaaccagggaggtggaggttgcagtgagacaagattgtgtcactgcactccagcctgagcaacagagactccattccctccccccrtcaaaaaagatacagaatagtgtctacagtagatggtgtgctcctatataattttttaagatgcttaaaatcagcccagaaagcatacattaaaaaaata

SEQ ID NO: 410982 - DNA, 201 bp, Homo sapiens
agcaaaaagaaaaaatttggaggcatcacattaccggacttcaaattacattacaaggctacaattaccaaaacagcatggtactggtataaaagtaggcrtttagatgaatggaacagaaaggaggacccagaaataaagccaaatacttacagccaactgatctttgacaaagcatacaaaaacataaattggggaaag

SEQ ID NO: 410983 - DNA, 201 bp, Homo sapiens
tcacatgtagaaaaatgaaactgcatccccatctctcaccttgtacaaaaatcaaaggcttaaatctaagacagaaaccataacaattttataagataacyttggaaaaactcttttggacattggcctaggcaaagaattcgtgaccaagaccacaaaagcaaatgcaacaaaaccaaaaataaatcagtggaacttaat

SEQ ID NO: 410984 - DNA, 201 bp, Homo sapiens
catgggtgatgggtgcactaaaacctcagaattcaccactatagaaatcatccatgtaaccaaaccacttatatcccaaatgctattgaaataaaaggaartaaagaagagacagatctgcacattaacaatatatctttgggagcttttctttttctaaaaatatgagttttggaaaattagttcgtttttatttttaat

SEQ ID NO: 410985 - DNA, 201 bp, Homo sapiens
gccaggaagtgagctaggactggtggagcagagattctatcctggtttatctggccccaaagcagatcaccttgaccgttattgaatatttgacaggtggracctagaggagggcaatatgttgaccaagggcacatagagcataggagacagagctgagacttgaatgcagttctcttgactccaagccatgggtcttca

SEQ ID NO: 410986 - DNA, 201 bp, Homo sapiens
tgaccaatgtctttccattctttcttcctcccttctctggtaaccaccattctcttcttggtttctatgatttctgtgttaattatttcagatctcacagktaattaaggttatgtgctgtttgtctctttgtgcctggctcatttcacttagcataatgtcctttaggttcttgcagattgccacagatgaaagaatttt

SEQ ID NO: 410987 - DNA, 201 bp, Homo sapiens
tgaccgttattgaatatttgacaggtggaacctagaggagggcaatatgttgaccaagggcacatagagcataggagacagagctgagacttgaatgcagktctcttgactccaagccatgggtcttcatctcctatactaacagtttctgctcgcatcccagtctggtccttgctggcaatgggttcctggggcagagga

SEQ ID NO: 410988 - DNA, 201 bp, Homo sapiens
gccaatttgcattccagagtctctgtactgatttagcttctggtctgcattgtgtgacaggactagtgatcctttttttctccttttgtgtagctgtatastattccattgtgtggatgtttatctaaacatctccccatccatgtatatttggcttgtttcatccttttgctaaattaaacttgtgcaatcggcatgtgt

SEQ ID NO: 410989 - DNA, 201 bp, Homo sapiens
tgtatactattccattgtgtggatgtttatctaaacatctccccatccatgtatatttggcttgtttcatccttttgctaaattaaacttgtgcaatcggyatgtgtgtacagtgagcattgctcatatgtataaacatcactgcaggacaaattcccaaaagtgcaattgttgaaccaaagaccatttgcattctacagt

SEQ ID NO: 410990 - DNA, 201 bp, Homo sapiens
catctccccatccatgtatatttggcttgtttcatccttttgctaaattaaacttgtgcaatcggcatgtgtgtacagtgagcattgctcatatgtataarcatcactgcaggacaaattcccaaaagtgcaattgttgaaccaaagaccatttgcattctacagttgtaataatgattgcaaatccatctctatattagg

SEQ ID NO: 410991 - DNA, 201 bp, Homo sapiens
tctatcaccaatgcctcaggtacccatgcagagcttgtggtggtgggtgccaggccaagcctctgtgtggtctctgcagtacccaggtccctccttgagtrctcgcgcccctcattgaggcttccatctcaatgtcttctccctccattgccatctgctccctgtcttggtgttctgggcaccactggggctccaagaggc

SEQ ID NO: 410992 - DNA, 201 bp, Homo sapiens
tcatctgcaagccagaaaccagggacactggtggtgtaaattcagcctgagtccagaaaggcctgagtccctggagttctgagggcaggagaagacagatrtcccagctgcagaagagagagcaagttcttcctttcctctgccttttgtcctgttcatgccctcaatggattggatggggtctggcgtctcagggtgggt

SEQ ID NO: 410993 - DNA, 201 bp, Homo sapiens
ccccatccatgtatatttggcttgtttcatccttttgctaaattaaacttgtgcaatcggcatgtgtgtacagtgagcattgctcatatgtataaacatcrctgcaggacaaattcccaaaagtgcaattgttgaaccaaagaccatttgcattctacagttgtaataatgattgcaaatccatctctatattaggtgagt

SEQ ID NO: 410994 - DNA, 201 bp, Homo sapiens
aagccagaaaccagggacactggtggtgtaaattcagcctgagtccagaaaggcctgagtccctggagttctgagggcaggagaagacagatgtcccagcwgcagaagagagagcaagttcttcctttcctctgccttttgtcctgttcatgccctcaatggattggatggggtctggcgtctcagggtgggtggacttcc

SEQ ID NO: 410995 - DNA, 201 bp, Homo sapiens
catccccttcatcgttttatgccaccctgacaccatccggtctatcaccaatgcctcaggtacccatgcagagcttgtggtggtgggtgccaggccaagcytctgtgtggtctctgcagtacccaggtccctccttgagtactcgcgcccctcattgaggcttccatctcaatgtcttctccctccattgccatctgctcc

SEQ ID NO: 410996 - DNA, 201 bp, Homo sapiens
atcccttagcccagtctagtggacacctaaaattaaacatcacaggaagtgacagcccttgacttgctttcagatcactcctacagaggagggcttgaagractcgacccagatgtcggccacctattcccagggctttacggtatggctgggtcccatcatccccttcatcgttttatgccaccctgacaccatccggtc

SEQ ID NO: 410997 - DNA, 201 bp, Homo sapiens
gctaaattaaacttgtgcaatcggcatgtgtgtacagtgagcattgctcatatgtataaacatcactgcaggacaaattcccaaaagtgcaattgttgaaycaaagaccatttgcattctacagttgtaataatgattgcaaatccatctctatattaggtgagtttgatggcactagctttcccacaaatttgccaatag

SEQ ID NO: 410998 - DNA, 201 bp, Homo sapiens
ctctgcactactatttccatcctgtttaccttcaaatgctaatctcttctcaaacaccctcacagacacacacagcaataatgtttgactggctatctggrcatcccttagcccagtctagtggacacctaaaattaaacatcacaggaagtgacagcccttgacttgctttcagatcactcctacagaggagggcttgaa

SEQ ID NO: 410999 - DNA, 201 bp, Homo sapiens
tcaattcagggcgctttctggaaggaacccccatgcttaaggacacgggtctagacagagacatttccagcttcatggggtcaggaatgggcaagatagakatgggtatgacaacacagagaactgggtgtctgctggggcaggctggaatgtttcctggaggaagagttgttggagctatgtctagaccaataagtagga

SEQ ID NO: 411000 - DNA, 201 bp, Homo sapiens
tgtttcctggaggaagagttgttggagctatgtctagaccaataagtaggattttttaagtgtggggcaggatgatgcagtgggcatcattggtatttggrgtcccagccagtcctggcaccagccttgcccatccctcagtccaaagcggtaggaggatttgtggctggtggagaatctgggctgctatttatgtgacat

SEQ ID NO: 411001 - DNA, 201 bp, Homo sapiens
actcacccctgagccctccctgccctgcccccagcagttcctgacttcgcccctatacactgtccctggagctcttccctgggcctcaggtcctcaccctkcatcccctctgccctgcaggatgtcgctgctgagcctgccctggctgggcctcagaccggtggcaatgtccccatggctactcctgctgctggttgtggg

SEQ ID NO: 411002 - DNA, 201 bp, Homo sapiens
ggacgacctggcccagctgcccttcctgaccatgtgcgtgaaggagagcctgaggttacatcccccagctcccttcatctcccgatgctgcacccaggacrttgttctcccagatggccgagtcatccccaaaggtgcccacagcctcagggggagaagcctcccgggtaggaagatggttccctcaggggatccttgtcc

SEQ ID NO: 411003 - DNA, 201 bp, Homo sapiens
ctctggtgctgaagccaagcttacctggctgctcctcaggccatgacaccacggccagtggcctctcctgggtcctgtacaaccttgcgaggcacccagartaccaggagcgctgccgacaggaggtgcaagagcttctgaaggaccgcgatcctaaagagattgaatggtgagtgcaagttcttctggcctgttcctgag

SEQ ID NO: 411004 - DNA, 201 bp, Homo sapiens
ccgggtgggtggaccctggatcactccattctgcccatcttccccctccctccatcctcctgagggcctcaatatctgggcgctgtccaccctctggtgcygaagccaagcttacctggctgctcctcaggccatgacaccacggccagtggcctctcctgggtcctgtacaaccttgcgaggcacccagaataccaggag

SEQ ID NO: 411005 - DNA, 201 bp, Homo sapiens
gggcccttctggactctaatcagcccatctctttccctttctgtgtggttaccaggttactggaggccacttggttgttggttttggttgggactttctgsacttcagatctcagccctcgtttactcacccctgagccctccctgccctgcccccagcagttcctgacttcgcccctatacactgtccctggagctcttc

SEQ ID NO: 411006 - DNA, 201 bp, Homo sapiens
gggaaagtgctggtaggcagccttgccctatacctgaagttcctctcttgccctctacatggcccctgatggtcctcgttcatgtcagctgccattgcacycaaggataatctcttcatcaggttcctgaagccctggctgggtgagtacctgcaggtgaaaggggatggggacaaccttgcggggagggtaggggaagtg

SEQ ID NO: 411007 - DNA, 201 bp, Homo sapiens
gttttggttgggactttctggacttcagatctcagccctcgtttactcacccctgagccctccctgccctgcccccagcagttcctgacttcgcccctatmcactgtccctggagctcttccctgggcctcaggtcctcacccttcatcccctctgccctgcaggatgtcgctgctgagcctgccctggctgggcctcaga

SEQ ID NO: 411008 - DNA, 201 bp, Homo sapiens
atccacccacctcggcctcccaatactctgactttctaatgggttttaatatctggcagagtggctttttttgttgttaaatcaacccttgcaaacatttrttgtgtgataaagtgtatgttttatttggattgagggaaatttataatgaaatacagagatttcatgtttctttttaagtttaatccaggtattttatat

SEQ ID NO: 411009 - DNA, 201 bp, Homo sapiens
atattattatgactagtatcttttcttttattatcttttcatttgatggttatttctatatggtaaaactaatgatttatgcatataaattctatgcccartgaacatagtatatgctaaagatggtatctgtatcaagagaaaaaatatagataattaagtaaaagctcttggggcaactggaaagccttctggaaaaaa

SEQ ID NO: 411010 - DNA, 201 bp, Homo sapiens
tgctaaagatggtatctgtatcaagagaaaaaatatagataattaagtaaaagctcttggggcaactggaaagccttctggaaaaaaggcaactgaacctkgttctcatatcttatgacaagataatgttcagattaatcatttttttctaaaagagtcctaaaagctctagaaggaaccatgagaaaattatttcatagc

SEQ ID NO: 411011 - DNA, 201 bp, Homo sapiens
caccaatgcctcaggtacccatgcagagcttgtggtggtgggtgccaggccaagcctctgtgtggtctctgcagtacccaggtccctccttgagtactcgygcccctcattgaggcttccatctcaatgtcttctccctccattgccatctgctccctgtcttggtgttctgggcaccactggggctccaagaggcctcaa

SEQ ID NO: 411012 - DNA, 201 bp, Homo sapiens
agttgttggagctatgtctagaccaataagtaggattttttaagtgtggggcaggatgatgcagtgggcatcattggtatttggagtcccagccagtcctkgcaccagccttgcccatccctcagtccaaagcggtaggaggatttgtggctggtggagaatctgggctgctatttatgtgacatccacctatgatgggtc

SEQ ID NO: 411013 - DNA, 201 bp, Homo sapiens
gtcccatcatccccttcatcgttttatgccaccctgacaccatccggtctatcaccaatgcctcaggtacccatgcagagcttgtggtggtgggtgccagrccaagcctctgtgtggtctctgcagtacccaggtccctccttgagtactcgcgcccctcattgaggcttccatctcaatgtcttctccctccattgccat

SEQ ID NO: 411014 - DNA, 201 bp, Homo sapiens
agaccaataagtaggattttttaagtgtggggcaggatgatgcagtgggcatcattggtatttggagtcccagccagtcctggcaccagccttgcccatcyctcagtccaaagcggtaggaggatttgtggctggtggagaatctgggctgctatttatgtgacatccacctatgatgggtcagttccttctgcctcatcc

SEQ ID NO: 411015 - DNA, 201 bp, Homo sapiens
aatcccagtactttgtgaggccaaggtgggcagatcacttgagatcaggagttcaagaccagccttgccaaattggggaaactccatctctactaaaaataaaaaaaaaaaattagctggctgttgtggtgaatgcctgtagtcccagctacttgggaggctgaggcagtagaatcacttgaaccagggaggtggaggttg

SEQ ID NO: 411016 - DNA, 201 bp, Homo sapiens
tccttctgcctcatcctatcactcatccaccctaagtttcctgctctcctcctatgggcttcaggattctccaataggagaacccacaccagctgcttgayctccccttgctctctgctcttctcatccttggacacaccaggctgagctagggaagtggcagcatcccacaaaatctatggctctgacccccaaatcctt

SEQ ID NO: 411017 - DNA, 201 bp, Homo sapiens
ctccccccgtcaaaaaagatacagaatagtgtctacagtagatggtgtgctcctatataattttttaagatgcttaaaatcagcccagaaagcatacattaaaaaaataataacctggcaacgtgtggggagaagtaaatggcattgggccataggagtgaattatgttttatagttttcaaattctgaaccagataattg

SEQ ID NO: 411018 - DNA, 201 bp, Homo sapiens
tctatggctctgacccccaaatccttagtgactctgtgcaggtcaccagctctctggctgctgaggtctctttcagttgtgagtgatggaaactcaacttyatgtgctctaagcaaataaagagaatcaaaggagtgtaaagttcagggagggtggtcttcaggcatggctgaatccaggtgtcaatgaacattatcaggg

SEQ ID NO: 411019 - DNA, 201 bp, Homo sapiens
agttttcaaattctgaaccagataattgtagacggtatgaaaattttaaatagccactgcaaaagaagaaagattaagcagagaattcagctcctttgctygatcttaaatgtttataaacgttttccagtggggcctctagtgttttctaagtataaaatcactatctgccaaaatgatacatttactaccacatttcaa

SEQ ID NO: 411020 - DNA, 201 bp, Homo sapiens
ctatggctctgacccccaaatccttagtgactctgtgcaggtcaccagctctctggctgctgaggtctctttcagttgtgagtgatggaaactcaacttcrtgtgctctaagcaaataaagagaatcaaaggagtgtaaagttcagggagggtggtcttcaggcatggctgaatccaggtgtcaatgaacattatcaggga

SEQ ID NO: 411021 - DNA, 201 bp, Homo sapiens
ctttgctgaagttgcttatcagcttaaggagattttgggctgagacaatggggttttctagatatacaatcatgtcatctgcaaacagggacaatttgacrtcttcttttcctaattgaataacctttatttccttctcctgcctaattgccctggccagaacttccaacactttatgcagccaaaaaacacatgaaaaaa

SEQ ID NO: 411022 - DNA, 201 bp, Homo sapiens
catgtgctctaagcaaataaagagaatcaaaggagtgtaaagttcagggagggtggtcttcaggcatggctgaatccaggtgtcaatgaacattatcaggratctgtctccttttcttaatttcaccatttctctgcatcactttttcttttaaggcagccgttctcttatctgtcaaccatgggtcctagcagctcagtt

SEQ ID NO: 411023 - DNA, 201 bp, Homo sapiens
ctccttttcttaatttcaccatttctctgcatcactttttcttttaaggcagccgttctcttatctgtcaaccatgggtcctagcagctcagttcttgtcmgaaagctcacctttcccccaggggtcccataaatagcctatagtttcaatattatacctggttatatcttttctgtttaacctgggatcatatggagaag

SEQ ID NO: 411024 - DNA, 201 bp, Homo sapiens
ttcaccatttctctgcatcactttttcttttaaggcagccgttctcttatctgtcaaccatgggtcctagcagctcagttcttgtcagaaagctcaccttwcccccaggggtcccataaatagcctatagtttcaatattatacctggttatatcttttctgtttaacctgggatcatatggagaagtcatcatgtgtgtg

SEQ ID NO: 411025 - DNA, 201 bp, Homo sapiens
ttttcttttaaggcagccgttctcttatctgtcaaccatgggtcctagcagctcagttcttgtcagaaagctcacctttcccccaggggtcccataaatascctatagtttcaatattatacctggttatatcttttctgtttaacctgggatcatatggagaagtcatcatgtgtgtggctcagctgtggtcgaggacac

SEQ ID NO: 411026 - DNA, 201 bp, Homo sapiens
tttctcctccttgtcatctcttggccatgtttgtagcttgtccaaggtctgggagctagggtctctttggaattgtcagagttattattttagtctccctragccaggtttcggaatccattctaatcacgcttgaagaaaactcttggttccacctgggacatgtctgggacatttaagaaatcacatttaaaccctatc

SEQ ID NO: 411027 - DNA, 201 bp, Homo sapiens
tcaggatccgggtgggtggaccctggatcactccattctgcccatcttccccctccctccatcctcctgagggcctcaatatctgggcgctgtccaccctmtggtgctgaagccaagcttacctggctgctcctcaggccatgacaccacggccagtggcctctcctgggtcctgtacaaccttgcgaggcacccagaata

SEQ ID NO: 411028 - DNA, 201 bp, Homo sapiens
tcatgtttggaggtgagggtcccagtgtgggactacagtggagacagaggtccctccatctcaggatccgggtgggtggaccctggatcactccattctgyccatcttccccctccctccatcctcctgagggcctcaatatctgggcgctgtccaccctctggtgctgaagccaagcttacctggctgctcctcaggcca

SEQ ID NO: 411029 - DNA, 201 bp, Homo sapiens
tgtgtgtgtgtgtgtgtcttgctttctcttcaggatgaagatgggaaggcattgtcagatgaggatataagagcagaggctgacaccttcatgtttggagrtgagggtcccagtgtgggactacagtggagacagaggtccctccatctcaggatccgggtgggtggaccctggatcactccattctgcccatcttccccc

SEQ ID NO: 411030 - DNA, 201 bp, Homo sapiens
  misc_feature (1)...(201): n = A,T,C or G
caggatccgggtgggtggaccctggatcactccattctgcccatcttccccctccctccatcctcctgagggcctcaatatctgggcgctgtccaccctcnggtgctgaagccaagcttacctggctgctcctcaggccatgacaccacggccagtggcctctcctgggtcctgtacaaccttgcgaggcacccagaatac

SEQ ID NO: 411031 - DNA, 201 bp, Homo sapiens; identical to SEQ ID NO: 92678

SEQ ID NO: 411032 - DNA, 201 bp, Homo sapiens
acagatctctctcgggctcaccctgcgcctgtgggacgtgtatctggtagaaggcgaacaggcgttgatgccgataacaagaatcgcctttaaggttcagyagagtaagtctacgtgtgcccagcggggcctggggagccctggggtcagaccccgactggcccgagggcagcttcctcacactgtcctcatgatcctctg

SEQ ID NO: 411033 - DNA, 201 bp, Homo sapiens
cagctcgagagacattcagagatggaacacaccagaccccagatcacaaagccaaccatgcccagcccctcccaacacccccagccccacgaccatcgttytgaattctgacgacgccgtgagcctgcctttgtactttaaactcatggaaggataaccaccttcacgttttgaaataaatgtttcctgttgaaatgattt

SEQ ID NO: 411034 - DNA, 201 bp, Homo sapiens; identical to SEQ ID NO: 92682

SEQ ID NO: 411035 - DNA, 201 bp, Homo sapiens
ctctttttcagaggaagcctctccttcagaggaagcctctccagtcacctctgccctctccaatgacatgagtcctcccaggtgagctcagccctcccagstgatgtccttccatggtgactctggctcttgcaggaggtgggctactgcagggacctgagccacatcgccgccttgttcctcctctatcttcctgaggag

SEQ ID NO: 411036 - DNA, 201 bp, Homo sapiens
ccgggtaagaggagcccagccaggagcccatccctcagggatcacaggatggagagacagaggatcccaggggaggtagggcgggagggagctgatgagcsgtgccacttctgaaacgcagggtgtgtggctcgggtgcagggagaggcaggtggatgctgggaggtcagaacctgcaagggccttggggctgtcaagtgg

SEQ ID NO: 411037 - DNA, 201 bp, Homo sapiens
tgccacgacagcttccccacgccaggcagcacgcacccctccctctgggatcagcagactacaggcgtgtcctcagtgtcaggccacgggggccacacagrgaccccgaggactccagagacgcaggcaggtggggcccagcccggaaaggcctgcgtgggctcactggagatgctgaccgcgtctgttttcctttcagcc

SEQ ID NO: 411038 - DNA, 201 bp, Homo sapiens
agcccggaaaggcctgcgtgggctcactggagatgctgaccgcgtctgttttcctttcagccaaacccgagcaagggtcgtcggcatccaggcctgtgccrgcttcacgtggcgggaagaccctctgcaagggggacaggcaggcccctccaggcccaccagcccggttcccatggcccatttggtcagcttccccgccac

SEQ ID NO: 411039 - DNA, 201 bp, Homo sapiens
aggcctgcgtgggctcactggagatgctgaccgcgtctgttttcctttcagccaaacccgagcaagggtcgtcggcatccaggcctgtgccagcttcacgkggcgggaagaccctctgcaagggggacaggcaggcccctccaggcccaccagcccggttcccatggcccatttggtcagcttccccgccacgggcacctc

SEQ ID NO: 411040 - DNA, 201 bp, Homo sapiens
tgacaatgggggctgtagccctaggagaacggggggaagatgggcagggccccgttctgggcatctcacggtgaggccggggaggcagcagggctcgcggmtaaagacctgggtctggtgctgggaagggatctggggccgggtaagaggagcccagccaggagcccatccctcagggatcacaggatggagagacagagg

SEQ ID NO: 411041 - DNA, 201 bp, Homo sapiens
ccgcgtctgttttcctttcagccaaacccgagcaagggtcgtcggcatccaggcctgtgccagcttcacgtggcgggaagaccctctgcaagggggacagrcaggcccctccaggcccaccagcccggttcccatggcccatttggtcagcttccccgccacgggcacctcgttcttccacaccctgtcctggtggggctg

SEQ ID NO: 411042 - DNA, 201 bp, Homo sapiens; identical to SEQ ID NO: 92806

SEQ ID NO: 411043 - DNA, 201 bp, Homo sapiens; identical to SEQ ID NO: 92688

SEQ ID NO: 411044 - DNA, 201 bp, Homo sapiens
ggacctgaccccaggttgctgttaactttggcagtttgataaaattccaaaaggagaaccacagtcctggcttgggggtggctgcgcgcttgtgtcaggaycccacctagaggctgggacctaagactggtgtggctgtggcctgaggatggtacatcccggggtcccaaagccagcccactggtgctcatttgctcaaag

SEQ ID NO: 411045 - DNA, 201 bp, Homo sapiens; identical to SEQ ID NO: 92689

SEQ ID NO: 411046 - DNA, 201 bp, Homo sapiens
gcgtaccagggaattcccatgaacatccggggcccgatgtggtcagtcctcctgaacattgaggaaatcaagttgaaaaaccccggaagataccaggtacrctcagccagagcacaaccaacaggacaggccgtgtcaggggcccaggtctccagctggagggaacgtcaagaccaccctggggagctgggggtgaaggtc

SEQ ID NO: 411047 - DNA, 201 bp, Homo sapiens; identical to SEQ ID NO: 92690

SEQ ID NO: 411048 - DNA, 201 bp, Homo sapiens; identical to SEQ ID NO: 92691

SEQ ID NO: 411049 - DNA, 201 bp, Homo sapiens
cagccagagcacaaccaacaggacaggccgtgtcaggggcccaggtctccagctggagggaacgtcaagaccaccctggggagctgggggtgaaggtcagwtgaacaccctgggcacagatggtgacacagtcaccacagacaaactcagctctggtgaccctccctggcttcagtaacaagccaaaatgcagctttctgc

SEQ ID NO: 411050 - DNA, 201 bp, Homo sapiens; identical to SEQ ID NO: 92692

SEQ ID NO: 411051 - DNA, 201 bp, Homo sapiens
ctgccccaaagcccaggagcttggcagcatcgcacacaggatggtgctatcagcagacattttggacaaggtgctgaagtgcctgatggacttggctcttstcatgaaatgaatgtgcatcctgaggaagcctctttttcagaggaagcctctccttcagaggaagcctctccagtcacctctgccctctccaatgacatg

SEQ ID NO: 411052 - DNA, 201 bp, Homo sapiens
gcagggacctgagccacatcgccgccttgttcctcctctatcttcctgaggaggatgcattctgggcactggtgcagctgctggccagtgagaggcactcyctgcagggtaagtgaacagctgccccggggacctcctgcagccagacctggggatggccaccctggccaggtgatcacagctttcagccaaggcaccctc

SEQ ID NO: 411053 - DNA, 201 bp, Homo sapiens
ctgcactgagccacaacgtgggcatggacttcccggccctgcagtgcgcccagcactgattccgaccagggcacccccttcagagctagggacgaacagcmgtgtgctcccacctcaggaccttgcctctgcggcctccacttggaaagttctcagttccctccaggcttctagaagcatctgggccagggctcatggctg

SEQ ID NO: 411054 - DNA, 201 bp, Homo sapiens
cacgtcactacccaacaccatgtggcatcaggtgagtttatggtcccctcagctcttcccagaggccctgcctcccgtggggctgtaggagcaggggggckggagcccctcgtggggctggtgactggctgagtcccagccagggcctgacctgggacgtcgggttctccatgggctgggagttggtttcctttcctgccc

SEQ ID NO: 411055 - DNA, 201 bp, Homo sapiens
tggtcaaagggtcctgggctccctaggagcacagggcagggacgggtggccaatgcccccaggcccttgcaccctttaccttggacccctcaccaaggctscctctgggctacagggacaccgagctgggctgccagaggacaaggggcctaagccttttcgaagctacaacaacaacgtcgatcatttggggattgtaca

SEQ ID NO: 411056 - DNA, 201 bp, Homo sapiens
cacagggtgaggggacgcctggcccggcctcagggctgttgtccagcaggtctctgagggcccacctgcccctgttctcccccatgcccctagagctatgrccctcactgtcccgtgaggggaaaaggcatggtgacaatgggggctgtagccctaggagaacggggggaagatgggcagggccccgttctgggcatctca

SEQ ID NO: 411057 - DNA, 201 bp, Homo sapiens
catctcacggtgaggccggggaggcagcagggctcgcggctaaagacctgggtctggtgctgggaagggatctggggccgggtaagaggagcccagccagragcccatccctcagggatcacaggatggagagacagaggatcccaggggaggtagggcgggagggagctgatgagccgtgccacttctgaaacgcagggt

SEQ ID NO: 411058 - DNA, 201 bp, Homo sapiens
ccctcagggatcacaggatggagagacagaggatcccaggggaggtagggcgggagggagctgatgagccgtgccacttctgaaacgcagggtgtgtggcycgggtgcagggagaggcaggtggatgctgggaggtcagaacctgcaagggccttggggctgtcaagtgggatgggcccctggtgcacccagagtacacgg

SEQ ID NO: 411059 - DNA, 201 bp, Homo sapiens; identical to SEQ ID NO: 92815

SEQ ID NO: 411060 - DNA, 201 bp, Homo sapiens; identical to SEQ ID NO: 92817

SEQ ID NO: 411061 - DNA, 201 bp, Homo sapiens
tgatgcgtggaggggctggtccagggacgtagggactgggcgggtggtcagtgaggcagaggaagcagctggcctgagcggtggcgggtgagggcaacacrctgtcactgggaggggcagcagtccctgctggacctgaccccaggttgctgttaactttggcagtttgataaaattccaaaaggagaaccacagtcctgg

SEQ ID NO: 411062 - DNA, 201 bp, Homo sapiens
agagacaggggacaggcacccatggctgtggcctggcgccgtcagcctctcagagggtgggtggcacgctgtcctcgcccagaggactgcaggcctggtcrccagatttcctgcctactcgtgcaagcgtcaccttgctgggagggaatctgaatctagggctgggactacccggagctcaaggctagggatgccctggtg

SEQ ID NO: 411063 - DNA, 201 bp, Homo sapiens; identical to SEQ ID NO: 92873

SEQ ID NO: 411064 - DNA, 201 bp, Homo sapiens; identical to SEQ ID NO: 92874

SEQ ID NO: 411065 - DNA, 201 bp, Homo sapiens
gcccgggggtctggctcactcccagcccacaggaggctcaggcgggtccccaaaggacacacaagcaaaaccctctgcccaagaggggtcatcccagggcmatggctggggctcaggcccagcctcatgggcagactgggccaggacccgacttgagagggctcagggaagcctcaagccctgggcaagcccctctctcca

SEQ ID NO: 411066 - DNA, 201 bp, Homo sapiens
tggagggctggctgaggggagactatcttcccttctgttcaaaggggtccgggcactagggttctccccaggcatttcttgctctgtgtggtcctcttgargcctcgccctccttttgcctcgagtattcccaggagggacagtccatccaggtgttctccaggaccaaggacccactgttcttcctcagtgacccaagaa

SEQ ID NO: 411067 - DNA, 201 bp, Homo sapiens; identical to SEQ ID NO: 92698

SEQ ID NO: 411068 - DNA, 201 bp, Homo sapiens; identical to SEQ ID NO: 92699

SEQ ID NO: 411069 - DNA, 201 bp, Homo sapiens
acgccctccggctctgattctgtgcagctgactctcccctccctgagagtcctcctgccctccagctgcccgggctcctgctgccatcggtgcccacgaaygggccgaccaagcccaggtggcagcatctccccatcccctgttccctggcccgaccccactaccaggagatgaccaggaagcccagcacccacccagttc

SEQ ID NO: 411070 - DNA, 201 bp, Homo sapiens
aaggtaagagcctgatgcgtggaggggctggtccagggacgtagggactgggcgggtggtcagtgaggcagaggaagcagctggcctgagcggtggcgggwgagggcaacacgctgtcactgggaggggcagcagtccctgctggacctgaccccaggttgctgttaactttggcagtttgataaaattccaaaaggagaa

SEQ ID NO: 411071 - DNA, 201 bp, Homo sapiens; identical to SEQ ID NO: 92700

SEQ ID NO: 411072 - DNA, 201 bp, Homo sapiens
ccctggcccaggaggcctccaggggaacctccagccaggctccagggactgttcccgccccacctccccagggtaaaggccgcatgttggggtcaccagakgggagggtgggaggccttggggtttgggggcctctccagctgcccagctcttgcagctgatggctccacatcttgggggaaggctctgatttcacgatgg

SEQ ID NO: 411073 - DNA, 201 bp, Homo sapiens
atggacttggctcttgtcatgaaatgaatgtgcatcctgaggaagcctctttttcagaggaagcctctccttcagaggaagcctctccagtcacctctgcyctctccaatgacatgagtcctcccaggtgagctcagccctcccaggtgatgtccttccatggtgactctggctcttgcaggaggtgggctactgcaggga

SEQ ID NO: 411074 - DNA, 201 bp, Homo sapiens
tcagagatggaacacaccagaccccagatcacaaagccaaccatgcccagcccctcccaacacccccagccccacgaccatcgttctgaattctgacgacrccgtgagcctgcctttgtactttaaactcatggaaggataaccaccttcacgttttgaaataaatgtttcctgttgaaatgattttagattttagacaga

SEQ ID NO: 411075 - DNA, 201 bp, Homo sapiens
agtgccctgcttccccagcccgggggtctggctcactcccagcccacaggaggctcaggcgggtccccaaaggacacacaagcaaaaccctctgcccaagrggggtcatcccagggcaatggctggggctcaggcccagcctcatgggcagactgggccaggacccgacttgagagggctcagggaagcctcaagccctgg

SEQ ID NO: 411076 - DNA, 201 bp, Homo sapiens
acaagaaagatctatgtgggcagtgttcgtccttaggctgcctcatccggatattgattgacggggtaaggaggcatagggagaccctggctcagggaccytccttgccctgcagtgccctgcttccccagcccgggggtctggctcactcccagcccacaggaggctcaggcgggtccccaaaggacacacaagcaaaac

SEQ ID NO: 411077 - DNA, 201 bp, Homo sapiens
atctgacagtgagtgacgcagaaccaggccttgcccctggggagctctccagcatacacctccctctcccctcccagcgtcccgcaaagcagacgtcaackccattgttaatgcacagaggaggaacctgactgttagacctgggttttccagggttgcacggcttctgggagacggatgtgaccctgaggatagggcaca

SEQ ID NO: 411078 - DNA, 201 bp, Homo sapiens
tctggatggtctagggggtgatagggcacagaaggacccaggaaagggtctgggggatgcaggacgttctacagagggcgtttgggagtcagtgctcaggycactccaggtcacgcaggtcatttgctggcctctgtcgtaattattgccatatgagagtgccacctttcctgcgacataatttagatattcctgtgaatg

SEQ ID NO: 411079 - DNA, 201 bp, Homo sapiens
tggaaccggttcgttgatgcctgggccagggatgatgacactgtgctcaagcatcttagggcctctatgaagaaactaacaagaaagcagggggacctgcmacccccaggtgggctccagtgccatgtcccctcccatgtcaccctctggggtagtcaatagtaggggagtgcccgggacccgcaaccctactacctgggc

SEQ ID NO: 411080 - DNA, 201 bp, Homo sapiens; identical to SEQ ID NO: 92706

SEQ ID NO: 411081 - DNA, 201 bp, Homo sapiens; identical to SEQ ID NO: 92887

SEQ ID NO: 411082 - DNA, 201 bp, Homo sapiens
ccagatcacaaagccaaccatgcccagcccctcccaacacccccagccccacgaccatcgttctgaattctgacgacgccgtgagcctgcctttgtacttyaaactcatggaaggataaccaccttcacgttttgaaataaatgtttcctgttgaaatgattttagattttagacagaaatattgaaaaggcactatagtg

SEQ ID NO: 411083 - DNA, 201 bp, Homo sapiens; identical to SEQ ID NO: 92889

SEQ ID NO: 411084 - DNA, 201 bp, Homo sapiens
aaccaacaatttccagaatccccgggctctggtcctcactggggtcaccccgtggcctgcgacaccagattgttttctgcccacagctcatagatcgagcrtaccagggaattcccatgaacatccggggcccgatgtggtcagtcctcctgaacattgaggaaatcaagttgaaaaaccccggaagataccaggtacgct

SEQ ID NO: 411085 - DNA, 201 bp, Homo sapiens
agccaaccatgcccagcccctcccaacacccccagccccacgaccatcgttctgaattctgacgacgccgtgagcctgcctttgtactttaaactcatggmaggataaccaccttcacgttttgaaataaatgtttcctgttgaaatgattttagattttagacagaaatattgaaaaggcactatagtgtcctcctatac

SEQ ID NO: 411086 - DNA, 201 bp, Homo sapiens
ctgcgacaccagattgttttctgcccacagctcatagatcgagcgtaccagggaattcccatgaacatccggggcccgatgtggtcagtcctcctgaacaytgaggaaatcaagttgaaaaaccccggaagataccaggtacgctcagccagagcacaaccaacaggacaggccgtgtcaggggcccaggtctccagctgg

SEQ ID NO: 411087 - DNA, 201 bp, Homo sapiens
ccatgcccagcccctcccaacacccccagccccacgaccatcgttctgaattctgacgacgccgtgagcctgcctttgtactttaaactcatggaaggatraccaccttcacgttttgaaataaatgtttcctgttgaaatgattttagattttagacagaaatattgaaaaggcactatagtgtcctcctataccttcca

SEQ ID NO: 411088 - DNA, 201 bp, Homo sapiens
gaagataccaggtacgctcagccagagcacaaccaacaggacaggccgtgtcaggggcccaggtctccagctggagggaacgtcaagaccaccctggggakctgggggtgaaggtcagatgaacaccctgggcacagatggtgacacagtcaccacagacaaactcagctctggtgaccctccctggcttcagtaacaagc

SEQ ID NO: 411089 - DNA, 201 bp, Homo sapiens
acagacaaactcagctctggtgaccctccctggcttcagtaacaagccaaaatgcagctttctgcagaaggaaaccttccttctgtccttccttcccgaastgctgactgtgggctgactgccactgggggcagggagtcttccatctgttctgagactgcttcctcctcttggccctgccctacagatcatgaaggagaa

SEQ ID NO: 411090 - DNA, 201 bp, Homo sapiens
ctcaggatctgacagtgagtgacgcagaaccaggccttgcccctggggagctctccagcatacacctccctctcccctcccagcgtcccgcaaagcagacrtcaacgccattgttaatgcacagaggaggaacctgactgttagacctgggttttccagggttgcacggcttctgggagacggatgtgaccctgaggatag

SEQ ID NO: 411091 - DNA, 201 bp, Homo sapiens
aggaaaccttccttctgtccttccttcccgaagtgctgactgtgggctgactgccactgggggcagggagtcttccatctgttctgagactgcttcctcckcttggccctgccctacagatcatgaaggagaagggcaagaggtcatctgaacacatccagcagatggacctggacgtaagcgggacattaaggaggcata

SEQ ID NO: 411092 - DNA, 201 bp, Homo sapiens
tgaggtctgcccttccctggctccttccagctggctcccaccagggctccagagcccaagacccagcatccgcgggcggctctgggaagcctggcagctcygctaactccaacatgcctcatttgacagcaaattcggcgggagatcagccgaaagagcaagtgggtgaaaatgctgggagaatgggacacctacaaaaac

SEQ ID NO: 411093 - DNA, 201 bp, Homo sapiens
acgattctttgcgatgggggctgtcctgcacctggcaggatgtttagcagcttctctggcctccacccactggaagccaggggaatgcagaagaggcttgyttattctcccatttaatgctcaggacaatatctgacataaatgttatgtcttttattttataaatgaagaaaatgagactcagaaaggtttaagcgagtc

SEQ ID NO: 411094 - DNA, 201 bp, Homo sapiens
tgccactgggggcagggagtcttccatctgttctgagactgcttcctcctcttggccctgccctacagatcatgaaggagaagggcaagaggtcatctgarcacatccagcagatggacctggacgtaagcgggacattaaggaggcatatattcttcagggatcgatacggaaccaagtaagccacagggtcccagcaga

SEQ ID NO: 411095 - DNA, 201 bp, Homo sapiens
cttccatctgttctgagactgcttcctcctcttggccctgccctacagatcatgaaggagaagggcaagaggtcatctgaacacatccagcagatggacckggacgtaagcgggacattaaggaggcatatattcttcagggatcgatacggaaccaagtaagccacagggtcccagcagagatggggtgaatgagaggga

SEQ ID NO: 411096 - DNA, 201 bp, Homo sapiens
cctcctcttggccctgccctacagatcatgaaggagaagggcaagaggtcatctgaacacatccagcagatggacctggacgtaagcgggacattaaggargcatatattcttcagggatcgatacggaaccaagtaagccacagggtcccagcagagatggggtgaatgagagggatgggggcttccccggagcagaagc

SEQ ID NO: 411097 - DNA, 201 bp, Homo sapiens
cagcggggcctggggagccctggggtcagaccccgactggcccgagggcagcttcctcacactgtcctcatgatcctctgttctggcccagagggaggtcyggccaggtgggctgggcaggacactgtgacaccgagcccatcccccacatgacccagatgaaagtcgagagtgtggtgagcacttccctgtccagatcgc

SEQ ID NO: 411098 - DNA, 201 bp, Homo sapiens
gaggtctggccaggtgggctgggcaggacactgtgacaccgagcccatcccccacatgacccagatgaaagtcgagagtgtggtgagcacttccctgtccrgatcgccccccagccacagtctcctgtgtatatctggacacctggggtggccacaaaaggatccggcaccgcccagtaggagactgaagtggccacgggg

SEQ ID NO: 411099 - DNA, 201 bp, Homo sapiens; identical to SEQ ID NO: 92719

SEQ ID NO: 411100 - DNA, 201 bp, Homo sapiens
cgagggcagcttcctcacactgtcctcatgatcctctgttctggcccagagggaggtctggccaggtgggctgggcaggacactgtgacaccgagcccatyccccacatgacccagatgaaagtcgagagtgtggtgagcacttccctgtccagatcgccccccagccacagtctcctgtgtatatctggacacctggggt

SEQ ID NO: 411101 - DNA, 201 bp, Homo sapiens
ctggccaggtgggctgggcaggacactgtgacaccgagcccatcccccacatgacccagatgaaagtcgagagtgtggtgagcacttccctgtccagatcrccccccagccacagtctcctgtgtatatctggacacctggggtggccacaaaaggatccggcaccgcccagtaggagactgaagtggccacggggtatga

SEQ ID NO: 411102 - DNA, 201 bp, Homo sapiens; identical to SEQ ID NO: 92721

SEQ ID NO: 411103 - DNA, 201 bp, Homo sapiens
cttctcaggatttcacagcccaaatggcgggaccgtccaggggctccaagaccaacaggagcatgtggtagccacgtcactacccaacaccatgtggcatyaggtgagtttatggtcccctcagctcttcccagaggccctgcctcccgtggggctgtaggagcaggggggctggagcccctcgtggggctggtgactggc

SEQ ID NO: 411104 - DNA, 201 bp, Homo sapiens
aattagtatttgtgacccaccaggatataggaagtaggatgtcagctcactgctggcataaacctccaaggaagggggtggtctcaaggggtcaagctgakacacaaaggagtcagggcctggactcctggtgtcacctgggcctgaccaccacttctcagaacaagaaatgacgccgtcctcctggggctgccccaaagc

SEQ ID NO: 411105 - DNA, 201 bp, Homo sapiens
cccattgtgatgcgtgccatgacctcagaatgtcactggtgcttagcacctatccgctctctggcctgcctcagtgttctacggcagttacacacaggcastggtatctgtgagcagctctgtggactcaaaggttttctccctgagaggcatgacccaggccagctgattcatcagagtcaggtgagcgtgacctgctct

SEQ ID NO: 411106 - DNA, 201 bp, Homo sapiens
ctgagggtctggccctgtctacttggagacaaccccggtgagatgcaagggttatggccacagggtgaggggacgcctggcccggcctcagggctgttgtscagcaggtctctgagggcccacctgcccctgttctcccccatgcccctagagctatggccctcactgtcccgtgaggggaaaaggcatggtgacaatggg

SEQ ID NO: 411107 - DNA, 201 bp, Homo sapiens
ggggaagatgggcagggccccgttctgggcatctcacggtgaggccggggaggcagcagggctcgcggctaaagacctgggtctggtgctgggaagggatmtggggccgggtaagaggagcccagccaggagcccatccctcagggatcacaggatggagagacagaggatcccaggggaggtagggcgggagggagctga

SEQ ID NO: 411108 - DNA, 201 bp, Homo sapiens
cagacattttggacaaggtgctgaagtgcctgatggacttggctcttgtcatgaaatgaatgtgcatcctgaggaagcctctttttcagaggaagcctctycttcagaggaagcctctccagtcacctctgccctctccaatgacatgagtcctcccaggtgagctcagccctcccaggtgatgtccttccatggtgactc

SEQ ID NO: 411109 - DNA, 201 bp, Homo sapiens
atttggaaactgacatccacatgaaacctgcatgccaggttcactgcttgactcctcgtcactcacacacggagccttcggggacggccttcaacacgggratggggagagcaaggctggtcctcccttcaaacggaagacccagtgagaaaagggaacgagccagtgatgcccgcacgaacgtgggtggatcctagatgc

SEQ ID NO: 411110 - DNA, 201 bp, Homo sapiens
ctcccttcaaacggaagacccagtgagaaaagggaacgagccagtgatgcccgcacgaacgtgggtggatcctagatgcattttgctgagggacagaagcyagacccaataagctaccacagtaggattcccattcctaggccattctggaaaaggccaaaccacagggactgagaagcagtctgggtggccaggggctga

SEQ ID NO: 411111 - DNA, 201 bp, Homo sapiens; identical to SEQ ID NO: 92924

SEQ ID NO: 411112 - DNA, 201 bp, Homo sapiens; identical to SEQ ID NO: 92925

SEQ ID NO: 411113 - DNA, 201 bp, Homo sapiens
agtgaaattaacaacatctgcacaaaacaaaccaaagccccctttctctgtttcctaggcagcgggaactactttacatcctcctggcgtatgaggagtayaacccggtgagtattcccggcagtgaggttcccgggccatatttccatattcacaggagtgggtgtctggtgggggtgtcgttgcttcttttaaaattag

SEQ ID NO: 411114 - DNA, 201 bp, Homo sapiens
tatttgtgacccaccaggatataggaagtaggatgtcagctcactgctggcataaacctccaaggaagggggtggtctcaaggggtcaagctgatacacaraggagtcagggcctggactcctggtgtcacctgggcctgaccaccacttctcagaacaagaaatgacgccgtcctcctggggctgccccaaagcccagga

SEQ ID NO: 411115 - DNA, 201 bp, Homo sapiens
caggatataggaagtaggatgtcagctcactgctggcataaacctccaaggaagggggtggtctcaaggggtcaagctgatacacaaaggagtcagggccbggactcctggtgtcacctgggcctgaccaccacttctcagaacaagaaatgacgccgtcctcctggggctgccccaaagcccaggagcttggcagcatcg

SEQ ID NO: 411116 - DNA, 201 bp, Homo sapiens
tggtgcagctgctggccagtgagaggcactccctgcagggtaagtgaacagctgccccggggacctcctgcagccagacctggggatggccaccctggccrggtgatcacagctttcagccaaggcaccctccttgtgtcgccagcttgttgggagactttaggatgtctctgctgagggtcccacaggagtccacggctg

SEQ ID NO: 411117 - DNA, 201 bp, Homo sapiens
cctcctgcagccagacctggggatggccaccctggccaggtgatcacagctttcagccaaggcaccctccttgtgtcgccagcttgttgggagactttagratgtctctgctgagggtcccacaggagtccacggctgacccccaaagcccaaatcagacgcctctcatccccatcagcagagggcatctcatcctccccg

SEQ ID NO: 411118 - DNA, 201 bp, Homo sapiens
ccctccttgtgtcgccagcttgttgggagactttaggatgtctctgctgagggtcccacaggagtccacggctgacccccaaagcccaaatcagacgcctstcatccccatcagcagagggcatctcatcctccccgtggccaccctctgtgtcctggagccacgccctccggctctgattctgtgcagctgactctcccc

SEQ ID NO: 411119 - DNA, 201 bp, Homo sapiens
tgggagcccggcgagagcggttcaggtgttctccgaagccgccgcgtacagtgtgacctttagacaattctgtctcacaggatggacgtggtagaggtcgygggcagttggtgggcacaagagcgagaggacatcattatgaaatacgaaaaggtacaagtcggtctgcttcttggagggaggcctcttccagtgtgccct

SEQ ID NO: 411120 - DNA, 201 bp, Homo sapiens
gcagcagtccctgctggacctgaccccaggttgctgttaactttggcagtttgataaaattccaaaaggagaaccacagtcctggcttgggggtggctgcrcgcttgtgtcaggaccccacctagaggctgggacctaagactggtgtggctgtggcctgaggatggtacatcccggggtcccaaagccagcccactggtg

SEQ ID NO: 411121 - DNA, 201 bp, Homo sapiens; identical to SEQ ID NO: 92744

SEQ ID NO: 411122 - DNA, 201 bp, Homo sapiens
ctctccaatgacatgagtcctcccaggtgagctcagccctcccaggtgatgtccttccatggtgactctggctcttgcaggaggtgggctactgcagggayctgagccacatcgccgccttgttcctcctctatcttcctgaggaggatgcattctgggcactggtgcagctgctggccagtgagaggcactccctgcagg

SEQ ID NO: 411123 - DNA, 201 bp, Homo sapiens; identical to SEQ ID NO: 92855

SEQ ID NO: 411124 - DNA, 201 bp, Homo sapiens; identical to SEQ ID NO: 92684

SEQ ID NO: 411125 - DNA, 201 bp, Homo sapiens; identical to SEQ ID NO: 92686

SEQ ID NO: 411126 - DNA, 201 bp, Homo sapiens
ctaaagcacctgtctcagctcagggatgggtttgcttttagaaaggcctttctgacgcaggacatgtctcaccaggtcgggtcaacctcctttccagggayagaactcctccctgactcccctgcaggtccagcccgaggttgttgttaggccagaggtgtggggcccatctagggagctggtgggaatggagactgggct

SEQ ID NO: 411127 - DNA, 201 bp, Homo sapiens
agtaggattcccattcctaggccattctggaaaaggccaaaccacagggactgagaagcagtctgggtggccaggggctgacggatcggggagaggctggktgcataggggccaccctggagacttggaggatgaaggagtcgccccaggaggggctggagcggtggccgggagactctgcacattggtttggaaccgtgg

SEQ ID NO: 411128 - DNA, 201 bp, Homo sapiens
agccctcccaggtgatgtccttccatggtgactctggctcttgcaggaggtgggctactgcagggacctgagccacatcgccgccttgttcctcctctatyttcctgaggaggatgcattctgggcactggtgcagctgctggccagtgagaggcactccctgcagggtaagtgaacagctgccccggggacctcctgcag

SEQ ID NO: 411129 - DNA, 201 bp, Homo sapiens; identical to SEQ ID NO: 92696

SEQ ID NO: 411130 - DNA, 201 bp, Homo sapiens; identical to SEQ ID NO: 92818

SEQ ID NO: 411131 - DNA, 201 bp, Homo sapiens
gatgtctctgctgagggtcccacaggagtccacggctgacccccaaagcccaaatcagacgcctctcatccccatcagcagagggcatctcatcctccccrtggccaccctctgtgtcctggagccacgccctccggctctgattctgtgcagctgactctcccctccctgagagtcctcctgccctccagctgcccgggc

SEQ ID NO: 411132 - DNA, 201 bp, Homo sapiens
gagcccatcccccacatgacccagatgaaagtcgagagtgtggtgagcacttccctgtccagatcgccccccagccacagtctcctgtgtatatctggacrcctggggtggccacaaaaggatccggcaccgcccagtaggagactgaagtggccacggggtatgagctgtgaccattcccaggtaactcccctggcctga

SEQ ID NO: 411133 - DNA, 201 bp, Homo sapiens
atttcacgatgggctgggggcttctcaggatttcacagcccaaatggcgggaccgtccaggggctccaagaccaacaggagcatgtggtagccacgtcacwacccaacaccatgtggcatcaggtgagtttatggtcccctcagctcttcccagaggccctgcctcccgtggggctgtaggagcaggggggctggagcccc

SEQ ID NO: 411134 - DNA, 201 bp, Homo sapiens; identical to SEQ ID NO: 92828

SEQ ID NO: 411135 - DNA, 201 bp, Homo sapiens
cttgtcctcccttccctgtgccttctcctgggctgagccctgagctggaaagggacagagccagtcctttctgggggtcggcacccaggctggggccgctscaggccccgtgcagttcctcagctctgcctgggttgccttacagtgagacggagctgcctcctctgactgcgcgggaggcgaaggtaagagcctgatgcg

SEQ ID NO: 411136 - DNA, 201 bp, Homo sapiens; identical to SEQ ID NO: 92702

SEQ ID NO: 411137 - DNA, 201 bp, Homo sapiens; identical to SEQ ID NO: 92703

SEQ ID NO: 411138 - DNA, 201 bp, Homo sapiens
gctcagccctcccaggtgatgtccttccatggtgactctggctcttgcaggaggtgggctactgcagggacctgagccacatcgccgccttgttcctcctytatcttcctgaggaggatgcattctgggcactggtgcagctgctggccagtgagaggcactccctgcagggtaagtgaacagctgccccggggacctcct

SEQ ID NO: 411139 - DNA, 201 bp, Homo sapiens
ttcccttctcctcatctctctttctctctccttcttttccagttctctctccctcctcatctcgctgcatgccactgttcacgctcctggggctccacgtrgacaggtggacatgggactcctaggctaattttcacggcacaagcacagggctgcaggaccttggtcccccacctcccagcaccctcaaaatgagaggtg

SEQ ID NO: 411140 - DNA, 201 bp, Homo sapiens
gttctgaattctgacgacgccgtgagcctgcctttgtactttaaactcatggaaggataaccaccttcacgttttgaaataaatgtttcctgttgaaatgmttttagattttagacagaaatattgaaaaggcactatagtgtcctcctataccttccatccagctgcccctaataatgatgttttgcagtcccatggcac

SEQ ID NO: 411141 - DNA, 201 bp, Homo sapiens
ttcacgatgggctgggggcttctcaggatttcacagcccaaatggcgggaccgtccaggggctccaagaccaacaggagcatgtggtagccacgtcactayccaacaccatgtggcatcaggtgagtttatggtcccctcagctcttcccagaggccctgcctcccgtggggctgtaggagcaggggggctggagcccctc

SEQ ID NO: 411142 - DNA, 201 bp, Homo sapiens
gatgggctgggggcttctcaggatttcacagcccaaatggcgggaccgtccaggggctccaagaccaacaggagcatgtggtagccacgtcactacccaasaccatgtggcatcaggtgagtttatggtcccctcagctcttcccagaggccctgcctcccgtggggctgtaggagcaggggggctggagcccctcgtggg

SEQ ID NO: 411143 - DNA, 201 bp, Homo sapiens
tgggggcttctcaggatttcacagcccaaatggcgggaccgtccaggggctccaagaccaacaggagcatgtggtagccacgtcactacccaacaccatgkggcatcaggtgagtttatggtcccctcagctcttcccagaggccctgcctcccgtggggctgtaggagcaggggggctggagcccctcgtggggctggtg

SEQ ID NO: 411144 - DNA, 201 bp, Homo sapiens
gtcactacccaacaccatgtggcatcaggtgagtttatggtcccctcagctcttcccagaggccctgcctcccgtggggctgtaggagcaggggggctggrgcccctcgtggggctggtgactggctgagtcccagccagggcctgacctgggacgtcgggttctccatgggctgggagttggtttcctttcctgccctgg

SEQ ID NO: 411145 - DNA, 201 bp, Homo sapiens
tgatatccaccctgtccctagagcgcctcacgaagacgtccaggtgtggcccgtgggcacgtttttggaaccggttcgttgatgcctgggccagggatgakgacactgtgctcaagcatcttagggcctctatgaagaaactaacaagaaagcagggggacctgccacccccaggtgggctccagtgccatgtcccctccc

SEQ ID NO: 411146 - DNA, 201 bp, Homo sapiens
ctcagctcttcccagaggccctgcctcccgtggggctgtaggagcaggggggctggagcccctcgtggggctggtgactggctgagtcccagccagggccygacctgggacgtcgggttctccatgggctgggagttggtttcctttcctgccctggaggagacagaggcacagggatgggggcccagctcccgcagagca

SEQ ID NO: 411147 - DNA, 201 bp, Homo sapiens
cagggcctgacctgggacgtcgggttctccatgggctgggagttggtttcctttcctgccctggaggagacagaggcacagggatgggggcccagctcccrcagagcagggcaaagggcagcgtgtccaccgggagtgtgggaaggtgacagtgttgtggggagctctggacaccgcccagtgttctgcactaggggaagg

SEQ ID NO: 411148 - DNA, 201 bp, Homo sapiens
acctgggacgtcgggttctccatgggctgggagttggtttcctttcctgccctggaggagacagaggcacagggatgggggcccagctcccgcagagcagbgcaaagggcagcgtgtccaccgggagtgtgggaaggtgacagtgttgtggggagctctggacaccgcccagtgttctgcactaggggaagggtcttcaga

SEQ ID NO: 411149 - DNA, 201 bp, Homo sapiens
atgaaagtcgagagtgtggtgagcacttccctgtccagatcgccccccagccacagtctcctgtgtatatctggacacctggggtggccacaaaaggatcyggcaccgcccagtaggagactgaagtggccacggggtatgagctgtgaccattcccaggtaactcccctggcctgatatccaccctgtccctagagcgcc

SEQ ID NO: 411150 - DNA, 201 bp, Homo sapiens
gggttctccatgggctgggagttggtttcctttcctgccctggaggagacagaggcacagggatgggggcccagctcccgcagagcagggcaaagggcagygtgtccaccgggagtgtgggaaggtgacagtgttgtggggagctctggacaccgcccagtgttctgcactaggggaagggtcttcagaggccctggaaga

SEQ ID NO: 411151 - DNA, 201 bp, Homo sapiens
ggcacagggatgggggcccagctcccgcagagcagggcaaagggcagcgtgtccaccgggagtgtgggaaggtgacagtgttgtggggagctctggacacygcccagtgttctgcactaggggaagggtcttcagaggccctggaagagggaggtttttagggcagcccagtggcctgagcacctctgttgcttccatcag

SEQ ID NO: 411152 - DNA, 201 bp, Homo sapiens
cccagctcccgcagagcagggcaaagggcagcgtgtccaccgggagtgtgggaaggtgacagtgttgtggggagctctggacaccgcccagtgttctgcaytaggggaagggtcttcagaggccctggaagagggaggtttttagggcagcccagtggcctgagcacctctgttgcttccatcaggacaagaaagatctat

SEQ ID NO: 411153 - DNA, 201 bp, Homo sapiens
ggaagatttgccaaaatgttctcagtttagaagcaggggcagtgacggggcctagggatgaccccagggttgtcactcaagcaacaagaagggcaaggagscctgtttcctgcccttatcctgggagaacttggccagggctccacaatgccctgcaggggcaggaggagaacaaatacacccttctctggaggaagtcac

SEQ ID NO: 411154 - DNA, 201 bp, Homo sapiens
ccatatttccatattcacaggagtgggtgtctggtgggggtgtcgttgcttcttttaaaattagtatttgtgacccaccaggatataggaagtaggatgtsagctcactgctggcataaacctccaaggaagggggtggtctcaaggggtcaagctgatacacaaaggagtcagggcctggactcctggtgtcacctgggc

SEQ ID NO: 411155 - DNA, 201 bp, Homo sapiens
gtgtggcacttactggttctccactcactccctcctgccgtcttgtgaagaaggtgcctgcttccccttccccttctgccatgattgtaagtttccggaastgcaagtcaattaagcctgtttcctttataaattacccaatctcaggtatttctttacatcagtgtgaaaacaaatgaatacagtccccttccctgaggt

SEQ ID NO: 411156 - DNA, 201 bp, Homo sapiens
ccagatgggagggtgggaggccttggggtttgggggcctctccagctgcccagctcttgcagctgatggctccacatcttgggggaaggctctgatttcaygatgggctgggggcttctcaggatttcacagcccaaatggcgggaccgtccaggggctccaagaccaacaggagcatgtggtagccacgtcactacccaa

SEQ ID NO: 411157 - DNA, 201 bp, Homo sapiens; identical to SEQ ID NO: 92923

SEQ ID NO: 411158 - DNA, 201 bp, Homo sapiens; identical to SEQ ID NO: 92724

SEQ ID NO: 411159 - DNA, 201 bp, Homo sapiens
gggtcccagcagagatggggtgaatgagagggatgggggcttccccggagcagaagccagggtcacccaggagggatgacacagctgccaagagctctccyggcccagggagcagccggcaccatgaaccgagcacctccctggttccaagccctgggccagactggaacatgtggggccagaacccaggaggatcctgag

SEQ ID NO: 411160 - DNA, 201 bp, Homo sapiens; identical to SEQ ID NO: 92726

SEQ ID NO: 411161 - DNA, 201 bp, Homo sapiens; identical to SEQ ID NO: 92725

SEQ ID NO: 411162 - DNA, 201 bp, Homo sapiens; identical to SEQ ID NO: 272927

SEQ ID NO: 411163 - DNA, 201 bp, Homo sapiens; identical to SEQ ID NO: 92727

SEQ ID NO: 411164 - DNA, 201 bp, Homo sapiens
ggcacaagagcgagaggacatcattatgaaatacgaaaaggtacaagtcggtctgcttcttggagggaggcctcttccagtgtgccctggtcaaagggtcytgggctccctaggagcacagggcagggacgggtggccaatgcccccaggcccttgcaccctttaccttggacccctcaccaaggctccctctgggctaca

SEQ ID NO: 411165 - DNA, 201 bp, Homo sapiens; identical to SEQ ID NO: 272928
  misc_feature (1)...(201): n = A,T,C or G

SEQ ID NO: 411166 - DNA, 201 bp, Homo sapiens
cagagcagggcaaagggcagcgtgtccaccgggagtgtgggaaggtgacagtgttgtggggagctctggacaccgcccagtgttctgcactaggggaaggstcttcagaggccctggaagagggaggtttttagggcagcccagtggcctgagcacctctgttgcttccatcaggacaagaaagatctatgtgggcagtgt

SEQ ID NO: 411167 - DNA, 201 bp, Homo sapiens
  misc_feature (1)...(201): n = A,T,C or G
cagcccagtggcctgagcacctctgttgcttccatcaggacaagaaagatctatgtgggcagtgttcgtccttaggctgcctcatccggatattgattganggggtaaggaggcatagggagaccctggctcagggaccctccttgccctgcagtgccctgcttccccagcccgggggtctggctcactcccagcccacag

SEQ ID NO: 411168 - DNA, 201 bp, Homo sapiens
cagcagagtaagtctacgtgtgcccagcggggcctggggagccctggggtcagaccccgactggcccgagggcagcttcctcacactgtcctcatgatcckctgttctggcccagagggaggtctggccaggtgggctgggcaggacactgtgacaccgagcccatcccccacatgacccagatgaaagtcgagagtgtgg

SEQ ID NO: 411169 - DNA, 201 bp, Homo sapiens
ggggagccctggggtcagaccccgactggcccgagggcagcttcctcacactgtcctcatgatcctctgttctggcccagagggaggtctggccaggtggkctgggcaggacactgtgacaccgagcccatcccccacatgacccagatgaaagtcgagagtgtggtgagcacttccctgtccagatcgccccccagccac

SEQ ID NO: 411170 - DNA, 201 bp, Homo sapiens
cactgtgacaccgagcccatcccccacatgacccagatgaaagtcgagagtgtggtgagcacttccctgtccagatcgccccccagccacagtctcctgtrtatatctggacacctggggtggccacaaaaggatccggcaccgcccagtaggagactgaagtggccacggggtatgagctgtgaccattcccaggtaact

SEQ ID NO: 411171 - DNA, 201 bp, Homo sapiens
ctgtgacaccgagcccatcccccacatgacccagatgaaagtcgagagtgtggtgagcacttccctgtccagatcgccccccagccacagtctcctgtgtrtatctggacacctggggtggccacaaaaggatccggcaccgcccagtaggagactgaagtggccacggggtatgagctgtgaccattcccaggtaactcc

SEQ ID NO: 411172 - DNA, 201 bp, Homo sapiens
gtgggcacgtttttggaaccggttcgttgatgcctgggccagggatgatgacactgtgctcaagcatcttagggcctctatgaagaaactaacaagaaagmagggggacctgccacccccaggtgggctccagtgccatgtcccctcccatgtcaccctctggggtagtcaatagtaggggagtgcccgggacccgcaacc

SEQ ID NO: 411173 - DNA, 201 bp, Homo sapiens
ctaacaagaaagcagggggacctgccacccccaggtgggctccagtgccatgtcccctcccatgtcaccctctggggtagtcaatagtaggggagtgcccrggacccgcaaccctactacctgggccttcctcttcaccttttcttcctcctcttcctcctggactctaagaaagtacaggaggcccaccggtcctcaggg

SEQ ID NO: 411174 - DNA, 201 bp, Homo sapiens; identical to SEQ ID NO: 92731

SEQ ID NO: 411175 - DNA, 201 bp, Homo sapiens
gccttcctcttcaccttttcttcctcctcttcctcctggactctaagaaagtacaggaggcccaccggtcctcagggcaggcgctcagtgcgtgtatactrgacatgctgtgcacgcaggagggggatgtgggcgagaccctccaacaagccccctcccactttctgcggtgtctccctctccccctcgcagggccctcca

SEQ ID NO: 411176 - DNA, 201 bp, Homo sapiens
ggtgacaatgggggctgtagccctaggagaacggggggaagatgggcagggccccgttctgggcatctcacggtgaggccggggaggcagcagggctcgcrgctaaagacctgggtctggtgctgggaagggatctggggccgggtaagaggagcccagccaggagcccatccctcagggatcacaggatggagagacaga

SEQ ID NO: 411177 - DNA, 201 bp, Homo sapiens
acgaaggtgtgtggcaggaagccgccagccagtctgaaccctgggggcagtcccaggagccacccgccatgccacgacagcttccccacgccaggcagcaygcacccctccctctgggatcagcagactacaggcgtgtcctcagtgtcaggccacgggggccacacagagaccccgaggactccagagacgcaggcaggt

SEQ ID NO: 411178 - DNA, 201 bp, Homo sapiens
ccctcccaacacccccagccccacgaccatcgttctgaattctgacgacgccgtgagcctgcctttgtactttaaactcatggaaggataaccaccttcaygttttgaaataaatgtttcctgttgaaatgattttagattttagacagaaatattgaaaaggcactatagtgtcctcctataccttccatccagctgccc

SEQ ID NO: 411179 - DNA, 201 bp, Homo sapiens
gctgacccccaaagcccaaatcagacgcctctcatccccatcagcagagggcatctcatcctccccgtggccaccctctgtgtcctggagccacgccctcyggctctgattctgtgcagctgactctcccctccctgagagtcctcctgccctccagctgcccgggctcctgctgccatcggtgcccacgaatgggccgac

SEQ ID NO: 411180 - DNA, 201 bp, Homo sapiens
tgcccagcccctcccaacacccccagccccacgaccatcgttctgaattctgacgacgccgtgagcctgcctttgtactttaaactcatggaaggataacyaccttcacgttttgaaataaatgtttcctgttgaaatgattttagattttagacagaaatattgaaaaggcactatagtgtcctcctataccttccatcc

SEQ ID NO: 411181 - DNA, 201 bp, Homo sapiens
cccgtggccaccctctgtgtcctggagccacgccctccggctctgattctgtgcagctgactctcccctccctgagagtcctcctgccctccagctgcccrggctcctgctgccatcggtgcccacgaatgggccgaccaagcccaggtggcagcatctccccatcccctgttccctggcccgaccccactaccaggagat

SEQ ID NO: 411182 - DNA, 201 bp, Homo sapiens; identical to SEQ ID NO: 92734

SEQ ID NO: 411183 - DNA, 201 bp, Homo sapiens; identical to SEQ ID NO: 92735

SEQ ID NO: 411184 - DNA, 201 bp, Homo sapiens; identical to SEQ ID NO: 92736

SEQ ID NO: 411185 - DNA, 201 bp, Homo sapiens; identical to SEQ ID NO: 92737

SEQ ID NO: 411186 - DNA, 201 bp, Homo sapiens; identical to SEQ ID NO: 92740

SEQ ID NO: 411187 - DNA, 201 bp, Homo sapiens
tgggggcggcggtggaatgggggttacgcagccagccagcatctgggagcccggcgagagcggttcaggtgttctccgaagccgccgcgtacagtgtgacytttagacaattctgtctcacaggatggacgtggtagaggtcgcgggcagttggtgggcacaagagcgagaggacatcattatgaaatacgaaaaggtaca

SEQ ID NO: 411188 - DNA, 201 bp, Homo sapiens; identical to SEQ ID NO: 92738

SEQ ID NO: 411189 - DNA, 201 bp, Homo sapiens; identical to SEQ ID NO: 92741

SEQ ID NO: 411190 - DNA, 201 bp, Homo sapiens
tggaatgggggttacgcagccagccagcatctgggagcccggcgagagcggttcaggtgttctccgaagccgccgcgtacagtgtgacctttagacaattytgtctcacaggatggacgtggtagaggtcgcgggcagttggtgggcacaagagcgagaggacatcattatgaaatacgaaaaggtacaagtcggtctgct

SEQ ID NO: 411191 - DNA, 201 bp, Homo sapiens; identical to SEQ ID NO: 92743

SEQ ID NO: 411192 - DNA, 201 bp, Homo sapiens
agtgagcacaagaggagctgggcagcctgagggtctggccctgtctacttggagacaaccccggtgagatgcaagggttatggccacagggtgaggggackcctggcccggcctcagggctgttgtccagcaggtctctgagggcccacctgcccctgttctcccccatgcccctagagctatggccctcactgtcccgtg

SEQ ID NO: 411193 - DNA, 201 bp, Homo sapiens
catcgccaagatggactcgactgccaacgaggtggaggccgtcaaagtgcacagcttccccacactcaagttctttcctgccagtgccgacaggacggtgygccttccctccagacggggctggggcgggctctgggaagagcagtggtccccacgccagcctgggtgcctctctggaaggagcctggggctagtcaggtg

SEQ ID NO: 411194 - DNA, 201 bp, Homo sapiens; identical to SEQ ID NO: 93008

SEQ ID NO: 411195 - DNA, 201 bp, Homo sapiens
tgagccactgcgcctggcctcagctgactttactaacagggtctcccgggtgcttttgcagagcactgctggttgcattcactggacatttttttttttttgagacagggtcttgctctgttgcccaggctggggtgcagtggtgtgactgtagctcactgcagcctcaaactcctgggctcaagcaatcttttgcacctc

SEQ ID NO: 411196 - DNA, 201 bp, Homo sapiens
atcaagttcttcaggaatggagacacggcttcccccaaggaatatacaggtgtggctgtggcactgcccttgaactgtctttagagagggactggcctgcygacttggaagggcaggggcagctgtctgagcggtggggaggccgggttccagaggcttggagggatcccgttcctcaggccgggttctctgtccacttgt

SEQ ID NO: 411197 - DNA, 201 bp, Homo sapiens; identical to SEQ ID NO: 93054

SEQ ID NO: 411198 - DNA, 201 bp, Homo sapiens
tgccatcctgggggcggctggctgaggtctgtttggagactgaccagcgaggagagggagactggtgcctttctggccacatgggctgtttgtgctgcccyctgttcctaggagcagcagcatggctgtagctctcggggtgacacctgctagctgtcgtgtgtagcgtgccagctgccgcgtcacgtgcttgcgtgattt

SEQ ID NO: 411199 - DNA, 201 bp, Homo sapiens
acagagtctgtctctgtcgcccaggctggagtgcagtggcgcgatctcagctcactgcaagctccgcctcacgggttcacgccattctcctgcctcagccycccgagtagctgggactacagggcacccgccaccacacccagctaatttttttgtatttttagtagagacggggtttcaccgtgttagccagggtggtct

SEQ ID NO: 411200 - DNA, 201 bp, Homo sapiens
accgccgaccctaggcggccaaccccaccttccacggccgccgccgcacgcttgacacgcgcgccggaaattgcgtcaccccaacttccggtccgggggcyggggggcgtgccagttgggtacgcggtccagtcagaatgcaacacgaggggtttcggaagcgcagccgcagctccgcccctaaactgggaactcctcccc

SEQ ID NO: 411201 - DNA, 201 bp, Homo sapiens; identical to SEQ ID NO: 92999

SEQ ID NO: 411202 - DNA, 201 bp, Homo sapiens
aaacctcctggccggcgagggtgcggcctgcgtgggctcattgggcccagcccactggcccagccttctctttctggattcttggcactgttggtgtctgyggctgccaccctggtgtgcccagggcagccacgcacctcagtcccgggcagggtgagggttggggagctctgtggtcccccaggcatcgccgcccctcac

SEQ ID NO: 411203 - DNA, 201 bp, Homo sapiens
caccaccctgcctgacggcgcagctgcagagtccttggtggagtccagcgaggtggctgtcatcggcttcttcaaggtagagaccagagcattccagtctyccttccttccgtcatccattgaggaggggtccacagcctgcagctggcagttctgcacgtgtcccccctggcctgggctctacagggtctgccctactgc

SEQ ID NO: 411204 - DNA, 201 bp, Homo sapiens
agcccccaggctggggatggggaggagtgggttgggggtggcatgaggctcccggtcaccactgctgtccagcgtctgacattggaggccattgggagaaycttctgcattaatagtgtgtgactcagacccagtaacttaagtttataacacagacagccccgaagatttttggaggtgaaatcaagactcacatcctgc

SEQ ID NO: 411205 - DNA, 201 bp, Homo sapiens
ttgcccacatgtccttggccccacacggctcacaccagctcggcagtctgggtgctgccgtctgccccggcccccagctctgtgggtcttggagacagccygtgctggggctggtttctggctagttcagctccagggcctcagcagggtttgtgtgccatgcctgggtcctgcgacacagtgagccgcgtactcacggaa

SEQ ID NO: 411206 - DNA, 201 bp, Homo sapiens
caggcctcgccgggggtgcggttctcccgttctccccgctacctcccttgccggccccacaggccctcacaaactcggccgctccggctcctcctgcctcygctccaggctgtggagtatccggccagcatgccgcgaggacctgtgtcaacacgtcgccagcaccagccagcccggtttgcccacatgtccttggcccca

SEQ ID NO: 411207 - DNA, 201 bp, Homo sapiens; identical to SEQ ID NO: 93002

SEQ ID NO: 411208 - DNA, 201 bp, Homo sapiens; identical to SEQ ID NO: 93046

SEQ ID NO: 411209 - DNA, 201 bp, Homo sapiens; identical to SEQ ID NO: 93053

SEQ ID NO: 411210 - DNA, 201 bp, Homo sapiens
gcttccaaagggtcaggtttcttcctcctcaccctacccggaccttaggaccccaaggtgggggacacacaggtgaccccaggactctggccctctgaccygggttggggcgagcactctcctggctcctccccgcttcagccagagcgacctttacaccccaggtaccttatctccctgggagcggacagggatgcaacc

SEQ ID NO: 411211 - DNA, 201 bp, Homo sapiens
cagcctcccaagtagctgggactataggcgcctgccaccatgcccagaaaattttttgtattttttagtagagatggggtttcaccgtgttagccagatgktctcgatctcctgacctcgtgatccacctgccttggcctcccaaagtgttgggattacaggcgtaagccaacgcgcttggcctttttttttgagatggag

SEQ ID NO: 411212 - DNA, 201 bp, Homo sapiens
tttagagagggactggcctgccgacttggaagggcaggggcagctgtctgagcggtggggaggccgggttccagaggcttggagggatcccgttcctcagrccgggttctctgtccacttgtgccctgagggtcttgtgaggagttttcatcctggaagaaccttcgaatggagaacctgtcttgtctggtgccatcctgg

SEQ ID NO: 411213 - DNA, 201 bp, Homo sapiens
cgcagcgtgcgtttccctaatgatgtcctgttcttggaccacatccggcagggtgacctggagcaggtggggcgcttcatccggactcggaaagtctcccyggccaccatccacccctcaggtgagcaaagcctggaagagctggccagggcctgtggggtggtgggagaggccagcaaggaggacctgacctggggctca

SEQ ID NO: 411214 - DNA, 201 bp, Homo sapiens
tatttgtgcctgtgctccctggccgtgggatggggtgcagtgaccctgtggaccagctgtgcggggagccggccctctggagagaacgttgggacatggcrcagctgcccgcagcactggtgtcatgtgctctggaaaggggagggagtcactgatacctttcccgttttgcagaggcagctgatgagcacattcctgggc

SEQ ID NO: 411215 - DNA, 201 bp, Homo sapiens
agggtggcccaggcacagcgtgcacaagagcagggagtggcacctggtctctaagttactctgcagacgcatacatggaaacggccagtaagaaaggatgygtgatttatttccccaagtctcatttaagaagtttgaggaggccgggtgcaggggctcatgcctgtaatcccagcactttgggaggctgaggtgggcggg

SEQ ID NO: 411216 - DNA, 201 bp, Homo sapiens
ggaagctgaaggcagaaggttccgagatcaggttggccaaggtggacgccacggaggagtctgacctggcccagcagtacggcgtgcgcggctatcccacyatcaagttcttcaggaatggagacacggcttcccccaaggaatatacaggtgtggctgtggcactgcccttgaactgtctttagagagggactggcctgc

SEQ ID NO: 411217 - DNA, 201 bp, Homo sapiens
agcaggcactgcaacccaggaaaacctctgcgggggctgctggtcactggcaccatgggtgtgagagcttctgatatttcactttttcttctcccccagcyggcagcactgggcctgttattgttgtttgagaaagggtctcgctctgttaccaggctggagtgcggtggcacaatcacacttcactgcagcttcgacctc

SEQ ID NO: 411218 - DNA, 201 bp, Homo sapiens
caggctatcagctcagccttgtgcgttaggaggggttatcttggtgagtagataaggtttttatgaagggaaatgccagaggaaaaagggaagcactgctragggatcaaggctgctttagggatcaaggctgctttctagcatctcatttccgcttccagatgccccttggtgtggccactgcaaggctctggcccctga

SEQ ID NO: 411219 - DNA, 201 bp, Homo sapiens
aggctctggcccctgagtatgccaaagccgctgggaagctgaaggcagaaggttccgagatcaggttggccaaggtggacgccacggaggagtctgacctrgcccagcagtacggcgtgcgcggctatcccaccatcaagttcttcaggaatggagacacggcttcccccaaggaatatacaggtgtggctgtggcactgc

SEQ ID NO: 411220 - DNA, 201 bp, Homo sapiens
gtaacttaagtttataacacagacagccccgaagatttttggaggtgaaatcaagactcacatcctgctgttcttgcccaagagtgtgtctgactatgacrgcaaactgagcaacttcaaaacagcagccgagagcttcaagggcaaggtgagctgctcttctgggtggctcgtggggcggtgccagggagcagtacaact

SEQ ID NO: 411221 - DNA, 201 bp, Homo sapiens
ggaaaagcaacttcgcggaggcgctggcggcccacaagtacctgctggtggagttctgtgagcgccgggcctggcgggcgggcggggctcggggccgctgrgccaggctcttgggacgcaggcacggcccggcagcccccggggtcgggacccccggcgcgcccggaactgaagggctcccttgctgcccgccttgggggc

SEQ ID NO: 411222 - DNA, 201 bp, Homo sapiens
aaatagaaaaattggccgggcatggtggctcacgcatgtaatcccagcactttgggaggccgaggcgggcggatcacgaggtcaggagttcaagaccagcstggccaacacagtgaaaccccgtctctactaaaaatacaaaaattagctgggcatggtggcgggcgcctgtaataccagctatttgggaggccgaggcag

SEQ ID NO: 411223 - DNA, 201 bp, Homo sapiens
tgagtagctggggctacaggtgtgcaccaccacgcctggctaatttttgtatttttagtagagacggggtttcaccatgttggccaggatggtctcgatcrtgacctcgtgatccacccgtctcggcctcctagagtgctaggattacaggcgtgattgatgttctcattttttactcatgttcacttttggaacgggaag

SEQ ID NO: 411224 - DNA, 201 bp, Homo sapiens
gccaggcttgcattgtggatgtgaagccagctgttgaattcacgggcagccataaggccgtgaccagagccagtcttactgtcgaggaacagccatgtccygtacccattgctggacctgtggctcgaaaccccacgggagggcagggctgctggctgctgtgacttcccacgtccagggagacccgggcccaggggctgt

SEQ ID NO: 411225 - DNA, 201 bp, Homo sapiens
ggttgggcaaccccggaatccaggttggaggaaaaaggcaccggagcacggtctgcttccgagcaaagtcagggctggaggcagaggccagccgtctcccrcacctgtgcaacctccttttctcccccagatcctgttcatcttcatcgacagcgaccacaccgacaaccagcgcatcctcgagttctttggcctgaagaa

SEQ ID NO: 411226 - DNA, 201 bp, Homo sapiens
tgagctgctcttctgggtggctcgtggggcggtgccagggagcagtacaactcttcccgaggtgacaagtgtggggccttcctgaggctgcctgctggacyggatcgggcacctgattcaggacagcctggatgtaggcgaggggccagccaggccagacctctgctcccagtcacctgctggtctggttgggcaaccccg

SEQ ID NO: 411227 - DNA, 201 bp, Homo sapiens
tctgtccacagtttgatgaaggccggaacaactttgaaggggaggtcaccaaggagaacctgctggactttatcaaacacaaccagctgccccttgtcatygagttcaccgagcaggtgcggctgccctgcagcccccaggctggggatggggaggagtgggttgggggtggcatgaggctcccggtcaccactgctgtcc

SEQ ID NO: 411228 - DNA, 201 bp, Homo sapiens
gctgccctgcagcccccaggctggggatggggaggagtgggttgggggtggcatgaggctcccggtcaccactgctgtccagcgtctgacattggaggccrttgggagaatcttctgcattaatagtgtgtgactcagacccagtaacttaagtttataacacagacagccccgaagatttttggaggtgaaatcaagact

SEQ ID NO: 411229 - DNA, 201 bp, Homo sapiens
aatttttgtatttttagtagagacggggtttcaccatgttggccaggatggtctcgatcgtgacctcgtgatccacccgtctcggcctcctagagtgctargattacaggcgtgattgatgttctcattttttactcatgttcacttttggaacgggaagtgctctgtccaaagtcaccgtggttctgtcactaacactca

SEQ ID NO: 411230 - DNA, 201 bp, Homo sapiens
ggcctgctctgcctttctctagggaggaggagccaatgccaggagattggctctgggccgggaccagcccctgcactcatccctgtcttccacaggtcatygattacaacggggaacgcacgctggatggttttaagaaattcctggagagcggtggccaggatggggcaggggatgatgacgtgagtggggtcacagccc

SEQ ID NO: 411231 - DNA, 201 bp, Homo sapiens
cctgtgttgtcacacagcccacagctccttcagtgccctggatgtctgcagtggccgctgtgactctatggacagtttggtgatatgtgtccgcgaaggcygggagggtggtttcgttgctcttgcctgcaaaggctcacacgtggccatccatgtgggctccccacaggttaacgttctgtctccattctctggagtcca

SEQ ID NO: 411232 - DNA, 201 bp, Homo sapiens; identical to SEQ ID NO: 93000

SEQ ID NO: 411233 - DNA, 201 bp, Homo sapiens
tggcctcaatattattatgtaatccaacatatgcatacagaatatttcaacatgtagtagtcaatgtaaagttattaacgaaatactgtaccttctgtccyccagcccctacacgcacacttttttttttttttttttgagatggagtctcgctctgttgcccaggctggagtgcaatggcgcgatctcggctcactgcaa

SEQ ID NO: 411234 - DNA, 201 bp, Homo sapiens
tgtctccattctctggagtccactagagctgggcacagacaaacccacttgggtttgatgccagttggtgggtggcgctttcctgcccactgaaggtggcycaggtgtctgtgatggcgaacgtggtcgttgcaggcagctccgggcagaagcccggccccctgtccggtgcacgtggtaggggctgccctggaagtcaga

SEQ ID NO: 411235 - DNA, 201 bp, Homo sapiens
gtagagaccagagcattccagtcttccttccttccgtcatccattgaggaggggtccacagcctgcagctggcagttctgcacgtgtcccccctggcctgrgctctacagggtctgccctactgcttggtgctgcgggatcatgacgacctctgcttctccctcctcattcaggacgtggagtcggactctgccaagcagt

SEQ ID NO: 411236 - DNA, 201 bp, Homo sapiens
tcggatgctggagcagtactctagtaacctggaggatctgatccgggagcgcacggaggagctggagctggaaaagcagaagacagaccggctgcttacayagatgctgcctcccgtgggtgccagtgggaaggggtgggctgggagggcagctggagcccagccaggtagagtggcccccaggtgacctcactgcctgcc

SEQ ID NO: 411237 - DNA, 201 bp, Homo sapiens
ctgggcagagcagccggaacttcggccctccatggaccacaccttcgacctggtcaggggctgggagtgggcaaggactgggctggcctctgggatcccaratgcttgtcagcaacctgagacagctgcagacaggcaggctggcaggacctctggccttccaggctacctcctaaggagtagcctgaagactcggagttt

SEQ ID NO: 411238 - DNA, 201 bp, Homo sapiens; identical to SEQ ID NO: 93060

SEQ ID NO: 411239 - DNA, 201 bp, Homo sapiens
tgtcccatctgcagtggaccccaggcacccccctttgaggaggtggggtgaactgctccttggcagggatttgtgacactgcattgctgggctgtgttccycgggctcttctggaccttgcaccgtggataccaggccatgtgccatggtatttgggtcctgggagggtgggtgaaataaaggcatgctgtcttccatgtt

SEQ ID NO: 411240 - DNA, 201 bp, Homo sapiens
gttcaagaacatcaacaagggccggaagacgaacatcattgactcgatgcttcggatgctggagcagtactctagtaacctggaggatctgatccgggaghgcacggaggagctggagctggaaaagcagaagacagaccggctgcttacacagatgctgcctcccgtgggtgccagtgggaaggggtgggctgggagggc

SEQ ID NO: 411241 - DNA, 201 bp, Homo sapiens
ttggccgcactcgccaacagctcccagcttcgcagggcccacgatgccgtgctcaccctcacgcgccactgtccctctgaaggcagcgtgctggacagccygcgcagggctcaagagcgccgcgagctgccctctgacctcaatctgcagcaggtagacggtcccgggaggagggaagaaggcaagggagaggggagagga

SEQ ID NO: 411242 - DNA, 201 bp, Homo sapiens
ggagcagtactctagtaacctggaggatctgatccgggagcgcacggaggagctggagctggaaaagcagaagacagaccggctgcttacacagatgctgyctcccgtgggtgccagtgggaaggggtgggctgggagggcagctggagcccagccaggtagagtggcccccaggtgacctcactgcctgccatccctagg

SEQ ID NO: 411243 - DNA, 201 bp, Homo sapiens
gaagacagaccggctgcttacacagatgctgcctcccgtgggtgccagtgggaaggggtgggctgggagggcagctggagcccagccaggtagagtggccyccaggtgacctcactgcctgccatccctaggtctgtggctgaggccttgaagacggggacaccagtggagcccgagtactttgagcaagtgacactgtac

SEQ ID NO: 411244 - DNA, 201 bp, Homo sapiens
gaggtgagtagtggaatgaggtaagtaggaagtgagcttgtgccagaaatggaagtctgcagcaaaaacagcaggctgggttcactcaggagtagaggagsagatttttcttggggtgagggtgttctggtgggctggtagagtcccaggggatgtgtgctttggggatggctgccctccaggacccctcccctgagccaa

SEQ ID NO: 411245 - DNA, 201 bp, Homo sapiens
ttgaaatcagaagccccacatggtgcttgtgtcaccacttaaccacattctgctgcagctaaacagcaacagtcccctttatccagatgtcgccactcccyacagactccgagacaccaagattttctgaacattcctttatattcctgcctggtgcctgtagacattgagcttaggactccttagcaggtattaggatta

SEQ ID NO: 411246 - DNA, 201 bp, Homo sapiens
cacggaggagctggagctggaaaagcagaagacagaccggctgcttacacagatgctgcctcccgtgggtgccagtgggaaggggtgggctgggagggcakctggagcccagccaggtagagtggcccccaggtgacctcactgcctgccatccctaggtctgtggctgaggccttgaagacggggacaccagtggagccc

SEQ ID NO: 411247 - DNA, 201 bp, Homo sapiens
tggggattctccgtgctctggactcgggctaccaggtggagctgcgaggccgcacggagctgaaggtgaggcagggccccaacccctcccggaggccccgscctgtcctgaggcaccgcccatcccgggccgcggctgcaaacctcagctcacccttctgacctggtctcccagttccacgcagactcgagatcccccacc

SEQ ID NO: 411248 - DNA, 201 bp, Homo sapiens
gctgggacaggcttaggcagggctcctcccggaagcagaggcggatgagccagagggcagacccagtttaaggtagaagtggagtgggcagggctgagccrgttccttcccaccttcactcagcctccttcccaggctggcctcaagctcaagtgaccagatgtgatagaagagccctgacccctccccagctagaagaac

SEQ ID NO: 411249 - DNA, 201 bp, Homo sapiens
tctggccttccaggctacctcctaaggagtagcctgaagactcggagtttgggggcagaattggaatgggggctgtggaggcttttggagtgggagatagwgttctgtctgggtgggaggaatattcaattcaattcaaataacactgattgagaaccaagtatgtgcttggcctgctgtgacagaaagacccttggcctg

SEQ ID NO: 411250 - DNA, 201 bp, Homo sapiens
ttgtgtcaccacttaaccacattctgctgcagctaaacagcaacagtcccctttatccagatgtcgccactccccacagactccgagacaccaagattttytgaacattcctttatattcctgcctggtgcctgtagacattgagcttaggactccttagcaggtattaggattacaggggctcctggacgggactttgcc

SEQ ID NO: 411251 - DNA, 201 bp, Homo sapiens
ggccctatctcatccccagtgcataaacctggcttccgcagaagcctcacaggctgtgcactgcacaagagacaactctagggggcagcagtcaccagagracaatgtgaaagcagaagccgtgcccactcccctcctgcaagaaactgacccgtgacccgctccttcctaggtgaacccccatgacccctttcctcgact

SEQ ID NO: 411252 - DNA, 201 bp, Homo sapiens
ccgggccagttctcttgagaagtgaggcccggccccggacaggtactgccccctcagccccaaccccagctgccgcgtcccctctgctgcctgcagaacgycccacccaagccaggtgtcccgatccctttctgacttagagagcccaggctggttcctaaaccccggggcttcccctgggagggaagcagccattgcagg

SEQ ID NO: 411253 - DNA, 201 bp, Homo sapiens
aagaacatcaacaagggccggaagacgaacatcattgactcgatgcttcggatgctggagcagtactctagtaacctggaggatctgatccgggagcgcayggaggagctggagctggaaaagcagaagacagaccggctgcttacacagatgctgcctcccgtgggtgccagtgggaaggggtgggctgggagggcagct

SEQ ID NO: 411254 - DNA, 201 bp, Homo sapiens
cagcgacacgcggcagagatcgccaacatgtcactggacatcctcagtgccgtgggcactttccgcatgcgccatatgcctgaggttcccgtgcgcatcckcataggcctgcactcgggtaactcccgggtcttcccaggctccagcccatctccctctttagggcctggccccagatttcctgtagaggaggcaactcat

SEQ ID NO: 411255 - DNA, 201 bp, Homo sapiens
gacccccagcatctccacaggtccatgcgtggcaggcgtggtgggcctcaccatgccgcggtactgcctgtttggggacacggtcaacaccgcctcgcgcmtggagtccaccgggctgcgtgagtgtgacggggacaagacggggaggtgggagggggacacgggaggtgagtcccgagctcacggcgtcccccaccgcca

SEQ ID NO: 411256 - DNA, 201 bp, Homo sapiens
tgcgtgagtgtgacggggacaagacggggaggtgggagggggacacgggaggtgagtcccgagctcacggcgtcccccaccgccacagcttaccgcatccmcgtgaacttgagcactgtggggattctccgtgctctggactcgggctaccaggtggagctgcgaggccgcacggagctgaaggtgaggcagggccccaac

SEQ ID NO: 411257 - DNA, 201 bp, Homo sapiens
gattttaagagactgagttccctacccccatcctctttgctgcagggagacagggtttggctgaagaaattcccaggggatcagcacatagctatccgccyagcaaccaagacggccttctccaaggtgagacttgggcctgtgatggggcctaggtggccatcggtttctccctccttgccttctctttgcagctgggta

SEQ ID NO: 411258 - DNA, 201 bp, Homo sapiens
aggaggcaactcatggagcggggagtggggcttaccttgaagaggatgcacttaacaaggcttatttggggggctggtggagataatgggtgcgaagatcmcccgaggccctacctaggtgcagcccagggccggccctgctagccccgccgacccccagcatctccacaggtccatgcgtggcaggcgtggtgggcctca

SEQ ID NO: 411259 - DNA, 201 bp, Homo sapiens
aggctaaaccatactcagtatccaaacagtggcctttgactatattgttttttccaaaaataggactatgtgtagaagagagcccccgtacataccttatyaaccatttcatccaccatttgtaaaaatctcatcttctgggtctggatactcaaaaacagatcttgattaacagccccttccccacattgccctgggcag

SEQ ID NO: 411260 - DNA, 201 bp, Homo sapiens
agaacatcaacaagggccggaagacgaacatcattgactcgatgcttcggatgctggagcagtactctagtaacctggaggatctgatccgggagcgcacrgaggagctggagctggaaaagcagaagacagaccggctgcttacacagatgctgcctcccgtgggtgccagtgggaaggggtgggctgggagggcagctg

SEQ ID NO: 411261 - DNA, 201 bp, Homo sapiens
agggtgggagtctttccccagcggcgcctcagccccttccccatccccagaccagctgtggacagccccggagctgcttagggacccagccctggagcgcyggggaacgctggccggcgacgtctttagcttggccatcatcatgcaagaagtagtgtgccgcagtgccccttatgccatgctggagctcactcccgaggg

SEQ ID NO: 411262 - DNA, 201 bp, Homo sapiens
gtgtgtaggggacaagccctcctgaccttcaattcagcttcaccagcctccagcccagcccttcctgcgcagcccctagcctacctgcccaatcaatcttstttcccagacctcccgtcccttatttattcctccagtccccagctcagtccttccactagcaacctggttctgcactaaccccaggtgggcccggtgaca

SEQ ID NO: 411263 - DNA, 201 bp, Homo sapiens
ggatcacgaggtcaggagatcgagaccatcctggctaacacggtgaaaccccgtctctactaaaaatacaaaaaaaattagccgggtgtggtggcgggcgyctgtagtcccagctactgtgggaggctgaggcagaagaatggcgtgaacccgggaggcggagcttgcagtaagccgagatcgcggcactgcacttcagcc

SEQ ID NO: 411264 - DNA, 201 bp, Homo sapiens
aggctcccttgcagggtgcgaggaggtcggctggtcctgccggcagccggacggcgccgcgagccaagcctctgtccgcagcagtgatcatggtgatgcaytcggtgctgctgggtggcgaggagcagcgctacctcctggaggccgcagaggagctgggcctgaccgatggctccctggtcttcctgcccttcgacacga

SEQ ID NO: 411265 - DNA, 201 bp, Homo sapiens
cgcatggagtccaccgggctgcgtgagtgtgacggggacaagacggggaggtgggagggggacacgggaggtgagtcccgagctcacggcgtcccccacckccacagcttaccgcatccacgtgaacttgagcactgtggggattctccgtgctctggactcgggctaccaggtggagctgcgaggccgcacggagctgaa

SEQ ID NO: 411266 - DNA, 201 bp, Homo sapiens
ttcccccaggtggagacaataggggacgcctatatggtggcctcggggctgccccagcggaatgggcagcgacacgcggcagagatcgccaacatgtcacyggacatcctcagtgccgtgggcactttccgcatgcgccatatgcctgaggttcccgtgcgcatccgcataggcctgcactcgggtaactcccgggtcttc

SEQ ID NO: 411267 - DNA, 201 bp, Homo sapiens
tccaaatcccttataaacaagacagggccacctgcataattagcgagatccagggcaagatagaaatgaggggctcctcgttcattcatgatgatggcagraggtcattgaaccaagcttgggcccttcggagcacgaggccctgtgtgactgcacaggtcccatgcctgtgaaccggccctgccaacagttgaggatgag

SEQ ID NO: 411268 - DNA, 201 bp, Homo sapiens
ttcaagaacatcaacaagggccggaagacgaacatcattgactcgatgcttcggatgctggagcagtactctagtaacctggaggatctgatccgggagcrcacggaggagctggagctggaaaagcagaagacagaccggctgcttacacagatgctgcctcccgtgggtgccagtgggaaggggtgggctgggagggca

SEQ ID NO: 411269 - DNA, 201 bp, Homo sapiens
agggacctctcatagctgctgcttcaatcccacggcagagactctacagcgtgtcccggggctcacctggcgcctttttttttttttttttttttttttgkgcttctccttagggtctgggccctgctccctgtcccatctgcagtggaccccaggcacccccctttgaggaggtggggtgaactgctccttggcagggat

SEQ ID NO: 411270 - DNA, 201 bp, Homo sapiens
acccagagactggaggctggagctgccagggagcatgctgggaccagcaggtaacatggtgtggccactgagaccatctccggcctggtcagagcctctgkccctgcccctcagcatttccacccaattcagaccagactcaggaatagcaacccctagagggggaaaagaaagtcacaaaaaagtattaggacattaact

SEQ ID NO: 411271 - DNA, 201 bp, Homo sapiens
tgtcccctcatgcctccagaagtggtgcagagggtgcggagcccccctccactgtgtcggcccttggtgtccatggaccaggcacctgtcgagtgtatccdcctgatgaagcagtgctgggcagagcagccggaacttcggccctccatggaccacaccttcgacctggtcaggggctgggagtgggcaaggactgggctg

SEQ ID NO: 411272 - DNA, 201 bp, Homo sapiens
agaaccaagtatgtgcttggcctgctgtgacagaaagacccttggcctgggagcccaacgattgggctggctccagtgccctgtcaattactagctgagawcaactgacctctgggaaccctcatttcccacgtgcctcctaatcgtgtctgaaaacacagtgcccagcaccccggggtgcttgatgaatagtagatgaat

SEQ ID NO: 411273 - DNA, 201 bp, Homo sapiens
gccctcctgaccttcaattcagcttcaccagcctccagcccagcccttcctgcgcagcccctagcctacctgcccaatcaatcttctttcccagacctccygtcccttatttattcctccagtccccagctcagtccttccactagcaacctggttctgcactaaccccaggtgggcccggtgacaagaggcaatcgcttc

SEQ ID NO: 411274 - DNA, 201 bp, Homo sapiens
cgccgacccccagcatctccacaggtccatgcgtggcaggcgtggtgggcctcaccatgccgcggtactgcctgtttggggacacggtcaacaccgcctcrcgcatggagtccaccgggctgcgtgagtgtgacggggacaagacggggaggtgggagggggacacgggaggtgagtcccgagctcacggcgtcccccacc

SEQ ID NO: 411275 - DNA, 201 bp, Homo sapiens
ctgacaccagaatatattttgacctcttgcattgacctctacctgctaggtggcccaggggagtcgatcaagtctgggtgcccgcagcatgtcagacattygcagcggccccagccaacacttggacagccccaacattggtgtctatgaggtgagcctgaccccagccagacagagagacagtgggggaagaatgctcag

SEQ ID NO: 411276 - DNA, 201 bp, Homo sapiens
cacgatccactacgccttgtccccaggcccggaggccttggccgcactcgccaacagctcccagcttcgcagggcccacgatgccgtgctcaccctcacgygccactgtccctctgaaggcagcgtgctggacagcctgcgcagggctcaagagcgccgcgagctgccctctgacctcaatctgcagcaggtagacggtcc

SEQ ID NO: 411277 - DNA, 201 bp, Homo sapiens; identical to SEQ ID NO: 93075

SEQ ID NO: 411278 - DNA, 201 bp, Homo sapiens; identical to SEQ ID NO: 93077

SEQ ID NO: 411279 - DNA, 201 bp, Homo sapiens
ctcgggcttggagaaactcggggttacggggagaaccctaggggaggccggggtctcagtcgctcagcctgctccgtctgtgttcgcagaagccggcaatvaccgcctgcgcccgccgagcgggtgggcttccggaccccgggctctgcggtcccgcgtggtgggctccgtccctgccccgcctcccccgggccctgcccc

SEQ ID NO: 411280 - DNA, 201 bp, Homo sapiens
tccctacccccatcctctttgctgcagggagacagggtttggctgaagaaattcccaggggatcagcacatagctatccgcccagcaaccaagacggcctyctccaaggtgagacttgggcctgtgatggggcctaggtggccatcggtttctccctccttgccttctctttgcagctgggtacagaggtaggtctcagtt

SEQ ID NO: 411281 - DNA, 201 bp, Homo sapiens
gggcctggccttcttccctgattcctctacaggagctcttggtcacagatgcagtgacttaagtggactatgtgtatggggattaatgaactcgatcaccwtttaataccaggtgtttaaaatgaaaagtatctgggcgcggtggctcacacctgtgatcccagcactttgggaggccgaggcgggcggatcacgaggtca

SEQ ID NO: 411282 - DNA, 201 bp, Homo sapiens
gaagtcacggaactgcatagtggatggcagattcgtactcaagatcactgaccacggccacgggagactgctggaagcacagaaggtgctaccggagcctyccagagcggagggtaagagtcccctgtgcagacgaggatccaccgggatccccattatttcaagggcttctcccccgcttcctccctacctctgccctcg

SEQ ID NO: 411283 - DNA, 201 bp, Homo sapiens
ggggaggtaactcttatggaaggtaagaagcacagcactgtagaaacgaatattgatgtctactggattttggaagtctgctacaggtcagacatctaaayttttgttgacaaattttttttaatttaaattagaaaacatttcaagcatacagaaaatccctacatatagcgattgtttaccaccaaaaactaacagatg

SEQ ID NO: 411284 - DNA, 201 bp, Homo sapiens
aatttagcaatttatctaaactgtctactcagcataactattgtaggtggctatttattattattcccattataaatatgagtaaagtgaggcagagagaktcattaaattgttcaaggccacatggatttttagtggcagagctgagctttgagcaaacctgggaaagcatacttcaaaacccatgttataatcactgtg

SEQ ID NO: 411285 - DNA, 201 bp, Homo sapiens
  misc_feature (1)...(201): n = A,T,C or G
aatagtaatcataattgctatcactgtttcctgtgtgacaggcactgagctaatttagcaatttatctaaactgtctactcagcataactattgtaggtgnctatttattattattcccattataaatatgagtaaagtgaggcagagagagtcattaaattgttcaaggccacatggatttttagtggcagagctgagct

SEQ ID NO: 411286 - DNA, 201 bp, Homo sapiens
tatgttgagagctgctaccaagcctttttgtactactcacagacttagggtaacataggttttctgtcatcttctgagtatgtctggaaacctaaagaaayagaaattctgttttagcaatttttatttctagtagtatttttattatgggcagcagtggaattataatgccaaatattaataaatgtgtgaggtttttct

SEQ ID NO: 411287 - DNA, 201 bp, Homo sapiens
tcactctcaagcaaaatggcataactttggcttttcagaatattaaactagtgattctgccttgcccgcctctcaaataaatggtgtgtcaccctagaaasaaagataacacactccgcatacacaaacacgcacaccgcaaggaaccaaaggccaagagtatcaatgtaccagggcgcacacacttcgagagacaggttc

SEQ ID NO: 411288 - DNA, 201 bp, Homo sapiens
tttattcctactttgtagcatctttaaaaatgcttaccaagctgggcacagtggtacacaactgtaatcctagcactttgggaggctgaggtgggaggatyactgagaccagaagttcaagactatcctgggcaatgtagtgagactttgtctttgcaaaataaataaacaaataaaaatgtttaccctagctatgctgtt

SEQ ID NO: 411289 - DNA, 201 bp, Homo sapiens
tagttaattgattctcttttagagtcaattacactttcagactttcagtctttctcccacctttatactttggaaaatttcaaacctatggaaaagttgartgactagttcaactagtcatccatacaaccttctcttagattcactagttatgaacatttagtttgttgtgtatatttctgagccatttcaatataagtt

SEQ ID NO: 411290 - DNA, 201 bp, Homo sapiens
atctaaaatatgtatttggcatatactaattacatattaggtgcagtgaggaatcagtgtggatattgagccactgcatgcactatctacaacagtctttrgaagcaaagagaatacaaatataaaacggagactaggagcagacatattacaagtaataagtacttagcaggcattgggagaagtgtgagtttgtttgta

SEQ ID NO: 411291 - DNA, 201 bp, Homo sapiens
  misc_feature (1)...(201): n = A,T,C or G
taatttgcagcaatatatcagggtatgtatttatagtcagaaataactggtctgcaaggaagtgttaaaatgatacatactagcaggtagtctaggtgcanaaaaacccaaaaggaagctgacactgaagatgtggcacttactgtggttagaccttgctgttttcttgccattgcagttttataaatttgtcataaaatg

SEQ ID NO: 411292 - DNA, 201 bp, Homo sapiens
acctatagtcccagctgctcagggggctgaagcgggaggattgcttgatcctaagatgttcaaggctgcaatgagctgtgattgcaccactgcattccagyctgggtgacacagtgagaccctgtcaccaaaaaaatagtgttctgtgtttgagcaagcaactgcaagtggataatagatctgggtaagggaatggagaga

SEQ ID NO: 411293 - DNA, 201 bp, Homo sapiens
gcgcactgactgcggaactgggcgaacccgggggttcgtttctgctgactccagtgtcccgagaggcgccgcttcttccgctttctcgtcaggctcctgcraccccaggcatgaaccaaggtttctgaactactgggcgggagccaacgtctcttctttctcccgctctggcggaggctttgtcgctgcgggctgggcccc

SEQ ID NO: 411294 - DNA, 201 bp, Homo sapiens
agtagccccatatggtggctcacacctatagtcccagctgctcagggggctgaagcgggaggattgcttgatcctaagatgttcaaggctgcaatgagctrtgattgcaccactgcattccagcctgggtgacacagtgagaccctgtcaccaaaaaaatagtgttctgtgtttgagcaagcaactgcaagtggataatag

SEQ ID NO: 411295 - DNA, 201 bp, Homo sapiens
attatgtatatccaaatattcctttttttttttttttttttttttaattttgagacagaatctcatgtgtcacccaggctggagtgcagtggcacgatctsagctcaccataacctccgcctcccgagttcaagagattgttgtccctcagcctcctgagtagctaaaactacaatcgcacacaaccatgcctggctaatt

SEQ ID NO: 411296 - DNA, 201 bp, Homo sapiens
atctcattatgtatatccaaatattcctttttttttttttttttttttttaattttgagacagaatctcatgtgtcacccaggctggagtgcagtggcacratctgagctcaccataacctccgcctcccgagttcaagagattgttgtccctcagcctcctgagtagctaaaactacaatcgcacacaaccatgcctggc

SEQ ID NO: 411297 - DNA, 201 bp, Homo sapiens
tctagttaaaattgtgtgaccttgtagcaaattgtttaacacaggaagctgtaaaacagtaaaaacagtaagtactttatcatgttatgaatgcatgcagygcacaacacctaagtgctcaataagtgttgcctgttattgttacagtatattattaatatattgtaattgtccccataataaactctaaatacagtatat

SEQ ID NO: 411298 - DNA, 201 bp, Homo sapiens
cactgtgcttagctgaatttcatgtgtagacttgggtcgcatccccaagctatctcattatgtatatccaaatattcctttttttttttttttttttttttaattttgagacagaatctcatgtgtcacccaggctggagtgcagtggcacgatctgagctcaccataacctccgcctcccgagttcaagagattgttgtc

SEQ ID NO: 411299 - DNA, 201 bp, Homo sapiens
ttacaagtaataagtacttagcaggcattgggagaagtgtgagtttgtttgtattactggttaccaaatgtgccaggtactgtgtactagggattcaaaartgacagctatgattcctgcctcctgggttattctggcagaggaaacagaccagttctatgatagtggtatccccagggtaccataggaatacaggggaag

SEQ ID NO: 411300 - DNA, 201 bp, Homo sapiens
attctttaactgatgtttttgaagtataaaagtaccatttttggatatttaagttccaaatcctctcattcagaatttccattaaaaggtttaaagtaaaygcttgctctacttatgataacactatctaaaaaccgtagaacaataccaaagtctctgcataacgacctttttatttaagataattctgaaacactttat

SEQ ID NO: 411301 - DNA, 201 bp, Homo sapiens
aatttccccttgccggtaaaaccactgttgacatttaggtgttttcctcttctcctaaatcgtttctctttgcattttttgcagttaatgcatacaacttmatttcttgcttatttcagtaacatgtagcatatttcccattttgcttattctttataaagtaattttataaagaaatataaaatttgtaacaattttata

SEQ ID NO: 411302 - DNA, 201 bp, Homo sapiens
tagaggtttacatattatttggtactcaattatgtaggaactgagccacaggcagaaccaagaagctggctattgcttctgccctcgcctgaggtgaattrttagctgcactgttcctgggagtcaagagcttgcactcactctcaagcaaaatggcataactttggcttttcagaatattaaactagtgattctgccttg

SEQ ID NO: 411303 - DNA, 201 bp, Homo sapiens
ccttatatagtgaacttaaacgtttaatcagaagttaggctttaaagctagtcctatgagaatatttccagttgcataaaatacgtcaaatgtgaaatcarttcacaaataaatatagcaaagagctttttaaaaccagactagaggccaggcgcggtggcttacacctgtaatcccagcactttgggaggctgaggcggg

SEQ ID NO: 411304 - DNA, 201 bp, Homo sapiens
atttagggggaacatagttcagcccatacaggcaccatagattgttcagtcaagtgcaagcgagactggtggcactgaaataactattagttttcttctttagcacacttctaatttgcagcaatatatcagggtatgtatttatagtcagaaataactggtctgcaaggaagtgttaaaatgatacatactagcaggtag

SEQ ID NO: 411305 - DNA, 201 bp, Homo sapiens
actcaacctgtgttattattaatagctttttatgtactagtctgggtaatagatgctttataaatattatctctaatttctataacaactttgcagcatarttattatcatctccatcttctagaagaggaaatggcagtggctaacaagaagtcaagattcacaaaacatgtttcaaaccatttcattcagtcacgtaaa

SEQ ID NO: 411306 - DNA, 201 bp, Homo sapiens
cgcactgactgcggaactgggcgaacccgggggttcgtttctgctgactccagtgtcccgagaggcgccgcttcttccgctttctcgtcaggctcctgcarccccaggcatgaaccaaggtttctgaactactgggcgggagccaacgtctcttctttctcccgctctggcggaggctttgtcgctgcgggctgggcccca

SEQ ID NO: 411307 - DNA, 201 bp, Homo sapiens
taaagatgtcagataggggtacagcttttttatattccatccctaccatcattgccttacttcaacttctgattatttcttgctggataattgtatcattrgcatttctcccttcaggctcttaagcctcttattcacccttctcctactgccaaagccttcattttaaaatgcaagtatcattacttctctgattaatat

SEQ ID NO: 411308 - DNA, 201 bp, Homo sapiens
gatttagagggactatcttcaaaccagtacagatatttcataaataatacctggctgttttctaaccaactgagtaatttgttgcataataagccacctcrcatctttcagcaagaaatacattaaatttgaatagtaaagatattacacaatgaattaggacaacaatttaaatttgctttaaatgtttctttgcggaag

SEQ ID NO: 411309 - DNA, 201 bp, Homo sapiens
atcaccccgaggagggagaacagggcagatgagaacagaagaatgatcatctttgtagggtagaaagattctattgatgcacagtatggaaaatagcttgraagccagtaaagtaaaagttatgaaattaagcatgttagaactaaggcaatatgactgagaaacatcaatgaaaaagaaaaaataacgaactaaggcatt

SEQ ID NO: 411310 - DNA, 201 bp, Homo sapiens
aatttaaatttgctttaaatgtttctttgcggaagaggacactacacttctactcaatgaagagaaacatttttacagtccagaggtcttttattaccacstattatgccatgaattcacagggaagaggctccagcagttcaggctccttcctattggttctcagagtgcacttctctgggtggagcatgctgacacttt

SEQ ID NO: 411311 - DNA, 201 bp, Homo sapiens
gtccttagggaagatccgtacagttaatgtgacagtgtgacagtcgaggtaagttgataggttcttaaaatcatagaaagcacctaacaagggctcctacmtaatgtggcagccccaccaccatagcaagaaagtctacgctagtcttcattttaagaaatcactattatatgttcactgatgcccccctcccctctcaaa

SEQ ID NO: 411312 - DNA, 201 bp, Homo sapiens
gaatcccttgagcccaagaagtggaggttgcagtcagccaagatcgtgctactgcactcaagcctgggtaacagaccaagaccctctctcaaaaaaaaaaattgaatgacttctgtcatcccacttctcactacctggaactagtttttctgcccttcacacatcacattttgaggtctgtagaagtgctttgtttctaca

SEQ ID NO: 411313 - DNA, 201 bp, Homo sapiens
gggcttcaccatgttggccaggatggtcttgatctcctgacttcgtgatctgcccacctcagcctcccaaagtgctgggattacaggcgtgagccaccatrcctggccgtaatggtaactttatttttaatgcctactctttttcatctgccatgctagttaactttgcattacatcctcaaggtatataatgttacagct

SEQ ID NO: 411314 - DNA, 201 bp, Homo sapiens
taaaaaattaaataataaagattaacaaagttctataagggccattcagttgcaaatttgaactttagaactcaggttttctaattcctcgcccagtgttrcttgcactgtttaggtctttttattgaagtatgatacacctacagaaaagtggtaaatgtaaagtagatttagagattcaagaaagaaattaaaaagtgg

SEQ ID NO: 411315 - DNA, 201 bp, Homo sapiens
tattgtattatagtgattaataatgttaattaaattttctgatttcatatttgacaattatttggttacttttatttatgtttctggtacactttattaaygaagagtttatcttaaagtataatgtgttcagatagctcaatctgttgattaaaatcactgagtttgaaatattgggtgttttgtatttgttatattttc

SEQ ID NO: 411316 - DNA, 201 bp, Homo sapiens
cctcgcccagtgttacttgcactgtttaggtctttttattgaagtatgatacacctacagaaaagtggtaaatgtaaagtagatttagagattcaagaaaraaattaaaaagtggtaaatgtccagctccatgaattgttacaaagtctccagatcaagaaagagaacactccaagtctaattcatagaactatgaagtac

SEQ ID NO: 411317 - DNA, 201 bp, Homo sapiens
acatgggtgagccaccatgcctggccacaagtacatttcttgtaagatgactgaaggaatggttacatttctttttgttgttgttgttgaaacagagtctsactctttctcccaggctggagtgcagtggtgtgatctcggctcactgcaacctctgccacccgggttcaagcgattctcctgcctcagcctcccgagcag

SEQ ID NO: 411318 - DNA, 201 bp, Homo sapiens
aatagattattaaatgaatttcatatgtggctcacatattcctcatggacaatgatgcttcaactgatttctaagaaccaagccctttgatttggcagaamctttcccctttttatttattaataggcctttccaaatctctttgctttaattatccatatcatccatctatagggaacattgttatggttggcaagaact

SEQ ID NO: 411319 - DNA, 201 bp, Homo sapiens
agcatgtttatgtaaacaaatgttcacataaatattttgtgtcatttccatttgatttatagccttagtaattcttagaaagttgtaggtttcagcctggrcaatgtggcaaaaccctgcctctaccaaaaaaatacaaaaattagctgagcgtggtggcatactcctgtaatcccagctcctcggaaggctgaggtgaga

SEQ ID NO: 411320 - DNA, 201 bp, Homo sapiens
tggcatgatcttggctcactgcaacttccgcctcccgagttcaatcaattctcttgcctcagcctcccgagtagctggggttacaggcatacgccaccacrcccggctaatttttgtatttttagtagagatggggtttcaccatgttggttaggctggtctcgaactcctgacctcatgatccgcccatctcggcctccc

SEQ ID NO: 411321 - DNA, 201 bp, Homo sapiens
tttatttttcattttcatcttttctttccaagacttgtgaatcatagaagtgatgtttttatccccaaactcaaactctttctcatataatctctaagaaycctgttacagctgtaatgtagtgaaactccagtcaacatgagtgtctttcattgaactcagaactgtgctgactcagcatattattacatgaactaatta

SEQ ID NO: 411322 - DNA, 201 bp, Homo sapiens
actagtctcaaactcctgttcaagtgatccacccacctcggcctcccaaagtgctgggattataggcgtgagccactgcacctggcctagaaatatcttayataaaagctaagagctcttttctattgattgataatcaatttatttctcatctttattggtcactttttctcctgattatttaatatatgacttatatga

SEQ ID NO: 411323 - DNA, 201 bp, Homo sapiens
atggcgggcgcctgtagtcccagctacttaggaggctgaggcaggagaatgacgtgaacccggcaggcggagcttgcagtgcgctgagatcgtgccactgyactccatcctgggtgacagagcgagactccgtctcaaaaaaaaaaaatttttttttaagagttggaatattgctacatcacccaggctagagtgcagtca

SEQ ID NO: 411324 - DNA, 201 bp, Homo sapiens
cctgtctctactaaaaatacaaaaagttagccaggcgtcatggcgggcgcctgtagtcccagctacttaggaggctgaggcaggagaatgacgtgaacccrgcaggcggagcttgcagtgcgctgagatcgtgccactgcactccatcctgggtgacagagcgagactccgtctcaaaaaaaaaaaatttttttttaagag

SEQ ID NO: 411325 - DNA, 201 bp, Homo sapiens
ttctttagggttattcttttggcaaatgatccttgaccttgaagattttttttaaaatgtatatgcttaattgtgcttcagtataggggatgcatttatgrttgtctttttgtgatatttttatttctagtcaaatgcaccatgtatcattttcattgatgaaattgatgctattacccccaaaagagaagtggcttcaaa

SEQ ID NO: 411326 - DNA, 201 bp, Homo sapiens
ctctgtctcaaaaaaaaaaaaaaaaacaagcattaatgattctaaactctgatgtgtagttaagaatagatttaagaataaatttggttgggcatggtgastcacacctgtaatcccagcactttgggaggccgaggcaggtgaatcacctgaggtcaggagtttgagaccagcttgaccaatatggtgaaagcccatctc

SEQ ID NO: 411327 - DNA, 201 bp, Homo sapiens
agattgagaccatcctggctaacacagtgaaaccctgtctctactaaaaatacaaaaagttagccaggcgtcatggcgggcgcctgtagtcccagctacttaggaggctgaggcaggagaatgacgtgaacccggcaggcggagcttgcagtgcgctgagatcgtgccactgcactccatcctgggtgacagagcgagact

SEQ ID NO: 411328 - DNA, 201 bp, Homo sapiens
tctaatcatcttggttctcttaagtcaggtaaaaatcagaagtaacacatgtgaactgccttctttagggttattcttttggcaaatgatccttgaccttkaagattttttttaaaatgtatatgcttaattgtgcttcagtataggggatgcatttatgattgtctttttgtgatatttttatttctagtcaaatgcacc

SEQ ID NO: 411329 - DNA, 201 bp, Homo sapiens
aaagtttataaacttgttgtcttaagtttttttttctgtgcatatgcttatccaaaatcattgtttctgtttcatagcatagcaaatgtatctaatttacraaagaatttcagtagatttatcacaaaacatgcattgatgaagagactataaatgtgttaccctatctgcagtctcttactgtgtacttctaatcatctt

SEQ ID NO: 411330 - DNA, 201 bp, Homo sapiens
tgtgccatgcatgcttgaccctctgtgctttcactaatactctttcttctacatagaattccattagcctatatatctgcttgttaaaattgtatttaccyttcaagccttttctgaaatgttaccacctccatgaaccctcccttattcctcagttggaattcatgatgtcttttctcttattaccatggtgctttgttt

SEQ ID NO: 411331 - DNA, 201 bp, Homo sapiens
cgggctaggccccaggaggggcgcatttcaggtgcaactggcccggcgaacgcggcgggcaacccctacgaggcccccggttgactaggagctggcggtcmgagctgtggcttgaaagaccgacgcgatgaagcccagacctgcagggttcgtggataataaactcaagcagcgagtcatccaggtgtgtattctgcaccg

SEQ ID NO: 411332 - DNA, 201 bp, Homo sapiens
agatcctaaagggatttcctgccatagtgacagctggaggattcattctgcagtgggagcggaatttgagagaattggacgtgtattttaggacaataacrctagcggcattgtaaagaggcccagagagaggaagtctagaggcaggaccatttaggaggactcacattttgcctttactgagggttgacgtaatcagag

SEQ ID NO: 411333 - DNA, 201 bp, Homo sapiens
acctaacctcttcagccatattgaatgttctttattccccaaagagatcaaattctctttggctgtgcctttgtatgggtggttttattgagttagagtgkcatttccctttcacaaactcccacacagccctcaagaatcagttgaaatgttactgcctttattaggcctaagacccctttttaaatgtttccttagctt

SEQ ID NO: 411334 - DNA, 201 bp, Homo sapiens
cacagttctggagagtgttgggcaggattggttcttctggagcctttgtcctcactgatggctgtcttctcccagcgcctgcatgtgcttttccctctgcrcacatgctcttccctcctgtgccctaatcccctctttttgtaaggagagcagtcatattggataagagtctacctgtatgacctcattttaatccagtct

SEQ ID NO: 411335 - DNA, 201 bp, Homo sapiens
ccgagtagctgggactacaggcgtgtgccaccacacccacttaattttttttgtatttttagtagagacgggatttcaccatattggtcaggctggtctcraactcctgatctcatgatccgcccacctcggcctcccaaagtgctgggattacaagcctgagccaccgcgcccgacctaaagctcccttctaaaccagtg

SEQ ID NO: 411336 - DNA, 201 bp, Homo sapiens
ccggctaattttttgcatttttagtagagacggggtttcaccatgttagccaggatggtctcgatctcctgacctcgtgatccgcccgtctctgcctcccwaagtgctgggattacaggcgtgagccaccgcgcccggctgaattaaactcttttacagattgttttgtatactacttctacttcctaaaaagaaattaca

SEQ ID NO: 411337 - DNA, 201 bp, Homo sapiens
actataatttaatctttgctgtttttataggcaaaatattgatcatatatattttttctttttttgagacagaatctcgctctgtcacccaggctggagtmcagtggtgcgatctcgactcactgcatcctctgcctcccaggttcaagcaattctcctgcctcagcctcccgagtagttgggattacaggcacccaccac

SEQ ID NO: 411338 - DNA, 201 bp, Homo sapiens
gaccaggaggttgaggttgtggcaagctctgattgcacaactacacttcagcctgactgagtgagaccctgtctcaaaaacataaagttttttttttttttgagatggagtctcactcagtcacccaggctggagtgtggtggtgtgatgtctgcccactgcaacctccacctcctgggctgaagtgatactcctgcctca

SEQ ID NO: 411339 - DNA, 201 bp, Homo sapiens; identical to SEQ ID NO: 93090

SEQ ID NO: 411340 - DNA, 201 bp, Homo sapiens
ggctggaacgcctgaggaaagcaaaccaagttttccagaggacgccgttgacagcgtctccgcacaccgcgccggggtaggaacttcctcccgcctggttmgcccggcggggaaccaataaagttgagcgcgttcaaaggggtcctaatcttccagggtccgctgggcaggcctgcaaaataaggcccctagaaactccct

SEQ ID NO: 411341 - DNA, 201 bp, Homo sapiens
cggaattttttccccttcattcgcattacttttattctgacggaaacggcgcgggctaggccccaggaggggcgcatttcaggtgcaactggcccggcgawcgcggcgggcaacccctacgaggcccccggttgactaggagctggcggtccgagctgtggcttgaaagaccgacgcgatgaagcccagacctgcagggtt

SEQ ID NO: 411342 - DNA, 201 bp, Homo sapiens
agagaggctgacacaggaggattgcttgaggctaggagtttgagaccagactgggcaacatagcaagattctgtctctaccaaaaaaaaaaaaaaaaaaaattagcgtggcatgcacctgtagtctgtcttagctactcaggaagttgaagcaggaggatcacttgaggccaggaattcaaggctgcagtgagctacgatt

SEQ ID NO: 411343 - DNA, 201 bp, Homo sapiens; identical to SEQ ID NO: 93092

SEQ ID NO: 411344 - DNA, 201 bp, Homo sapiens
ttaccaccttgcccaggctggtcttgaacacctggactgaagcaatcctcccgccttggcctctcaaagtgctgggattacgggtgtgagccaccacgccygggcttatttatgtatttatttttgagataaggtctcgttctgttatccaggctggagtgcagtggctcgatcatagctcactgcaacctctaagtctgg

SEQ ID NO: 411345 - DNA, 201 bp, Homo sapiens
cctcccatgtagctgggaccacaggtatgcaccaccatgtctggctaattttaaaattttttgtagagatgagatcttaccaccttgcccaggctggtctygaacacctggactgaagcaatcctcccgccttggcctctcaaagtgctgggattacgggtgtgagccaccacgcctgggcttatttatgtatttattttt

SEQ ID NO: 411346 - DNA, 201 bp, Homo sapiens
agattctgaaggaggatggtttattgacaaaaccccaagtgtaaagaaagacagttttttcttggacctgtcatgtgagaaaagtaatcctaagaagccartaactgagatacaggtatttttgtaatgaaattttagccccatatcatcgaagtacatttcaaccttttagttgaatataatatcaatcagatacttgtg

SEQ ID NO: 411347 - DNA, 201 bp, Homo sapiens
atgattctgtaaccattattgccgtcagtgtcaagtgctttgttcactactctttctctgtctcttactagatctgaataatgtggctgctacagcccggrtcctagttattggagctactaatcgaccagactcgttagaccctgctttgagacgtgcgggaaggttcgaccgagaaatatgcctaggtatcccagatga

SEQ ID NO: 411348 - DNA, 201 bp, Homo sapiens
tgaggggaggtaggtgcttgataaagaacagtaggtgctgcttatcaacagatgaaaggagggttctttttcaggcaaccatctcatttgtgagtgaatgsactttctctttaaagtgctgggattgttagtgccatttttattgtaaatatcagaattgttattttttgtcttctacctaagaattctgtctcttaggct

SEQ ID NO: 411349 - DNA, 201 bp, Homo sapiens
  misc_feature (1)...(201): n = A,T,C or G
gcctatatatctgcttgttaaaattgtatttacccttcaagccttttctgaaatgttaccacctccatgaaccctcccttattcctcagttggaattcatnatgtcttttctcttattaccatggtgctttgtttatatctgttattatacttcacaaaatttgtctgatgccatttttttatttacacactcaatgtttc

SEQ ID NO: 411350 - DNA, 201 bp, Homo sapiens
  misc_feature (1)...(201): n = A,T,C or G
tatctgcttgttaaaattgtatttacccttcaagccttttctgaaatgttaccacctccatgaaccctcccttattcctcagttggaattcatgatgtctnttctcttattaccatggtgctttgtttatatctgttattatacttcacaaaatttgtctgatgccatttttttatttacacactcaatgtttctcaatag

SEQ ID NO: 411351 - DNA, 201 bp, Homo sapiens
aaaactaataggattttctggaattagatgtgggataagagaaagaaaataaataagggctattcttattgttagattgttttacctatactgggtaaaakgttttgccacttctgagataggggacacttggagaaaaaggacactttagaaaaagaccaacttttctaaaatgtctgttcaaggagatgaaaataagtt

SEQ ID NO: 411352 - DNA, 201 bp, Homo sapiens
gtgggaagactctgctggcgaaggtatcatataagttcaattgcatgtaatttatttcttagtatcagataggataatatgaacttaactttaaatattayagtgaggtaagtcttatgcataatttttatcagaagtttattttagcaaaactgacaactttcttcattaaagtttcctacttttttaaattacaaaggc

SEQ ID NO: 411353 - DNA, 201 bp, Homo sapiens
gattgtaggcgtgagccaccacatattatcattcttctatttaaaaccctccagtggcttcattcagtttcaaatccaaaggcctgtgacagccactaacrtcctttatgatttcgctgcctgactttcttttcagtttcatctcctaccaccctgttaggtatgtgaatctatttcctcagctgtaaattttacaaactc

SEQ ID NO: 411354 - DNA, 201 bp, Homo sapiens
gccttatctgtttcttggatgtctactgccgtacatttctttttttttttttcttttgagagagagtcttgctctgtcacccaggctggagtgcaatggcrctatctcagctcactgcaacctctgcctcccaggttcaagcgattttcctgactcagcctcccgagtagctgagattacaggcgcctgctaccatgccca

SEQ ID NO: 411355 - DNA, 201 bp, Homo sapiens
acgcctgaggaaagcaaaccaagttttccagaggacgccgttgacagcgtctccgcacaccgcgccggggtaggaacttcctcccgcctggttcgcccggyggggaaccaataaagttgagcgcgttcaaaggggtcctaatcttccagggtccgctgggcaggcctgcaaaataaggcccctagaaactccctgaggttt

SEQ ID NO: 411356 - DNA, 201 bp, Homo sapiens
tagcttgtgcctgtaatcccagcactttgggaggccaaggtgggtggatcaccaggtcaggagtttgagaccagcctggccaacatggtgaaacccatctytactaaacatacaaaaaattagccgggtatggtggtgtacatctgtaatcccagctacttgggaagctgaggcaggagaatctcttgaacccgggaggcg

SEQ ID NO: 411357 - DNA, 201 bp, Homo sapiens
agaattcattttagttcttactataagtcagaaacataaccacatttcaattaaagaatagttagatttcagtgatccaaagattccttagcccttatttytactaattagaaagtaatgttgctaatgaaacttttggaggtatcctaggtagagcacacctcatgccctcaaaaaaaggagagtttggctgagcgtggt

SEQ ID NO: 411358 - DNA, 201 bp, Homo sapiens
ggctggagtgcagtggtgtgattgtagctcactgcctgctgccttgagctcctgggctcaagaaatgatcccacctcagctgcctgagtagctagtagtaygggtgtgcaccaccacacccagctaagtttttgtttttagaggtgggatcttgctgtgttgcccaggcttgtattgaacttctggcctcaagcgatcctc

SEQ ID NO: 411359 - DNA, 201 bp, Homo sapiens
aggaggatggtttattgacaaaaccccaagtgtaaagaaagacagttttttcttggacctgtcatgtgagaaaagtaatcctaagaagccaataactgagrtacaggtatttttgtaatgaaattttagccccatatcatcgaagtacatttcaaccttttagttgaatataatatcaatcagatacttgtgttttgtgga

SEQ ID NO: 411360 - DNA, 201 bp, Homo sapiens
tttgagacggagttttggtcttgatgtccaggctagagtgcaatggcgtggtcttggctcactgcaacctctgcctcccaggttcaagtgattctcctgcytgagcctcctaagtagctgggattacaggtgcctgccaccacacctgtttttctttttctttttcttttttttttttttgagacgaggtctcactcttgt

SEQ ID NO: 411361 - DNA, 201 bp, Homo sapiens
gcttgaacccagaggcagaggttgcagtgagccaagatcgcgccgttgcactccagcctgggcaacaggacgaaactctgtctcaaaaaaaaaaaaaaaaacaagcattaatgattctaaactctgatgtgtagttaagaatagatttaagaataaatttggttgggcatggtgactcacacctgtaatcccagcactttg

SEQ ID NO: 411362 - DNA, 201 bp, Homo sapiens
tttttccccttcattcgcattacttttattctgacggaaacggcgcgggctaggccccaggaggggcgcatttcaggtgcaactggcccggcgaacgcggygggcaacccctacgaggcccccggttgactaggagctggcggtccgagctgtggcttgaaagaccgacgcgatgaagcccagacctgcagggttcgtgga

SEQ ID NO: 411363 - DNA, 201 bp, Homo sapiens
gaaaagtaatcctaagaagccaataactgagatacaggtatttttgtaatgaaattttagccccatatcatcgaagtacatttcaaccttttagttgaatrtaatatcaatcagatacttgtgttttgtggaaggcataggaactttaaaatatatggagaatttgatcacattgcactgctttccattctttctatccta

SEQ ID NO: 411364 - DNA, 201 bp, Homo sapiens
gtaatcctaagaagccaataactgagatacaggtatttttgtaatgaaattttagccccatatcatcgaagtacatttcaaccttttagttgaatataatrtcaatcagatacttgtgttttgtggaaggcataggaactttaaaatatatggagaatttgatcacattgcactgctttccattctttctatcctagtcta

SEQ ID NO: 411365 - DNA, 201 bp, Homo sapiens
tggagagtgatatgaaacggaaaggcaagctaaagaataaaggaagcaaaaggaagaaagaagatcttcaggaagtagatggagaaattgaagctgtcctrcaaaagaaaggtaaggtgtgagtcttgttggtggcagtggtcatgtttgcagtgagagaagcatcattctgtcccaagctattttgcttgagggaccttc

SEQ ID NO: 411366 - DNA, 201 bp, Homo sapiens
aatatttgacaacctctgctctgtagagtcagaagacccttaggcttgttgaaccatgctctagtatgatattgaaagtgttatgcagtaatattctttcytatttccaagtatggaatcctagcattccaagagagaattccaacaatgtgctgaatagtgatgaaaccattgaataataagtatatgggttccataagg

SEQ ID NO: 411367 - DNA, 201 bp, Homo sapiens
gttctgcagtatctgacagatgtcaaatatcactgtgttccttgaagtttaaaatatcccctcctacccttatgagtttactgcagtgttctggggtgttyggaaacctaggatattagtaagtaagccctcacttactgccttataactattctgataattattagtattgtattatagtgattaataatgttaattaaa

SEQ ID NO: 411368 - DNA, 201 bp, Homo sapiens
acggaaacggcgcgggctaggccccaggaggggcgcatttcaggtgcaactggcccggcgaacgcggcgggcaacccctacgaggcccccggttgactagkagctggcggtccgagctgtggcttgaaagaccgacgcgatgaagcccagacctgcagggttcgtggataataaactcaagcagcgagtcatccaggtgtg

SEQ ID NO: 411369 - DNA, 201 bp, Homo sapiens
  misc_feature (1)...(201): n = A,T,C or G
gtgaactgctgaggacagagtttgtattttatttatcctcctcacaccttttacatatttgacatttaataaatgttggttttatatgtatgttgctgtcnaaatctgtaatactttatctttaaccatgaaatgattctgtaaccattattgccgtcagtgtcaagtgctttgttcactactctttctctgtctcttact

SEQ ID NO: 411370 - DNA, 201 bp, Homo sapiens
tcaacattgaaatttgtataaaccttaacagcaccagtctggaagtcagttatactcatttagtcaaacagccattattaagaacctattatgtagatgartatggtctttatctttgagactcagtctcactctgtcgcccaggctggagtgcagtggcatgatctctgctcactacaacctccacctccagggcttgag

SEQ ID NO: 411371 - DNA, 201 bp, Homo sapiens
cgaacgcggcgggcaacccctacgaggcccccggttgactaggagctggcggtccgagctgtggcttgaaagaccgacgcgatgaagcccagacctgcagrgttcgtggataataaactcaagcagcgagtcatccaggtgtgtattctgcaccgcttggcctcgccaagggccccgatcgctgccccagggtgccactcc

SEQ ID NO: 411372 - DNA, 201 bp, Homo sapiens
aagtcttaactcattttagcatcaactcttaagtccaaactctcatctcaatatcatctaaatcaggccagatgcaaggactcacacctataatcccagcrttttgaggggccattggcttaaggccatagagttcaagaccaacttggggaacatagtgagaccccatctctacaaaatgaaaatagaaataattagctg

SEQ ID NO: 411373 - DNA, 201 bp, Homo sapiens
caacctttttttgtttttcatgatctttacatttttgaagattacaggtagttactatatagaatatccctcaatttggatttttctgctgttttcacatsgttggaatcaggttatatgtttttggaaggaaaaccaaagaagcaatttgacttcaaaaggcacagaatatctgtgtggggtgttattcggtaatgttag

SEQ ID NO: 411374 - DNA, 201 bp, Homo sapiens
actaatctactttcctttttttttttttttttttttttaatgtagagacagggtctcatgttaaccaggttggtctcgcactcctggcctgcagcatgccycctgccttggcctctcaaagtactgaggttttaggcatgtgtcgctactggccatcatctactttctgtctatataaatttgtctattctggatatttta

SEQ ID NO: 411375 - DNA, 201 bp, Homo sapiens
accctgctttggttgcatatacttatttctttgcatcaaacaagcttgatgatgactgcatcatagcatcttctctccctttcgttggctctgtttttttktttttttttttgacacagtatgtcaaaaaaagagaccctgtttgttgcccaggctgaagtgcagtagcgtgatctcagctcactgcaacctccacctcct

SEQ ID NO: 411376 - DNA, 201 bp, Homo sapiens
cagtcatattcagaggtactgggggttaggacatcaacataagaatataagggaaacacaattcagcttattggactctgtcctgtggctcccaaaattcrtggccttctcatgtgcagatacattcattccattccacaagccccaaaagtcttaactcattttagcatcaactcttaagtccaaactctcatctcaata

SEQ ID NO: 411377 - DNA, 201 bp, Homo sapiens
ctactgttacctctcaattttaactttttttttcttttttaattaatgttttttacccatggcaagctgtaatagcttttttgaggggaggtaggtgcttkataaagaacagtaggtgctgcttatcaacagatgaaaggagggttctttttcaggcaaccatctcatttgtgagtgaatggactttctctttaaagtgct

SEQ ID NO: 411378 - DNA, 201 bp, Homo sapiens
gcaatctcagctcactgcaacctctgcctccctggttcaagcgattctcctgcctcagcctcccgaggggctgggactacgggtgcacgccaccatgcctrgctaattttttgtattttagtagcgacagggtttcactgtgttgcccaggctggtcttgaactcctgagctcaggcaatctgcccgcctcattctcccaa

SEQ ID NO: 411379 - DNA, 201 bp, Homo sapiens
ctccagggcttgagcaattctcgtgcctcagcctcccgagtagctgggactacaggtgcataccataacgcccggctaatttttgtatttgtagtagagayggggttttaccatgttccacaggttggtctcgaactcctgacctcaggtgatctgcccaccttggcctcccaaagtgctgggattacaagcatgagccat

SEQ ID NO: 411380 - DNA, 201 bp, Homo sapiens
gtgacagagggagactcaaaaaaaaaaaaaaaccataaaatatgtatctggaaataatttgaacctgcagtataaaatggacatgtaatggatcgccgttkgtatcattatttccaggcaccagtacgcaacccagaccagttcaaagctcttggattggtgactccagctggggtcctccttgctggtcctcctggctgt

SEQ ID NO: 411381 - DNA, 201 bp, Homo sapiens
tgaagttcataccccacctcatttatttattgtgttcctttatatactgagctttctttcacaaaagatttttcttaaacaaaggatatgctaagaatagraagctgacaattgctcccattatgcaaatgtgaggaaaattcctcctctgctgggcgctgtggctcacgcctgtaatcccagcactttgggaggcggagg

SEQ ID NO: 411382 - DNA, 201 bp, Homo sapiens
tggcatgatctctgctcactacaacctccacctccagggcttgagcaattctcgtgcctcagcctcccgagtagctgggactacaggtgcataccataacrcccggctaatttttgtatttgtagtagagacggggttttaccatgttccacaggttggtctcgaactcctgacctcaggtgatctgcccaccttggcctc

SEQ ID NO: 411383 - DNA, 201 bp, Homo sapiens
agtgtttcagtcaatgatggacctcatgtatgatggtgatcccataagattattacatcatatttgtactgtaccttttctgtgtttagatatgtttaaawacacaataccattgtgttacagttgcctatagtatttagtacaataatgtgctgtataggtttgtaggcacagtaggctataccatgtagtctaggtgtg

SEQ ID NO: 411384 - DNA, 201 bp, Homo sapiens
tttgtcactaaaaatattattaaacataatgtatgcatgcaagttactgggttaagtgttaaaattctgggttggttttttttcctctacatccagtctcwtgagaaattctaagagttctaagttacatacttgtcattgctaatgtgtcttgaaatgagctgaaggggaattggcaccaaaatcaagattgagtgttag

SEQ ID NO: 411385 - DNA, 201 bp, Homo sapiens
ctgtctgtgccaacggcagaagggcttttgttagtttattctctttgacttgagagtgcatttttgctccaattctgactgtgtcctattctaagacttgraacctcattgggcagagctgcccaggaggagcaggacccacatgcagcctccctgtgccctgtctgcctgcgttggcctggtgccctctcaagagagctg

SEQ ID NO: 411386 - DNA, 201 bp, Homo sapiens
tctgagcacagtggctcacgtctgtaatcccagcactttgggaggccgagaagggcggattgcttgcactcgggagttcaagactagcctgggcaacatarcgaaatcctgtctctactaaaaataaaaaattaaccagccaaacatcttatgtgctcactcataagtgggagctaagctatgaggacacaaagcataaga

SEQ ID NO: 411387 - DNA, 201 bp, Homo sapiens
gtttctacatttctatagccttgggatgggagagggagctaagctggtggtgttaatccttctggggatgaaatcacttgtacctggacccgctctctccrtccagttggagatacctccccccatgggagctgtcccactcccatgggattgtacccagttctgtccagctccctggaaagtggcataccttggcagttc

SEQ ID NO: 411388 - DNA, 201 bp, Homo sapiens
aatcccaccactttgggaggccgagatgagcagatcacctgaggttgggagttcgagaccagcctgaccaacatggagaaaccctgtttctactaaaaatmcaaaaaaaaaaaaaaacaaaaaaaacaaattagccgggcatggtggtgcatgcctgtaatcccagctacttgggaggctgacgcaggagaatcacttgaa

SEQ ID NO: 411389 - DNA, 201 bp, Homo sapiens
ccaaactaagaatgctttataattatcatcagtattcccctttaccttggggcatgtagaactggctttaagatgtgttttgtggggagttttctgtgggkttttttttttttttttttttttttagatggagcctcaccctgttgcccaggctggagtgcagtagcacgatcttggctcactgcaacctccgcttcccag

SEQ ID NO: 411390 - DNA, 201 bp, Homo sapiens
ggcaggagaatcgctggaactcgggaggtggaggttgtagtgatcgcgccactgcacttcagcctggtgacagagcaagactccgtctcaaaaaataatartaattatcagatgaaagagtggatgactcacagagaaggtatttatttcattgtactaagatatttaccactgaagttccaagctaaatagagtgtttcc

SEQ ID NO: 411391 - DNA, 201 bp, Homo sapiens
cacgatctcagctcactgcaacctccatctcccaggctcaagcaattttcctgcctcagcctcccgagtaggtgggattacaggtgtgtgccatcacaccyggctaatttttgtatttttagcagagacggggtttcaccatattagccaggctggtctcgaactcctgacctcaggtaatctgcctgccttggcctccca

SEQ ID NO: 411392 - DNA, 201 bp, Homo sapiens
acaaaagaaaggtaaggtgtgagtcttgttggtggcagtggtcatgtttgcagtgagagaagcatcattctgtcccaagctattttgcttgagggaccttytatgtgcagaaatgtttaccaggaaatatttctatatttaatggacctttgtttacttaaagactattcattataattatgagttactactgaatcatta

SEQ ID NO: 411393 - DNA, 201 bp, Homo sapiens
tttcacaatagacagcatctttgagcaaagaggttgggaatagttaacagaggtgaaagtgctagggcaggaatgaattttctttacaatgcccctctttwaaaagtaaaacaattattggcatagaattttaagcatggcatatttaaatttattttctttccaggattcaaaagattcttctcttttggagagtgatat

SEQ ID NO: 411394 - DNA, 201 bp, Homo sapiens
taggagttcaagattagcctgggcaacaaagcaagaccccatctctacaaaataaaaattaggccaggtgcagtggctcacacctgtaatcccaacacttygggaggccgaggcgggcagatcatgaggtcaggagttcgagaccagcctggccaacatggtgaaaccccgtctctactaaaaataaaaaaatcagctggg

SEQ ID NO: 411395 - DNA, 201 bp, Homo sapiens
tgtgcagaaatgtttaccaggaaatatttctatatttaatggacctttgtttacttaaagactattcattataattatgagttactactgaatcattaatmttttcatctcctcatttttgtttaccagctaaagccagggggttagaattccagatctccaacgtgaagtttgaagatgtgggaggcaatgatatgacat

SEQ ID NO: 411396 - DNA, 201 bp, Homo sapiens
gagatggaggttgcagtgagccaagatcacaccattgtactccattctgggcaacaagagtgaaacttcatctcaaaaaacaaaacaaacaaacaaacaaaaaagcttagtcttggtggggtgcagcggctcacacctataatcccagcactttgggaggctgaggcaagaggattgcttgaggccaggaggtcacgacca

SEQ ID NO: 411397 - DNA, 201 bp, Homo sapiens
ccttaagaataaaatgaacttgtctcatgtcagagagaaaattattaaaatacatagacgttcaggatagcttacggaaatattacagtaataatttttayaagtagaaaatgtaacttttcaatagctgttgtggtgtttctttatttttttcccctctattgttcccttcaaggatgaattacaaaggctgctggggtt

SEQ ID NO: 411398 - DNA, 201 bp, Homo sapiens
ggagatggaggttgcagtgagccaagatcacaccattgtactccattctgggcaacaagagtgaaacttcatctcaaaaaacaaaacaaacaaacaaacaaaaaagcttagtcttggtggggtgcagcggctcacacctataatcccagcactttgggaggctgaggcaagaggattgcttgaggccaggaggtcacgacc

SEQ ID NO: 411399 - DNA, 201 bp, Homo sapiens
gggagatggaggttgcagtgagccaagatcacaccattgtactccattctgggcaacaagagtgaaacttcatctcaaaaaacaaaacaaacaaacaaacaaaaaagcttagtcttggtggggtgcagcggctcacacctataatcccagcactttgggaggctgaggcaagaggattgcttgaggccaggaggtcacgac

SEQ ID NO: 411400 - DNA, 201 bp, Homo sapiens
gttgctgacaattataataatagcaaagttatttagtacctctctaataaagagtactgtccctataggcaaatggatccattcgctgtcttcatcatgastctgggctgcttatcaattctggaaaaacgtattcttttgctaaggtgatatctacttgcctgttaaaatgcagcctaaattggagagcttagaaaatac

SEQ ID NO: 411401 - DNA, 201 bp, Homo sapiens
gcacagatggcttctgtatgttatataatttgatccctgtaaccttatataaatgtcattttccccattttataatcaaaggcactaagcttaagtggttrtgatttcctcaagcccatacagcctctactttatagagcaggggcttcaatccagatcttttgttctcagataatttgtttttttcttagacatttgaaa

SEQ ID NO: 411402 - DNA, 201 bp, Homo sapiens
tgggagatggaggttgcagtgagccaagatcacaccattgtactccattctgggcaacaagagtgaaacttcatctcaaaaaacaaaacaaacaaacaaacaaaaaagcttagtcttggtggggtgcagcggctcacacctataatcccagcactttgggaggctgaggcaagaggattgcttgaggccaggaggtcacga

SEQ ID NO: 411403 - DNA, 201 bp, Homo sapiens
ctgttagcagtgcaatttcacatccttatcttacctcatccttcagaggtcatgaatgtttttgtttaaaaagctttgttgatggctaaagcagggcagaktgagaggaagaggaagcacaatatctaatttcagaggggagaagtcacaaggcagacttcctgcccatgtatgttctttgtaagtcaacagaaagtgagg

SEQ ID NO: 411404 - DNA, 201 bp, Homo sapiens
acgtgaagtttgaagatgtgggaggcaatgatatgacattaaaagttagtgcaaattctgaattttacctcaaatggatatattactaatcagttatgagraaaaagcctacctctttgtttctaatatgatctgggtgtagaaaaggaaactgggaaggttgagaagggcaaacctgacctgtaccctttagggcattgc

SEQ ID NO: 411405 - DNA, 201 bp, Homo sapiens
ggttcaaaagcttagtctagggccgggcgcagtggctcactcctgtaatcccagcactttgggaggccgaggtgggcagatcacctgaagtcaggagtttsaagaccagcctgaccaacgtggtgaaaccgcatctctactgaaattacaaaattagccaggcatcgtggcatacgcctgtaatcccagctacttgggagg

SEQ ID NO: 411406 - DNA, 201 bp, Homo sapiens
ggaggggcgcatttcaggtgcaactggcccggcgaacgcggcgggcaacccctacgaggcccccggttgactaggagctggcggtccgagctgtggcttgraagaccgacgcgatgaagcccagacctgcagggttcgtggataataaactcaagcagcgagtcatccaggtgtgtattctgcaccgcttggcctcgccaa

SEQ ID NO: 411407 - DNA, 201 bp, Homo sapiens
cacctaccacaatgactaaaatttaaaatattggcaacactaaatggtggcaaggatatgaaacagctggaactctttttatttatttatttatttatttwtttttttgagacagagtttcactcttgttgcccaggctggaatgcaatggcacaatcgcagctcaccacaacctctgcctcctgagttcaagctattctc

SEQ ID NO: 411408 - DNA, 201 bp, Homo sapiens
tagcctcctaactgatctctctgattctgcttttacctaaagcctattccccacagagcagccagagacatctaattttttttttttttttctgctcactrcaacctctgcctcctgggttcaagtgattctcctgcctcagcctcccgagtacgtgggattacaagtgcatgccatcacgcctggctaatttttgtattt

SEQ ID NO: 411409 - DNA, 201 bp, Homo sapiens
agggaaattaaaatttgaatatttggttattcttttatgtgtctgcataggaacttgacctgccaattttgaaagtggctgctccagagattgtgtctggrgtatccggagagtctgagcagaagctgagagaactatttgagcaagctgtggtgagtcagttaatgactaatgccaggtggtcagacgctaccagcttat

SEQ ID NO: 411410 - DNA, 201 bp, Homo sapiens
ctcagcttcccgagtagctgggactacaggcgtgtgccaccacacccacttaattttttttgtatttttagtagagacgggatttcaccatattggtcagrctggtctcgaactcctgatctcatgatccgcccacctcggcctcccaaagtgctgggattacaagcctgagccaccgcgcccgacctaaagctcccttct

SEQ ID NO: 411411 - DNA, 201 bp, Homo sapiens
agtgaaactccagtcaacatgagtgtctttcattgaactcagaactgtgctgactcagcatattattacatgaactaattaaataagtgaaggcctgttttgtatttgtcatattttaagtaacttatgatgtgttcattcagttttaacttgaatcaggtgcattaaagactttccagggtttgtatttttcccttctga

SEQ ID NO: 411412 - DNA, 201 bp, Homo sapiens
ccgcctggacaaaacactgtttgtgggtttaccgccccctgcagatcgccttgccatcttaaaaactatcacaaaagtgagtaaaggaaatggtatatttytgtatatgtttctcttgttttaaatagagacagttataagaggtagtaattttcgttgactgattactttcttttctgtagctgtgtttgcccagcctat

SEQ ID NO: 411413 - DNA, 201 bp, Homo sapiens
ctcttccctcctgtgccctaatcccctctttttgtaaggagagcagtcatattggataagagtctacctgtatgacctcattttaatccagtctcctctayaaagaccctctctccagttacaatcacattctgaggtcctgcgggtgcggactgcagcatgtgaattttggggggcaccattcagcccaaaacaagcagt

SEQ ID NO: 411414 - DNA, 201 bp, Homo sapiens
tagagtggaggtagcctttgaattttaacctctttggcttgtgaagttagcacaggaatggtcttcaaacgctcgcattgtaagaggtccttgagaagggrtggcataaataatatgttaatttccgttctcaaggaacttacacactaaaacgagataacatgggtctggcaacagtaacaggcactttgcctacggttt

SEQ ID NO: 411415 - DNA, 201 bp, Homo sapiens
tcctttctggaataagatggaacatgtaataatgacagcgtttgttgagtgactgaactatttgatcttatatagtatccattttgatacctttggcagaygtgaaggacttcaaataaatatagttggtgacttgtttttactattagatcaggaatcagaaattttttcccctgtcttttctacagaatacttcaaaca

SEQ ID NO: 411416 - DNA, 201 bp, Homo sapiens
gagtgcagtggctcaatctcggctcactgcagcttcagccccctgggctcatccttctgcctcagcccccagatggctggaactaaggcacatgccaccakgccccgctgattctttgtattttttgtagagatggggttttgccatgttgcccagctggccttgaactcctgagctcaagtgatcctctcgcctcagcct

SEQ ID NO: 411417 - DNA, 201 bp, Homo sapiens
attagttcctaagaaagatttctacaatatgaacttagatgaatttgaagggtgcccggaaatacagatgttggagaatatgcaggaagagtttagaggawgagaatgctaaaggaaaatggagtggagtggtgaatgagcagaatgaagatgaaagggctggtcagctaaggagccaggacagggcagagagtgtggcca

SEQ ID NO: 411418 - DNA, 201 bp, Homo sapiens
gcctcagggaggtttagtcaacatggggctcagaaaccagtgacattccaaataaggtatttttctctctgtcttgtaaggtctacctgaagggtgtgcaycccaaatttcctgagggagggaagatgtctcagtacctggatagcctgaaggttggggatgtggtggagtttcgggggccaagcgggttgctcacttaca

SEQ ID NO: 411419 - DNA, 201 bp, Homo sapiens
agtactttcttctccccatacttcagattgggcctacagcaagggctttgtgactgccgacatgatccgggaacacctgcccgctccaggggatgatgtgytggtactgctttgtgggccacccccaatggtgcagctggcctgccatcccaacttggacaaactgggctactcacaaaagatgcgattcacctactgagc

SEQ ID NO: 411420 - DNA, 201 bp, Homo sapiens
gacactttctccagagcctttcagggccctccccagtctcatggcaccacacccccttgccagcatgtatctggagtattaagtactttcttctccccatrcttcagattgggcctacagcaagggctttgtgactgccgacatgatccgggaacacctgcccgctccaggggatgatgtgctggtactgctttgtgggcc

SEQ ID NO: 411421 - DNA, 201 bp, Homo sapiens
ctgcaggcccgctatcccaatcgctttaagctctggttcactctggatcatcccccaaaaggtatccttcccatttctggacatcccactatcccctcatygtcaaaatcaaagccttgcccctttgtgaattctggcttcattgaaatcaaccttgcctcacactgccaactcggaagtctgagtgcacagacacagtga

SEQ ID NO: 411422 - DNA, 201 bp, Homo sapiens
ttcatctttgttccttcataatgtgtagataaaggctgttcccctcttctcctcatcctaactccctaaaagcactgcaagtcttgcttatttcctagaayttttgctttcccttaacattctttttcttagttggaaagttgtatagcagaaaactttttatgtgggcctgagaagactcctaaagactttccttcccct

SEQ ID NO: 411423 - DNA, 201 bp, Homo sapiens
tctggagcacagaaacttagatcttcttggttaaatattcatctttgttccttcataatgtgtagataaaggctgttcccctcttctcctcatcctaactycctaaaagcactgcaagtcttgcttatttcctagaacttttgctttcccttaacattctttttcttagttggaaagttgtatagcagaaaactttttatg

SEQ ID NO: 411424 - DNA, 201 bp, Homo sapiens
gcctccctgggggtggggctggtcactctgctcggcctggctgtgggctcctacttggttcggaggtcccgccggcctcaggtcactctcctggaccccartgaaaagtacctgctacgactgctagacaagacggtaagttggggaagaaagggccagggtgaaggaggggaccagagtgctcctggcatggagggtaca

SEQ ID NO: 411425 - DNA, 201 bp, Homo sapiens
gaggcaggagactcacttgaacccaggaggcggaggttgcagtgagccaagattgcgccactgcactcaagcctgggcagcaagagcaaaactctgactcaaaaaaaaaaaagaaagaaagaaagtatgtagacggggaaaagatagcacatatctgatccctgccccagcctcagggaggtttagtcaacatggggctca

SEQ ID NO: 411426 - DNA, 201 bp, Homo sapiens
accccaatgctacagctgatccgggccatcctgaaagtccctgaagatccaacccagtgctttctgctttttgccaaccaggttggtttgttttcctccaycctaagacttcaaagttgctgtgtgggtagggctgagagacgtggtatggatgggcagaactggcccagtgccctgttttagcctctgcccaaggtcccc

SEQ ID NO: 411427 - DNA, 201 bp, Homo sapiens; identical to SEQ ID NO: 93108

SEQ ID NO: 411428 - DNA, 201 bp, Homo sapiens
tgattgccggcgggacaggtgcattacactgagggcctttctctcccaccattgttgactgttgccatgcaaattcctaggtgaccctctgaagactggtwaccatagccaagctgttgttcatcaggggatttccagcaatgcttagaactccctagtatctgaaaaacaaaatcataagcaggtagaaaccaaaaaaaa

SEQ ID NO: 411429 - DNA, 201 bp, Homo sapiens
tgggaatgattgccggcgggacaggtgcattacactgagggcctttctctcccaccattgttgactgttgccatgcaaattcctaggtgaccctctgaagrctggtaaccatagccaagctgttgttcatcaggggatttccagcaatgcttagaactccctagtatctgaaaaacaaaatcataagcaggtagaaaccaa

SEQ ID NO: 411430 - DNA, 201 bp, Homo sapiens
ctaagttcgctgtattgactttattcttccactgctctcttcacctgacctctcagggcattttaacattcagcccaacaagaaatctccaccagaacccmgagtggcgaagaaactgggaatgattgccggcgggacaggtgcattacactgagggcctttctctcccaccattgttgactgttgccatgcaaattccta

SEQ ID NO: 411431 - DNA, 201 bp, Homo sapiens
actcaagcttccacccaagctccaggatcagatgtcatagcagctgctcaactggcctcaggcatattttcaactctgcatttgttttctaagttcgctgyattgactttattcttccactgctctcttcacctgacctctcagggcattttaacattcagcccaacaagaaatctccaccagaaccccgagtggcgaaga

SEQ ID NO: 411432 - DNA, 201 bp, Homo sapiens
ggaccccaatgaaaagtacctgctacgactgctagacaagacggtaagttggggaagaaagggccagggtgaaggaggggaccagagtgctcctggcatgkagggtacagcacccacggtggttgggatgtccaagggacgtggcagcgccaggcgcgcttggtgaaacacttgtgtcctccaccctccagactgtgagcc

SEQ ID NO: 411433 - DNA, 201 bp, Homo sapiens; identical to SEQ ID NO: 93112

SEQ ID NO: 411434 - DNA, 201 bp, Homo sapiens
ctgtctccttcaccagggagtgacactttgccagaagcagctgatacattgtgtggcgctgaactgactcacagatagccctggccccattgtccctcaastatattattgtcagggctggctcaactcaagcttccacccaagctccaggatcagatgtcatagcagctgctcaactggcctcaggcatattttcaactc

SEQ ID NO: 411435 - DNA, 201 bp, Homo sapiens
ctggagctgctgtgtgccacttgggaaaatagattcacacctggctctgtgcctgtctccttcaccagggagtgacactttgccagaagcagctgatacaytgtgtggcgctgaactgactcacagatagccctggccccattgtccctcaactatattattgtcagggctggctcaactcaagcttccacccaagctcca

SEQ ID NO: 411436 - DNA, 201 bp, Homo sapiens
gcctcacactgccaactcggaagtctgagtgcacagacacagtgatctcctggtccctttcctttgggttcctgtttaccaggtgggtgacagggatggckgtgctgctaaggctcagcttgaggcaggctgagtatacccattcccagctgctgctaccacttgacactttctccagagcctttcagggccctccccagt

SEQ ID NO: 411437 - DNA, 201 bp, Homo sapiens
gccgcctggcctccaggcatccagccggtcaggttgtaaacatttccggcccctcccactgcgcgccgcctccgaggcggcctaggtgcggtgggcgctcrtccccggctgtcccccgactcccggcagtcctgtgagtgctgcgcctttagccccacggggtggagatgcatgggttccccagatcgggaccagagagcc

SEQ ID NO: 411438 - DNA, 201 bp, Homo sapiens
agtgatctcctggtccctttcctttgggttcctgtttaccaggtgggtgacagggatggcggtgctgctaaggctcagcttgaggcaggctgagtataccyattcccagctgctgctaccacttgacactttctccagagcctttcagggccctccccagtctcatggcaccacacccccttgccagcatgtatctggagt

SEQ ID NO: 411439 - DNA, 201 bp, Homo sapiens
cacttgacactttctccagagcctttcagggccctccccagtctcatggcaccacacccccttgccagcatgtatctggagtattaagtactttcttctcyccatacttcagattgggcctacagcaagggctttgtgactgccgacatgatccgggaacacctgcccgctccaggggatgatgtgctggtactgctttgt

SEQ ID NO: 411440 - DNA, 201 bp, Homo sapiens
gttgcagccgtcaagtcctgcaccccctcgccactcccacaggtggagacaattggcgatgcctacatggtggtgtcagggctccctgtgcggaacgggcrgctacacgcctgcgaggtagcccgcatggccctggcactgctggatgctgtgcgctccttccgaatccgccaccggccccaggagcagctgcgcttgcgc

SEQ ID NO: 411441 - DNA, 201 bp, Homo sapiens
gccttccccgcaggccctggcctagccaccactcctgctctcccttaggttgtactgaactacaatgggacttcccaagagctggtggctgtgtcggggcrcaaactgaactggcccctggggtaccctcctcctgacatccccaaatgtggctttgacaacgaagacccagcatgcaaccaaggtgactgccccttgcct

SEQ ID NO: 411442 - DNA, 201 bp, Homo sapiens
tctgggatatggatcccgagaatggtgccttcagggtaagtttgtgcacccagaagacagtgccaattccaaatgacatctcaccctcctacttccccccsacagccctgccagggcacctgtttatcctgtagccattccaccatgcctggacacttacaagagccctggataaaacagacccagctccagtctggggaa

SEQ ID NO: 411443 - DNA, 201 bp, Homo sapiens; identical to SEQ ID NO: 93135

SEQ ID NO: 411444 - DNA, 201 bp, Homo sapiens
caaacgatgtaaaagtatttccgggccagtgctggagagttcccagcaggaatctgattttaagaccctctgtgggccgggcgtggtgactcacacctgtratcccagcactttgggaagctgaggcaggcggatcacctgaggtcgggggttcgagaccagcctgaccaacatgatgaaatcccgtctctactaaaaata

SEQ ID NO: 411445 - DNA, 201 bp, Homo sapiens
tcggggagctccgaagggaggcaggcaggaccgcctcccagcagagacagggctgtgaaagatgcacattacacagctctgcaagcgagcagggacaggarggcgctgaggccaatggccacaagggacaggtcatccagagaaggcctcctggaagacgggcacatggactgggcctgcgaatgtaggctaaggtgaaca

SEQ ID NO: 411446 - DNA, 201 bp, Homo sapiens
ctaggatagcaccactgcactccagcctggatgacacaatgatactacatctcaaaaaaaaacccaacaacaaaaaggaagggtgacacaaagataaggcwggataaggcagggaaataaagaccagagcacaagcaatcaggatgcagactgggcccaccggctgaccattcctcctgctctccctcctttcagagaggc

SEQ ID NO: 411447 - DNA, 201 bp, Homo sapiens
aaggatcatctgagcccaggagtctgaggcggcagtgacctaggatagcaccactgcactccagcctggatgacacaatgatactacatctcaaaaaaaaacccaacaacaaaaaggaagggtgacacaaagataaggcaggataaggcagggaaataaagaccagagcacaagcaatcaggatgcagactgggcccaccg

SEQ ID NO: 411448 - DNA, 201 bp, Homo sapiens
gcagcctctccttgctcggcattctgattgtctccttcttcatatacaggtgagctgtgatgtggggggttgagtgaggctgggggacccggagaaccaakagcagaggaggcggtggggacccagagggaagagggcaggggtgaaggggcagcaggggaaaaccaagggagatgaggaagaaaggaggcttaaaagcca

SEQ ID NO: 411449 - DNA, 201 bp, Homo sapiens
ggccttgggactggggcaggagtgtactctgatggaggactggtggggggttctgagggaaggagtaagctggtggggagcagcagatgggggccctgggrgtgggctattgggaacaagtgagggtcctgagggcagggatgggctgtcgggagcagctggaattcccaggacatgggaccatgctcttcacagtgacag

SEQ ID NO: 411450 - DNA, 201 bp, Homo sapiens
tgaaccgtaaacgcattgagctgacacgaaaagtcctgtttgaactgaagcatgtaatgtggggagtgaggcagtggcatggagaaggggccctcggggaygcaagggagactggccaacagaactagttatggagggacctcagggtaccccaagaaaggggcagggactggagccctgggatggaccttcatcttgtgg

SEQ ID NO: 411451 - DNA, 201 bp, Homo sapiens
ttcccctgctccccggtatcctgctatgccctcaaccctgagcgtctctagagacctcactgcagtctggagggggaagtgcctaggggcgggcgctcacgtaggctgtgctgctcctctcttaccacccccaccgccaccctctgcccccagggagaacagcagcaacatcctggacaacctgctgtcccgcatggagca

SEQ ID NO: 411452 - DNA, 201 bp, Homo sapiens
ctccagggcaaaggcaaggttcggacctactggctccttggggagagggggagtagcacccgaggctgacctgcctcctctcctatccctccacacctccctaccctgtgccagaagcaacagaggtgccaggcctcagcctcacccacagcagccccatcgccaaaggatggaagtaatttgaatagctcaggtgtgctg

SEQ ID NO: 411453 - DNA, 201 bp, Homo sapiens
tattctgtgctgtccaatacagtagcctctaggcacatatggctacttatcactggaaatgtgacgggtgcaactgaggccctgattttttttttttttttggagacagagtttcgctctgtcgcccagcctggatggagtgcagtggtgcaatctcggctcactgcaacctccgcctcccaggttcaagcgattctcctg

SEQ ID NO: 411454 - DNA, 201 bp, Homo sapiens; identical to SEQ ID NO: 93137

SEQ ID NO: 411455 - DNA, 201 bp, Homo sapiens; identical to SEQ ID NO: 93138

SEQ ID NO: 411456 - DNA, 201 bp, Homo sapiens; identical to SEQ ID NO: 93132

SEQ ID NO: 411457 - DNA, 201 bp, Homo sapiens
agacccagcatgcaaccaaggtgactgccccttgccttccaggcctccatcccagagatgctgcatccttcccctaagcacagtcgagtaggtgctcctgycccatgctgagggctttctggagaatgactcctgcctttttcttcccttcatccatcatcccagttcactgatggactattagaaagttcttcctcctgc

SEQ ID NO: 411458 - DNA, 201 bp, Homo sapiens
ctgagacatgaaaatcacttgaacccaggaggtggatgttgcagtgagccgagactgcacccctgggcaacagagcgagactctgtctcaaaaaaaaaaaagagagaaagaaagaaaagaaaagaaagaaactgttaaacacaacaaggccactgtgattgatgcaaaccccagaagtagggacatgagttcagacagtgg

SEQ ID NO: 411459 - DNA, 201 bp, Homo sapiens; identical to SEQ ID NO: 93134

SEQ ID NO: 411460 - DNA, 201 bp, Homo sapiens
cagtctggggaagccaccagaatgatagggactcacaggcatcacacttggggagccccatgcctgaggagggagcacaagcctgccctcggggagctccraagggaggcaggcaggaccgcctcccagcagagacagggctgtgaaagatgcacattacacagctctgcaagcgagcagggacaggaaggcgctgaggcc

SEQ ID NO: 411461 - DNA, 201 bp, Homo sapiens
ggttcaagtgattctcctgcctcagcctcccgagtagctgggcttacaggcatgcaccaccacgcctggctaatgtttgtatttttagtagagatggggggtctcaccatcttgtgcaggctggacttgaactcctgatctcatgatccatccatctcggcctcccaaagtgctggggttacaggcatgagcgaccgtgcc

SEQ ID NO: 411462 - DNA, 201 bp, Homo sapiens
cttctccctctgggatatggatcccgagaatggtgccttcagggtaagtttgtgcacccagaagacagtgccaattccaaatgacatctcaccctcctacwtcccccccacagccctgccagggcacctgtttatcctgtagccattccaccatgcctggacacttacaagagccctggataaaacagacccagctccagt

SEQ ID NO: 411463 - DNA, 201 bp, Homo sapiens
cgaatccgccaccggccccaggagcagctgcgcttgcgcattggcatccacacaggtaaggccactgaaggtgcaggcgggcatccagaggccaaggcttygcaagggaaacttgtcccctggcccagcccctcgccctttcatctctctctctctctctctctctctctctctctctctctgtctctctctctctctctc

SEQ ID NO: 411464 - DNA, 201 bp, Homo sapiens
gaggagtttggtggtttcgagctggagcttcgaggggatgtagaaatgaaggtagagggagaagcctctgccctccccaccttttggggtcctagagggarttacccttctcaagcagccaatgccactcccatccctaaggctctcatctgactggggaaagggcatgtgccactccccagcccatcctcttttttccct

SEQ ID NO: 411465 - DNA, 201 bp, Homo sapiens
gaggcagaggttgcgatgagccaagattacaccacgcaccccagcttgggcaataagagttaaactctgtctcaaaaaaaaaaaaaaaaaaaaaaaaaagrccctctgctccacctttgatgtggtaaagatggcttcagagccagcataagtgaggctgtgaatctcagctccacagctggctgtgtgtcagtttgctat

SEQ ID NO: 411466 - DNA, 201 bp, Homo sapiens
tgagggtgggagtggggatgggaagggacagacagacatggacaaggtcagaaaaagatgaggggtaggcagaatgatgtggagtcttaagagaggagatyggggacacgggcagagacagtgacacagggagacccgggaacaggcagagaacccatgtgggatgggggatgagcaaagacagatgagggtacagaatga

SEQ ID NO: 411467 - DNA, 201 bp, Homo sapiens
ggaggcagaggttgcgatgagccaagattacaccacgcaccccagcttgggcaataagagttaaactctgtctcaaaaaaaaaaaaaaaaaaaaaaaaaargccctctgctccacctttgatgtggtaaagatggcttcagagccagcataagtgaggctgtgaatctcagctccacagctggctgtgtgtcagtttgcta

SEQ ID NO: 411468 - DNA, 201 bp, Homo sapiens; identical to SEQ ID NO: 93141

SEQ ID NO: 411469 - DNA, 201 bp, Homo sapiens; identical to SEQ ID NO: 93143

SEQ ID NO: 411470 - DNA, 201 bp, Homo sapiens
ctggaaagcgctcacctggcctctctttctttttgatggcaggtccagcctttcctgccaaggtggctggctgagcctaactgtgtcagaaggaatgtcaycgaagacctggttcctatcgaggacatccctgacgtccatcctgacctgcagaagcagctgcgggcacacggcatctcgtcctactttccaggtgcccca

SEQ ID NO: 411471 - DNA, 201 bp, Homo sapiens
gtgccactgtgggttgatgggaggctacagagtgagtttgctcagggagtggcatctgcttttactgtttaacttctgaaggctgtatggaaagcgcatcytggggctgagaaggagctgaagacgacagaggtttccccagcctccctcccctagctttttccaccgtgggcttctgcgcgagagcctggaaagcgctca

SEQ ID NO: 411472 - DNA, 201 bp, Homo sapiens
ctgttcccgtgaagaggaggagctcccaccggcccccttcccatgtggggtggagtcggggctgtggggtgaggcagcgtcttgctatccggaagcccttragaaagcttccttctctcgagctgctctctggtctgtagagctgatgggtaccgctgcttggctgacatcgtggtagccacccccggccgcctggtggac

SEQ ID NO: 411473 - DNA, 201 bp, Homo sapiens; identical to SEQ ID NO: 93145

SEQ ID NO: 411474 - DNA, 201 bp, Homo sapiens; identical to SEQ ID NO: 93146

SEQ ID NO: 411475 - DNA, 201 bp, Homo sapiens
gtcagactcttgaaggctcaggggccagtctggagatagctgcgtttgattccagggttgggaggacagctcgcgctgggaaaactggacaggccttcacrctgctcctgaaagtgcaggtgaggctgcgagggtcttgggagtttctgctgttggtgggtgttaaggggctggcccaagaacccccttccaccatgagct

SEQ ID NO: 411476 - DNA, 201 bp, Homo sapiens
gacctcctggctgcgggagggtgggtgccactgtgggttgatgggaggctacagagtgagtttgctcagggagtggcatctgcttttactgtttaacttcygaaggctgtatggaaagcgcatcctggggctgagaaggagctgaagacgacagaggtttccccagcctccctcccctagctttttccaccgtgggcttct

SEQ ID NO: 411477 - DNA, 201 bp, Homo sapiens
ctggccttcgtcatccctgtggtgcaggtctgtgtgagggtcccctttctctacagcgggtgtgcagaggacaggtaacagccttgctgacgcaggcgctycttccccctcaggccctgctttcgagagtggtctgccacatccgtgccctggttgtgctgcccaccaaggagctggcccggcaggtatgtggaccctaga

SEQ ID NO: 411478 - DNA, 201 bp, Homo sapiens
gacttctctctcgcctttcctcatccagtccaggcagctgtgattcctgccctcctggagagcgcagcctgtgggtttctggtgggcagaggtggctaccrgcctagcgacctctgtgtttctgccccaacaggcagtgggaagacactggccttcgtcatccctgtggtgcaggtctgtgtgagggtcccctttctctac

SEQ ID NO: 411479 - DNA, 201 bp, Homo sapiens
ctgtcgttccgtcagactcttgaaggctcaggggccagtctggagatagctgcgtttgattccagggttgggaggacagctcgcgctgggaaaactggacrggccttcacactgctcctgaaagtgcaggtgaggctgcgagggtcttgggagtttctgctgttggtgggtgttaaggggctggcccaagaacccccttcc

SEQ ID NO: 411480 - DNA, 201 bp, Homo sapiens
ctgagaacctacgtgcaccggtgagcgctggcgcagcggccactggggggtctggggctttgtgagctcctgggcgttgatgtgggaccgtcttgactggygtggggtggggttggtgtggagagaagctgtcgttccgtcagactcttgaaggctcaggggccagtctggagatagctgcgtttgattccagggttggga

SEQ ID NO: 411481 - DNA, 201 bp, Homo sapiens
gcatcgacgtgcagggtgtggagctggtggtgaactacgacgccccccagtacctgagaacctacgtgcaccggtgagcgctggcgcagcggccactgggrggtctggggctttgtgagctcctgggcgttgatgtgggaccgtcttgactggcgtggggtggggttggtgtggagagaagctgtcgttccgtcagactct

SEQ ID NO: 411482 - DNA, 201 bp, Homo sapiens
ggtccctgctcagccctgcaggtggcctgaggcaccgtgggagcagaggaggggccaccatctttaaccacctgttcccgtgaagaggaggagctcccacyggcccccttcccatgtggggtggagtcggggctgtggggtgaggcagcgtcttgctatccggaagcccttgagaaagcttccttctctcgagctgctctc

SEQ ID NO: 411483 - DNA, 201 bp, Homo sapiens
gtctgtcaaggtaagggcaccagagtccggcatgaaaccctctggggagggcgtttgcagagagggcgtcgtcaccacacgtggagaaaagagggaaaaaraggaaagcgagaaggcaacagagggtcacacaggttgtcctcgagcttctggcccaagggcggggagcccctgggcaccagtggtggaaacacgtggcac

SEQ ID NO: 411484 - DNA, 201 bp, Homo sapiens
tcgggcacaggagtgcggggggtgtctcctgggtgatcaccaaacttcacacttccacaatgggccccagtaaaacagtggaccctaataagcacattccygtccccttaggtgcactaagggaagctaaaagcagactgaggggtgcctgtaaccccaagaagatgtctgggagcagacccagagaccctcgcagaaaag

SEQ ID NO: 411485 - DNA, 201 bp, Homo sapiens
gccttgctgacgcaggcgctccttccccctcaggccctgctttcgagagtggtctgccacatccgtgccctggttgtgctgcccaccaaggagctggcccrgcaggtatgtggaccctagacctggagcgtggcaccgcccgcctcagcttccctgctgagtgcacagcgatcagcccctgggggacccagattagatctg

SEQ ID NO: 411486 - DNA, 201 bp, Homo sapiens
gccagtgacagacttctcctgcaggtgagcaaagttttcaacatctacacagatgccacacctctgagagtctccctggttacgggacagaagtctctggycaaggagcaggagagcctcgtccagaaaacgtaggttgtgtcagggtgcgggtttttcagggggtccctgctcagccctgcaggtggcctgaggcaccgt

SEQ ID NO: 411487 - DNA, 201 bp, Homo sapiens
agccccatggcagccagttcccagaaaggcctgagctgccccccgcagggccggtgctgccacggcccctgctcctggcacgtcgggcccacaatgctgcrtgtcccggcaggctcatcagcacggacgccaccgcgcgaggcatcgacgtgcagggtgtggagctggtggtgaactacgacgccccccagtacctgagaa

SEQ ID NO: 411488 - DNA, 201 bp, Homo sapiens
cagcagctccgcttcctggtaggtccccgccccaggggcctgggctttgagctcagggccgcgccacccagtcccgggctccctgtctcctgcagattatygacgaggctgaccggatgattgacagcatgcatcagtcctggctgccgcgggtggtggcggccgccttccagagcgaggaccccgcggacccctgtgccc

SEQ ID NO: 411489 - DNA, 201 bp, Homo sapiens
cccacaatgctgcgtgtcccggcaggctcatcagcacggacgccaccgcgcgaggcatcgacgtgcagggtgtggagctggtggtgaactacgacgccccycagtacctgagaacctacgtgcaccggtgagcgctggcgcagcggccactggggggtctggggctttgtgagctcctgggcgttgatgtgggaccgtctt

SEQ ID NO: 411490 - DNA, 201 bp, Homo sapiens
ggcccaagaacccccttccaccatgagcttctctccaggagaggagattcctccgaatgctaactgaagctggggcacctgagttgcagcggcacgagctytccagcaagctgctgcagccgctggttcctcggtacgaggaggccctgtcccagctggaggagtctgtcaaggtaagggcaccagagtccggcatgaaac

SEQ ID NO: 411491 - DNA, 201 bp, Homo sapiens; identical to SEQ ID NO: 93140

SEQ ID NO: 411492 - DNA, 201 bp, Homo sapiens
tgctgagccctcccctttcctccacaggaagagcgcaagcagagggcggcctaggctggggctcagagggccggagggactgaacgctcaccaccctgacyctccttccagagcagtgctgatcactggatcctgtatgtgaggaaaggaatcccccagtggacacagccttcctccccaagcacgtggtctctgcgccag

SEQ ID NO: 411493 - DNA, 201 bp, Homo sapiens
ccacccccggccgcctggtggaccacatcgaccagaccccaggattcagcctccagcagctccgcttcctggtaggtccccgccccaggggcctgggcttygagctcagggccgcgccacccagtcccgggctccctgtctcctgcagattatcgacgaggctgaccggatgattgacagcatgcatcagtcctggctgcc

SEQ ID NO: 411494 - DNA, 201 bp, Homo sapiens
gagtccccagcaaggccctcaccttgaagagctctcgggggaacaggtagttgccttcccacttggacttctccagggggtgcgctccttccagctgcacraacttcaggagtgcgctgagggccagctcctgggaagggggcagtgcagggtggctgtgatgccctcaccccacggatgggcccagagctcagcccagtc

SEQ ID NO: 411495 - DNA, 201 bp, Homo sapiens
agggttctctgcttcactaactcccgagagaactcccacaggtgaggccccggctgggcgggggtggcagaggtggcctctggtcccagcatcacttggcygcagccttctctctgcctaggctcttcctgctggtgcaagcttttgggggtgtggacgtggctgagttctcctcgcgctacgggcctggccagaggagga

SEQ ID NO: 411496 - DNA, 201 bp, Homo sapiens
aagcagactgaggggtgcctgtaaccccaagaagatgtctgggagcagacccagagaccctcgcagaaaagtgtcacagagcagcacagactgagtctgayagaaactctctatacaaatagcacaccttgtcccagctaaaaccctgggccctgggaggacaagacatccctcctctaacccctcgtcactagcccattt

SEQ ID NO: 411497 - DNA, 201 bp, Homo sapiens
tgggcaggcccgtcccggcccttccacagtggcacgggggcctggatccttccccagagtttcgagatgtgagaggggagaggagcgggagggacagcagytgagcacacaaaggaagaggtgggaggggcaagaggaggacagagctgttggtgacggtggggaccaggcgagagggggtggggtgggggctgaggggtg

SEQ ID NO: 411498 - DNA, 201 bp, Homo sapiens
tggaaagcgctcacctggcctctctttctttttgatggcaggtccagcctttcctgccaaggtggctggctgagcctaactgtgtcagaaggaatgtcaccgaagacctggttcctatcgaggacatccctgacgtccatcctgacctgcagaagcagctgcgggcacacggcatctcgtcctactttccaggtgccccag

SEQ ID NO: 411499 - DNA, 201 bp, Homo sapiens
ggctgtatggaaagcgcatcctggggctgagaaggagctgaagacgacagaggtttccccagcctccctcccctagctttttccaccgtgggcttctgcgygagagcctggaaagcgctcacctggcctctctttctttttgatggcaggtccagcctttcctgccaaggtggctggctgagcctaactgtgtcagaagga

SEQ ID NO: 411500 - DNA, 201 bp, Homo sapiens; identical to SEQ ID NO: 93153

SEQ ID NO: 411501 - DNA, 201 bp, Homo sapiens
ttttttttttttttttgagacagtctcactttgtagctcaggctggagtgcagtggttcgatcttggctcactgcaacctctgcctcctgggttcaagcarttctcctgcctcagcctcccaagagctgggattacaggcacgtgccaccatgctcggctaatttttgaagttttagtagaaaggggtttcaccatgttgc

SEQ ID NO: 411502 - DNA, 201 bp, Homo sapiens
gtgtgagttgtcatgcccagccaaaactactttttgaataattaatggacttgatatacatagtgtagaggcttaaaaatattaacaaaattattggttasccatgatcaatatcaagatcctgaaaagccatatatctggagtagcctattattatctaatgatcacctagtatctggttaagtgttttcttcatagtag

SEQ ID NO: 411503 - DNA, 201 bp, Homo sapiens
acttaagtgaaataaattaatgtacccacagcttaccttttttgaaagaaatggttgagctttaggattaatgtccattaggcctgttcaacacatagatrcttgataatttgactacaaaaaagtcttgttcaattatgctgaggtaggtggaagactataaaagaaataaactatttctccattggggaaaatagaaat

SEQ ID NO: 411504 - DNA, 201 bp, Homo sapiens
agctatagtttattttttgatagctgtgtaatattccattgtatcagtataccatgatttatccattcttctgttggaggacattggaaagattgtcatgkttttgctgttactaacagtactgttaatgaatatccctgtacataatatcctagcatacatgtgtgcaagggttattcttggtataatgcaacattgtgg

SEQ ID NO: 411505 - DNA, 201 bp, Homo sapiens
gctctttcccccagctatccctctgtccccctcacgctcccacttgagataatcctgagttaaggatgctatgttatcttggatttctttttaaaattcawtattatatttttaagaattatccaattttttttacaagtagctatagtttattttttgatagctgtgtaatattccattgtatcagtataccatgattta

SEQ ID NO: 411506 - DNA, 201 bp, Homo sapiens; identical to SEQ ID NO: 93161

SEQ ID NO: 411507 - DNA, 201 bp, Homo sapiens
acttttggtaacgatagaccacatccagttgtattaaagctgttattggtgctcctggcctgaaatggacctatgaactttgagttgcaactataaggatrttttttgccagtattatacactgcacaaacctatttatccataactgttagtattggttcatatatggaatcaaccagggaatagttcagattccatctc

SEQ ID NO: 411508 - DNA, 201 bp, Homo sapiens
ttgcagtgagctgagatcgcaccattgcactccagcctgggcaacaagagtgaaactccatctcaaaagaaaaaaaaaagcggctgggctctgtggctcakgcttgtaaccccagcactttgggaggccaagaggtggatcacctgaggtcaagaatttgagaccaacctggccaacatggtgaaaccccatctgtactaa

SEQ ID NO: 411509 - DNA, 201 bp, Homo sapiens
ccagcctgaccaacatggtgaaaccctgtctctactaaaaatacagaattagccaggtgtggtggcaggcgcctgtaatcccagctacttgggagactgargcagaagaatcacttgaacccaggaggtggaggttgcagtgagctgagatcgcaccattgcactccagcctgggcaacaagagtgaaactccatctcaaa

SEQ ID NO: 411510 - DNA, 201 bp, Homo sapiens; identical to SEQ ID NO: 105579

SEQ ID NO: 411511 - DNA, 201 bp, Homo sapiens; identical to SEQ ID NO: 93164

SEQ ID NO: 411512 - DNA, 201 bp, Homo sapiens
tccattaggcctgttcaacacatagatacttgataatttgactacaaaaaagtcttgttcaattatgctgaggtaggtggaagactataaaagaaataaactatttctccattggggaaaatagaaattatattcaagttagcattatgttactatttttaatgactttcttttatactattaattaaatcataactgaac

SEQ ID NO: 411513 - DNA, 201 bp, Homo sapiens
tacgggcggggcttctcagccttctgccttctggcccgatgcccgcttcccaacggccggaggccgctagactaatcggcttcgccctgcgcgctgtaatscgcatgcgcacgcgcacaagttcctgggcccgcccatcttccggacttgggcggggcgtaaaagccgggcgttcggaggacccagcaattagtctgattt

SEQ ID NO: 411514 - DNA, 201 bp, Homo sapiens
gtccattaggcctgttcaacacatagatacttgataatttgactacaaaaaagtcttgttcaattatgctgaggtaggtggaagactataaaagaaataaactatttctccattggggaaaatagaaattatattcaagttagcattatgttactatttttaatgactttcttttatactattaattaaatcataactgaa

SEQ ID NO: 411515 - DNA, 201 bp, Homo sapiens
tgtccattaggcctgttcaacacatagatacttgataatttgactacaaaaaagtcttgttcaattatgctgaggtaggtggaagactataaaagaaataaactatttctccattggggaaaatagaaattatattcaagttagcattatgttactatttttaatgactttcttttatactattaattaaatcataactga

SEQ ID NO: 411516 - DNA, 201 bp, Homo sapiens
tttagtagagacggggtttcaccatgttagccaggatggtctcgatctcctgacctcgtgatccgcctaccttggcctcccaaagtgctgggattacaagygtgagccaccgtgcctggcctggccaggctgtcttgaactcctgacctcaagtgatgtgcccgcctcggcctcccaaagtgttgggattacagatgtgag

SEQ ID NO: 411517 - DNA, 201 bp, Homo sapiens
tgggcgacagtgagactccatctcaaaaaaaaaaatctgaagttaagatgtggagtgtctaataaaagtaaaatgatgaattctgggttctaaatagaaayggattcaagtgagaagggactaaagacagaaatgagctatgaaaaggcctcgtaacaacacaggtgactctacatatgttcttaggaaaggccacataat

SEQ ID NO: 411518 - DNA, 201 bp, Homo sapiens
atgtccattaggcctgttcaacacatagatacttgataatttgactacaaaaaagtcttgttcaattatgctgaggtaggtggaagactataaaagaaataaactatttctccattggggaaaatagaaattatattcaagttagcattatgttactatttttaatgactttcttttatactattaattaaatcataactg

SEQ ID NO: 411519 - DNA, 201 bp, Homo sapiens
gattcaagtgagaagggactaaagacagaaatgagctatgaaaaggcctcgtaacaacacaggtgactctacatatgttcttaggaaaggccacataatayaccaacttttattccttacccactagatgagaaattgatgctgttttccccacacctacaaaccgcctatgttttttctctgtgatggcctctggctcag

SEQ ID NO: 411520 - DNA, 201 bp, Homo sapiens
cctcctgggtacctgggactacaggcatatgccatgacgcccggctaattttttgtatttttagtagagatggggtttcaccatgttagccaaaaaaaaaagaatgtgcctcaccttgcaaggcccaggccctaggatcacttgagctcaggagttcaaggccagcctgggcaacagggcaaaaccctgtctctacaataa

SEQ ID NO: 411521 - DNA, 201 bp, Homo sapiens; identical to SEQ ID NO: 93156

SEQ ID NO: 411522 - DNA, 201 bp, Homo sapiens
ggcctgtcttgaaccactgggctcaagtgatcctccctccttagccttccgaagtactgggattgcaggtgtgaaccactgtgcccggctttagacttaartgttttatcaggcttgaaatcctagctctttaaagattttgttttaaatgccgggtgcaagagcctgggaacaatttgcacttaggtgcctgtgaatatc

SEQ ID NO: 411523 - DNA, 201 bp, Homo sapiens
ttttatcaggcttgaaatcctagctctttaaagattttgttttaaatgccgggtgcaagagcctgggaacaatttgcacttaggtgcctgtgaatatcaawgtttcaatttctggcaaatggtttaaaatagaaatccaatttgtccatgctatgcaaaccatctgaattagaatgtaatgagtaaagcttaaaccttagg

SEQ ID NO: 411524 - DNA, 201 bp, Homo sapiens; identical to SEQ ID NO: 93157

SEQ ID NO: 411525 - DNA, 201 bp, Homo sapiens
ataatgtaactgcaaactccaagctggtcattatcacggctggggcacgtcagcaagagggagaaagccgtcttaatttggtccagcgtaacgtgaacatmtttaaattcatcattcctaatgttgtaaaatacagcccgaactgcaagttgcttattgtttcaaatccaggtgaggcttttgactgcataaaaattgaca

SEQ ID NO: 411526 - DNA, 201 bp, Homo sapiens
ataaacttgatttcctccagctctccctaattgtagttacataaagttacaacttgactaaaactacaaggaagatgttgacatgctcttcctccatttargaagccataatgataaaactctaagaacaagaaaggtttgtggagcatttatggaacaaatttttgctgcctaggtaaaatttattctaaaggccttaat

SEQ ID NO: 411527 - DNA, 201 bp, Homo sapiens
ccagtgttctgcttccacatctgcagtggtggaactcctatagagctcgcttcagtggggagacagggctggagagagggtcagtgctatctatgtagggwgtaatctgtaagtcagcttttgaaatggggtgccctctactttgaatatctcgatactgtactaataaagtaacagaactctcctatgccagaaatatag

SEQ ID NO: 411528 - DNA, 201 bp, Homo sapiens
gagagagggtcagtgctatctatgtagggtgtaatctgtaagtcagcttttgaaatggggtgccctctactttgaatatctcgatactgtactaataaagkaacagaactctcctatgccagaaatatagaaatttttcatgctcttctaaaaatctagaagtggcaattttccatttaactaaagatttgatgtctttta

SEQ ID NO: 411529 - DNA, 201 bp, Homo sapiens
ctgggctcgaaatcggcgggcggtgcaaaactcgaggtccagttctcggagcccatagagccaaaaaagcctcagcttgtccggggcgggttcttgaaagmcggaaagcggctgagtaccacgcggcttgcatttttctcttgggacgctcgagaggtgggctccgtgagggcagctgctgcctgcagattatagggagcc

SEQ ID NO: 411530 - DNA, 201 bp, Homo sapiens
cttctggccacgctggggaaccgaggaggtggccgcacccaagcaggggtcgaaagcccgggtggatgcggaacaaggatatgataggccttaagggtggrggatacctctgggctcgaaatcggcgggcggtgcaaaactcgaggtccagttctcggagcccatagagccaaaaaagcctcagcttgtccggggcgggtt

SEQ ID NO: 411531 - DNA, 201 bp, Homo sapiens
aaattctttttccagatggtctccatttgttgcttagggtagagtgcagttgcacaattatggctcaccacagcctcgaaccctgggctcaagcaatcctycttccacttcattaccccctccccctcacaaagaaactgggactatagggtatgctaccatgcccggctaatttttttactttttgtagagatggggacc

SEQ ID NO: 411532 - DNA, 201 bp, Homo sapiens
ctgtcttgaaccactgggctcaagtgatcctccctccttagccttccgaagtactgggattgcaggtgtgaaccactgtgcccggctttagacttaaatgytttatcaggcttgaaatcctagctctttaaagattttgttttaaatgccgggtgcaagagcctgggaacaatttgcacttaggtgcctgtgaatatcaaa

SEQ ID NO: 411533 - DNA, 201 bp, Homo sapiens
gtttttttgtagagatggggttttgctatgttgcccaggctggtcttgaactgctggcctcaggcagtcctcccacctcagcctcccaaagtgttgggatwacaggtgtgagttgtcatgcccagccaaaactactttttgaataattaatggacttgatatacatagtgtagaggcttaaaaatattaacaaaattattg

SEQ ID NO: 411534 - DNA, 201 bp, Homo sapiens
tgacctactaggctcaggtgatccttcttcctcagcctcttaagtagctaggactacaggcgtgcaccaatatgcctggctagtttgttaaaagtttttttgtagagatggggttttgctatgttgcccaggctggtcttgaactgctggcctcaggcagtcctcccacctcagcctcccaaagtgttgggataacaggtg

SEQ ID NO: 411535 - DNA, 201 bp, Homo sapiens
gataatgggtgatttttattttctcctttttcatagtggatatcttgacctacgtggcttggaagataagtggttttcccaaaaaccgtgttattggaagyggttgcaatctggattcagcccgattccgttacctaatgggggaaaggctgggagttcacccattaagctgtcatgggtgggtccttggggaacatggag

SEQ ID NO: 411536 - DNA, 201 bp, Homo sapiens; identical to SEQ ID NO: 93163

SEQ ID NO: 411537 - DNA, 201 bp, Homo sapiens
tggatatcttgacctacgtggcttggaagataagtggttttcccaaaaaccgtgttattggaagcggttgcaatctggattcagcccgattccgttacctratgggggaaaggctgggagttcacccattaagctgtcatgggtgggtccttggggaacatggagattccagtggtaagcataagttattttctttttgtt

SEQ ID NO: 411538 - DNA, 201 bp, Homo sapiens
gggggaaaggctgggagttcacccattaagctgtcatgggtgggtccttggggaacatggagattccagtggtaagcataagttattttctttttgttttwgaaaagattatataaaaagtcgatgggcattatattattcaattagagcctaatcaaatatccattcagtaggatggaatggtttcccgaaatctagcat

SEQ ID NO: 411539 - DNA, 201 bp, Homo sapiens; identical to SEQ ID NO: 93166

SEQ ID NO: 411540 - DNA, 201 bp, Homo sapiens
gttgaaaaatgttatgattaggttctgtatgctaagaaaaccccccttatgttctcatactatctttatatttcaaatatacatgggttaaacatttcaaytggctagagaaacaggttagaatacagttaaaattcttagttttacataatgtaagtaaatgaaaatctaatctaaaagtgagtaatgactacattagta

SEQ ID NO: 411541 - DNA, 201 bp, Homo sapiens
atacatagtgtagaggcttaaaaatattaacaaaattattggttagccatgatcaatatcaagatcctgaaaagccatatatctggagtagcctattattmtctaatgatcacctagtatctggttaagtgttttcttcatagtaggtatatcttttttgtgtgtagggagaggataatgggtgatttttattttctcctt

SEQ ID NO: 411542 - DNA, 201 bp, Homo sapiens
caggccctggtttctagtattgcgatttaaagtctggcgctggctgcgcgccagacctgggaggctgccagctaggcttcacgttgctggcgtctgcttcrgggcattcattaggtctgaagtctgaatcccagctccctccctctcacccactgagctgcatagctccagattgcctctgcttacgggcggggcttctca

SEQ ID NO: 411543 - DNA, 201 bp, Homo sapiens
gaagataagagaattaggaaaatgaatcacaattactaatctgttggtacatgaaaataaatgtagtctgtactatttcttttagtgcctgtatggagtgsaatgaatgttgctggtgtctctctgaagactctgcacccagatttagggactgataaagataaggaacagtggaaagaggttcacaagcaggtggttgag

SEQ ID NO: 411544 - DNA, 201 bp, Homo sapiens
tgcgcgcacggcgccagagggatgggcgggtagagccaactgcctctggttctgctggcctccgctgctcgcgaagggattcctgctcccgggaggtgtasgagccgctttccagaagcacagcccagagacgtctgggcggcggcccacacaacgcatgtgttcggagctcgccgcgctctgcttttgctctaagcggga

SEQ ID NO: 411545 - DNA, 201 bp, Homo sapiens
cagctgtttatacctgacttgtactgcctggccctgaaaagatgagcaaatccaaatgcacaaaagttatattatcacagttgaaaaatgttatgattagrttctgtatgctaagaaaaccccccttatgttctcatactatctttatatttcaaatatacatgggttaaacatttcaattggctagagaaacaggttaga

SEQ ID NO: 411546 - DNA, 201 bp, Homo sapiens; identical to SEQ ID NO: 93160

SEQ ID NO: 411547 - DNA, 201 bp, Homo sapiens
ggcgcatgcaaagatgaagcaggcagcatcccagcccttccgcacctcagacggtcagttgagtaggatccgccggtaccaactcctccttttaacaaatrgggagaccgaaagctaggagacagtcagggatctctaagttcccagtgagtaggaggcagaggtgaggtgtagaactcgtttttgcatgtctctcgcctc

SEQ ID NO: 411548 - DNA, 201 bp, Homo sapiens
gcaattagtctgatttccgcccacctttccgagcgggaaggagagccacaaagcgcgcatgcgcgcggatcaccgcaggctcctgtgccttgggcttgagytttgtggcagttaatggcttttctgcacgtatctctggtgtttacttgagaagcctggctgtgtccttgctgtaggagccggagtagctcagagtgatct

SEQ ID NO: 411549 - DNA, 201 bp, Homo sapiens
gaaaccttacaaggctgtctagaaatagcagtgatttgtaaggagagacccggctccagcttggtgactctgggctgactgcctgcctagaggtcctctckgatttttgccctttggagtggtgtcaaaactagacgtgatactttggggatgcagcctgtgatatttcctccagcgaatgcagtgcagggttggattaac

SEQ ID NO: 411550 - DNA, 201 bp, Homo sapiens
agatttatgcactcattcggataactttctgtgaaacaaacttttgaaatatgataatacaccaaaagtgtatctgaaattaaaaagaatcaaaggttgtyaggctggagacccagttcctaaaattcattattctgtattaacatgcatggattgactaccaatgaaaaggaagggtccatgattttaaatgagccaaaa

SEQ ID NO: 411551 - DNA, 201 bp, Homo sapiens
gactttatttctcttttcccatcccccttattttaggtacgtacccggttcccgccagaacccaatggaatcctgcatattggacatgccaaagccatcartttcaactttggctatgccaaggtaagcatgtgtctagggacctggcaagcaagatgaccacttgctgttcccatgagtggataccatatccctgccttg

SEQ ID NO: 411552 - DNA, 201 bp, Homo sapiens
ttggcagcagctcctatagtcaggcccctggggtcagaggctttggctgcagcctggtccttaggcttattctggtcctggcaggtgagaactacaagacyccaggctatgtggtcactccacacaccatgaatctactaaagcagcacctggagattactggtgggcaggtgtgtggggatgtggccatgtgagcttgtg

SEQ ID NO: 411553 - DNA, 201 bp, Homo sapiens
tgtggagacctctcaggttgggacttcttgtcagcttggacccctgaccagtgggctttggcttctccagccgcctccagtgctgcgtgatttgattctgwtgtaccttcaattcttctgacccgcattataaacattataattttattctaaaaattgtaattttttttgcattttggaagtgactgctgctgtttaaat

SEQ ID NO: 411554 - DNA, 201 bp, Homo sapiens
actctcattggtcagcgagtgaatgccgacctgcagactggggcctaagtttcttttagtttccggtgtctctgcaatggcggctctagactccctgtcgmtcttcactagcctcggcctgagcgagcagaaggcccgcgagacgctcaagaactcggctctgagcgcgcagctgcgcgaggccgctactcaggtgcgagc

SEQ ID NO: 411555 - DNA, 201 bp, Homo sapiens
tggactaggcaaagcctagaagggctggtggttagtgggcctctccttgggccatggcctgcccactgggtgtttgtggctggctgctcatactttgtttmattttgccccaggctacacaccttacaaagtcacatatgcgtctgactattttgaccagctatatgcgtgggctgtggagctcatccgcaggtaaggcca

SEQ ID NO: 411556 - DNA, 201 bp, Homo sapiens
acccagagtgagggtgtgggttcccagaatatctctaaaggtggctttcctgaaccacatggtttggctttctgcaggtggaggctgctattaacaggcaycggccccagctcctggtggaacgttaccatttcaacatggggctgctgatgggtgagcagggcctggaacggggctatattgttctctctggtcatgcct

SEQ ID NO: 411557 - DNA, 201 bp, Homo sapiens
acgtcattgagctgcagcatgttgtcaaggtgagagccagctgcagccttcctactgcagtgcctgctggggccaagatgtgagtatagcctgcagtcctsgttgtggttcccgggtctaattgctgctcccctccccccacttccagggccccagtggttgtgtagagagtctggaggtgacctgcagacgggcagatgc

SEQ ID NO: 411558 - DNA, 201 bp, Homo sapiens
gccatggcctgcccactgggtgtttgtggctggctgctcatactttgtttcattttgccccaggctacacaccttacaaagtcacatatgcgtctgactaytttgaccagctatatgcgtgggctgtggagctcatccgcaggtaaggccagggccatgacgtagagccaggcagactgactaggtcacagccatgctggg

SEQ ID NO: 411559 - DNA, 201 bp, Homo sapiens
tggtgtttcttttgttccctttgcccagagactggcatgagaggcctcagatgtctggctctagatatcttgtctctggaattgagggaataggggtctaytcagttctgttctggctgtaggatatggtaaatgtatctagaggacaagttttccttgttttgttccccacaggcgagactgctgaccagaccctgtctc

SEQ ID NO: 411560 - DNA, 201 bp, Homo sapiens
gcgaggccgctactcaggtgcgagcccctctgcccccggcctggtttgcagaccatgctgcaacgcagcgcggggcggggtccagatcccgacctgccccrtttgtcccgccctttcctctcactgagcgcggggcttctctcttgacccctctgacctcaggctcagcagaccctgggttccaccattgacaaagctacc

SEQ ID NO: 411561 - DNA, 201 bp, Homo sapiens
agctagcagacccacatgagaagagatgggatgggctaggtaggttttttcagtcagtgctggtagataggccaggaagccttgggttggtgggtaggatyagtcaggggctccttgaaagaggatactcctgcctctgcctgattctggtctctgctcaggtcctccaccttctgggccccaagttggaggctgatctgg

SEQ ID NO: 411562 - DNA, 201 bp, Homo sapiens
gcaggttgggtagatacattgggggttgagtgtggcagtttgtgattgtagctgtgactgatgctgaactttcctgccaggtgggagtgactgtggcacaraccacaatggagccacatcttctagaagcctgtgtgcgtgatgtgctgaatgacacagccccacgagccatggctgtgctggagtcactacgggtcatca

SEQ ID NO: 411563 - DNA, 201 bp, Homo sapiens; identical to SEQ ID NO: 235371

SEQ ID NO: 411564 - DNA, 201 bp, Homo sapiens
atgactcatacctgtctcctgtctcctgctatagtccttggacatccaggtgcccaacttcccagctgatgagaccaaaggcttccatcaggttccctttrcacccattgtcttcattgagaggactgacttcaaggaggtaaattgtgggggtggagggtcccgtttgctgctgagtctggtactgggaacctttcatct

SEQ ID NO: 411565 - DNA, 201 bp, Homo sapiens
tcccatggaggagtcactgctgctctttgaggtggggtcctagaggagcatctgggtttgggtgggccaaggtgctgagaatgagatgctcctgtgcttasagacagcctgagtccttgttcccctcaggcaatgcgcaagggcaagttttcagagggcgaggccacactacggatgaagctggtgatggaggatggcaag

SEQ ID NO: 411566 - DNA, 201 bp, Homo sapiens
gaggccatcaacaacttctgtgcccgggtatagcccagcaggttgggtagatacattgggggttgagtgtggcagtttgtgattgtagctgtgactgatgstgaactttcctgccaggtgggagtgactgtggcacaaaccacaatggagccacatcttctagaagcctgtgtgcgtgatgtgctgaatgacacagcccca

SEQ ID NO: 411567 - DNA, 201 bp, Homo sapiens; identical to SEQ ID NO: 235373

SEQ ID NO: 411568 - DNA, 201 bp, Homo sapiens
cagcgagtgaatgccgacctgcagactggggcctaagtttcttttagtttccggtgtctctgcaatggcggctctagactccctgtcgctcttcactagcytcggcctgagcgagcagaaggcccgcgagacgctcaagaactcggctctgagcgcgcagctgcgcgaggccgctactcaggtgcgagcccctctgccccc

SEQ ID NO: 411569 - DNA, 201 bp, Homo sapiens
ccgctactcaggtgcgagcccctctgcccccggcctggtttgcagaccatgctgcaacgcagcgcggggcggggtccagatcccgacctgccccgtttgtyccgccctttcctctcactgagcgcggggcttctctcttgacccctctgacctcaggctcagcagaccctgggttccaccattgacaaagctaccgggatc

SEQ ID NO: 411570 - DNA, 201 bp, Homo sapiens
gtccctggctgatgggggggactgggtttgggacacccacacagagggccagctccttgccgcttctccttctctaacccagaggacactggctctgtcartgggaagctgaggggtatgatttgggtgtggagacctctcaggttgggacttcttgtcagcttggacccctgaccagtgggctttggcttctccagccgc

SEQ ID NO: 411571 - DNA, 201 bp, Homo sapiens
tgagccaagatcatgcccttgcactccagcctaggtgacatggtgagactctatcacacacaaaaaatacataaataaataaataattaaaattaaaaaawttttaaaaagaaaaagatatttaaaaatagctacttaaatgtctgtgatgagacaggttaagtgccaattgagtggtacacacaggccaagaaggaggcg

SEQ ID NO: 411572 - DNA, 201 bp, Homo sapiens
tgcattctttactaatgtgtgaggtacattgtagagcatacacaaaaattgggaattaaatagactttgttctcttagtgcctggggagtgtcctcacccrtactcggagaccctaccacattagaattgacacagaaaacaggagtgtaaagttgtgaagttattaagacaaaaaaaaaaagtctggcttaaaagtagtt

SEQ ID NO: 411573 - DNA, 201 bp, Homo sapiens
gaatctgtatttttagcaggctccttgggagatcctgatgcagtcaaccctgtccttcttgttgaacctactttcaagaggcattggggtgtattaattcycctcacttgctggttttctgggtactgtggtcctggataacctttgccttgctttagtgagtaacttgtttgctagtgaagattgaaatagcctttgaaa

SEQ ID NO: 411574 - DNA, 201 bp, Homo sapiens
ctaacattctgtgaaagatacacatcgccctaccaaatagaacatttagaatcagtaactactgaggagcaaattttttaattaaaaaaaaaaatcaggcygggcgcggtggctcacacctgtaatcccagcactttggaaggccaaggtgggcgggtcatctgaggtcaggagttcaagaccagcctggctaacgtggtg

SEQ ID NO: 411575 - DNA, 201 bp, Homo sapiens; identical to SEQ ID NO: 318387

SEQ ID NO: 411576 - DNA, 201 bp, Homo sapiens
ggtttataagccagaccccttcacctgaaacattaagggagcatatagtgaagaactattcatttataccaaccgagtagttagattcagatgtatttctytgggcctccttgtgatgcaaagagtaattctatgtatgctttcaatcaagatgtatttccataccttctgcagttctgcctatctgtcctggaacacagc

SEQ ID NO: 411577 - DNA, 201 bp, Homo sapiens
aatagcctttgtcactaatacatgcaaaagggacccagcagagattggaccgtgacagagcctcagcaaatattaaggccaatacaacggaaagacacttstgatttcactgcaattggcctgcattacctgcagcctgggattatgaattagattaataaaggacagaaatgacaaccaaatgatccaacccagaatgac

SEQ ID NO: 411578 - DNA, 201 bp, Homo sapiens
tggacatatgtgtgtgttgttgattttcaactgaggttcattgctttttggttggagaaaaggaatttgtaaaatttgatgttaagtggacaggcctgtcmgtaatgttctgtaacttagtctttaaatctagagggggtttttggtctgttgtttaaataacatgaaactacatacaactgtgtccttgcctagaatcaa

SEQ ID NO: 411579 - DNA, 201 bp, Homo sapiens
tggggtatgcccagtgatgccagcagcttgtggcacctgggcgcaccctccagctcgggccccttccgatgggtctgctggctcaggtgcgggcgatggcyggggagccgcgccccgcacgtgactcagcactttccccagagcccggactgcggagaacaatatcctcctccctaacagataaacagcccttgttcctcg

SEQ ID NO: 411580 - DNA, 201 bp, Homo sapiens
gggcttcaacattagaatattgaggggatacagttttgtccgtaatgcccactgtggtctcagtgcaatttaccacctcttcctctgcttttctttctttyttttttttttttattttagagttctgttatgtgataggcaagaatctcgcccaggtgaatggctggttagaaagttctttggctccttaccagactcttg

SEQ ID NO: 411581 - DNA, 201 bp, Homo sapiens
ctgaatgagagtatgccactgttggttaatccctagatactaatttttcatttggaaaggctgacagctgaaatatctaagatatgaaagacattggctasaggtagattgcttctctgaaggacacacctttttgcttagaaagaaagggtagatggtggggcctgcttcagaatagtctggaacttcctggacagcatt

SEQ ID NO: 411582 - DNA, 201 bp, Homo sapiens
ggccggggataccgtggggtatgcccagtgatgccagcagcttgtggcacctgggcgcaccctccagctcgggccccttccgatgggtctgctggctcagrtgcgggcgatggccggggagccgcgccccgcacgtgactcagcactttccccagagcccggactgcggagaacaatatcctcctccctaacagataaaca

SEQ ID NO: 411583 - DNA, 201 bp, Homo sapiens
aagatcaaggtgccctcagggttggtgtccggtgaggcctcttttcctggctggcagacagaccaccttctggcagtgtcctcacatggcctttcttcttwgtgtatgcagacagagagagacctctgatgtctcttcctcttatgaggaccccagtcccatcacactagtcctattccatccttaagacctcattaaact

SEQ ID NO: 411584 - DNA, 201 bp, Homo sapiens
gaagccaaggttgaagaattaaaatttgatcgttactctgtatttaggcctgggtaagtataatatttatactgaatgagagtatgccactgttggttaayccctagatactaatttttcatttggaaaggctgacagctgaaatatctaagatatgaaagacattggctacaggtagattgcttctctgaaggacacacc

SEQ ID NO: 411585 - DNA, 201 bp, Homo sapiens
atgacgctgaacaatatataattgcttttacaatttggaaagattatctttccaaaataatccttcaactactgtgtgtaacattcctagtatttattgcytattttctcagcctccatgtgtgtatgaactcccccgccccacccaattttagaaactcctttattgtttaggaacatttattctactcaatgaagtttc

SEQ ID NO: 411586 - DNA, 201 bp, Homo sapiens
ctaacactaaatgagccaggcagtattctgagggcttttatgtgcatttgcgtggaaacaggtactgtgatattaagaccaccagctgttggctgggcacrgtggctcacgcctgtaattctagcactttgggaggccgaggtgggaagatcacttgaggctgggagtttgaaaccagcctgggaaacgtggcaaaaccct

SEQ ID NO: 411587 - DNA, 201 bp, Homo sapiens
gagaagtagaagccaaggttgaagaattaaaatttgatcgttactctgtatttaggcctgggtaagtataatatttatactgaatgagagtatgccactgwtggttaatccctagatactaatttttcatttggaaaggctgacagctgaaatatctaagatatgaaagacattggctacaggtagattgcttctctgaag

SEQ ID NO: 411588 - DNA, 201 bp, Homo sapiens
acacatcaggattaaatgatctcttccttaatttcccagactccttggaacctaaaattctagataaggatattttgagtattgagatctgcaaaagcagrttatctcaaaaccacaaattattctctcttaaacttcacacaggtgagctggtcgcgattaaatactgaaaatgtgttttttcttaatagggagaagtag

SEQ ID NO: 411589 - DNA, 201 bp, Homo sapiens
acaatgtggtgagaccaagagacaagcagatggaactgctggagaacaaggccatccatgacctggggaaagcgcatggctctctcaagccatgaccacaytggagaaatggtttttattgtcaaccttaacacccatcaccaaatcggtaatttcagggtctaaaaaaagtcagcatgttttaactttgttgttttacta

SEQ ID NO: 411590 - DNA, 201 bp, Homo sapiens; identical to SEQ ID NO: 318413

SEQ ID NO: 411591 - DNA, 201 bp, Homo sapiens
acaggcctgtcagtaatgttctgtaacttagtctttaaatctagagggggtttttggtctgttgtttaaataacatgaaactacatacaactgtgtccttkcctagaatcaagaagtggtggactttgaaaagttggatgactacgcctctgcctttcaaggtcatgatgttggattctgttgcctgggtaccaccagagg

SEQ ID NO: 411592 - DNA, 201 bp, Homo sapiens
cactttggagaaccctagctatttggcagtactaaagaatataaaatattatataatacaaaaaccatcaaatgcatcatattatgcatttgtatggctaygggactgcaggaatatatttagtaaacaggaatgattggaaaggtaatttccaatgtcttcctctctattaattatccagcaacaaatggaatgagatat

SEQ ID NO: 411593 - DNA, 201 bp, Homo sapiens
gctggacatgtgctgatgctgagagatgaattaagaaaaaagacccagccactgccttcactggactgaatctagattgggtgtctccaaacacttttgaytagagacccattaataaaaacgtttgaggatgcattctttactaatgtgtgaggtacattgtagagcatacacaaaaattgggaattaaatagactttgt

SEQ ID NO: 411594 - DNA, 201 bp, Homo sapiens
ataacatgaaactacatacaactgtgtccttgcctagaatcaagaagtggtggactttgaaaagttggatgactacgcctctgcctttcaaggtcatgatkttggattctgttgcctgggtaccaccagagggaaagctggggcggtaaggaaggcatatgctcttttccctttttgctggccagtaatatcaaggattct

SEQ ID NO: 411595 - DNA, 201 bp, Homo sapiens
tttccaggccctctccttgtcttgtagatggcagccttctctttgtgtctctttacgtggtattttccctgaatacctgtgcctatatccacatttcccctttttataagaccactagtcatactggattagggaccaccctatttagtatgatctcaactaattacatctgcaatgaacttatttccaaataaggtcata

SEQ ID NO: 411596 - DNA, 201 bp, Homo sapiens
cagggatgatgggctaagtgtgggggtctctgcagcagcgtgggtgctcgtccttcaaggagcggttgtcagtcgttagcgaggcgggtgaaaggaaggaygccaaagtctgatggccggggtggtattgatgtgccttcgctgactaatcagattgaaaaagtcccatggtatttatgtcactttaattttcatcaaaca

SEQ ID NO: 411597 - DNA, 201 bp, Homo sapiens
aaaaaatcaggccgggcgcggtggctcacacctgtaatcccagcactttggaaggccaaggtgggcgggtcatctgaggtcaggagttcaagaccagcctsgctaacgtggtgaaaccctgtctctactaaaatacaaaaattagccggacatggtgacatgtgtctataatcccagctacttgggaggctgaggcaggag

SEQ ID NO: 411598 - DNA, 201 bp, Homo sapiens
tgaatctttcccttatttttaaagaaacggatgaaagaaaaagtattttaacagactactataataatccttccaatcaatcttgctaaaacaacaacaamaaaaaaactgaatttatttcactagtcaactgtgtcattttgttgtgaataactaacctgtcattaaaatcagagttctgataaactggcatgaggggaa

SEQ ID NO: 411599 - DNA, 201 bp, Homo sapiens
gacttggccctgatccagatctactgcatcagcatctctgaatttggaagcttggaatctgtatttttagcaggctccttgggagatcctgatgcagtcarccctgtccttcttgttgaacctactttcaagaggcattggggtgtattaattcccctcacttgctggttttctgggtactgtggtcctggataacctttg

SEQ ID NO: 411600 - DNA, 201 bp, Homo sapiens
ctcttagtgcctggggagtgtcctcacccgtactcggagaccctaccacattagaattgacacagaaaacaggagtgtaaagttgtgaagttattaagacaaaaaaaaaaagtctggcttaaaagtagtttctcagcctgatcttactgttccctttgttctttgcagatttgtttggtgtctgtgtttcaatgtcattgt

SEQ ID NO: 411601 - DNA, 201 bp, Homo sapiens; identical to SEQ ID NO: 318483

SEQ ID NO: 411602 - DNA, 201 bp, Homo sapiens
aataaggtcatattctgaggtaatgggggttaggagttcaacatacgcattttggggggatgtaatccaacccacaaaattcagtctactcaggtttctaytgacactggttctaggaaaaggtctattagctttcctcagctgtttggaagactatttcctttaacagtagctgggcagatgctaatcttccttttcata

SEQ ID NO: 411603 - DNA, 201 bp, Homo sapiens
tccctaatgactgagcggaaagaagagcttttatttgtgtagagatttggagaaatctatcctgaagcagtattctagttacagactcaactttcttttctttttttttttttttgagacaggttcccaggctggagtgcagtggcatgatcttggctcgctgcagcctctgccccgccaagtaactgggactagaggcat

SEQ ID NO: 411604 - DNA, 201 bp, Homo sapiens
agtttttgttaagagccagttcttagaagaacctatgccaaggtcacccatagagtccattggtgtgaaagagaaaggcaaagaggtgtggcgggggagcrtaagatttggagtcagaagtctcagttctgtcatttgtcctggagcaggttattgagtctctttgaatcttggttttcacatctgtaaaatggaaagtcc

SEQ ID NO: 411605 - DNA, 201 bp, Homo sapiens
acattcgagcatgcgctcttaggggttccgggggccggtgggatttacttccggcagcaggtggtggggccatggtaaggaggcgggtggcgagccttgarggggtgatgctctttggggtcggggtcagggctggggcgggcaggcccgacgctcgggtttcggactccgaggatccgtgggaggaagctctggcgtgtg

SEQ ID NO: 411606 - DNA, 201 bp, Homo sapiens
aggaaaaaggctctaagcaagttcttacagcacttgtttgtgacattcagtcagataatggccagaagtttttgttaagagccagttcttagaagaacctrtgccaaggtcacccatagagtccattggtgtgaaagagaaaggcaaagaggtgtggcgggggagcgtaagatttggagtcagaagtctcagttctgtcat

SEQ ID NO: 411607 - DNA, 201 bp, Homo sapiens
cggcctcaggagatgtttgtgcgtatccagcggtacagtgggaaacagaccttctacgtcaccctgcgctatggacgcatcctggacagagagcgtttcayacaggtgtttggggtacatcagatgctcaagtgaacaactgggacctggacctctgggtaaccctgggtcgcctggattaacaggaaggctgagggtgtg

SEQ ID NO: 411608 - DNA, 201 bp, Homo sapiens
cattcgagcatgcgctcttaggggttccgggggccggtgggatttacttccggcagcaggtggtggggccatggtaaggaggcgggtggcgagccttgagkgggtgatgctctttggggtcggggtcagggctggggcgggcaggcccgacgctcgggtttcggactccgaggatccgtgggaggaagctctggcgtgtgt

SEQ ID NO: 411609 - DNA, 201 bp, Homo sapiens
aagcatttggtcagaggttttagcagggagaaaggcttcgagcagtcagcagggacttccagagccctgtgctgtgcccctcacatatccagcggcagaarggtctgtcaggatgttaactacacattgacgagcagatgtcgtccaggtaggcacgaaaccccagttgagatttgttcaccacccagaggtctagaggct

SEQ ID NO: 411610 - DNA, 201 bp, Homo sapiens
aaggcttcgagcagtcagcagggacttccagagccctgtgctgtgcccctcacatatccagcggcagaagggtctgtcaggatgttaactacacattgacsagcagatgtcgtccaggtaggcacgaaaccccagttgagatttgttcaccacccagaggtctagaggctcttgctttggatggccctgcagtgtaataaa

SEQ ID NO: 411611 - DNA, 201 bp, Homo sapiens
ggtaaccctgggtcgcctggattaacaggaaggctgagggtgtgggcaaggctgaagaaaggggactgggtacttggagactttgcctgggcccctgggarcatgtgttttgtggtgaataaattcacaaggcaagagctggtgtacaggtttaggaaaaaggctctaagcaagttcttacagcacttgtttgtgacattc

SEQ ID NO: 411612 - DNA, 201 bp, Homo sapiens
tgggcttagtttccctagtggtaaagtggaaatagtgataactatcttagatagctgttgtgatgcccacatgagatagcatctggctttacccttccctygtctggcaataacggttaccttgcaggattggcagaagccttagagtatggtgctttgcagatgttcaccgtgtgattaatgtggttgagttccatgaga

SEQ ID NO: 411613 - DNA, 201 bp, Homo sapiens
aaggggactgggtacttggagactttgcctgggcccctgggaacatgtgttttgtggtgaataaattcacaaggcaagagctggtgtacaggtttaggaaraaggctctaagcaagttcttacagcacttgtttgtgacattcagtcagataatggccagaagtttttgttaagagccagttcttagaagaacctatgcca

SEQ ID NO: 411614 - DNA, 201 bp, Homo sapiens
gagtaatttgctcacaaattactgttggagccagaattggaataagagcttttactgcttcactacccacctagtaatacccttgtgctacgtgttggggyctccctgcctcgctccttctccttctccgctgtttccccttccccagactaggctaagagaaagcagcagttccctccagcacccaagatagcatatgaa

SEQ ID NO: 411615 - DNA, 201 bp, Homo sapiens
atcctaaattggctattctgagttacacagtttgattttcttggaaggaggacctggtttcattagcacctagttgcaaatgaatctcctccttgaagttyttgttgctatttgagcttgtttttagctggagatttactcttggattttagttgttttcgccttcatctgttgaagaggtgggatgatattgcgtgtgtg

SEQ ID NO: 411616 - DNA, 201 bp, Homo sapiens
tacaattgagtataattagccaaatgcctcttgcatcctaaattggctattctgagttacacagtttgattttcttggaaggaggacctggtttcattagmacctagttgcaaatgaatctcctccttgaagttcttgttgctatttgagcttgtttttagctggagatttactcttggattttagttgttttcgccttca

SEQ ID NO: 411617 - DNA, 201 bp, Homo sapiens
gggagctcaaattctttttcagggcctcaggtcataataatgataaaacgaaacattgtatgttaagtgcttagcacagtcgtgaggcccaaggtcagttscccgataaatggtagctgctataaacatcatcatcattaccatccttgtgaaggtggagtgaacttattctttcaagacatttccactgacagataaatt

SEQ ID NO: 411618 - DNA, 201 bp, Homo sapiens
taagcgagttctcacgagatctgatggtttaaaagtgtgtgtcaattgcttcttttctacccatccccatccttccgctgtgtgagatgttcctcgcttcstcttcgtcttccaccatgattgtaagtttcctgaggtctccttccccagccatgccaagcggtgagtcaattaaacctctgttccttataaattacccag

SEQ ID NO: 411619 - DNA, 201 bp, Homo sapiens
gtttcatgctctcaatttttacttggcttgatccgtgctgtctccatccggtgttctgaggcatttcacacacgactggtcttcggcaactgggccaagcytgttctgttctttttcagttttcttaattgcaaggctttttgtttccccactggagaactcccataccaagaattctgaaatctaggtactcagacctta

SEQ ID NO: 411620 - DNA, 201 bp, Homo sapiens
gtggcaagacagtcactagcagaagtgttgcatctttattctgtcagttaagtgacttaggggaaacagagtgcagagtccacttcctggtcgcttcatcrgaagtcccagggctaactctgattggactcctcttcctcacttgcccataaatcaaccaatcacattgttcaggataggaatacactgactgaccaggct

SEQ ID NO: 411621 - DNA, 201 bp, Homo sapiens
tgcccaggctggtctcaaactcctgggctcaagcagtcctcccaccttggcctccaaaatttctgggattacaggcaggagccaccacacccagcctgtaytgactttattcagggaatgtctccccaccccaactcccagtgtggcaagacagtcactagcagaagtgttgcatctttattctgtcagttaagtgactta

SEQ ID NO: 411622 - DNA, 201 bp, Homo sapiens
gtgtgacccttatataacttccttactttgctctcatttcctcatttccctgtggctcagtaaatcttccaatatcttcttgtgggttcgtgctcttttgyaccctggaatggtaggacatgggcgctttgggatatttcctataactcagaacaggtagcctggaagaattttgcaatgaagctttgagctggcatcagc

SEQ ID NO: 411623 - DNA, 201 bp, Homo sapiens
tttaatatagtagaatggctcctgaatttttgaaaatttaagaggaaaatgtatccctgcaccatctaaaatgatcttgtacaccatcagtataccacacmctggaatacaccacgttaaggaggcccttagcggaaggcgttgtccactttcttctttgaatggtatgaaaggtcttacagtgtccttgttttcacaacc

SEQ ID NO: 411624 - DNA, 201 bp, Homo sapiens
ggcctcacaatcatggtggaaggtgaaaggcatgtcttacatggtggcaggcaagagagaatgagaaccaagtaaaagaggaaaactcttctaaaacaatmatatctcatgagacttattcactaccacaagaaccttatgggggaaactggccccatgattcatttatcccccactgggtccctcccacaacaggtggga

SEQ ID NO: 411625 - DNA, 201 bp, Homo sapiens
gtttggttttcagtgaacgatatgttttggagagctttccattttttgccttcattctctttgactgctggaaagaactccatgatatgcatgcatcagartatttttaagcattttcttctcactagactttttttgggggggtgggatgagggctatcagtcatatggctgtgttaaggatcgttggggagtcctctgt

SEQ ID NO: 411626 - DNA, 201 bp, Homo sapiens
ttttattatatgcatttgcatatgtttttgtttttctgagacagagtcttgctctgttgcccaggctggagtgcagtggtacgatcttggctcactgcaayctctgcctcccaggttcaagtgattctcctgcctcagccaccagagtagctgggtttacaggctactacaggggtgcgccatgacgcccagctgattttt

SEQ ID NO: 411627 - DNA, 201 bp, Homo sapiens
tccactatacagacagcttaagtcatgacgcaggcacagtgctggtaagcttcagagctgggatttgaactggctctaggagctatgcccttaaccattaygctatattgcttctcattaaaaaatgtatcctcattgtaaaaaaaaaaaaatgaaaatacagataagcattcctttggcttggcatctcaatgccaatct

SEQ ID NO: 411628 - DNA, 201 bp, Homo sapiens
acctaggctgtagtgtggttttcccaacatcacctcctgataggtatccgacatcagtgctgccagtggaggctgtcctcaggtgtcttggggaccagggraagaggccatgctgcccagtactttatctgggtgtgctgtggggagtggtggtgtattccacaggaatgcacagcacacaggtatgcaaagtggattctt

SEQ ID NO: 411629 - DNA, 201 bp, Homo sapiens
gcagatgggcaggaagcctgacagttttcctggaccctgggctagatcacccttttcatcgtccagggtccctcctaccacttaaaatggatttctgtgcrattatttattcttgccccttcttttgaagtcctttgagcctttgaacttgatatggtttggctgtgtccccacctaaatctcaccttgaattgtagcttc

SEQ ID NO: 411630 - DNA, 201 bp, Homo sapiens
ttctagctccatcgctgagttcttcctcccacctccatctttacttttggaaagcacagttgaaatctacctctcagggttcttattaggatcgaatgaartaaggtgtatgaaaaccctgaaaactgtaagaagaaatacaagtgtgaaacatgtcattgttagtcccgctttgcctttaagtcctttaagttttaagtg

SEQ ID NO: 411631 - DNA, 201 bp, Homo sapiens
aacaggcaattattcttatatataaatataccatgatgctagaaatgatactaaaggctcttggtgcacaagggtgcctggcacagttgctggtgaagacytcccagggcggtggtagttaggctaagattggaaaaatgattagaagttggccaaccagggtggagtatgggggtagggaggtagtgtttaggtggagga

SEQ ID NO: 411632 - DNA, 201 bp, Homo sapiens
agatcctgtctcaaaaaataaataaataaataaataaaaataaatatagtttaaaagagaatggtatatcactgccaataatgaaaaccagtttcacttaygataagcagaagataacagcaaactaacaatcaaataaacaaacaaaatcttgccactagtaaaaaaaccaaaaataaagattacagtagtaatattaaa

SEQ ID NO: 411633 - DNA, 201 bp, Homo sapiens
agaagccacagttcgtctgaaggttaacatctaatgagtagcagtgccagcattcagttgaagacccaacatcttttctgacccatgatgttgtgctaacsctctgcttgtcctgagaagggaacagctctggcaagggttgtacctatctgttacaaggtcgtggggttaggagatgcgaagttgctctcacccatgaag

SEQ ID NO: 411634 - DNA, 201 bp, Homo sapiens
tttattgggagcttacctgagtgccaggtactgtgttaaatgctttgcctccattatctaatttaaacatcatgacaaacctatatgacggtgaccatcargattttcatccacctttgaggaaacaggcattgagagattaagcagcgtgtctgggatcaatcttacgccagagcccctgctttgagtcacaatgtaaaa

SEQ ID NO: 411635 - DNA, 201 bp, Homo sapiens
tctctcagccatctataagaaggtcaggctagaattgagctgagagccacacccccttagcacgcagctgctggactcccctttcacgttttggtgaactsttctccaggggcttctgtcacatcaactgcagtgggattgctgcctccagtttgtgtcttctggtgctagcacagaaaccccaccttcttctcttctgtt

SEQ ID NO: 411636 - DNA, 201 bp, Homo sapiens
tcgccatgttggccaggctggtcttgaactcctggcctcaggtgatcctcccacctcggcctcccaaagtgctgggattacaggcgtgagttaccgtgacyggcttaagtgaggcatttctaactaacagattccatttattgggagcttacctgagtgccaggtactgtgttaaatgctttgcctccattatctaattta

SEQ ID NO: 411637 - DNA, 201 bp, Homo sapiens
ttgacagcgtgaaatagcctctagggttctctcagccatctataagaaggtcaggctagaattgagctgagagccacacccccttagcacgcagctgctgkactcccctttcacgttttggtgaactcttctccaggggcttctgtcacatcaactgcagtgggattgctgcctccagtttgtgtcttctggtgctagcac

SEQ ID NO: 411638 - DNA, 201 bp, Homo sapiens
gcaattctttgttttttaaatttttttattgtgtgtttttatttattttattgtttatttcttttttctttcttttttgtttttgttttgagacagagtckcgctctgtcacccagactggagtgcagcggtactatctcagctcagtgcaacctccatctccgaggtttgagtgattctcatgctgcagcctcccaagta

SEQ ID NO: 411639 - DNA, 201 bp, Homo sapiens
gttgctgatacggttattacaggacagcttgtggagaatgtcgtcctgtagcatccctcacacttctgtacgatgaagagcattgctttgttctgtttgasgcacgctttgatcttgttgacaacacaattcttataacaacttatggttttctttttgcttggattaccgcacaattcagagcttaatgcatgattcttc

SEQ ID NO: 411640 - DNA, 201 bp, Homo sapiens
acaagttgagtcggtgcatatgcaaatttgttttgcttttctcaattaaagtagacagttctgttgtttagtttccacatttaaggaccaggtgataattycattgagctagaggaatattaattaatttagcttttactgctttgtgttttcatcatgccttaactagcactgaagggtactacaagaaatagttatttt

SEQ ID NO: 411641 - DNA, 201 bp, Homo sapiens
acattgcagaattagtaagtatagaagttaggcttacttccccacttggaaatgccacctaggcagttggaaatacggggttatggttcaggggagaattkaaaactaaagttagatattacatatgtgcatatattatagagtacatatcatattaattgatgatctgagaactgataaaatcacagcattatcatttct

SEQ ID NO: 411642 - DNA, 201 bp, Homo sapiens
ctaaagttgtgtatgttataaactcttaaaaatttaagagttggtaatttttacctgtttaatgggtgtacaaatatcaactaattcagaaaatgtcatgragattaattcaacaattagtatgaagcctttaggatagtgcttagcaaatagtaattactcaataagtgttagttcttgtcatgataactgctataatta

SEQ ID NO: 411643 - DNA, 201 bp, Homo sapiens
taccagcagggtactatgtcactctgaaatatttctggaaggctttaggactttgaatctgctacagttcagaggttatctctgaactggggctggaggagtgtgtgtgtgtgtgtgtgtgtgtgtgtgtgtgtgtgtgtgtgtgtgatgaagtagacagaatatacttcttacaattaacataaatctgaaaaatgaacc

SEQ ID NO: 411644 - DNA, 201 bp, Homo sapiens
ttaacacatctttcacgactgttggttaccattttgggtgtctgtgtatgtggtgtgagtataattaagatctaatcgcttcacaaatttcaagtgtatartatgatattactaactgtagtcaccatcctcagaacttattcattcaccttataatggagagttggtaccctttggtcaacatatctacattatggccat

SEQ ID NO: 411645 - DNA, 201 bp, Homo sapiens
gtgttagttcttgtcatgataactgctataattaaggacactttctgcttttgctgtcatgtactcacagtgtgtccttgggaaagccacttccccttttmaacttcagtttactcatctgaaaaataggagaagagtacagctaatgattgtgaacaaaccttccagtgctaacattctgtggtcttggggtttttcttt

SEQ ID NO: 411646 - DNA, 201 bp, Homo sapiens
accagcagggtactatgtcactctgaaatatttctggaaggctttaggactttgaatctgctacagttcagaggttatctctgaactggggctggaggagtgtgtgtgtgtgtgtgtgtgtgtgtgtgtgtgtgtgtgtgtgtgtgatgaagtagacagaatatacttcttacaattaacataaatctgaaaaatgaacct

SEQ ID NO: 411647 - DNA, 201 bp, Homo sapiens
tttcaacttcagtttactcatctgaaaaataggagaagagtacagctaatgattgtgaacaaaccttccagtgctaacattctgtggtcttggggtttttytttacagcaattcaaccaatgaggggatgaatgtgaagaaatgctgcaaggggttctgcattgatattctgaagaagctttccagaactgtgaagtttac

SEQ ID NO: 411648 - DNA, 201 bp, Homo sapiens
cctgcccaggcctgtcctctttgattcatgcttattctggatttcttctctctgtcaatggtattcctgttgtccaagccttccttgcttggaaggaacaygaaggacggatgtatattgagctccctgatgtgcaggcagagtgttgcaggcagggatccgaggaccaccaccctcattgtagagaggaggaaagtgaag

SEQ ID NO: 411649 - DNA, 201 bp, Homo sapiens
ttgctgggagattaggctcttgtcccaagtttataattggtatcccaaataatggattgagaggtgttggccagaggggagaagaactggcaacatcaccrcctaaatgaccccagggattctggccaaaagcagagagcaatctttctcgaagccccaacatctgctgttgctcagaaagcttcctggcagtttgagcca

SEQ ID NO: 411650 - DNA, 201 bp, Homo sapiens
attggtatcccaaataatggattgagaggtgttggccagaggggagaagaactggcaacatcaccacctaaatgaccccagggattctggccaaaagcagrgagcaatctttctcgaagccccaacatctgctgttgctcagaaagcttcctggcagtttgagccaacttaatcagactgttctcttccacggcgctcgga

SEQ ID NO: 411651 - DNA, 201 bp, Homo sapiens
caataggctattcagctaagtaactacattgcagaattagtaagtatagaagttaggcttacttccccacttggaaatgccacctaggcagttggaaatayggggttatggttcaggggagaatttaaaactaaagttagatattacatatgtgcatatattatagagtacatatcatattaattgatgatctgagaactg

SEQ ID NO: 411652 - DNA, 201 bp, Homo sapiens
cccttatcagatatacaatttgcaaatattttttcctattccatgggttacctttttatattctagctattacattgatagtgtcttttgatgcacatttwaaaaaaaatttagggagtattgtctttttaccaataaatatttttctaaaaggcttgagttgtcctcagtgacatgtctgtaaaaacaaaagaacagtgt

SEQ ID NO: 411653 - DNA, 201 bp, Homo sapiens
tctaagaagtgaaatggttgaattctttgatctctaaactagttcatgagattcttttatctgtgtcaaacacttaggaagactcagacaaaccacatatrcaaacaactgtcagttttgcagaaaggatttagaatcatgccccaaaattgggtgcctccaagcctggccaatggaccaactgtacctgaatcacatgat

SEQ ID NO: 411654 - DNA, 201 bp, Homo sapiens
ccaagtcactttctagtttccccatctaagaagtgaaatggttgaattctttgatctctaaactagttcatgagattcttttatctgtgtcaaacacttakgaagactcagacaaaccacatatgcaaacaactgtcagttttgcagaaaggatttagaatcatgccccaaaattgggtgcctccaagcctggccaatgga

SEQ ID NO: 411655 - DNA, 201 bp, Homo sapiens
agaataaatttcttgaaagagtgggtcacagttgcaattttaacagatattgccaaatctccctccaaaggaaattcatacttaccccatcagtgcatgaragagcttatttctccaaagttttgccaatacaatgtgtaattaatctttcaaaattttgctaataggtaaaaagtatgctgagatataaatttgcacttt

SEQ ID NO: 411656 - DNA, 201 bp, Homo sapiens
agttattttttatagagtcataatctttcattatgcaaatataccatattttatttggtcaggcctctattgttggacatttaggttgtttccaatctttygctattgcaaacaaagctgtagtgaatatctttgtattgcgtcacattcagtgtagaataaatttcttgaaagagtgggtcacagttgcaattttaacag

SEQ ID NO: 411657 - DNA, 201 bp, Homo sapiens
ttcattggagttaatatttggggaaaccacatacatgtttaacaggctccttgattaattatttaaatttttttttttttttcagacagggtctcactctrtcacccaggttggagtacagtagtgtaatcatagcttattgcagcctggacttccctgggctcaggtaatcatcccacctcagcctcctgagtagctggg

SEQ ID NO: 411658 - DNA, 201 bp, Homo sapiens
atggttggagacagtggttgatgcctagctggctttctctccctccatttattaaccagagcacaaaatgggttgttttctttctttttcaatcttttttytaatataatagcaaaaaggagagaaatggaaaccattcgtggccataaattgtacaaattggtttctggaagccatataataattataacatccatctta

SEQ ID NO: 411659 - DNA, 201 bp, Homo sapiens
tttttgtttgtttccattgtggtcttttaatcaacatatactgttgttttggacagaccatgcgcacaaatgcagatgataatggttggagacagtggttratgcctagctggctttctctccctccatttattaaccagagcacaaaatgggttgttttctttctttttcaatcttttttttaatataatagcaaaaagg

SEQ ID NO: 411660 - DNA, 201 bp, Homo sapiens
tacctggcctaaggtttatgcttaataaatatgtgtcatcactgcaatgttttgggatgttttctctgtatgtaaaatggtgcccatgtccacctccctgrgctattgggggattaactgagacactgcatgacaaaactctttggaagtccagtgcaaatgagtggacttgtgacctctcacattatttctgtttgtagg

SEQ ID NO: 411661 - DNA, 201 bp, Homo sapiens
gcagggaggttgcaaatagctccagaagaagttcagatgaggtcatacctgatatcttcgtggtgagttactgaggggatctgggatccagatttgactgrttgagaacaaagtcatggggccagctagacatgccacttggtggtcctcatggactttatttataatctcaggcaaagagctggtgcagttaggatattg

SEQ ID NO: 411662 - DNA, 201 bp, Homo sapiens
agctgataataagcactaggcaaaaagtggattagggaaaggcaaaaggaagcccttgggtggtggtgcgatggggttttgatttgaaatagagccatctycacgggagggtccacttgagaacaggcaggtggaataggagagaacttgatcgtttctgtgattgagaaagagaggggactggaagtgcagttgttcctg

SEQ ID NO: 411663 - DNA, 201 bp, Homo sapiens
atagctccagaagaagttcagatgaggtcatacctgatatcttcgtggtgagttactgaggggatctgggatccagatttgactgattgagaacaaagtcwtggggccagctagacatgccacttggtggtcctcatggactttatttataatctcaggcaaagagctggtgcagttaggatattgttgctcatgggctgg

SEQ ID NO: 411664 - DNA, 201 bp, Homo sapiens
tgtgtgtaagatagacatctcttcttcttgtaacatcttaaagtatatacatttagcatggtgccaggcatggagaaggcattttacaaataactatcagrtcattattataattttatttttcttattattgtggtcatcatcatcattattataactttatacttgttacactgcaagctctgagtaagctaggaaagc

SEQ ID NO: 411665 - DNA, 201 bp, Homo sapiens
gaaaaagatggagttagtgataataatcccatatcctgacctgctaatgatcaactggaagctggaagtgactgtcatctctgcgcagtacaccttagtcmccacctgggttggtttatttatccatgttacctccagggctttttaaagtattttatcccaggttgtcttgtactcatttttattatttttatcataatc

SEQ ID NO: 411666 - DNA, 201 bp, Homo sapiens
acgcctggctaacttttgtatttttagtagagaccaggtttcatcatgttggtcaggatagtttcaaactcctgaccacaagtaatctgcccgttttggcytcccaaaacgctgggattacaggcatgagccaccgcgccgctccaatttcagacattaaccactaaacgcccgtagtggtttaattttgtttaagttagt

SEQ ID NO: 411667 - DNA, 201 bp, Homo sapiens
gtggctgtggatgttgcttctgaaacaaggcaggatgaacgttccttggagcactggcagggggggacattcactatattctaacgttaatacttgggttktcttgatagctgagatgctaaactttgctgtgagagcttggaaaagtctgttctctctgagcctcagtttcctcatctgtaatatgggcaactcctttat

SEQ ID NO: 411668 - DNA, 201 bp, Homo sapiens
cctttgtagagctatgtttttccaaatgcacttccttgttcctaagttggagggcattgttaacattcatgggctaatattaatgagagccactggatacrgggattgggatggtgctcaggactctcgatgaattctcattttatactcatgacaaacctatggcatggctgctatgattatgcccattttactgatcaa

SEQ ID NO: 411669 - DNA, 201 bp, Homo sapiens
ccacagtgagatataatctcagctcagaaaagatattatcaaaaatacaaaaagtaaatactggcaaggatgtggagaaagagaactagtatacattgctsgtgggaatttagaacagccattatgaaaaacggtatggagtttcctcatactaaaagtagaacttctgtatgatccagcaaccccattactgggtaaata

SEQ ID NO: 411670 - DNA, 201 bp, Homo sapiens
taaacctgggaggcagaggttgcagtgagccgagatcgcaccactgcactccagcctgggcaacggcaagactccgtctcaaaaaaaaaaaaaaaaaaaaraactctgagacttcatatgagactcaaatatgagtttaaatctcatatctcagctatgactgcttttcaactacttattgtatccttgaattagctcagt

SEQ ID NO: 411671 - DNA, 201 bp, Homo sapiens
taggtcttggggacttgaccgttcctgttggaagttcagtgcatgatatgtaaaaggacttagggtgagcatgggaaggagcacaggctttgtagctgccmaagttcaaacaccagctctgcaaaactggcccacggggctcagtctccttaactgtgaagtgatgatagcacatccaacccacaggtctttaaaggaaga

SEQ ID NO: 411672 - DNA, 201 bp, Homo sapiens
acctgggaggcagaggttgcagtgagccgagatcgcaccactgcactccagcctgggcaacggcaagactccgtctcaaaaaaaaaaaaaaaaaaaagaastctgagacttcatatgagactcaaatatgagtttaaatctcatatctcagctatgactgcttttcaactacttattgtatccttgaattagctcagttct

SEQ ID NO: 411673 - DNA, 201 bp, Homo sapiens
gcaaccttcttatatctctttaaatctttgtattagtcctgttcatttttgcttatatgatagatgtaaaacggaatctaaccatggtcttcaatttgcawttatcttattaagaagttgaacatattttcacatttattggccatttgggttttcttttctttggtttgtttttcttgaacagtcatgtcagaagattca

SEQ ID NO: 411674 - DNA, 201 bp, Homo sapiens
gtgaatggagcagatccatgttcttcagttgacagaaagggagagttagagatgaacctaatgccctgcttaaatcagagggcgaagtgatatgaagtttraatttaggaaggactttttttttctctctctaatggcctggagatatcctacaggctatgctgggtactttgcatagactaccttcaagatgcagagaaa

SEQ ID NO: 411675 - DNA, 201 bp, Homo sapiens
tgcaaggattctcgaaccttgggaaactagttaaaattcagattctgggcttaaggtgctgcatatttaaaagatcccaagattattttgataagctaccrgaaagtattgtaaagcagcaattggcaagtgttttatttaaaagcccagatagtcaatattttaggcttggcaaaccaagaggccacacattctgctgct

SEQ ID NO: 411676 - DNA, 201 bp, Homo sapiens
cagattctgggcttaaggtgctgcatatttaaaagatcccaagattattttgataagctaccagaaagtattgtaaagcagcaattggcaagtgttttatktaaaagcccagatagtcaatattttaggcttggcaaaccaagaggccacacattctgctgctatagcacaaaggcagccacagacaatacaggaaagggc

SEQ ID NO: 411677 - DNA, 201 bp, Homo sapiens
aggaatctgttctagctgttggtatggagatgctgaaacaccctgcagtctttgttctgccagcgtgtgagtatgcaactgatagtatttagtgaagaagycttactttattagaaacttttgcctaaatggaaactctaggtttgtacatcatttggagtagttccctgagacctgagtattcccaggatttacacctaa

SEQ ID NO: 411678 - DNA, 201 bp, Homo sapiens
ctgaggcaggagaatcatttgaacctgggaggcggaggttgcagtgagccaagattgtgccaatgcactacagcctgggctacagagtgagactccgtctyaaaaaaaataacaaaaataaaaacaaaaaacaaaaaacctttctaggaagtgataagagataccccaaataaaccagatagaatagtgattatcctttgt

SEQ ID NO: 411679 - DNA, 201 bp, Homo sapiens
attgttgatgactttacagtttagccatgggtttgggatttttgtttgtttccattgtggtcttttaatcaacatatactgttgttttggacagaccatgmgcacaaatgcagatgataatggttggagacagtggttgatgcctagctggctttctctccctccatttattaaccagagcacaaaatgggttgttttctt

SEQ ID NO: 411680 - DNA, 201 bp, Homo sapiens
aagccacactcttttcttttttgtcgtctttggctcaacattgtgtttgcaagattgttgcatgtaatttcagtgctttcattctcattgctggaatgcascacacatggatgtctctgtcctaatcttgatggacatttgggtaatgtcctattttggggccattatgaataatgcttcttttgttaatgagtgagcgca

SEQ ID NO: 411681 - DNA, 201 bp, Homo sapiens
aatgaggggattttgattatccagaaaattagctcatatggggcatttcagttgtcacagattcctgcatggaaacatgactgtaggtgcattctccttgyggcttaataaataacctccttttcggctgttcggcaagcccattgtgaaggccttgctgctggctttgtgtctggtagggggagacagaggcccctctaa

SEQ ID NO: 411682 - DNA, 201 bp, Homo sapiens
ttcctttctcgttctctctccagtttcagagacctcatgactattccccaccttttcgatttgggacagtgcctaatggaagcacggagagaaacattcgsaataactatccctacatgcatcagtacatgaccaaatttaatcagaaaggagtagaggacgccttggtcagcctgaaaacggggtaaggatggcagtttc

SEQ ID NO: 411683 - DNA, 201 bp, Homo sapiens
catcctgccctaatgcatgcatttacctcctaacaccagacaaaatgatcactaatttattatttgttctctcctccccctcctcccttctctttcttttyctactctctctcttcctttctcgttctctctccagtttcagagacctcatgactattccccaccttttcgatttgggacagtgcctaatggaagcacgga

SEQ ID NO: 411684 - DNA, 201 bp, Homo sapiens
tgcctcctggtctcagttgtttaggtagccctcactccatgccaggaagtttttctttttgagacagagtctggctcattcacccaggctggagtgcaacrgcgcgatctcggcccactgcaacctctacctcctaggatcaagtgattctcctgcctcagcctccagagtagctgggattacaggtgtgtgccaccatgc

SEQ ID NO: 411685 - DNA, 201 bp, Homo sapiens
aaagggtaaatgggtggagggatgaatggttggttgcttggatatatgtatgggtgaatcaattatattattaatttcttcagagtagaaattctggtacrtgtatttatcttctctgttattagtatgacactgcatttaggaaatgctcattaagtatttgttgcctggttttctctgcattcagaaatgctgttaact

SEQ ID NO: 411686 - DNA, 201 bp, Homo sapiens
tcagttgacagaaagggagagttagagatgaacctaatgccctgcttaaatcagagggcgaagtgatatgaagtttgaatttaggaaggactttttttttctctctctaatggcctggagatatcctacaggctatgctgggtactttgcatagactaccttcaagatgcagagaaaggaaatgcatctaatgctgttagt

SEQ ID NO: 411687 - DNA, 201 bp, Homo sapiens
cactttgggaggccgaggtggcagatcatgaggtcaggagattgagaccatcctggctaacacagtgaaaccccgtctctactaaaaatacaaaaaaattrgctgggcatggtggcacgcgattgtagtcccagctactagagaggctaaggcaggtgaatcgcttgaatccaggaggtgggggttgcaatgagccgagat

SEQ ID NO: 411688 - DNA, 201 bp, Homo sapiens
gaggtgggggttgcaatgagccgagatcgtaccactgcactccagcctgggcaacagagtgagactccgtcacccccacccacccccccacccccccgccaaaaaaaaaaaaaaaaaaacagaaccaagagaaggaaagattattaggaaaccccacaatgaagaaacagcttgaaatcagccttgttaaaaacaaatact

SEQ ID NO: 411689 - DNA, 201 bp, Homo sapiens
aggtgggggttgcaatgagccgagatcgtaccactgcactccagcctgggcaacagagtgagactccgtcacccccacccacccccccacccccccgccaaaaaaaaaaaaaaaaaaacagaaccaagagaaggaaagattattaggaaaccccacaatgaagaaacagcttgaaatcagccttgttaaaaacaaatactg

SEQ ID NO: 411690 - DNA, 201 bp, Homo sapiens
tgttggtatggagatgctgaaacaccctgcagtctttgttctgccagcgtgtgagtatgcaactgatagtatttagtgaagaagccttactttattagaamcttttgcctaaatggaaactctaggtttgtacatcatttggagtagttccctgagacctgagtattcccaggatttacacctaacttggtttatatttgc

SEQ ID NO: 411691 - DNA, 201 bp, Homo sapiens
cttataaaaatccttttcttctttctgtttctttatgttgtggtttctgagcccattttagagtatctctgtgttggagttattatttttctgtcttgacttttttttttttttttttttttttttttttgagacggagttttgctcttgttgcccaggctagagtgcaatggtgcgatctccactcaccacaacctccac

SEQ ID NO: 411692 - DNA, 201 bp, Homo sapiens
agaataatggcttccctaagatgtccatgctgtgaatatgttgcttatagtgtaaaggggactttgcagttgtgagattcagggtttagtaccttgagatkcggatgatcctggattagcaaggtgggaccaacttaatcctgtgaatcctcaaaagtgaagagcttttccaggatgtggacagagaaagatgtgaagatg

SEQ ID NO: 411693 - DNA, 201 bp, Homo sapiens
ttataaaaatccttttcttctttctgtttctttatgttgtggtttctgagcccattttagagtatctctgtgttggagttattatttttctgtcttgacttttttttttttttttttttttttttttttgagacggagttttgctcttgttgcccaggctagagtgcaatggtgcgatctccactcaccacaacctccacc

SEQ ID NO: 411694 - DNA, 201 bp, Homo sapiens
attcagggtttagtaccttgagatgcggatgatcctggattagcaaggtgggaccaacttaatcctgtgaatcctcaaaagtgaagagcttttccaggatrtggacagagaaagatgtgaagatggaagagtcagagagatgcagtggtgctggcttgaagatgaaggaaggagtcataagccgaggaatgtgggcagcct

SEQ ID NO: 411695 - DNA, 201 bp, Homo sapiens
aaaacagaaagacactggggattcagaatgcacaacaatgtttgcaattgcaatgcagagacggtgatgtggcaggcagtcagtcagccagtcagtcagcrtgctccctttccgggatctgccagtggagtgcactgtgccccatggatgggcttcggagggggtagtggtgacatcagctccccagcagcttctcacctc

SEQ ID NO: 411696 - DNA, 201 bp, Homo sapiens
tataaaaatccttttcttctttctgtttctttatgttgtggtttctgagcccattttagagtatctctgtgttggagttattatttttctgtcttgacttttttttttttttttttttttttttttttgagacggagttttgctcttgttgcccaggctagagtgcaatggtgcgatctccactcaccacaacctccacct

SEQ ID NO: 411697 - DNA, 201 bp, Homo sapiens
agtggattctcccctacggcctccggaaaggaaagcaatcctgctgacaccttgattttagtccagcgagacccatttcacatttcagaaccacagaagtrtaagacaataagtgaggattatttaagcccccgccaagttgatggtaatttgtcatagcagcaatagaaaatgaacgcaccatggctgatcccattaaat

SEQ ID NO: 411698 - DNA, 201 bp, Homo sapiens
gaggctttctgttactccctaatcataattagtgccctgtcccctgcacccttgttattttctttgtagagctgtatttttttccttcatagaattcaacraaattgataaatatatatttacttgtatgatttatttattgtctatatatccatttgggaagaggccttggatattttgctcctcatctagtggaggccc

SEQ ID NO: 411699 - DNA, 201 bp, Homo sapiens
ataaaaatccttttcttctttctgtttctttatgttgtggtttctgagcccattttagagtatctctgtgttggagttattatttttctgtcttgacttttttttttttttttttttttttttttttgagacggagttttgctcttgttgcccaggctagagtgcaatggtgcgatctccactcaccacaacctccacctc

SEQ ID NO: 411700 - DNA, 201 bp, Homo sapiens
gactgtgagttctttcattcctgcaccacaagcacttcctctcctccaccaggacatggcactatgtctggcacatagctctaaaatgcaagccccatgargcagggagtttgtccatcattgctatactccagtgcctagaatagtacctggcacagagtagctatatagtaaatatctgttgaatggatgaattattga

SEQ ID NO: 411701 - DNA, 201 bp, Homo sapiens
ggggatccagttagaggtagggtgctctttttttgctcattcatttattcatccacttaaaatatcgtgagctagggagtgtgctggtgtagcatgtatcmgaatgtcctttctttttgaacgctggctaatatttcattgtatgtatttacattttgtttacctgttcttctgtcaatggacatttgggttgttcccacc

SEQ ID NO: 411702 - DNA, 201 bp, Homo sapiens
taaaaatccttttcttctttctgtttctttatgttgtggtttctgagcccattttagagtatctctgtgttggagttattatttttctgtcttgacttttttttttttttttttttttttttttttgagacggagttttgctcttgttgcccaggctagagtgcaatggtgcgatctccactcaccacaacctccacctcc

SEQ ID NO: 411703 - DNA, 201 bp, Homo sapiens
attgctatactccagtgcctagaatagtacctggcacagagtagctatatagtaaatatctgttgaatggatgaattattgaatagcagattctcaataartatacagaggctgaaggttaataaacctgtagtaattatctaaaagccttttgtttatgtttcagtggtactttatggaggcatagcttacatatagtat

SEQ ID NO: 411704 - DNA, 201 bp, Homo sapiens
aagagggaatttgctagagaaaaaatgtgagagagttcacagctgggggatccagttagaggtagggtgctctttttttgctcattcatttattcatccamttaaaatatcgtgagctagggagtgtgctggtgtagcatgtatccgaatgtcctttctttttgaacgctggctaatatttcattgtatgtatttacattt

SEQ ID NO: 411705 - DNA, 201 bp, Homo sapiens
ttagggaggccgaggcaggaggatcacttaagcctaggagttcaagaccagcctggggaacacagggagaccctgtccctccaaaaaaaagaaaaaatagycagatgtggtggcataggcctatagtcccagctacttggaaggctgaggcaggaggatgcctgagcccaggaggtcgaggctgctgtgagttgtaattac

SEQ ID NO: 411706 - DNA, 201 bp, Homo sapiens
agttcttggtacatggttgaggcttaataaagagccattaagtaaacgagtacgtgaataagtactgtacttttctaatagtcttttgggtgctaaagtcrtacatatattgaatgcttgctatataccaagcactatagtgctgagtattttacatccattaaattgcacgtaaatgacaacaacaataacaaactcgct

SEQ ID NO: 411707 - DNA, 201 bp, Homo sapiens
attaagtaaacgagtacgtgaataagtactgtacttttctaatagtcttttgggtgctaaagtcatacatatattgaatgcttgctatataccaagcactrtagtgctgagtattttacatccattaaattgcacgtaaatgacaacaacaataacaaactcgcttgaatggtaaatgttattagctcaagtgtataactc

SEQ ID NO: 411708 - DNA, 201 bp, Homo sapiens
agtcttttgggtgctaaagtcatacatatattgaatgcttgctatataccaagcactatagtgctgagtattttacatccattaaattgcacgtaaatgamaacaacaataacaaactcgcttgaatggtaaatgttattagctcaagtgtataactcaggaaattgagactaagaaaattacagctgggtgcggtggctc

SEQ ID NO: 411709 - DNA, 201 bp, Homo sapiens
tatattttttgtaactcataaagatttgaacccagataagtctaacctcatagccctcatcacattcttcactatgatatcatggtatcatgatttagttrtccagtctgcataatggtaggaatttaggagttaattttcttttatttaaaaaaattttgtgggtacatagtaggtatatatatttatggggtacatgag

SEQ ID NO: 411710 - DNA, 201 bp, Homo sapiens
tcatgggtatattctgtgatgctgaggatatgaatggtcccatcatccaagtagtgagcatagttcacaacaggtagtttttcagccttgctctcctcacrcttatcatcatccccagtgtctattcccatttttatatccatgtatacccagtgtttagctctcacttataagtgagaacatgaagtatttgtttttctg

SEQ ID NO: 411711 - DNA, 201 bp, Homo sapiens
ctgcttctttaacattaaatagtaagcattttctctgcatcattaatttgtcttcaaaaacatgattttcaatgacccgaatggtctgttgaataaatacrcaatatttgctcttttccttttccccaatttcttcactttgtccttggaaaccagattctcccccacacaacacccccatcagtcgcttctgcaccatgc

SEQ ID NO: 411712 - DNA, 201 bp, Homo sapiens
tccaatctattctctacacagccttcaattgacatgatctattacctctttgatgtcaccctcgcttctatgtcttcccatagttttttttgtttgtttgtttttctgagacagggtttcacacttgttgcccaggctggagtgcaatggcacgatctcggctcaccgtgacttctgcttcccgggttcaagcaattctcc

SEQ ID NO: 411713 - DNA, 201 bp, Homo sapiens
tgccacctctttcaattttcttctttactcattcctctcttctttcctcctctcttttcctctccatctcctctcatctctcgattcctctctccatcatmctctcttccctcttcctcccttccctcttcttttctctcctctctgactcttccatgacttatctccatttcaactatgctttttttaaaaaattcattt

SEQ ID NO: 411714 - DNA, 201 bp, Homo sapiens
gtaaatgacaacaacaataacaaactcgcttgaatggtaaatgttattagctcaagtgtataactcaggaaattgagactaagaaaattacagctgggtgyggtggctcatgcctgtaatcccagcactttgggagactgaggcaggaggatcactttagtccaggagtttgagactagcctggacgacattggcaaaacc

SEQ ID NO: 411715 - DNA, 201 bp, Homo sapiens
tttctacaactgagatgtaggtattgacgatctgaatagctcatatttgctgaaaaactgaaaatatacctaaaaactttcccattttaaaaagacaaaaragaaactcctggcctagatggcttcgtctatctataacaaacatttaaaagaaataacagcactctatacaaagtttttcaatatgttactaatcataat

SEQ ID NO: 411716 - DNA, 201 bp, Homo sapiens
ctcgaactcctgacctcaggtgatatacccacctcagcctcccaaagtgttaggattacaggcgtgagccgccatgcctggccaatgtttttaattagtasacgaataaaaccacaagaaaaccattggcaagccctctagttctttgggctccttgctttagcacagtggaaagcctgtgtactaagtcagaacggcgac

SEQ ID NO: 411717 - DNA, 201 bp, Homo sapiens
ggggatctagtgcttcagaaataactccgtgtgcttctgtctctaagaaagagaaagccagtggagcaggtaaataccagtcgtgttacccttaaagctgcccccccagcactacacgctggtacagcaggtcagcagaggggaaagactgctgaggagggagctgttattctgggactcggaggcgatttcttttcatct

SEQ ID NO: 411718 - DNA, 201 bp, Homo sapiens
agttccccttgacagactgaattaatttgtagatgttattttaaggttggaagaaaatatttgctctggtggggtgtgcagtggcgttatgacatttgtcragtgaatggcaaatgatggagccggatggaacccgtattacttgcttaagaaattgtcttgaaaatttccaatgtgtcatttaacgtagtaaagtatttg

SEQ ID NO: 411719 - DNA, 201 bp, Homo sapiens
gaatcaggtggaacctacaagcctattatgagctcctatggggagacatgcagggcatgaggaatagaaataggaggaggagacagaacatcataatttcsctctaggtttagggatggaagctggttggtgggtcaggggtgggaaaatgagtgaggctttttatctcttaggagattggagatgttttcaagagggctg

SEQ ID NO: 411720 - DNA, 201 bp, Homo sapiens
ctactaaaaataaaattagctgggtgtggtggcacacacctgtaatcccagctactcaggaggctgaggcagaagaattgcttgacccaggaggtggaggytgcagtgagccaagatggtgccactgcactccagcctgggtgacagagcgagcctccgtctcaaacaaacaaacaaacaaacatgcataccattaatgag

SEQ ID NO: 411721 - DNA, 201 bp, Homo sapiens
tatagcttcaaaataatgaagcaaaactgatgcaactgcaaggggaaataaattcataattatagtaggagatttcaatactcttaataattgctagaacragcaaagttagtaaagatacagatgattttaacaatgtcacaaccaagttgacctaatatttgcttgtggaacactccacccaacaacagaacacacatt

SEQ ID NO: 411722 - DNA, 201 bp, Homo sapiens
tgtgacagatgagtgcaaatccagcctatttctctggtccaaatgaatacttgtccttgtaacactgaaaaccaaatatttgaataggaatgagtattctrgggtattctggggtagcatggctcagaggctcctagcagttgttcagtgacttaaaagggagatggttgtaaaaatttggggcataagctgaacatttgt

SEQ ID NO: 411723 - DNA, 201 bp, Homo sapiens
cacagtgaggaaaatatagtagatctctagcaaattaacacattcaactgaaataagtgatgccatctcccaaagcatgtgtgtgtgcaactgtgtgtgcgtgtgtgtgtgtgtgtgtgtgtgtcttgcactggttcttttgttgttgctgttgttgttgttgttgttgcagttgtaacatcaacccaactccaaaaagaa

SEQ ID NO: 411724 - DNA, 201 bp, Homo sapiens
tatgcatatcataccttctgtcttcctattatccagaaaattgtcatagggtcatgcctagctactagggaagctagaaatgtaagctttattattggagkttctgtgcccctctaaaaatagaatttctgttactaaggcagaagaaaagaggatattgatgaacaaccagaagtctcttgacccgtatagcttttcaca

SEQ ID NO: 411725 - DNA, 201 bp, Homo sapiens
catattaagtaaaattagccacggccagtgctatattaaagtatcaaaacttttagcatttgctcaccctcctttcctggggagaacaggtttctctacaygattgcctgtatgctttgctatgagtcatagtttagagaaaacccccacgttcctgtgcaatgaaagaagcagcataatgatctcaactcaggcagaatg

SEQ ID NO: 411726 - DNA, 201 bp, Homo sapiens
aacctaatacacagcaagcattctttccccagctctctgtaattcctgatagttcactttggcaaagtgcttccatcccatggggtctgtcctagtaccartttgcagactatttgcttcagaatctacttaaaaatacggatttctgggtcacacctcagacatactgtgccagataaaatccgtgggaacagagcccca

SEQ ID NO: 411727 - DNA, 201 bp, Homo sapiens
acagtgaggaaaatatagtagatctctagcaaattaacacattcaactgaaataagtgatgccatctcccaaagcatgtgtgtgtgcaactgtgtgtgcgtgtgtgtgtgtgtgtgtgtgtgtcttgcactggttcttttgttgttgctgttgttgttgttgttgttgcagttgtaacatcaacccaactccaaaaagaac

SEQ ID NO: 411728 - DNA, 201 bp, Homo sapiens
cagaagtagatgcatatgttgagatatgtggcagaaaggcccttgagacggatggatgtctctggcagggaaaggatttgcctctccagaaatcagcggcrgaagaaagcacagctgtgtctttgtgtttgtgctgcaggtgggcaagtgggagaaccatacgctgagcctgaggcacgccgtgtggcccaggtacaagtc

SEQ ID NO: 411729 - DNA, 201 bp, Homo sapiens
ccccaccagagtctagtgcaatgtataattattctccttcaaatgtatatctcagatccttcctcatctccagtgctaccaccatcatcaccatctggagytgtagatgaagcagcctccactggtctccctgcttctacctctactcctcccctacttcatcctttcctttgcagccagggtaaattggatcaggtcact

SEQ ID NO: 411730 - DNA, 201 bp, Homo sapiens
ctagtaccaatttgcagactatttgcttcagaatctacttaaaaatacggatttctgggtcacacctcagacatactgtgccagataaaatccgtgggaayagagccccaggagaccattgctaaagatatggaagtggggttgaacctgtgtgtgtgtgtgcatgtgtctgtgtggtcattgatgggcatgaggagtagt

SEQ ID NO: 411731 - DNA, 201 bp, Homo sapiens
ctgtaatttgtgaatgaggcttggtggttgacaggtgaggaagtggtggattgactcagagctgggtggaaggtggtgccaggtgggtgtgacaggaggayaagatgggagcaggaaaattgtgggcgtggcaggaaatctgttgctgtgataaagagatctgggctgtaatagggaaaaaatggaaagtcacgaatgagc

SEQ ID NO: 411732 - DNA, 201 bp, Homo sapiens
cttcatggggtttcgttaaagactgaatgagataatgtggaagaaatgatcggaatgcaataaataatcagtaaacagctactgtacatgagctcatctgrtctatgaagttggtggaaattgcttttcctgttttacagcctaggacacggaggcttaaggggttgagccagtttctcaaggcaacacgggtagcctgtg

SEQ ID NO: 411733 - DNA, 201 bp, Homo sapiens
tatgcatttctctgtccccctacctatactcacttccacccttgctcactcattcattcaaaaaacatttacagagtggctactgtatgtcaggtacaagrctaggtgctggagctacaattgtgaggaagaaagcagggtccctaacctgttctccacttttgtaagtgacatcaccattcacttggcaatcctctttca

SEQ ID NO: 411734 - DNA, 201 bp, Homo sapiens
acctgggaagcggaggttgcggtgagccaagatcatgccactgcactccaccttgggcaacagagcgagactccatctctacaaaaaaagaaaaaaaaaaraaaaagaaaaaaagttacttgaaggaacatcagtttaccgctctgaaaaattgtaataatatctctttcacatctatgtgactctgctgtgatggtcaag

SEQ ID NO: 411735 - DNA, 201 bp, Homo sapiens
cagttgaatgtacctcctaaacatctcttgaacctctcttttgtgtatctgtattgcagcaatcctagttcagatctttctctcttttctggagttgcttyagtgagatttctctgggcctgcttttctgccttcattcattccctcctccaagcccttcctcatactcaagctcaagtggtccttcccgaagataaaaac

SEQ ID NO: 411736 - DNA, 201 bp, Homo sapiens
ttagttcagggtgcattcttctgctgtggatgcattgcttccagaggaagaagctggtgatggaggaagcactgtgctggggaagggttgatcttcagatsgtatctgaatatatgggagaatgaccaggtaaaggaaagggagctcacaggttaagcaccgataaggagggaggtgcacgttgtcagtggtgaagagcaa

SEQ ID NO: 411737 - DNA, 201 bp, Homo sapiens
ttctacctctgagccccctcatttcacaccccctgttcatccagctctcacttataccctgccctctctaacccatcactgtgctactaactcagccactscctttctcactggatgttcgtttatttcttcaatctcttatacccacaactcatgtcacatccacccatccgtccatctgttcatctgtccatccatcca

SEQ ID NO: 411738 - DNA, 201 bp, Homo sapiens
cgcacatatgccagatttaaattaaacaacgtccctagaactccgaagagcctaatatttcaagacacagtgggatagtttgtgtttttcttttaattgaytttcatgtacaagtctgggtgtatacatttatggaaaagtcccaatttccttagaagcctcagttttcagctctcaggatccccagtcccctgtgcgatt

SEQ ID NO: 411739 - DNA, 201 bp, Homo sapiens
aggttccaaatgttatccttttaaaacttttatattaagttcgagggttcatgtgcaagtttgttatacaggtaaactgatatcccaagggtttgtagtamagattatttcagcacccaggtattaagcctagtacccattagttatttttcctgtctgtggaataaggttctcttgaaaactctggaggactaagaaaaa

SEQ ID NO: 411740 - DNA, 201 bp, Homo sapiens
cgcttgggttcttgatgtctcagtggggtctgcacttcctccccttaccagcctttcttgggcatgtcacaagagcatccagattttgtgcattcataagmcaggtgttgcaaacttagatgactaaggaaggcagaaaggaaacgggagtgggtgcagcaggcgggacatgagaaaaatagcacagatgacgtgaaacgg

SEQ ID NO: 411741 - DNA, 201 bp, Homo sapiens
tttggttcacaaaaaaagaaaaaatatcttggttaattgctgcatttttctggaaattttatctccaagtgttgcatctctacctcctccatcatcaaatrcttgccatgttttagtcacttggatgaccttcagacatgcctccatattggatggaaaaaaaattagaaaataatcctctgttctccaaactgtaaggag

SEQ ID NO: 411742 - DNA, 201 bp, Homo sapiens
gtctcccatgactttgtgactgtgcgaaagcatgggaggctgttggaagaaaaggaattgaatcaagataccctcttctcatccctttacctacacaaccrattgatcagcacccatttttgtgggtgaggaactggaaagggatggatttcctatttttttaaaaaaaaactcattaacatgtatgcttttttttctggt

SEQ ID NO: 411743 - DNA, 201 bp, Homo sapiens
actgcactccagcctgggcgactgtagtgagaccccatctcaacaaaacaaaacaaaatacctccaaagggaggggggacgtcaacagcacattgtatttycaaagggatggcattggtgtttttgtgagaagaggaagcagccgtgcaggtctgaggtacatggtgggcagagaaatctggatgagtttgagatagtgtt

SEQ ID NO: 411744 - DNA, 201 bp, Homo sapiens
tcttatgggaatgtagagtcaatattatcaggtcttctagttttttaaaaagagaaaatgtcatctgattttgttagaaacctttccatttttaaatattrgtaactaattccatgtaaaaattttttggccgggcacggtggctcatgcctataatcccagcactttgggaggcccaggcgggcggatcacgaggtcagg

SEQ ID NO: 411745 - DNA, 201 bp, Homo sapiens
tgctaggaatcattctcgtaggaagcacggagtgtgtcctggatgtagacccaggaatgcatgaaatccattttagaaaggattaaatccaataaaaatgrttttattttaaatgacagagttgtttaatgaggggattttgattatccagaaaattagctcatatggggcatttcagttgtcacagattcctgcatggaa

SEQ ID NO: 411746 - DNA, 201 bp, Homo sapiens
catttattgtaattatttgcataggatctgcctttcccttaaactctaaatgattgcagagaaaggaccacacaatttttacttacctctttaattcctayactttgctagcataaagtagatgttcaatggatgtttattgaagtgatgtgtttactaagaagtagatttgaagcctttctatagctgtccttttggtat

SEQ ID NO: 411747 - DNA, 201 bp, Homo sapiens
ggaggttaagaaagggttagaggaagtgagttcatggatcaaaatggaaagaaattgtttcttttcacacaaaaaagtcttgtatctctttagtgagctaragagaactctttttccaattcaatcagagagaaaaaaatatcaattggcttgtcttatgaaaatgggtcgtgaatattgaatctggcctcaacccagttt

SEQ ID NO: 411748 - DNA, 201 bp, Homo sapiens
aaatatcaattggcttgtcttatgaaaatgggtcgtgaatattgaatctggcctcaacccagtttctctagatttttatcttgcttgcatttgtaaaacayttccataaaaatgtcaagtattttgctaaatttagcaaaacctctctttccccacacttttcctgctgcatttttaaaagtaaaataaattgtaaccaga

SEQ ID NO: 411749 - DNA, 201 bp, Homo sapiens
taccaggtgtggtagtcatactgattatgcatgtgtagtactttctagtggtgccgttcttagaccacattttcagttcttgagaacagtgtcattgttgkcatttttctcccaaagagctggcataatactcaaaagaaacggggtcttattaagtggttgttcattgactgataggaagagaactgtgggaatatatat

SEQ ID NO: 411750 - DNA, 201 bp, Homo sapiens
tagggctctcaaattgttgattactgtctgagatggggataattggtttgggtgaaattggattgacggtggtgggttacttaggcttagttttcaaaaayagcaagtcttatccatcccatcccaagggaaccctcctcttcccccagtgccttagaataatcacgtttttaactgggcaaagctgtcgttaagcttatt

SEQ ID NO: 411751 - DNA, 201 bp, Homo sapiens
ctttgctatgagtcatagtttagagaaaacccccacgttcctgtgcaatgaaagaagcagcataatgatctcaactcaggcagaatggcctggaaagtcaygatatgtggctgcacccagtcggtacctttgctttgcttgtgttggaggtctcttgcattagtgttgtgaaaatagatgatgagctcgtgcctctgtgac

SEQ ID NO: 411752 - DNA, 201 bp, Homo sapiens
tatcacaataaataaaaggctttttcagctgtcagcccaggatcacagtctacctctcttagccactttctaactcttattggcaagtttgctgagggaamaaaaacttcttaatatcattcaggtaaatactccccaaaagagctgtttactctgccagactgcaaatggcatttcatttattttacaattggatgttat

SEQ ID NO: 411753 - DNA, 201 bp, Homo sapiens
aaaacccccacgttcctgtgcaatgaaagaagcagcataatgatctcaactcaggcagaatggcctggaaagtcacgatatgtggctgcacccagtcggtrcctttgctttgcttgtgttggaggtctcttgcattagtgttgtgaaaatagatgatgagctcgtgcctctgtgactttgtttcttgagacctgcctgatt

SEQ ID NO: 411754 - DNA, 201 bp, Homo sapiens
cacaataaataaaaggctttttcagctgtcagcccaggatcacagtctacctctcttagccactttctaactcttattggcaagtttgctgagggaaaaaraacttcttaatatcattcaggtaaatactccccaaaagagctgtttactctgccagactgcaaatggcatttcatttattttacaattggatgttatgct

SEQ ID NO: 411755 - DNA, 201 bp, Homo sapiens
tggggactgacaggcatgacatacctgtgatatacctgaaggaaacacacggtggtgagaatgttagacatcagacactgtcttatgtcattgcctagtcytccctgggatggacagaggtcacctggcaccaggacccctgggtcagaaccatcactctgagagatgcttgcagcatgatattgggcatgccatgtgact

SEQ ID NO: 411756 - DNA, 201 bp, Homo sapiens
atctcaactcaggcagaatggcctggaaagtcacgatatgtggctgcacccagtcggtacctttgctttgcttgtgttggaggtctcttgcattagtgttrtgaaaatagatgatgagctcgtgcctctgtgactttgtttcttgagacctgcctgatttccatggtcacaagaacacagagaaagatgtgtgggctcccg

SEQ ID NO: 411757 - DNA, 201 bp, Homo sapiens
caataaataaaaggctttttcagctgtcagcccaggatcacagtctacctctcttagccactttctaactcttattggcaagtttgctgagggaaaaaaarcttcttaatatcattcaggtaaatactccccaaaagagctgtttactctgccagactgcaaatggcatttcatttattttacaattggatgttatgctga

SEQ ID NO: 411758 - DNA, 201 bp, Homo sapiens
ctcctttgccatggtgctgcaaagttgtgtcatttagaagacgtggaaaaaagccacaggggagctgtttgtatttgcattagtgctgtgtttgtgggttktagtgttttgggttttgttgctgtcattgtggttgattctttcttgattacaacagccaccataatcacagctctcattaatggagctctcggtatgtgc

SEQ ID NO: 411759 - DNA, 201 bp, Homo sapiens
cttcagtaagtcctcatccccatcccttacatatgtcacttgcccataggataaagataaaaccccataacaggcaacctactaactcccttggtctttctttttttttttttttttttttttttgagagactcttgctctgtcacccaggctggagtgcagtggtgcaatctcagctcactgcaacctccgcctcctggg

SEQ ID NO: 411760 - DNA, 201 bp, Homo sapiens
gctgccatcaccatggggccatgtagatctcagggaagtcatttaacctctcatcctgtgtctttaggagaaatgccatccatgagtgttatgccacttgygttatctcttgagtagttaggatcaaagagataatgggtgtggatgggctttgtaacctttatgaatgggtaaatggaatgtaagttgctattatgctct

SEQ ID NO: 411761 - DNA, 201 bp, Homo sapiens
cctccacaggtgaaggggatagggaaagacattctagacagagggaagagatttctagaggtgtcaaggtgggacatggaggaacagcaaggtgttctgtrtgaggtattatgagataggtattatgaccattactctcattttactaatgagaaaactgaggctcagagaggtgaagcgacttgcccaaggtaacacagc

SEQ ID NO: 411762 - DNA, 201 bp, Homo sapiens
ttgtaacctttatgaatgggtaaatggaatgtaagttgctattatgctctaggaaacaccaggctttggtacccatggagtcaggtgtcaccctggggacycagcaagctctggaacattctggaacaggattgaatgctctagacctgattgaatgagtcctcagttatgatggtactgaaacacagagtctagagcaga

SEQ ID NO: 411763 - DNA, 201 bp, Homo sapiens
aatgttgaattaatgataatagttccacgtatggagacctttctgtgtgccaggaactgtgcattaagagatgtttgttgttattatcttataagtaagcstcataacagcatatgaaatggaagtgttgtttttatttggtgattgagtgaactgaggttcaaaaagattatgtggcttgttcaaggtcacatggctaaa

SEQ ID NO: 411764 - DNA, 201 bp, Homo sapiens
tgtaacctttatgaatgggtaaatggaatgtaagttgctattatgctctaggaaacaccaggctttggtacccatggagtcaggtgtcaccctggggaccsagcaagctctggaacattctggaacaggattgaatgctctagacctgattgaatgagtcctcagttatgatggtactgaaacacagagtctagagcagac

SEQ ID NO: 411765 - DNA, 201 bp, Homo sapiens
cctggaaagtcacgatatgtggctgcacccagtcggtacctttgctttgcttgtgttggaggtctcttgcattagtgttgtgaaaatagatgatgagctcrtgcctctgtgactttgtttcttgagacctgcctgatttccatggtcacaagaacacagagaaagatgtgtgggctcccgggggctctgcctgacactgtt

SEQ ID NO: 411766 - DNA, 201 bp, Homo sapiens
aaggtctcccctgctttggggcatttgcatatgcttttctttccacctggaatgctcttcccctcattccctcccttggctggctatttctcatcattatscatcatctcctgagaaagggcttgcttccgctcctgtcaatcccctcctgcctatctttgctgtcaatgtggatttcagcttccttttttatttcctttt

SEQ ID NO: 411767 - DNA, 201 bp, Homo sapiens
tacgcattgtctatggctgtttttgtgctacaaaggcagagttgagtagttgtgatagagaccgtatggcctgtagtgctgaaaatatttactaattggcygtttaccataaaaaaaaaaaaaaaaagattagtgacctctggcttaaacaataaaagtgacatgttattttgaaacaattccaacaattggaagaattta

SEQ ID NO: 411768 - DNA, 201 bp, Homo sapiens
aggatgtggagacaagcacccaaactgtcaaagtcaggcgtggacagatgagtctcccacttctaccttttcatcccattctcacagcagacccatgtgayggaagggtcattattcctatcttataggtaaagaaactcaggcccagaaagattaagcactttttcaaagccacggggctggctaggttagccacagtcc

SEQ ID NO: 411769 - DNA, 201 bp, Homo sapiens
aagtcacgatatgtggctgcacccagtcggtacctttgctttgcttgtgttggaggtctcttgcattagtgttgtgaaaatagatgatgagctcgtgcctytgtgactttgtttcttgagacctgcctgatttccatggtcacaagaacacagagaaagatgtgtgggctcccgggggctctgcctgacactgttgagagc

SEQ ID NO: 411770 - DNA, 201 bp, Homo sapiens
tttctttctttcttcctctctctctctctctctctttctttctttctctctttctctcgacagagtcacattctgtcacctaggctggagtgcagtggtgygatcttggctcactgcaacctctacctcccagattgaagctattcttatgcctcctgtgtagctgggattacaggtgcatgccaccatgcccagctcatt

SEQ ID NO: 411771 - DNA, 201 bp, Homo sapiens
tcctcagtggtaaaactccaggggatttaatctgcgtaaatttgcagtgaattccctaatgggcctgttgagattcagaatcttagtgtctgttatcaatmcaacaccaggattagtacaaggtcagcatgccaggcccatgcctgacaagcagtgaattgctcaaaccagagaaagtcaaatgtcaagagaaccatcaaa

SEQ ID NO: 411772 - DNA, 201 bp, Homo sapiens
actctttcacagatggcctgtgccgagctggctctgggccaattaactgctgtccctccaattatctttctcctgaggaagttcacagtgcagccatgccytcctctctacatgtagagaaccagataagatgcgtgtgcttacagctttgctctgtgcacagaccttttcatgggtaccctggtcatgtctagctcagag

SEQ ID NO: 411773 - DNA, 201 bp, Homo sapiens
ctgtgacacccaagcagttcaaggaggcatttaagggacactgtgatccaggaaacgtccctgggaacttcagaaatggcaaagtagatggaaaattaacygaaaattgagaaacactaaatgggttatggtggcatttgtgaaacagtaagagaattaaagtctaagggggaaatagtgaataataaatatgtctagaga

SEQ ID NO: 411774 - DNA, 201 bp, Homo sapiens
aaatatatcgttagaaaactgtctttgctgatgctgttttatttccgtggcttgattttccggtcatgagctggggtgggggtcagatagagtttgttctrttagaaccatatagactcaaaggaggaaggggcaggacgaactagaggaaaatgagaagaatagatgataagcaagcaataattacagacatccttccag

SEQ ID NO: 411775 - DNA, 201 bp, Homo sapiens
gttcaaggaggcatttaagggacactgtgatccaggaaacgtccctgggaacttcagaaatggcaaagtagatggaaaattaaccgaaaattgagaaacamtaaatgggttatggtggcatttgtgaaacagtaagagaattaaagtctaagggggaaatagtgaataataaatatgtctagagaacatctcaaataatta

SEQ ID NO: 411776 - DNA, 201 bp, Homo sapiens
ttccatctcaaaaaaataataataataaaagggaaatacagtcaacaaaccatgttggtttattaccagcagggtactatgtcactctgaaatatttctgraaggctttaggactttgaatctgctacagttcagaggttatctctgaactggggctggaggagtgtgtgtgtgtgtgtgtgtgtgtgtgtgtgtgtgtgt

SEQ ID NO: 411777 - DNA, 201 bp, Homo sapiens
caaagtagatggaaaattaaccgaaaattgagaaacactaaatgggttatggtggcatttgtgaaacagtaagagaattaaagtctaagggggaaatagtraataataaatatgtctagagaacatctcaaataattagattttggaagttaaaggagacttatgactataagacgaaagagataaaatagaaatctggag

SEQ ID NO: 411778 - DNA, 201 bp, Homo sapiens
tcagttcaaaaaacttaaatcctgagaatgagaaatatgaagacatagcataatcaaatttctcaaaatcagttttaaagatatatcagctaaaaagatayaccacagttgaaagctgtcagagtgaaaaaagatgtcagccgacttctcgtcggaaacaatacaggttagaaaagaatgcagaaagatattttgtactga

SEQ ID NO: 411779 - DNA, 201 bp, Homo sapiens
agggtctgagcacggtggctcacgcctgtaatcctagcactttgggaggctgagccaggtgggttgcttgagcccaggagtttgagatcatcagcctgggcaagatggtgaaacctcgtctctactaaaaatacaaaaaattagcacagcatggtggcatgtgcctgtcgtcccaactacttcggaggctgaggtgggagg

SEQ ID NO: 411780 - DNA, 201 bp, Homo sapiens
tttaaaatgacttaaaagataagtgtgtccatttttcccttcatcaaatagttaagttgtattagttcgttctcacactgctaatgaagacatacccaagwctgggtaatttataaaggaaaaaggtttaattgactcacagttcagtgtggctgggaggcctccggaaatttacaatcatggcagaaggggaagccaaca

SEQ ID NO: 411781 - DNA, 201 bp, Homo sapiens
tgggatcccttttgcagcgctgtgtgcccagccccacctttctgtgctttgctgacaaagcctcacttcagggatcctcagcagatttttgcctttgggcrctggaatggtaaatgcctggcaatttaagttccctcaatctttgtggtcacctgtaaccaaagactaatctgtgtgagaatacaaaggctaagctgctcc

SEQ ID NO: 411782 - DNA, 201 bp, Homo sapiens
aacagcatgggggtaaccattctcatgattaaattacctcccaccaggtccctcccacaacacgtgaggatgatgggaactacaattcaagatgagatttrtgtggggacacagccaaaccatatcacaagtaaaagcaatgctctaggaagttctactgtatttgtgctctgcacgtgtgttctgctgggctgtgtgtgc

SEQ ID NO: 411783 - DNA, 201 bp, Homo sapiens
cagaggaggggcttatgtgcagtgcacctgttggatttagtgaaaaccactggaggtcttaggtcagtttgagaggcaaggacagtgcagaagagaatgtrtctagagcccaagggctgggatgcgtgttaggctagaggagagatgcctcctttattactgaaagaggggagaagaaagacatgtgtgcagaggcaggtg

SEQ ID NO: 411784 - DNA, 201 bp, Homo sapiens
accaccctcattgtagagaggaggaaagtgaagcccagggaatcacagaagcttatttttggtgacactgctggtaggcaggtaacagagctgggccctgractcaggtctcctgactccacaacctctgtttttttgatcagaagaatttcttaagttttgtttccttccatggcaccttcacaacattttggccacttt

SEQ ID NO: 411785 - DNA, 201 bp, Homo sapiens
tatatatgggggtggcagaagagagatgaattaatggatatttccatggttgggatttcaagaactcctatatggcagatgggagagaaactattttttayggtggaagataagaggctgagttcttctctaagcctactgagtttgaggtttctcggaggcagtagagaagaatgggggaaaggcagcagatcaggggct

SEQ ID NO: 411786 - DNA, 201 bp, Homo sapiens
acactgctggtaggcaggtaacagagctgggccctgaactcaggtctcctgactccacaacctctgtttttttgatcagaagaatttcttaagttttgttyccttccatggcaccttcacaacattttggccactttgactaattttttattgtgatataatacacataacatagaatctgccattctaaacattttaaag

SEQ ID NO: 411787 - DNA, 201 bp, Homo sapiens
tgttatgtgaccttttgcatctggcatctttcacttagcataatgttttcaaggtccatccatgtcgtagcatgaatcagtactttattccttttcatggytgaataatattccattgtatggatatactatatttaatttatctattcaaccattgatgggcatttgtgctgtttccatctgttagctattgtgaatggt

SEQ ID NO: 411788 - DNA, 201 bp, Homo sapiens
gtgagtgaattctcatgagatctgatagttttatagatggtagtctttcctgcatgctcacactctttcctgtctccccgtgaagaaggtatttgcttccycttcatcttctgccatgattgtaagttttctgaggcctccccagccatgcagaactgtgagtcaattaaacctcttcctctataaattacccgtctctgg

SEQ ID NO: 411789 - DNA, 201 bp, Homo sapiens
ttcatagagtgcctactgtatgccatgtactttctgtccaagatcgaatttaactttcttaagagccctgtgaaaaaaagaatactacttgtatcttatakaggatgtaccagaggctcaaagaggtagaatgacttgtcagagtaagcttttttaaagatacaaataagactgtccttcctgcttaggaccttccattct

SEQ ID NO: 411790 - DNA, 201 bp, Homo sapiens
acctgaccagagttcgcagaggaaagaatagcacagaagtaggcagggtggttatagccaactctctagatcatttttgctataaaagggaacagagagamatggagaattatctacagagggacacgaggtcacataagggttttcatttctgtttttaaggtagaagctacgcttgtattttggggtgatcctcctcat

SEQ ID NO: 411791 - DNA, 201 bp, Homo sapiens
tgattttgctatggttggaccctgtatacacttcttcttcttcttctttttttttttttttgagacagggcctcactgtgttacccaggctggagagcagyggtgcaatctcagctcactgcaagctctgccctaccaggctcaagagatcctcccacctcaggctcctgagtagctggggccacaggtgtgtaccaccat

SEQ ID NO: 411792 - DNA, 201 bp, Homo sapiens
ctgcaagctctgccctaccaggctcaagagatcctcccacctcaggctcctgagtagctggggccacaggtgtgtaccaccatgcctgcatgcctggctattttttttttttttttttttttttgtatttttagtagagacggtgtttcaccatgttgcccaagcctggtctcgaactcctgagctcaaatgatctgctta

SEQ ID NO: 411793 - DNA, 201 bp, Homo sapiens
ggccacaggtgtgtaccaccatgcctgcatgcctggctattttttttttttttttttttttttgtatttttagtagagacggtgtttcaccatgttgcccwagcctggtctcgaactcctgagctcaaatgatctgcttacctcggcctcccaaagtgctgggattacagtacacttctacaattaattctttcacattat

SEQ ID NO: 411794 - DNA, 201 bp, Homo sapiens
tggtcacaagaacacagagaaagatgtgtgggctcccgggggctctgcctgacactgttgagagcgattccagaggagaaggtatctgtggggtaatcttyggatgttattctgaaaagccccaacatcttcctcataacagcttctaagcttgaggaccaagagttatcctctaaaaaggtgtccccaaacaaggtaggt

SEQ ID NO: 411795 - DNA, 201 bp, Homo sapiens
gcttccgctcctgtcaatcccctcctgcctatctttgctgtcaatgtggatttcagcttccttttttatttcctttttcaaagtctaccattggtaactgkgggaatgtatcacagttcactgagtggcgaagagcttggagtctgcggtagactgctgaggtgagaattctggctccaacacttaccagctgctgggata

SEQ ID NO: 411796 - DNA, 201 bp, Homo sapiens
tgatcggtgaagtaagttatcttttcatcccctaggctcttactcagacaaagggcctgcagtcctcaggaatgttagcaggaaaagtaaagtactgttgttctctctctcttttttttttttttttttttgccttgcatccaggtggtctatcaacgggcagtcatggcagttggctcgctcaccatcaatgaggaacgt

SEQ ID NO: 411797 - DNA, 201 bp, Homo sapiens
ctggcttaacaataaagcttactttttgctaacctgatggtccgatggtgggtattcctggggtcagcaggcagcttctcttcatgtggggatttaagaastcagtctccactatcttgtggctctgccatcttctaataacttaggattttctgcaagcagccagaaaatccaggaaacaggaaggagagaagaaagggt

SEQ ID NO: 411798 - DNA, 201 bp, Homo sapiens
tagtctgaaaagtatatgctgatttaaaattaatcgaatcatattttaaatgtgactacccattaagccaaatagtttgtaaagaaggaaattcttgtgatttttttaaccgttttgtaaatttatgtttttacataaaaggtgttttttttttttaaatcaaggaagagctatgttttctatcatctgcttttctctagc

SEQ ID NO: 411799 - DNA, 201 bp, Homo sapiens
ccaaatcacacacaactctaacttgcattgggaactgacaacccattgctttttctttatcagttggtgctttcgttatgctgtagcattgtcatgtttasaagtataacatccaactgcctcattttgcatggaagaaaaggctcagaaaggtgaagaatgtgtccaaaatcatccagtgaatatatggcacagccagca

SEQ ID NO: 411800 - DNA, 201 bp, Homo sapiens
gcctgcaaagctcaaaatatttactctctagctctttacagaaaagtttgctgacctctggcttaacaataaagcttactttttgctaacctgatggtccratggtgggtattcctggggtcagcaggcagcttctcttcatgtggggatttaagaactcagtctccactatcttgtggctctgccatcttctaataactt

SEQ ID NO: 411801 - DNA, 201 bp, Homo sapiens
atgctgatttaaaattaatcgaatcatattttaaatgtgactacccattaagccaaatagtttgtaaagaaggaaattcttgtgatttttttaaccgtttygtaaatttatgtttttacataaaaggtgttttttttttttaaatcaaggaagagctatgttttctatcatctgcttttctctagcacttggactgtattg

SEQ ID NO: 411802 - DNA, 201 bp, Homo sapiens
caagacatttagatccctttccagtgaccaccctggattctatgctttttttaaaaaattctgctgctgtgaaatgctgttgcgcaatttcccaaagttaygcctttaaacacagtaattttgtaaatggtatttcagccccagagaagcaatgcatcaagcgtggtaagtcgccatccactgcttggtgtttaatgaaac

SEQ ID NO: 411803 - DNA, 201 bp, Homo sapiens
agatttccaacagggtggaatctgagacagtttctgtgagtgaccacactgtgatacagtagttccttatatttgcataatcagggcttgtgctgttgtgaatttacacattttctgatgaatatttatcaaatgggtactacgtgccaggaggcactatactgctgccagagataatgtggtaaatcaaatagagatttt

SEQ ID NO: 411804 - DNA, 201 bp, Homo sapiens
ggccaagagtttaaagtagtgaaaacaaagatttttatcagattttaggtaggaggttttctgagtgtggggaggagtagcttgctagtaggagctttatkaaaaaactaattgtataacattgatgaaagagaaagaaaagatgggagaaaagcaatgagaactcaaatcattcaagttacagttagcattcctctctgt

SEQ ID NO: 411805 - DNA, 201 bp, Homo sapiens
tgtgggctcccgggggctctgcctgacactgttgagagcgattccagaggagaaggtatctgtggggtaatctttggatgttattctgaaaagccccaacrtcttcctcataacagcttctaagcttgaggaccaagagttatcctctaaaaaggtgtccccaaacaaggtaggtgactttcccccagtatttccaggggt

SEQ ID NO: 411806 - DNA, 201 bp, Homo sapiens
tactcgccacacatgaaggtactgttagtgtccttattttactaatgaagtgttagcagtgaggtgacttccctctttttattaatggggcaactgaggcacagacagatcctgcaatttgctcaaggtcacaaacttacgttgggattcagttttttttttttttggagatcaacacttccttggacttattgggaaatg

SEQ ID NO: 411807 - DNA, 201 bp, Homo sapiens
gaatgtgggcttttgaattagaaatagaataggatttttcagttagcatcgtggatacaggggctgaaaagatgccacaatgagctgaagttaggaaggawcaggggacagctgtgggaggaggacagtgtggggatgactggaggggagtggaaataggggaccatggggcaggggagtggggagagaatatgaaggctt

SEQ ID NO: 411808 - DNA, 201 bp, Homo sapiens
gttatataacctccttgctactgcacagttattaaacatctgttccttcaccaagcacagaccatgtcactgttaactcccaaaattgtgaaggtaaaccwtgacctgtttggctggtggaatcccggctgttgtgtccggttccatcacaagaatctgtccagttcaggagtggccagggccccctgggaggcagtggca

SEQ ID NO: 411809 - DNA, 201 bp, Homo sapiens
gctataataacaaataattcctgcaaaattttaatgccttagcacaagatttgacaagctgtggttctccagcccaatttgggcccttgtttgtttttgtraataaagttttattggaacacagccacacccatttgtttacagatcatctaaggaagcttttatgctatgataacagagttgagccattgtgagagagac

SEQ ID NO: 411810 - DNA, 201 bp, Homo sapiens
actcgccacacatgaaggtactgttagtgtccttattttactaatgaagtgttagcagtgaggtgacttccctctttttattaatggggcaactgaggcacagacagatcctgcaatttgctcaaggtcacaaacttacgttgggattcagttttttttttttttggagatcaacacttccttggacttattgggaaatgg

SEQ ID NO: 411811 - DNA, 201 bp, Homo sapiens
gtgtatcttcttccttcctctctcccttctggaccttacctttcctcatctgtaaaatgggattgggctaaggtccactccttgacagactccgctgcttsttggaagtcaggagtcactccagcctcattgatgatgatctgccttttgcatgcttgggggacctacacctctgtacaggcgagagccctccaagcatcc

SEQ ID NO: 411812 - DNA, 201 bp, Homo sapiens
ggtctaggtagtatgacagacttgactatgaatttaccacatatttaccaagtataagttattaacaactgtgaacccaggagttttcctaaagagggtgygtgtgtaagatagacatctcttcttcttgtaacatcttaaagtatatacatttagcatggtgccaggcatggagaaggcattttacaaataactatcagg

SEQ ID NO: 411813 - DNA, 201 bp, Homo sapiens
ctcgccacacatgaaggtactgttagtgtccttattttactaatgaagtgttagcagtgaggtgacttccctctttttattaatggggcaactgaggcacagacagatcctgcaatttgctcaaggtcacaaacttacgttgggattcagttttttttttttttggagatcaacacttccttggacttattgggaaatgga

SEQ ID NO: 411814 - DNA, 201 bp, Homo sapiens
tcgccacacatgaaggtactgttagtgtccttattttactaatgaagtgttagcagtgaggtgacttccctctttttattaatggggcaactgaggcacagacagatcctgcaatttgctcaaggtcacaaacttacgttgggattcagttttttttttttttggagatcaacacttccttggacttattgggaaatggat

SEQ ID NO: 411815 - DNA, 201 bp, Homo sapiens
tctgtgtggttcccattttagttagggaagtaggacatggagaagttactgcactggaaatcaagtagaagagctcaagtagatctatagcacaaatgagkgggcaaaaaaagtcttatcccaggagagttatgaattagtattgaagggaagttatttggccttcattgatgacacctggcatgaccatttatgtgtttt

SEQ ID NO: 411816 - DNA, 201 bp, Homo sapiens
ttagcagtgaggtgacttccctctttttattaatggggcaactgaggcacagacagatcctgcaatttgctcaaggtcacaaacttacgttgggattcagttttttttttttttggagatcaacacttccttggacttattgggaaatggatgatcattgttaaaaacacgttttccaaaaaaaatattttttcttgaggt

SEQ ID NO: 411817 - DNA, 201 bp, Homo sapiens
gctgagtaacctgccatttcagacgagaagcccgtgccacgttatgtcatcagggtccattaagagattactctgattccagaggaacatccgttccgaakacagaggaacttgctttcatcttccaagggatgccaattgttgattccttgctcctcttcaaagggaaatgtgataaaaatccttctggaggaattttcc

SEQ ID NO: 411818 - DNA, 201 bp, Homo sapiens
actctttgcaaatatttatctgggagatcaccatatgctcaacaaacacttctcgcagtgaaatcaggcacctcagaggccaagctgtcctgtgggccttygctgtacatctgattgggactctgaactcagaagtgggaaaaacagctgagtctcaaagtaaatcagcaagagatacgaggtgagagaatccagaggaac

SEQ ID NO: 411819 - DNA, 201 bp, Homo sapiens
gccactgagtcttcctcagtggtaaaactccaggggatttaatctgcgtaaatttgcagtgaattccctaatgggcctgttgagattcagaatcttagtgkctgttatcaatccaacaccaggattagtacaaggtcagcatgccaggcccatgcctgacaagcagtgaattgctcaaaccagagaaagtcaaatgtcaag

SEQ ID NO: 411820 - DNA, 201 bp, Homo sapiens
cttgctgagtaacctgccatttcagacgagaagcccgtgccacgttatgtcatcagggtccattaagagattactctgattccagaggaacatccgttccraatacagaggaacttgctttcatcttccaagggatgccaattgttgattccttgctcctcttcaaagggaaatgtgataaaaatccttctggaggaattt

SEQ ID NO: 411821 - DNA, 201 bp, Homo sapiens
tacacaggatttgagcttattgatggcagtcaaagccctacgactgggcaaggtcttgcaggggagaatgatgactcaggagggcctgggtttaaaccatraggaactttaacattaattggtaaataatcctccaagggaaaggagaatgttggagagaaagagttacgctgtaaattccaggtgctcttcccacatgga

SEQ ID NO: 411822 - DNA, 201 bp, Homo sapiens
gttagaatcttagtctcctcttggcttactttctcacaaccagaggggtcagtttaagctgtgcttggcataaccagagtgagggacccgcattgtaagakaggcaagatcccacatgctcctgaaatcaacgtcaggatttcttcacaggtttcgttgtgggagtcggaaatgtgggcactactttttaatgtcttagaa

SEQ ID NO: 411823 - DNA, 201 bp, Homo sapiens
tcctggcatgaatcttagggatggaggagtcacggtccagcgtgatggtgctagctgtgttctgcgtgggcatgggaggccagccacatttctacatgggyctcaaagttgggtaaatgaactggcagatctgctggtgtctggtgtaccattgtccaaatccccacagtcagcttcctgaggatctgcttcatttggtta

SEQ ID NO: 411824 - DNA, 201 bp, Homo sapiens
gtatttatttccaaaacaagaacttgatgattattaagattggcagatattagaatgagcaataacagggagttttgatagctcacctccagagatcttcrtacctgagttagcacaactggaagtgtgtacaacataggtctctcttatcctatatgcttacagcattactggtcaaacattcttacttaaagctgcagg

SEQ ID NO: 411825 - DNA, 201 bp, Homo sapiens
gtaagttatcttttcatcccctaggctcttactcagacaaagggcctgcagtcctcaggaatgttagcaggaaaagtaaagtactgttgttctctctctcytttttttttttttttttttgccttgcatccaggtggtctatcaacgggcagtcatggcagttggctcgctcaccatcaatgaggaacgttctgaagtggt

SEQ ID NO: 411826 - DNA, 201 bp, Homo sapiens
ggctcacacctgtaatcccagcattttggtaggccaaggcaagtgaatcatttgaggtcaggagtttgagaccagcttggccaacatggtgaaaccccatstctactaacaatacaaaaactagccagacgtggcggtgggtgcctgtaatcccagctacttgggaggctgagggaggggaatctcttgaactagggagga

SEQ ID NO: 411827 - DNA, 201 bp, Homo sapiens
tccggaaattgtagtagaattagtctcctttgcttacagtagagaactagagctagtgggttgaagcttcaaggaaataactgtggttcagtgaaaggaarctcttgctgacactttaagctatcagtggaagggaccctccaaagaagtggagagaaatcatgtggacactggaatcttctggcaggaagactgggaaga

SEQ ID NO: 411828 - DNA, 201 bp, Homo sapiens
atgtctctggcagggaaaggatttgcctctccagaaatcagcggcggaagaaagcacagctgtgtctttgtgtttgtgctgcaggtgggcaagtgggagamccatacgctgagcctgaggcacgccgtgtggcccaggtacaagtccttctccgactgtgagccggatgacaaccatctcagcatcgtcaccctggaggag

SEQ ID NO: 411829 - DNA, 201 bp, Homo sapiens
gccacaggtgtgtaccaccatgcctgcatgcctggctattttttttttttttttttttttttgtatttttagtagagacggtgtttcaccatgttgcccargcctggtctcgaactcctgagctcaaatgatctgcttacctcggcctcccaaagtgctgggattacagtacacttctacaattaattctttcacattatc

SEQ ID NO: 411830 - DNA, 201 bp, Homo sapiens
cacaggtgtgtaccaccatgcctgcatgcctggctattttttttttttttttttttttttgtatttttagtagagacggtgtttcaccatgttgcccaagsctggtctcgaactcctgagctcaaatgatctgcttacctcggcctcccaaagtgctgggattacagtacacttctacaattaattctttcacattatcat

SEQ ID NO: 411831 - DNA, 201 bp, Homo sapiens
aaaaatataaaaattagtcgggcgtggtagcacacgcctgtaatcccagctactcaggaggctgaggcaggagaattgcttgaacccgggaggtggaggtygcagtgagccgagatcgcaccactgcactccagtctgggcgacagagcgagactccatctcaaaaaaaaaatgttgaataaatggatgagtggatatgca

SEQ ID NO: 411832 - DNA, 201 bp, Homo sapiens
cctcttctctagatatagtccttagtagttggagctttgcagatgcctccacaatctacagttgtagcctcaacctcttgccctgggttcctgacctgttyccctaggtgcttggtgggcttctctccttgacatggccatgggtgcctcacactgaacctgcccaggcctgtcctctttgattcatgcttattctggatt

SEQ ID NO: 411833 - DNA, 201 bp, Homo sapiens
acctccatctcctgagctcaagcaatcctcctgcctcagcctccctagtagttggtactacaggtgtgtgccaccatgcctggctcatttttgtgtttttytgtagagatggggtttcaccattttgcccaggctggtctcaaactcctgggctcaagagatccacttgccttggtctcccaaaatgctgagattaaaggc

SEQ ID NO: 411834 - DNA, 201 bp, Homo sapiens
ataaggtttttgaaatttcctaccagcataaacattggcaatttggacagaagggaacagagaagataaaatgaaggaaggccattacactccctaaattytttttttattattattatactcgaagttctagggtacatgtgcacaatgtgcaggtttgttacataggtatacatgtcccctgttggtttgctgcaccca

SEQ ID NO: 411835 - DNA, 201 bp, Homo sapiens
ttttttttttttttgagacggtgtcttgttctgctcattctgttgcccaggctggagtgcagtggcacaatctcagctcgctgcaacctctgcctcccggkttcaagcgattctcctgcctcaggttcctgagtagctaggattacaggcatgcaccaccacgcccggctaatttttgtatttttagaagagatgggattt

SEQ ID NO: 411836 - DNA, 201 bp, Homo sapiens
accagtcctctccggtggggagacaaaggcagtgtggtttgactgcaaccccaaaacttcccaggctccatctgttcccaagagagcatttagcttgtgtsttcccagcaagaatgagtctgcttcaggaaagagatttaattgccccatttatcagctctggttcacaagatcacactgacaaagatcacggcctctttt

SEQ ID NO: 411837 - DNA, 201 bp, Homo sapiens
ttttttgagacggtgtcttgttctgctcattctgttgcccaggctggagtgcagtggcacaatctcagctcgctgcaacctctgcctcccgggttcaagcrattctcctgcctcaggttcctgagtagctaggattacaggcatgcaccaccacgcccggctaatttttgtatttttagaagagatgggatttcactatgt

SEQ ID NO: 411838 - DNA, 201 bp, Homo sapiens
gcctcaggttcctgagtagctaggattacaggcatgcaccaccacgcccggctaatttttgtatttttagaagagatgggatttcactatgttggccaggstggccttgaattcctgacttcaagtgatctgcctgcctgagtctcccaaagtgctgggattacaggcgcgagccaccaagcccagactatttcacatctc

SEQ ID NO: 411839 - DNA, 201 bp, Homo sapiens
gagcttagaggagaataatggtggtaaaatgcttagtgcagtgcctgacacatcataagcgctcataagtaaaataataacagtagtagtaataataacartaataacatgctaataataatggcgaattactcttcctgttttgccactctaggcagagggatattagtgaagagaatacaagatccatggtgggtcagg

SEQ ID NO: 411840 - DNA, 201 bp, Homo sapiens
gggcagatggcagattcattctatactcaatctcccatgtgggggatgctttgcattgttactttaaactcagaaactagagctgaaggagtacaagtctttttttttttttttttttttttttttgagacggagtttcgctcttgttgctcatgctggagtgcaatggtgcagtctctccccgctgcaacctccacctcc

SEQ ID NO: 411841 - DNA, 201 bp, Homo sapiens
ggcagatggcagattcattctatactcaatctcccatgtgggggatgctttgcattgttactttaaactcagaaactagagctgaaggagtacaagtctttttttttttttttttttttttttttgagacggagtttcgctcttgttgctcatgctggagtgcaatggtgcagtctctccccgctgcaacctccacctccc

SEQ ID NO: 411842 - DNA, 201 bp, Homo sapiens
gcagatggcagattcattctatactcaatctcccatgtgggggatgctttgcattgttactttaaactcagaaactagagctgaaggagtacaagtctttttttttttttttttttttttttttgagacggagtttcgctcttgttgctcatgctggagtgcaatggtgcagtctctccccgctgcaacctccacctccca

SEQ ID NO: 411843 - DNA, 201 bp, Homo sapiens
gaattacccaaggagagttccccttgacagactgaattaatttgtagatgttattttaaggttggaagaaaatatttgctctggtggggtgtgcagtggcrttatgacatttgtcaagtgaatggcaaatgatggagccggatggaacccgtattacttgcttaagaaattgtcttgaaaatttccaatgtgtcatttaac

SEQ ID NO: 411844 - DNA, 201 bp, Homo sapiens
cctatagggaacgtctttgaggaaggctgatcagttgcaaaaagaattcctgttagacaacatgattgtgtgaaacctttttgtttctcacttctggcaartggtgggatcttctaagaataccaggtaaccggaaatgagctgagaaatcttcctttctggtctgttagttgggtgataaagacatgcagagaaaattgg

SEQ ID NO: 411845 - DNA, 201 bp, Homo sapiens
cagatggcagattcattctatactcaatctcccatgtgggggatgctttgcattgttactttaaactcagaaactagagctgaaggagtacaagtctttttttttttttttttttttttttttgagacggagtttcgctcttgttgctcatgctggagtgcaatggtgcagtctctccccgctgcaacctccacctcccag

SEQ ID NO: 411846 - DNA, 201 bp, Homo sapiens
agaaattaatgccaagaattccatgattaacataataatagaggatccagcagggctgagactaaggttgggcaagtacagtcggatcttgtctttatttcaaattttgatttgttttgcatcattttttttgcattggtttttatttgtaaaaatatcatattaaaatattacttatcttgactgatgagtcatttatca

SEQ ID NO: 411847 - DNA, 201 bp, Homo sapiens
gagcgctttttacctgcttattgggcaattgtatttattcttttgagaggtggatatgcaagtcttttggccattttacatttgggttgtttgggttttctttttttttttttttttggttgttgttaggttttaagagttctctgtatattctggatatcaatcccttatcagatatacaatttgcaaatattttttcct

SEQ ID NO: 411848 - DNA, 201 bp, Homo sapiens
ataaacatcacaaagcaagaaccaactctaaggtgcccataagaaacccactttaaatataaaagcataaataggttgaaagttgaaatatggaaaaataygtacacactaatactaattttaaaaaactggactggctgtattaataagacactaagtagatttcagatcatgaagatttttggcattaaatattgccat

SEQ ID NO: 411849 - DNA, 201 bp, Homo sapiens
aaactttttttaaagtagaaaaaaatgtctgtggggggcaggagttaaataaagtgagatcataattctttaaactcagagacggaaaaaaaaaaaaaggyaaaaaaaacagactaaaaagaaatatatcaaaatgttatcggagatgctgctaggtgattgggatgatggactttacatctttttacatttaacaaattt

SEQ ID NO: 411850 - DNA, 201 bp, Homo sapiens
agagggaggaagcggcaggatcacaagagggtcgctgcgtgggaaagatccacctccctcggggaaccgggaccgcgggagcccgcgtccttccctccccmtctcctactgctggctcgtcacaaactcagccagcgcccccccaccctcgttacctcctctttctctccctacctccctcgctcagcagctcccggtcgc

SEQ ID NO: 411851 - DNA, 201 bp, Homo sapiens
tctgtttgtgatttttttttgctgaagtcggcatatggaaaggatcttctcttaaactacaatccctgacttgaaaactacaatccctgacttgaaaaagsttaattgtttccattggtccctaacagtgactcttttgccaaaacaaaaataaactcactctaaaatgtaagttgtgatttccaaaaatcactgacacct

SEQ ID NO: 411852 - DNA, 201 bp, Homo sapiens
agattttcatccacctttgaggaaacaggcattgagagattaagcagcgtgtctgggatcaatcttacgccagagcccctgctttgagtcacaatgtaaawaaaataaaaaatatgactgttctcataatattccacaattaaggccgtttctaatggcccaccattatgcaaaacctagtaccaatttcgtcatattttt

SEQ ID NO: 411853 - DNA, 201 bp, Homo sapiens
ctcaaactcctaaccttcagtaatccacccacttcggcctcccaaagtgctgggattacaggagtgagccaccgtgcccggtctgcatttgtatatattaatatatgtccacacagaataaaattttattctgtggaatgctatcaaactctatgcagtatgtcacagtttggttttcagtgaacgatatgttttggagag

SEQ ID NO: 411854 - DNA, 201 bp, Homo sapiens
ttgacatttaggttgattccaaatcttggctattgtgagtagtgctgcaacaaatatgggagtgcagatgtctccttgatattttcctcttaattcactgwctaataaacatcacttcctaatgataaaggcaggtaaaaaccaaaataataaattaaaatttcattctattctaaatgcgggaccatataaaatgaacat

SEQ ID NO: 411855 - DNA, 201 bp, Homo sapiens
tcaaactcctaaccttcagtaatccacccacttcggcctcccaaagtgctgggattacaggagtgagccaccgtgcccggtctgcatttgtatatattaatatatgtccacacagaataaaattttattctgtggaatgctatcaaactctatgcagtatgtcacagtttggttttcagtgaacgatatgttttggagagc

SEQ ID NO: 411856 - DNA, 201 bp, Homo sapiens
ttacttaataaagtatattcagcttgttttgcacatcttactgtagtaatatgtttgtattctaaagagccagccagactcctctctggtttttcagttgrcaaattattctttttagtcagttgtattctcctgcatttggaacatctgcttatggcagaaaatactctagatactattctgttgtttatccacttctcc

SEQ ID NO: 411857 - DNA, 201 bp, Homo sapiens
gcagggctgtgcacctgccgcagttcatgcgtgtgcaccacctgaggacatgtgaggactccggctggccgtgggcaccgctacagcagtctgaggaagtrcgcagaaaagcgcgcgtgcctatgagcgtgtgcggcccactgcccacgtgcacctaggacttggcaacagcgcccgcagtagaaaggctagggaggggct

SEQ ID NO: 411858 - DNA, 201 bp, Homo sapiens
atgatatttgaagatttggcagaggaggtgtaggaggcttgtcttctgtgccagctccatcctgctgctcatgtgagtgatgatagtggggttggggtggmtctggtctgcactgattggaagtatgaggggtagtgggatggtgcccttgtgcgagtccaggctgggaggcccagagagcaggtaagagagatgtgagct

SEQ ID NO: 411859 - DNA, 201 bp, Homo sapiens
cctctcttctatcctctccccttctctgcttctctctgcctctgtcttacaaaatcactcaggatttattatcagctaaaaaaataaatattaaccatcchtcttttttgcccaattcacagtgaatattattggtaaaaaaataagccacacaaaataaactgacaagagctgaaagcacacagggtgaaatttggtatt

SEQ ID NO: 411860 - DNA, 201 bp, Homo sapiens
tgaggcaggaggatcacttgagcctaggaatttgaggctgcagtgagctctgattgtgccactgcattccagcctgggcgacagagcgagatcctatctcaaaaaaaaaaaatatatatatataaagaaatccatcaactcacacaaaaatgttgttgatgggactttgcattattcttataattaagaaaagcaaaatga

SEQ ID NO: 411861 - DNA, 201 bp, Homo sapiens
tgcctctgtcttacaaaatcactcaggatttattatcagctaaaaaaataaatattaaccatccatcttttttgcccaattcacagtgaatattattggtaaaaaaataagccacacaaaataaactgacaagagctgaaagcacacagggtgaaatttggtattgactaaaaatccatagatgactcaaatcttcttagc

SEQ ID NO: 411862 - DNA, 201 bp, Homo sapiens
ggatcacttgagcctaggaatttgaggctgcagtgagctctgattgtgccactgcattccagcctgggcgacagagcgagatcctatctcaaaaaaaaaawatatatatatataaagaaatccatcaactcacacaaaaatgttgttgatgggactttgcattattcttataattaagaaaagcaaaatgaaaattcagta

SEQ ID NO: 411863 - DNA, 201 bp, Homo sapiens
ctacaataaattcttcgtctctccgttgttatccatttatcctatggacaattactaggcacccaccaggtgtgggatgctatgccagataggaggcacagggctccctgccctcacaaagctcatgatttaatgctaccctttgcattgtccactgagatgggtctgtggttggcaagaggctgcagccccttagcaata

SEQ ID NO: 411864 - DNA, 201 bp, Homo sapiens
atcacttgagcctaggaatttgaggctgcagtgagctctgattgtgccactgcattccagcctgggcgacagagcgagatcctatctcaaaaaaaaaaaatatatatatataaagaaatccatcaactcacacaaaaatgttgttgatgggactttgcattattcttataattaagaaaagcaaaatgaaaattcagtaag

SEQ ID NO: 411865 - DNA, 201 bp, Homo sapiens
tatgccagataggaggcacagggctccctgccctcacaaagctcatgatttaatgctaccctttgcattgtccactgagatgggtctgtggttggcaagaggctgcagccccttagcaatactagatgcagtgaatctgtggggcaatagtccttcttttctttcccatgcatgtgtggaaatccagtgtgtatgaagtgg

SEQ ID NO: 411866 - DNA, 201 bp, Homo sapiens
ttttcatgtttctttgctgcttcctttcatcttgccaagttacatttagcaggatattcatctaattccttttttaaaattttaatgctccccattttttkggggggtgggggacaaaaagagccttttaggaaataagcatcaggaactaactaatcaaagtgaaactttctgggagacatctgacagccgcatgcctct

SEQ ID NO: 411867 - DNA, 201 bp, Homo sapiens
tcccccactccactgcaccattgcaggctgaattagggggcctcttctctgcgcctcttacattaccctgggtttcccgtgctcaggccatgcctaccacttttttttttttttttttttttgagatggagtttcactcttgtcacccaggctggagtgcaatggcatgatcttggctcactgcaaccttcacctcctggg

SEQ ID NO: 411868 - DNA, 201 bp, Homo sapiens
taattccttttttaaaattttaatgctccccatttttttggggggtgggggacaaaaagagccttttaggaaataagcatcaggaactaactaatcaaagygaaactttctgggagacatctgacagccgcatgcctctaatgaccttcaaaaagatcacgtgctccaggcaattacaggatttgggagaaaatagctcat

SEQ ID NO: 411869 - DNA, 201 bp, Homo sapiens
gcttattttctggggtatgcataggatttctaaggaaatgataacattccacattttgaactgcatggtgatttcaaggatatatacatatgtaaaaattyatcaagcattttattacacatacgttatacctcaataaaaataagtgtatcaaaaaagaatttaaaagtgctatgtgtattcacatggaaatatattcac

SEQ ID NO: 411870 - DNA, 201 bp, Homo sapiens
ttttaatgctccccatttttttggggggtgggggacaaaaagagccttttaggaaataagcatcaggaactaactaatcaaagtgaaactttctgggagasatctgacagccgcatgcctctaatgaccttcaaaaagatcacgtgctccaggcaattacaggatttgggagaaaatagctcattctgaatagccgaacct

SEQ ID NO: 411871 - DNA, 201 bp, Homo sapiens
atgcctaccacttttttttttttttttttttttgagatggagtttcactcttgtcacccaggctggagtgcaatggcatgatcttggctcactgcaacctycacctcctgggttcaagcaattctcctgtctcagcctcctgagtagctgagattacaggcacttgccatcacacccaaccaatttttgtatttttagtag

SEQ ID NO: 411872 - DNA, 201 bp, Homo sapiens
tcaggggactttgttggtcaagctcttgaatatgggtgcagctggaaaaataacctatttgtcaataggttaccagtttcacagctggtagtgcccagaakggcgctgaataaacttcagtgggatccctgctgcttggtgcttgaagttcatctgacgtgaagcctttgtgaaaagagtattcaggaacccagtagcaat

SEQ ID NO: 411873 - DNA, 201 bp, Homo sapiens
gcctcattttacccagctactatttaagatggagtgttctggttcacacgcctctgatatcattattatcattatcatcaccaccaccatcaccgtcatcrtcatcatcatcatgaccattgccatcatcctcattaccacgatcatcaccaccatcatcatggccatcaccaccaccctcctcctcctcttcatccttct

SEQ ID NO: 411874 - DNA, 201 bp, Homo sapiens
ttatgctctttaatgcaatatatgcaatatgcatatgaggcacatatatgcacatatttaatatgtgcaatatgaggcatataaccaacagaattatataytccctggcttttacaactgtagtggatcataaattgctacttagtccagtaatatggaaactgaagccacagaggggatatgacctcacctaaagatgca

SEQ ID NO: 411875 - DNA, 201 bp, Homo sapiens
caggggactttgttggtcaagctcttgaatatgggtgcagctggaaaaataacctatttgtcaataggttaccagtttcacagctggtagtgcccagaagkgcgctgaataaacttcagtgggatccctgctgcttggtgcttgaagttcatctgacgtgaagcctttgtgaaaagagtattcaggaacccagtagcaatc

SEQ ID NO: 411876 - DNA, 201 bp, Homo sapiens
tacttcatcaggttccctctgttccttttgtactgcaacttttgccagcaataattttaaagactcatctagattgttaacagattggagaggaccacaarccctgctctcatgttaataaggaaacttcctgcaatggactctagagttttaatagcaccattcagcataatgatgctcacagatcttggagtgggggag

SEQ ID NO: 411877 - DNA, 201 bp, Homo sapiens
ggggactttgttggtcaagctcttgaatatgggtgcagctggaaaaataacctatttgtcaataggttaccagtttcacagctggtagtgcccagaagggygctgaataaacttcagtgggatccctgctgcttggtgcttgaagttcatctgacgtgaagcctttgtgaaaagagtattcaggaacccagtagcaatctt

SEQ ID NO: 411878 - DNA, 201 bp, Homo sapiens
gaggtaaaattctagggcctccccagaaaactgtttcatgaatgaggaagctaagaaaaagggccactggctttaaagcccagtaggttaaataggagaayggagaaagttataaaatgattaattggtcaagttgggatgggaaccttaggttataatatcaagatttaaccttggcactatggacattttgagcaggag

SEQ ID NO: 411879 - DNA, 201 bp, Homo sapiens
tagattcaccactttgattcccccacacacccttttttaagagacgagaggctgcagtgaggagccacctgtagtcccagctacttgtggggactgaggcmagataattgcttgagcccataggtcaaggccacagcgagccatgttcatgccgctgcactccctggagtggctcactgcaggcctctacctcctgggctt

SEQ ID NO: 411880 - DNA, 201 bp, Homo sapiens
actgcacgctgaatctggctcatagatgcattttgtttcaccagtacagcatttttaaatgcttgaattttaatgtctttagacagcatgcattttcaaawtcactacagctgtccccactctgttatcccatatctagggtgattcatacatttatgttaatgatatggtttctgtgagtatttgagatcatggtgctca

SEQ ID NO: 411881 - DNA, 201 bp, Homo sapiens
ggaccatatgtttgcacgaggcttagggatttagagtgtggacatatatagtttctcattttatctctgccaaggattaataactcagtgatagcctgggraacctggcagctccaacggtatttgtttaaagaatctctattttcagatgaggaaataaaggatctgggagttgcagtaatttgtgcattgttcaaagct

SEQ ID NO: 411882 - DNA, 201 bp, Homo sapiens
gattcagtggtgctggaaggaaactcgggtatatgcacactgaaaagctcattagggtgattttgatgctaagttattgaattactagcactctacacaaytggaggacagaaaatacctatgtgaggttgtagtatttatggaagaaggaaaaggtgatatctagatcttgaaagataaaatactgacaaaataaacatt

SEQ ID NO: 411883 - DNA, 201 bp, Homo sapiens
ggttgtatggatgtgttcaaattgtagaaaattgagtggtataatttgtccactgtttttatgtattaaaaatttaaaaatgtgtgtttgtaagacctctytctgtgtcacacacacacacacacacacacacgcacacacacacacacccctatggatctctttccttcagtgttcaggagagacacactccccagacat

SEQ ID NO: 411884 - DNA, 201 bp, Homo sapiens
ttaactgagacaatcagaagcttcctttgcctttgtaggacttgctgagagctttatcctggcaaacggaagctaaatgtggccagcatgaaagtgatcgyaggagaagactatctcattgacctttgcactaaatgactccaccaactggaccatatgtttgcacgaggcttagggatttagagtgtggacatatatagt

SEQ ID NO: 411885 - DNA, 201 bp, Homo sapiens
tttcataggtatttgtgcatctattatgtaagcagccctgggctgggtacgagggccataaaggcaaacagaacacagtcccaccctcaatgagtccactrgggcagacagatgagtgtgcaggtctcacactagctagtgaggtagggaaaggagaggctacctgcccagttttatgggattagaggctgcttcccagaa

SEQ ID NO: 411886 - DNA, 201 bp, Homo sapiens
agttttgccatgttgcccgggctggtctcaaactcctggcctcaagtgatcctcctgccttgccttcaaagtgctgagattgcagatgtgagccaccgctyctggctaacttgttcatttcataggtatttgtgcatctattatgtaagcagccctgggctgggtacgagggccataaaggcaaacagaacacagtcccac

SEQ ID NO: 411887 - DNA, 201 bp, Homo sapiens
tcacccctggaaattgaaataaaatatgttgaaatgctcagttgatacactatgagagtaacagaaagcacatcagggcttaccagggctcacaagggcartcctcaacaggagaatgcaaattccccaggagtctctctggatcgttgctgagttacctccattatttccttttcttggcagacagcaggaaaataagtt

SEQ ID NO: 411888 - DNA, 201 bp, Homo sapiens
cccctgtcccttcaaagattaaaaaatatgtattataaagttcttctctgattgctctagcatctttccttcttcagttgtgaagtccttcatttgtagartcagttagttggatgttcacatatgttctttaatttttgtttgtgaacttattttcaaggcaactttatgatttcttatgccctgtatctgtgagggtgt

SEQ ID NO: 411889 - DNA, 201 bp, Homo sapiens
cccattttagagttgagacattcatccctgcattccacagtgatcatttcagcctcgttaaataactttaacatttggaaacaatatccaggactactgayagggatctaatcataattagcacctgtaatcccagcactttgggaagccgaggtgggtggatcacttgaggccaggagttcaagaccagcctgaccaacc

SEQ ID NO: 411890 - DNA, 201 bp, Homo sapiens
gaggaggatggatgtgatgatgatggaggatgatgatgacagaggaagggggagggaggtgggtggtggtggagtagttgttttccagtgtgaccaattcwgcttatgtgcacgtgagaatgctatccatctgaatcctcaggcttaccaggcttatttgatgtttttacttttcctctcacccctggaaattgaaataaa

SEQ ID NO: 411891 - DNA, 201 bp, Homo sapiens
ttttgtactgcaacttttgccagcaataattttaaagactcatctagattgttaacagattggagaggaccacaaaccctgctctcatgttaataaggaamcttcctgcaatggactctagagttttaatagcaccattcagcataatgatgctcacagatcttggagtgggggagccttggaagtcaatggagaactcac

SEQ ID NO: 411892 - DNA, 201 bp, Homo sapiens
tttggtctgtcgcagacattggagaagagggatcgctcctctccaacatcttctatagggagtggaggcagaaaggtggcatggaccccagtgtgtcagayggtgtctctgtcctcatcacaggcaacatcccacagttctcagacctgacctctgaacgtcctcctgcccagtgggagaaacacaaccctggtacctggg

SEQ ID NO: 411893 - DNA, 201 bp, Homo sapiens
gccaccacacctgtccagttatttcttatttaaatgattataacaaccttctaatgccctcctgcttttctattcactcatcctcctgtagatgctaaatwtttttttctgaaatataaatgtcatgttcctattaataacccattacttgttgataaagtccatattgcttaactcactgcataagtctctttgttcatg

SEQ ID NO: 411894 - DNA, 201 bp, Homo sapiens
agaaatggacttgacttggtggaaataataaccacaaaagaaaactcaaaatggcagaagttataaattagtaaaatttgttgtggtccaaatcctgatcratgaagcaaatatttataaaatttaaacacaaaagaattgaccccagtaaaaatgtttccaaaaaagttggaaacaatttaactacgctatgcaagacat

SEQ ID NO: 411895 - DNA, 201 bp, Homo sapiens
tgtgatgttctgccaaagttggaaactaagccatgttatatagcatggaataaaacccctctgacaagactttattgtctgtaggatgtgactcttcaggycccttagatagggctttgggcaagagaagaaaatggtcggagtttggtccttatattaatttcatttgcccctcacaatgactaaatggcatggagttat

SEQ ID NO: 411896 - DNA, 201 bp, Homo sapiens
actggctttaaagcccagtaggttaaataggagaacggagaaagttataaaatgattaattggtcaagttgggatgggaaccttaggttataatatcaagmtttaaccttggcactatggacattttgagcaggagaattctttgctgtgggaggggctgttctgtgcattgtaagatatatagcaacatccctggactct

SEQ ID NO: 411897 - DNA, 201 bp, Homo sapiens
tgtagatgctaaatttttttttctgaaatataaatgtcatgttcctattaataacccattacttgttgataaagtccatattgcttaactcactgcataastctctttgttcatggccttctaggcttgtctctctccactctgacctatgtttaaatgacttaaaacggttgtcacttcttgagacaccctcatttcttg

SEQ ID NO: 411898 - DNA, 201 bp, Homo sapiens
catttcctggtggtaaaaatctcccccagttgaatgtaaatttgttcagccattgtggaaagcagtgtgatgattcctaaaagaacttaaaacagaattaycaatcaacccagcagtctcattatggagtatatccccaaaggaatataaataattatataaagatatatgcatacatatgtattctgcagccctattcac

SEQ ID NO: 411899 - DNA, 201 bp, Homo sapiens
ttatctagtgttctaaattgaatctccatgtacataattttataatattttataacttttaagtgaaaattcttaaagcaggcatttgctccctttacattatatatatatatatttaattatactttaagttttagggtacacgtgcacaacgtgcaggtttattacatatgtgtacatgtgccatgttggtgtgctgta

SEQ ID NO: 411900 - DNA, 201 bp, Homo sapiens
aaaatctcccccagttgaatgtaaatttgttcagccattgtggaaagcagtgtgatgattcctaaaagaacttaaaacagaattatcaatcaacccagcartctcattatggagtatatccccaaaggaatataaataattatataaagatatatgcatacatatgtattctgcagccctattcacaatagcaaatacatg

SEQ ID NO: 411901 - DNA, 201 bp, Homo sapiens
tttgtcaaaaatcaattgacagtgtcagagcttatttctaaacgttcagttttgttccagtgatttgtctctttcccttaataccacactctcttgatttytgtagctttgtaatatgtttgaaatgagggtaatgtaagtccttcaccattgtttttctatttcaaaattattttgcctgggtctattttttttttggct

SEQ ID NO: 411902 - DNA, 201 bp, Homo sapiens
aaaatctgaatttgattgaatgcatttatgtgtttcgagcatttgttatgttctgagcattgcacacatactttacttatataataacactttattcccarcagccctctaagggcaaatattgttggctccatttttctttcttgtttttttttttgagatggagttttgctcttgttgcccaggctggagtgcagcagt

SEQ ID NO: 411903 - DNA, 201 bp, Homo sapiens
tatctagtgttctaaattgaatctccatgtacataattttataatattttataacttttaagtgaaaattcttaaagcaggcatttgctccctttacattatatatatatatatttaattatactttaagttttagggtacacgtgcacaacgtgcaggtttattacatatgtgtacatgtgccatgttggtgtgctgtac

SEQ ID NO: 411904 - DNA, 201 bp, Homo sapiens
ggagtgcaaaagttttaaattttaatggagatgaatttgcctattttttcatttatgtctagtaaaagaataatgaatggttttgtgtctaagagctttcygcttaacccaaggacatgatggttttctctaatttttttttcaaggagccttatagttttagttgttatatttaggtctaagatctattttgagttaatt

SEQ ID NO: 411905 - DNA, 201 bp, Homo sapiens
ggctgtttttgtgctacaaaggcagagttgagtagttgtgatagagaccgtatggcctgtagtgctgaaaatatttactaattggccgtttaccataaaaaaaaaaaaaaaaagattagtgacctctggcttaaacaataaaagtgacatgttattttgaaacaattccaacaattggaagaatttaactaaacatgactg

SEQ ID NO: 411906 - DNA, 201 bp, Homo sapiens
cttggactgtaagaagactccttttctagaacagaaaagatgaaaagtatgtgcatgtaattatggtgtttatgccactctaaaaaaattattcctaaatrttgtttgggtagaattatttagagaatgaggctagaaccattccaatcccaaagactcctcatttgactaaactcttctattctttgttgaaaggactag

SEQ ID NO: 411907 - DNA, 201 bp, Homo sapiens
gaattgggccagttgtgcaatcatgcaatctactgcaaaaggttttttgtttttttttttcactttgttgcccgggtattccctaaaacacccagagactstagctcttaaatataaggctgattaaagctgatcgatgccacctgactataatactgtcacttgagtgaaggtgccaatgctacgcagcaaatgtaggag

SEQ ID NO: 411908 - DNA, 201 bp, Homo sapiens
tgctcttccactcatccctggccactgtctcaccccatctggtgccttagacttgggaaaagggagaggaggtcagaggagcacctccatacctggggagsgggaggatgtcatcaaaggaagagctgagagctctcctaagtcataacccagccctgcacaccaccctattaccctctatggaaagaaaaacagggtctt

SEQ ID NO: 411909 - DNA, 201 bp, Homo sapiens
gaactgagcctgtaactctcacctttcctcagtccagcactttttaaaaattacagcctcctgagccctcaccattttgtttgcaagtgtcttgttgattmactccattacagatttaggacattataaccagggacccagtcattttccttattggtatctcctctgtacacgtggcttagtgctgagcagagagtaact

SEQ ID NO: 411910 - DNA, 201 bp, Homo sapiens
ggtcagacagaatgagcacagagagaagagctatgattccaggaaggtctcaggaagaaaggcagagggcatgagagagcagtcttcaaacatacgaaggrctgtcctgtggaggagaaacaagagccactagttactgtcccgcagggaagagtaggacctgtgggcaaaagctataagggagagagaaattagctgtgc

SEQ ID NO: 411911 - DNA, 201 bp, Homo sapiens
tccaagggtctgggttcctcttttaaaaaatgctttctgggccaggcacagtggctcatgcctataatcccagcactttgggaggttgaggcgggcagatmactggaggtaaggagtttgagaccagcctggccaacgtggtgaaaccctgtctctactaaaaatacaaaaatcagccaggcattgtggtgggtgcctgta

SEQ ID NO: 411912 - DNA, 201 bp, Homo sapiens
atccttttaaaacttttatattaagttcgagggttcatgtgcaagtttgttatacaggtaaactgatatcccaagggtttgtagtacagattatttcagcrcccaggtattaagcctagtacccattagttatttttcctgtctgtggaataaggttctcttgaaaactctggaggactaagaaaaataaggctgtggaaa

SEQ ID NO: 411913 - DNA, 201 bp, Homo sapiens
catgttgaaaaagcagagttccttctatttgggagtgaaggagggtcctgaaggtatcttctaggaagtagcatttgaatctagcctttgaagtgagttamctttattctgtttctgactccagtaaacaagccagcaaatcaaacccttagagatggcaagactaccttaacagagcaggtgcagatctcttctgacccg

SEQ ID NO: 411914 - DNA, 201 bp, Homo sapiens
attttggaagtggagctaaacccaaggctgactccaggactacaactatttctacttggagcccttgagcttatttttccagtacataggtctcagctgaycaatctgaaaatggagagtagggacatagggccttggaggttcctacttattttaatcagttccatagcctgaccctggtccagtgagcatcagatttgg

SEQ ID NO: 411915 - DNA, 201 bp, Homo sapiens
ggagccccatgttgggcagaagttgccaggccccatgtccccctcatgccctgtcactggctgaggactgctctggcagaatgtgacctcagctcaaaagyggaagtgaatcctgagggctctgaagccagaggatgtcagtaacctgcacccccagtggctgaatgacacattcttttttgaaggcagatcggatccaag

SEQ ID NO: 411916 - DNA, 201 bp, Homo sapiens
ccatgaaaggagccccatgttgggcagaagttgccaggccccatgtccccctcatgccctgtcactggctgaggactgctctggcagaatgtgacctcagytcaaaagtggaagtgaatcctgagggctctgaagccagaggatgtcagtaacctgcacccccagtggctgaatgacacattcttttttgaaggcagatcg

SEQ ID NO: 411917 - DNA, 201 bp, Homo sapiens
tcagaccaccatgcagaccagacagtctctgccaacctaacagaaagctttggagaagaggttgcccatgaaaggagccccatgttgggcagaagttgccrggccccatgtccccctcatgccctgtcactggctgaggactgctctggcagaatgtgacctcagctcaaaagtggaagtgaatcctgagggctctgaagc

SEQ ID NO: 411918 - DNA, 201 bp, Homo sapiens
acttaatatgtgagagataattttatgatttaaaaaaacacctggtgttagaggaatcagaccagaaaaatgaacattttatttttattctgttttctttkttaagaactgtgagtcctggtttgaaatccccacccctattcatctctccatcattgagaatttttgatgagtgattagtctatgtgctaggtgctgtag

SEQ ID NO: 411919 - DNA, 201 bp, Homo sapiens
ccatccatgccagttatcacttgggtttcgttttctatgttattcctatgcaagcctcatgtcttctgccagagtgtaagtcgtttgagggcagatttttwaaaaaactgtttatctgtatatgtgtatttgacatgacaaatgcttctctcctccgcagacatataaaaataatgccttttcattgtagagcacttagga

SEQ ID NO: 411920 - DNA, 201 bp, Homo sapiens
acattttggaagtggagctaaacccaaggctgactccaggactacaactatttctacttggagcccttgagcttatttttccagtacataggtctcagctkatcaatctgaaaatggagagtagggacatagggccttggaggttcctacttattttaatcagttccatagcctgaccctggtccagtgagcatcagattt

SEQ ID NO: 411921 - DNA, 201 bp, Homo sapiens
ccatggtgactggctcattgattagcatgaatcatagttaagaacgatgagatgggagattttattggagggcttctgagaaccttctaaagatacaagarcatgcatggaagcacttgtggaatgttggcaggttcccatgttgtgttcacgatggggcaccagccataagatagtttcagcagagggtatgtagggcag

SEQ ID NO: 411922 - DNA, 201 bp, Homo sapiens
ttagaattttgcctactgtggctggtaatccaaaccaaatattcttcctgtggattaagactatcactttgggaacatcttagaattctgcctgctgtggstggtaatccaaatcaaatattcttcctgatctttgtgttaagactatcacttttggaacagccattttccaaagctctctcataattccatcgtaggcag

SEQ ID NO: 411923 - DNA, 201 bp, Homo sapiens
aaactgattgcctcgtattcgcttcccatgcatcaagagctagtttgagttctactgtccataattgtcagttgctacacactcactcagcagcaatatgscagatttttctgctagttaatgcttaaaagtttattccattttacaaagtactgatgaatttcgacaagaataaaaggccttatggtttccagtaggaaa

SEQ ID NO: 411924 - DNA, 201 bp, Homo sapiens
agccagatatttttttctctgtttcctttttttttttttttttttttggagctgctccaccccctggtatggtgcagcttctcctggggctcctctgtaaytttacagcagcttctgagctagtgaagaaggcgggatttgctcacttgcagttaagtctggccagacagctgttagttgttgccacaaacatcttatgtg

SEQ ID NO: 411925 - DNA, 201 bp, Homo sapiens
gggatggctggctcaaatggtatttctagttctagatccctgaggaatcgccacactgacttccacaatggttgaactagtttacagtcccaccaacagtrtaagtgttcctatttctccacatcctctgcagcacctgttgtttcctgactttttaatgattgccattctaactggtgtgagatggtatctcattgtggt

SEQ ID NO: 411926 - DNA, 201 bp, Homo sapiens
tgtctccggtcatgtgacttagctgcctggactcttctgttctatgcaggaacagagctagttttcatttactgcaggaaagaccagattggcaggttgattttttttttttctttctcatttgagcaaggcactgggaacactgagggtgataaagggaaggcttagttttgcaatctgtgcttatatcactgagctccc

SEQ ID NO: 411927 - DNA, 201 bp, Homo sapiens
tcttagctcctaatcctcacttcatccttacctaccttctacctctctgtgtgtcaactctattgtgtttctatgattacatttttaaaaatatttatttsttttgaataggcaatacccacatgggattacaaaaattaaatcagcatctgtatgtgtctagcaagtattttttcttctaagcttccttcctggaggaat

SEQ ID NO: 411928 - DNA, 201 bp, Homo sapiens
ttatattctaattccttgaccttgtgagtatgttaccttacatgacaaaaggggctttgccaatgtgattaagttaagcatcttgatatggggagattttyctgtattatccaagtggacccaacaatataatcacaagtgtcctcatcagggaaagacagggagattctactaccagggaagatgacagtttgatgacca

SEQ ID NO: 411929 - DNA, 201 bp, Homo sapiens
atgtgatggtggtctgctgcgctcatcaacctgtcacctacattaggtgtttctcctaatgctatccctcccctagcccccaacccctgacaggcccagtrtgtgatgttcccctttctgtgtccatgtgttctaattgttcaactcccacttatgagtgagaacatgcagtgtttggttttctgttcttgtgttagtttg

SEQ ID NO: 411930 - DNA, 201 bp, Homo sapiens
tctattttcatactgctatgaagaaatacccaagactgggtaatttacaaagaaaaagaggtttaatggactcacatttccacatggctggggaggcctcwcaatcatggtggaaggtaaagcaggaacaaaggcatgtcttacatggtggcaggcaagagagcatgtgcaagggaactgccctttataaaaccatcagat

SEQ ID NO: 411931 - DNA, 201 bp, Homo sapiens
caagagagaaaggggatcagtgccacactcttttaaacaaccaaatctcatgtgaactaagagcgagagctcactcattaccagggttatggtgctaggcygttcatgagggatctgcccccatgatctaatggcctcccgccaggccctacctccaacactggaggtgacatttcaacatgagtttggagggaacaaaca

SEQ ID NO: 411932 - DNA, 201 bp, Homo sapiens
acctctgcctctagggttcaaatgattcttgggcctcagcctcccgaggagtagctgggactacagacgtgcaccaccatacctggctaattttttggggttttttttttgtatttttggtagagatgaggttttgccatgtttgccaggttggtcttgaactcctgacctcaagtgatccatccaccttggcctcccaaa

SEQ ID NO: 411933 - DNA, 201 bp, Homo sapiens
cagttttacctgattgttttgtgggaaaatgtccattttttcctcttatggtaagtgactaaaactatttctaaaaattattaaatgtgggtaggttctgraagaaaatgcaaagtttttaggtaaagcacaaaagggcagaaaaaatgtcatgcttcctctgactctgcagttagaggaacagaggtggggagtttgaga

SEQ ID NO: 411934 - DNA, 201 bp, Homo sapiens
aaaatagaggtaactctaatcataagcagagataactctcctatactcaccatccagcttcagcatttatcaactcatggacaatcttaattcattttatygccacccacagtagattattttggagcaaattcccaacatcctatcatttcatctctatacttttcaatatgcgtctctaaagataagagctcctggggg

SEQ ID NO: 411935 - DNA, 201 bp, Homo sapiens
ggcttctggtgaggcctcaggaggcttccaatcatggtggaaggtgaaaggggggtagcatatcgcatggtgaaagacagagcaagagagaaaggggatcrgtgccacactcttttaaacaaccaaatctcatgtgaactaagagcgagagctcactcattaccagggttatggtgctaggctgttcatgagggatctgcc

SEQ ID NO: 411936 - DNA, 201 bp, Homo sapiens
gagcagggcagcctcctccccggggccagggacaggggaatggcctaaggagccaggacccaagggtagcccaggaccggggaagggggcagagacctccycttggcctaggtcaggagctcagaagtgccacatggctgagggggcagcggcccgggaagagccagaggcagagccaggaaagcaccatttcctgggggg

SEQ ID NO: 411937 - DNA, 201 bp, Homo sapiens
tccccaagtgtgttgtttctttcagtgatggtgattcagaggctgtgatacatcggcttagctgttttgggtttcagctttctcatgactagatgtatgtytttggacaagtttacattttcccatatttactttctttgtccttaaaaaaaaagttgctgttgctgctgatagtatctattcctcatagttgcgagtggg

SEQ ID NO: 411938 - DNA, 201 bp, Homo sapiens
tgaggttttgccatgtttgccaggttggtcttgaactcctgacctcaagtgatccatccaccttggcctcccaaagcgctgggattacaggcgtgagccaccgccaccggccttattttatcttattttttagatatgagagtttatcattattatggcaggaacgggtagtgttggaagcaagactgagaaggagataat

SEQ ID NO: 411939 - DNA, 201 bp, Homo sapiens
tccccacttcatgctgccatatcgtggttcctaaagccaggtctggggtacttgctggggtggaatttagaagctagaaacgaacttgctcaagtctacawcccatccacagttcacatgcccttggtccacgcccacttgtgctgtgtgctcctgttctcttggtttggggagaccatatcccgcttgtattgatgactt

SEQ ID NO: 411940 - DNA, 201 bp, Homo sapiens
agcacaccagcatggcacatgtatacatatgtaactaacctgcacattgtgcacatgtaccctaaaacttaaagtataataataataaaattaaaaaaaawtttattttttttgtgggtacatagtaggtgtatatatttatggggtacatgagatgttttaatacaggcatgcaatgtgaaataatcacatcatggaaaa

SEQ ID NO: 411941 - DNA, 201 bp, Homo sapiens
gataggtattgcttcagctgcctaaacccatatctccctgtacccccaaaacactcaagagccatagccataaaacttcaagaagatgaaatattttgggrgttagtaatacccttgatggttagagttatatgtggctgagattcttcttgtatctattctggtctcatttaagatggctgaaatgattgatcactgccc

SEQ ID NO: 411942 - DNA, 201 bp, Homo sapiens
catgtctttcgaagcaacatggagggaacttgacgtccttatcttttttgtttttaattattatactttaagttctgggatacatgtgcagaacgtgcagktttgttacataggtatacatgtgccatggtggtttgctgcacccatcaacccatcatctaggttttaagccccgcatgcattaggcatttgtcctaatgc

SEQ ID NO: 411943 - DNA, 201 bp, Homo sapiens
ttaatatctgaaagtctgtagtaatgcaccagactttatttctgatagtctcttttcttcttgatcagtctacctaggtttatcaattttgtttttttttktttttttaaagagaatcagctttgggtttcattagttttctctgttatttcttaattagcttctcagcctaaatgttttctcagaaaggatgtttcctga

SEQ ID NO: 411944 - DNA, 201 bp, Homo sapiens
tgcctactctcgttttcacagtcccttcacaaatattgtatcttcggttatgctcatgtgtgagttctgtattttaagaaggacattgataaactgagctygttaaaaggaacatgactaagggaggtacaggctgctggaagtggttcctgaataacatcaacaaaaggataaatgtttgcatttctgagagtggagaga

SEQ ID NO: 411945 - DNA, 201 bp, Homo sapiens
ttaattattatactttaagttctgggatacatgtgcagaacgtgcaggtttgttacataggtatacatgtgccatggtggtttgctgcacccatcaacccrtcatctaggttttaagccccgcatgcattaggcatttgtcctaatgctatccctccccttgcccactaccccctgacaggccctggtgtgtgatcttccc

SEQ ID NO: 411946 - DNA, 201 bp, Homo sapiens
ctgtaagtactcctcatgcaactacctgcagtggatttaaagtcagctcagggcagtttcaacaccagagttggaggaaagaggttgtgtgtacattgtcytctggggactgctgctgtttatgccttgtggtttcctttgggggagacagatccaccctgctttcctcatccatcttcctacatggatatatcttgttat

SEQ ID NO: 411947 - DNA, 201 bp, Homo sapiens
tttgcctctgcctactctcgttttcacagtcccttcacaaatattgtatcttcggttatgctcatgtgtgagttctgtattttaagaaggacattgataamctgagcttgttaaaaggaacatgactaagggaggtacaggctgctggaagtggttcctgaataacatcaacaaaaggataaatgtttgcatttctgagag

SEQ ID NO: 411948 - DNA, 201 bp, Homo sapiens
aaggagacaggtgaaaaaaaaaaatgccaatgtaagaacatagttgagactgttgagtcagtatctagaggcagcattcattttccatcaaccgtgtgtgkgtgtgtgtgtgtgtgtgtgtgtgtgtgtgcgcgcgcgcgcgcgcgtgtagagagagagattcagggggtgcgtgtgcaggtttgttacatagacatatta

SEQ ID NO: 411949 - DNA, 201 bp, Homo sapiens
tgagcgaggtggttcacacctgtaatcctagcactttgggaggccaaggcgggtggatcacctgaggtcaggagttcaagaccagcctggccaacatgctkaaaccccatctctacaaaaatacaaaaatcagctggatgtggtggcaggcccctgtaatcccagctactcaggaggctgaggcagggagaattgcatgaa

SEQ ID NO: 411950 - DNA, 201 bp, Homo sapiens
cttggctatttcagatggggaagtacgcatgcctcattttatccaagtttctcacagttctataagtcttttttcacacacagttccatacacaaaaggtrgctttgcaaaaaacttcttttaacatagctggcaggctatactgtacatatatctatacacatgtatgcatgtatgtgcatatacatatacctttgcata

SEQ ID NO: 411951 - DNA, 201 bp, Homo sapiens
agggcatggcaccaccatcctcccagatgcccaggctcaacttcttgctgccaccatttccctcacacccctcaccctgtgactacaccttctacatagtrttcatatccatccacttttctcttttctctgctggccagaatcctctaatcttttaccttgaaaggttcaataacagatgaatgaacagatgacagaatg

SEQ ID NO: 411952 - DNA, 201 bp, Homo sapiens
cagttccatacacaaaaggtggctttgcaaaaaacttcttttaacatagctggcaggctatactgtacatatatctatacacatgtatgcatgtatgtgcwtatacatatacctttgcatatatatgtttatgcatacattttattttgctttatttagaattattatttttggagatagagtcttgccttgtcaccgagg

SEQ ID NO: 411953 - DNA, 201 bp, Homo sapiens
attccttcttcaaactggtcctcctccagggcatggcaccaccatcctcccagatgcccaggctcaacttcttgctgccaccatttccctcacacccctcrccctgtgactacaccttctacatagtgttcatatccatccacttttctcttttctctgctggccagaatcctctaatcttttaccttgaaaggttcaata

SEQ ID NO: 411954 - DNA, 201 bp, Homo sapiens
ttctagtagtatttattggactcctatgatattccttcttcaaactggtcctcctccagggcatggcaccaccatcctcccagatgcccaggctcaacttsttgctgccaccatttccctcacacccctcaccctgtgactacaccttctacatagtgttcatatccatccacttttctcttttctctgctggccagaatc

SEQ ID NO: 411955 - DNA, 201 bp, Homo sapiens
aggcatttgtttggcaggattcctgcccactaagagcttaccatgagtgtcatggtgggaatgagctgggtatttttagagcttggcagcctagcactgcsgcttgctcttccccgaggtctgtggattagcctaggggtagcatatgcctacgctttgcttgcctggtcctggtacatggtcctgtgtactgttaagaaa

SEQ ID NO: 411956 - DNA, 201 bp, Homo sapiens
ggatcatccagctaggtaggcatttgtttggcaggattcctgcccactaagagcttaccatgagtgtcatggtgggaatgagctgggtatttttagagctyggcagcctagcactgccgcttgctcttccccgaggtctgtggattagcctaggggtagcatatgcctacgctttgcttgcctggtcctggtacatggtcc

SEQ ID NO: 411957 - DNA, 201 bp, Homo sapiens
tgcatacatctgtgataccatcaccaaaatcaaggagtactgaatatatctttaacctccagggtatgtgattaatgtatatttctcctcggggatcatcrgcttcgtaggggcaggaactgtattagttttcactcaccgttttgtccctattgattactacagtagttgacaaagtacaactaacattttaccgagcac

SEQ ID NO: 411958 - DNA, 201 bp, Homo sapiens
tctcaaccctctccgtgaaactttcccagcccccttttgattccctttcatgggtaatagtgagaggcagcacacacagggaaccaggacagtaaacaacyttcttacccttttccaagatttcttcccaggagagacacagtaaaatagagcaggtgaggcaatgcggacgtgtgactgcatgatccattacctgaaata

SEQ ID NO: 411959 - DNA, 201 bp, Homo sapiens
cttggaaaccagattctcccccacacaacacccccatcagtcgcttctgcaccatgctggtccagggatgtacatgtgacccattaggccagtgtctcttyttaaaatttcttgtagcctagttctcttcttcttcttctttttttttttttttttttcactttttagcatctctggatgttaatggaatatgaagcaagt

SEQ ID NO: 411960 - DNA, 201 bp, Homo sapiens
tgatgcatgttgctagatgcaattttttcaaatgattattttatttgattcatgcttgtaacctacatacttaccagtgccccatatattctagcctcaamactttgtaaattcagagaaacacagagcttttataaaaataaattttcgttttacttttgtcttttcaataaaattcatgggcatctaatttataatgca

SEQ ID NO: 411961 - DNA, 201 bp, Homo sapiens
gttttgtgaccatcgctctgaaatttctccttcattttcctttggattgaaaaatagcagttaatgtgagtaataaaaaatgttatactcatgtttgttartttgtggaattgcacaagcttacaaatataaacagcagttgtctgagagaaagcaggagagaaatcaacttttaagggtacattggcccagaatataagt

SEQ ID NO: 411962 - DNA, 201 bp, Homo sapiens
aacccagataagtctaacctcatagccctcatcacattcttcactatgatatcatggtatcatgatttagttatccagtctgcataatggtaggaatttasgagttaattttcttttatttaaaaaaattttgtgggtacatagtaggtatatatatttatggggtacatgagatgttttgacacaggcgtgcagtgtgaa

SEQ ID NO: 411963 - DNA, 201 bp, Homo sapiens
gaggcggccgagatgctcgtgcgcgcagcgcgccccactgcatcctcgaccttctcgggctacaggtacgtcccagagggagatcagggctccttgggccrgggaggagggagactcgaccggagggagagcgggagagggatcaggctagagagggagagggaaagcgggagggagcccagcggcgaagtgcaggagggg

SEQ ID NO: 411964 - DNA, 201 bp, Homo sapiens
aaccgtataaaacaatgtgagagggcctgtctctcttcttccaccctcaccatcctgtatgctttagtgttatatgcattgcatctgtacattaatacccyaagaggcaatgtaaggatttgtgctttaaatagtcacatgcatatgtatttttttaattaaaagaagagtcttttatgcttatccagatatttatgcttc

SEQ ID NO: 411965 - DNA, 201 bp, Homo sapiens
ggctagataattatttgtgaatagggagctttcctgtgcattgtaggatgtttagcagcaaccctggtctttacccactgggtgccagtcataccctgccycctagctgtgacagctaaatgcatctccaggcatagcgaaatatcccctggtggagcacagtcattgcatgttgagaaccactggtctagggtatctgga

SEQ ID NO: 411966 - DNA, 201 bp, Homo sapiens
cctttagtttcgcttctctttctttttctgagtataaaaccgtataaaacaatgtgagagggcctgtctctcttcttccaccctcaccatcctgtatgctwtagtgttatatgcattgcatctgtacattaataccccaagaggcaatgtaaggatttgtgctttaaatagtcacatgcatatgtatttttttaattaaaa

SEQ ID NO: 411967 - DNA, 201 bp, Homo sapiens
tctggatggctgtggattgaggtatcactgagtaagtttgggtggtggatgacaaggtcagttttagagtctgctgagcttaactggcttatggggcaccrtgaacatccagttctttaaatatcaaagcccagtggaatgatctggatttggaaggcattggcatatatttaaaaccatgaaggatggataaaatgtcca

SEQ ID NO: 411968 - DNA, 201 bp, Homo sapiens
gtagaaagttttgtgcagctattaggttggggcaaaagtaatcgtgggttttgccatttaaaaaaaacagcgaaaactgcaattagtttcacacaagcctratagttgcagaaagaaatttggagtgtgagaatgcttagtctgacttctacatttgaggatcgagggggctccatgataaggaatgcaggggcctctagg

SEQ ID NO: 411969 - DNA, 201 bp, Homo sapiens
agttttagagtctgctgagcttaactggcttatggggcaccatgaacatccagttctttaaatatcaaagcccagtggaatgatctggatttggaaggcaytggcatatatttaaaaccatgaaggatggataaaatgtccaagtaaatgatgtacccagtgaggaacaatggatgcaacacagagccttggggaacacta

SEQ ID NO: 411970 - DNA, 201 bp, Homo sapiens
ctgttttgtgcaacaggatggccattgactccctgtgtctactgagcatttgaagtgtggctagtgtgacctgaaatgtgctatatgtgttaaattcactstgaatttcagacttgctgtgaaaaaaaagaatgtgaaatatctcattaataataatttttatattgattgcacattaaaatgataatatagtgagttgaa

SEQ ID NO: 411971 - DNA, 201 bp, Homo sapiens
ttttgtgcaacaggatggccattgactccctgtgtctactgagcatttgaagtgtggctagtgtgacctgaaatgtgctatatgtgttaaattcactctgratttcagacttgctgtgaaaaaaaagaatgtgaaatatctcattaataataatttttatattgattgcacattaaaatgataatatagtgagttgaataa

SEQ ID NO: 411972 - DNA, 201 bp, Homo sapiens
caacaggatggccattgactccctgtgtctactgagcatttgaagtgtggctagtgtgacctgaaatgtgctatatgtgttaaattcactctgaatttcaracttgctgtgaaaaaaaagaatgtgaaatatctcattaataataatttttatattgattgcacattaaaatgataatatagtgagttgaataagatacat

SEQ ID NO: 411973 - DNA, 201 bp, Homo sapiens
acatttaagttaaattttaggtttctgagaagtgtcattgttccttgtggcccatcattatggttcagctgttgagatttagaatgatcactcctatcccmattttgcatggttttgcctgatgttcactgatttaatccacgctttattcctcagataatgagcagtgtagaactgtgattaagggcctcaactctggag

SEQ ID NO: 411974 - DNA, 201 bp, Homo sapiens
caaagctcatgatttaatgctaccctttgcattgtccactgagatgggtctgtggttggcaagaggctgcagccccttagcaatactagatgcagtgaatytgtggggcaatagtccttcttttctttcccatgcatgtgtggaaatccagtgtgtatgaagtggagatctgaccccatcttgtttgagctgtgtgctgat

SEQ ID NO: 411975 - DNA, 201 bp, Homo sapiens
taatttcaactttttctttttactttaatatatgtggtttgagggcagggcgcagtggctcacacctgtaattaccagcactttggaaggctgaggcgggyggatcacctgaggttgggagtttgagaccagcctgaccaacatggagaaaccccatctctactaaaattacaaaattagctgggtgtggtggtgcccacc

SEQ ID NO: 411976 - DNA, 201 bp, Homo sapiens
cacacctagagagttgggcacatcaggaaacttttgtcaatagtttagtttctggcagagtctcatggagaatcaagttactcggtgtgtgtgtgtgtgcrcgcatgcatgcatgagtgtgtgtccacatgtgagtgtgtctgtgagagaaggagaacatactggtatgtgtgtgtttgtagctgaaggagtgtcatatcg

SEQ ID NO: 411977 - DNA, 201 bp, Homo sapiens
aaccccatctctactaaaattacaaaattagctgggtgtggtggtgcccacctataatcccagctacttgggagactgaagcaggagactctcttgaaccygggagtcaggggttgcagtgagccgagatcacgccaccgcactcccgcctgggtaacaagagcaaaactctgtcaaaaaaataaatacgaccaggtatgg

SEQ ID NO: 411978 - DNA, 201 bp, Homo sapiens
atttcactgtctttgcctcctaatgcattaataattcatactgttttaaaatttttttaatttctatttcaatagtttttggggtacaggtgcttttggtyacagggataagttgtttagtggtcatttctgagattttggtgcacccatcacctaagactactaactattgtagtcttttatccctcaccccctcccaaa

SEQ ID NO: 411979 - DNA, 201 bp, Homo sapiens
agaagcacacctagagagttgggcacatcaggaaacttttgtcaatagtttagtttctggcagagtctcatggagaatcaagttactcggtgtgtgtgtgygtgcgcgcatgcatgcatgagtgtgtgtccacatgtgagtgtgtctgtgagagaaggagaacatactggtatgtgtgtgtttgtagctgaaggagtgtca

SEQ ID NO: 411980 - DNA, 201 bp, Homo sapiens
ctatttcaatagtttttggggtacaggtgcttttggttacagggataagttgtttagtggtcatttctgagattttggtgcacccatcacctaagactacyaactattgtagtcttttatccctcaccccctcccaaactttccctacccctaagtccccaaagtccattatgtaattttttttttgagatggagtctcgc

SEQ ID NO: 411981 - DNA, 201 bp, Homo sapiens
caatgtaagaacatagttgagactgttgagtcagtatctagaggcagcattcattttccatcaaccgtgtgtgtgtgtgtgtgtgtgtgtgtgtgtgtgtgtgcgcgcgcgcgcgcgcgtgtagagagagagattcagggggtgcgtgtgcaggtttgttacatagacatattatgtaatgctgaagtttgagcctctaat

SEQ ID NO: 411982 - DNA, 201 bp, Homo sapiens
ttttctgtgtctgcagaaagacacagtgcaaactgttaaatttggaggtttttggcagcttcattaaagggcaaggattttcctctttgggggtgggcttyatgttttaatggtcgtggtcagcattgctgggtgaggatccttaggctttttgtcaggggttcagggccttctggcttccccaggcttctccaggcttct

SEQ ID NO: 411983 - DNA, 201 bp, Homo sapiens
aatgtaagaacatagttgagactgttgagtcagtatctagaggcagcattcattttccatcaaccgtgtgtgtgtgtgtgtgtgtgtgtgtgtgtgtgtgtgcgcgcgcgcgcgcgcgtgtagagagagagattcagggggtgcgtgtgcaggtttgttacatagacatattatgtaatgctgaagtttgagcctctaatg

SEQ ID NO: 411984 - DNA, 201 bp, Homo sapiens
ccttaagcgctggaattacaagcatgaaccaccatgcccagccttatttagaatttcatagggaattcttatgttattaaaactaagggttataagggctkccaaatcgctgtcatatggctggtctcaaatgcatttaaacaccccctcccccattgattttttttttttacatggttttcttatgtttgaaaatttgta

SEQ ID NO: 411985 - DNA, 201 bp, Homo sapiens
tgtaagaacatagttgagactgttgagtcagtatctagaggcagcattcattttccatcaaccgtgtgtgtgtgtgtgtgtgtgtgtgtgtgtgtgtgtgygcgcgcgcgcgcgcgtgtagagagagagattcagggggtgcgtgtgcaggtttgttacatagacatattatgtaatgctgaagtttgagcctctaatgtt

SEQ ID NO: 411986 - DNA, 201 bp, Homo sapiens
tatactgtacatatatctatacacatgtatgcatgtatgtgcatatacatatacctttgcatatatatgtttatgcatacattttattttgctttatttaraattattatttttggagatagagtcttgccttgtcaccgaggctggcgtgcagtggcacgatcttagctgtctgcaacccccacctcctgggttcaagcc

SEQ ID NO: 411987 - DNA, 201 bp, Homo sapiens
agcctccttaagcgctggaattacaagcatgaaccaccatgcccagccttatttagaatttcatagggaattcttatgttattaaaactaagggttataarggcttccaaatcgctgtcatatggctggtctcaaatgcatttaaacaccccctcccccattgattttttttttttacatggttttcttatgtttgaaaat

SEQ ID NO: 411988 - DNA, 201 bp, Homo sapiens
agactgttgagtcagtatctagaggcagcattcattttccatcaaccgtgtgtgtgtgtgtgtgtgtgtgtgtgtgtgtgtgtgcgcgcgcgcgcgcgcgygtagagagagagattcagggggtgcgtgtgcaggtttgttacatagacatattatgtaatgctgaagtttgagcctctaatgttcctgttgcccaagtag

SEQ ID NO: 411989 - DNA, 201 bp, Homo sapiens
caatcttcctcctacactctgcgctcacaagggacatggaaacctgtcctgtttctcctcataccctgccgtcgactgcggcccctgcacacagtggggtytacgatgttgatgggagccaagggattgttgtactgattttttaaggctggatatttatttttcggtatgctttgcactttttgcctagggaatcaggac

SEQ ID NO: 411990 - DNA, 201 bp, Homo sapiens
ttgtcaatttttttttgttgcatttgcttttgaggacttagtcataaattatttgcctaggctaatgtccagaacagtatttcctaggtttcttctaggattttttatagtttgaggtcttacatttaagtctttaatccatcttgggttaatttttgtatatagtaaaagataggggtccagatttagccttttgcatat

SEQ ID NO: 411991 - DNA, 201 bp, Homo sapiens
gtggattgctgctttgaccaagagtgttggaccgatgaaagtatatccagtcctcagtctgaaatttgacgtctgtggctgggtttgaaaggatgagcttraatgtgggcttttgaattagaaatagaataggatttttcagttagcatcgtggatacaggggctgaaaagatgccacaatgagctgaagttaggaaggaa

SEQ ID NO: 411992 - DNA, 201 bp, Homo sapiens
tcaagggacttagaatcatccccagagaaggatgctgtgaacaacctcacgtgtgatggtgtggccactttggttgtactagagtggtgggatttgggagktttttcttatttttatttatttattgtaaatttttttaaattaaaacaattttaaatagagacagggtctcaatatattgcccaggttggtctcgaattc

SEQ ID NO: 411993 - DNA, 201 bp, Homo sapiens
cggcgctcggaggttttcatcctttgggacaagagatagctctgagttacttaacttacctggttcttgtatacgcttcatgttgtggcttttagtttctkttctctccaaggtgagccagttggatcttccaggaaacagatgctgagatggagttaggggcacaagaagtttattgagagggcataagtacctgggaaa

SEQ ID NO: 411994 - DNA, 201 bp, Homo sapiens
gtagctcaatgtagctgtctgtggttgatgtcactcggagtcaggggtaggagtgtgtgtgatacagtgtagcagagatgccaatctttgtggttgccccrcccttcttgctgtggattgctgctttgaccaagagtgttggaccgatgaaagtatatccagtcctcagtctgaaatttgacgtctgtggctgggtttgaa

SEQ ID NO: 411995 - DNA, 201 bp, Homo sapiens
ctcttgccttctcctctgattatttgttttctacctcaggtctatgtgtaattattttatgtgttatgtgctttttttgcttctatgttacttgcagataytgcagaatagtaataagtctgcctaacatggtaatgtgcttggtgaatttccaagaacatatatggtggtttccaagtatgctagcacagcagtatctat

SEQ ID NO: 411996 - DNA, 201 bp, Homo sapiens
acagaaaatacctatgtgaggttgtagtatttatggaagaaggaaaaggtgatatctagatcttgaaagataaaatactgacaaaataaacattttcttctttttttttttttttttttgagacagcgtcttgcactgttgcctgggttggagtgcaatggcgtgatctcagctcattgcaacctccgtctcctgagttta

SEQ ID NO: 411997 - DNA, 201 bp, Homo sapiens
ccccagtatttccaggggtgtgagccaagacatggggcaaaatgattaggggacctcctgggtcttggaagtggtttaatccttcctgtagctcaatgtarctgtctgtggttgatgtcactcggagtcaggggtaggagtgtgtgtgatacagtgtagcagagatgccaatctttgtggttgccccgcccttcttgctgt

SEQ ID NO: 411998 - DNA, 201 bp, Homo sapiens
cacaaactgaaataacccaaatcaatactagttttatttatttatttttccttttctaaaatttccataggtttttttttggggggggaggggggacagtwggtatttggttacatgagtagttcagtgatgatttctgagattttggtgcacccatcacccgagcagtatacatttaatccaatttgtagtcttttattc

SEQ ID NO: 411999 - DNA, 201 bp, Homo sapiens
tttttagtagagacggggtttcactatgttgaccagactggtctcgaactcctgacctcatgatccgcccaccttggcccctcaaggtgctgggattacargtgtgagccaccgcactcggcccattttatttctttaaaagagccttttggttattgtacattgttaaaacagaaatacactataaaataaaatcgacaa

SEQ ID NO: 412000 - DNA, 201 bp, Homo sapiens
aaagccccaacatcttcctcataacagcttctaagcttgaggaccaagagttatcctctaaaaaggtgtccccaaacaaggtaggtgactttcccccagtrtttccaggggtgtgagccaagacatggggcaaaatgattaggggacctcctgggtcttggaagtggtttaatccttcctgtagctcaatgtagctgtctg

SEQ ID NO: 412001 - DNA, 201 bp, Homo sapiens
gtctgaagtaattaggttaagaaaagttagtttaacacatacatccctgaatagcagaaactgaatccaccacagatgtacttcttactcgtctgaagtcraatgtggatgtttgtattcagagggcggccctctgacaagtgacgattcaggggctcagctcctttcatcttttggttctgccaccttcaacatatggct

SEQ ID NO: 412002 - DNA, 201 bp, Homo sapiens
tccacactttcactgttgtgtctggactttgccccttggaagacatttgggaaaggtgatgtggggctggaagtctatgctgaccggccaagagagtaaaktgtgtgtgtgtgtgtgtgtgtgtgtgtgtgtgtgtgtgtgtgtgtgtgttttaccacaatttaaaaaaaattgaaaaagaagaacactattagttacctg

SEQ ID NO: 412003 - DNA, 201 bp, Homo sapiens
ctgctcatgtgagtgatgatagtggggttggggtggctctggtctgcactgattggaagtatgaggggtagtgggatggtgcccttgtgcgagtccaggcygggaggcccagagagcaggtaagagagatgtgagctcactttgccctaatgtggagaagcagtgcatgaataatcacccagtgggggagagaaactattg

SEQ ID NO: 412004 - DNA, 201 bp, Homo sapiens
aagcacacctagagagttgggcacatcaggaaacttttgtcaatagtttagtttctggcagagtctcatggagaatcaagttactcggtgtgtgtgtgtgygcgcgcatgcatgcatgagtgtgtgtccacatgtgagtgtgtctgtgagagaaggagaacatactggtatgtgtgtgtttgtagctgaaggagtgtcata

SEQ ID NO: 412005 - DNA, 201 bp, Homo sapiens
aggaagttgttgtgggtgcggcagttggcgccgaggaagagctgctgcacggtgagccagtcctggggcacgtagccggtgccgccactgatcagatggtycgccatgctgccgcaaggccccgcgaagcgacaaacacccgcgcggccgcctgccgctgctgccgctgctgctgacgctgtgggcctgggaactgtaagc

SEQ ID NO: 412006 - DNA, 201 bp, Homo sapiens
taatgctaccctttgcattgtccactgagatgggtctgtggttggcaagaggctgcagccccttagcaatactagatgcagtgaatctgtggggcaatagyccttcttttctttcccatgcatgtgtggaaatccagtgtgtatgaagtggagatctgaccccatcttgtttgagctgtgtgctgattgttggatggggtg

SEQ ID NO: 412007 - DNA, 201 bp, Homo sapiens
aatcagagtgaagagacaacctgcagaatgagagaaaatatttgcaaactactcaactgacaagggattaatatgcagaatatacaaggaactcaacagcaaaaaaaaaatccgattaaaaatgggcaaatgagttaaataaacatctcttaaagatatgcaaatggacaagtttatgaaaaaaatacttgacatcactaa

SEQ ID NO: 412008 - DNA, 201 bp, Homo sapiens
tgaagccctgttcaaacttcttgaccttatgcacctcgttggcctggaactctggggtgcagttgtggtgaatgaaaccaatacctcccatcagagccatygcgatggccatgtcggcctctgtctcagtgtccataggggaagagatcagtggtgtcttcagcatgatcttccgggtcagggctgaagttaggtctacct

SEQ ID NO: 412009 - DNA, 201 bp, Homo sapiens
acattgaatcaaccactgaattaacagatgaagaaaatgtggtatgtatacacaatggaatactattcagccattaaaataacaacatcttggctgggcgyggtggctcacacctgtaatcccagcactttgggaggccaaggcgggtggatcacaaggtcaggagatagagactatcctggctaacgcagtgaaactccg

SEQ ID NO: 412010 - DNA, 201 bp, Homo sapiens
gcttgatccttggcgtcatcacctcactgaggagggtggtgtggtccttctcagcaagaaagttgatgtctcgggaggagatgatgcccaccaacttgctscccatggtgcccatctcagtgatgaggatgcaagagaagccatgccggatcttggcctccagcacatcacccacagtgtgtgaggggctcagcaccacgg

SEQ ID NO: 412011 - DNA, 201 bp, Homo sapiens
attcttcttcaggttggtgtgggagacgatggccactagctcatggcgatcattgaccataggcagcttcccttgctaggctgaaggatctcatttgcctstttcaatgtcatgcctgctggagccaccatcagcttgatccttggcgtcatcacctcactgaggagggtggtgtggtccttctcagcaagaaagttgatg

SEQ ID NO: 412012 - DNA, 201 bp, Homo sapiens
gacgttgatgcctacccaggtgagcaggtccaggcagtatttgtcatcctcatgggtgcccacagctgccctgcacagcagctgcttgtgggaatccttgraggccagaatgtagtctcgattcttcttcaggttggtgtgggagacgatggccactagctcatggcgatcattgaccataggcagcttcccttgctaggc

SEQ ID NO: 412013 - DNA, 201 bp, Homo sapiens
tcctgccccttcaaacatttgtcctctttgctaaggacaccctttccattgattctatatctgggtagctcaaagtgggtctgcccttttccacttcattyctgcagacctgtatactaattcgtaagagtgttaacagcttgctttggcattgtttgcttgcctattcatcttcgcttagactagaatccccaagagggg

SEQ ID NO: 412014 - DNA, 201 bp, Homo sapiens
agtacattggccagaggtgcagtgatctaaaggctggactgaggctggaggactggctggcatggatggcttgtttccgaggctgctggcagggggcctcrtttattgattttgagaacctctccgtggggctgcttgaagtccctcatgtcatggcagccaacttcctcagagtgagtgatccaaaagagagaaggcaac

SEQ ID NO: 412015 - DNA, 201 bp, Homo sapiens
gtacttaatagaatttataatggaatttgcaaagtgacaggccacaggatgaatgagttttattcagcccacatggtgctttgacttagtctccaacattkacaaatcaggagatgttacatgaaattctggatatttgacttctcttaaagatttaaaagctccagtgatactgtctgttgaaatggcagtattcagatg

SEQ ID NO: 412016 - DNA, 201 bp, Homo sapiens
gttatcagttaaaatgaacacacacacacacatttttttaactttttttatttttatttttatttttactttaagttctagggtatatgtgcacaacgtgyaggtttgttacatatgtatacatgtgccatgttggtgtgctgcacccattaactcgtcatttacattaggtatatctcctagtgctatccatcccccctc

SEQ ID NO: 412017 - DNA, 201 bp, Homo sapiens
cgggagcaacttagttgggggattcttgcctagggtctcttgtgaggctgtggtcagtacattggccagaggtgcagtgatctaaaggctggactgaggckggaggactggctggcatggatggcttgtttccgaggctgctggcagggggcctcatttattgattttgagaacctctccgtggggctgcttgaagtccct

SEQ ID NO: 412018 - DNA, 201 bp, Homo sapiens
gtaaaaagctatcccttaagaacttatggtttcaaaggtagtttattcatacactcagaggtttgtgtaaatgtgtgtgtcactgtgtatatgtggttgcmttagaaataaattcaacacaaatgtgatcatgtcatttcactggatgaaaacttcccctttttgtcttaggtttaaaaagtgaaaagtacttaatagaat

SEQ ID NO: 412019 - DNA, 201 bp, Homo sapiens
gagttggggtatgtttagctgcaagtaattatgagaaccttgactcaaagtagattatacgatgtataaacttattatttcacatgaccagaaactctgamgtagatcaaagttggggactgatggattcagtggcccagtggtatcaacaagaatccaccttcttcccttccgtctgttctaccatccttagtgttgagt

SEQ ID NO: 412020 - DNA, 201 bp, Homo sapiens
tttcgccacgttagccaggctggtctcaaactcctgacctcaagtgatccacccgccttggcctcccaaagtgcggggattacaggcgtgagtcactgtgyccggcccattgtatcattcttatacctttgcatcgtcatagcttagctcccacttataagtgagaacataacgatatttggttttccattcccgagttac

SEQ ID NO: 412021 - DNA, 201 bp, Homo sapiens
gcataattcatattctttattaccacagagtcgcaggaagaattcaccccaaatttcaaaatgtgggacctgctgaacacagaatctaccactgaagtgtsgaacatgagtcacttaatagtgctgaactaatagtgagaatttcatcgtgagaacttaacagtgactcatgtttcactactgctgaaggctgaagtgtgg

SEQ ID NO: 412022 - DNA, 201 bp, Homo sapiens
aactaatagtgagaatttcatcgtgagaacttaacagtgactcatgtttcactactgctgaaggctgaagtgtggaaaatgagtcactattaaacaaggawgggcactgggtaacctttgtgctgtggttctcaaagtgtggtttctggaccagcatcatcactatcacttgagatagggccaaaatatgcacattctcag

SEQ ID NO: 412023 - DNA, 201 bp, Homo sapiens
ggcttaaggtgctgcatatttaaaagatcccaagattattttgataagctaccagaaagtattgtaaagcagcaattggcaagtgttttatttaaaagccyagatagtcaatattttaggcttggcaaaccaagaggccacacattctgctgctatagcacaaaggcagccacagacaatacaggaaagggcttggctgtg

SEQ ID NO: 412024 - DNA, 201 bp, Homo sapiens
gtttcactactgctgaaggctgaagtgtggaaaatgagtcactattaaacaaggaagggcactgggtaacctttgtgctgtggttctcaaagtgtggtttstggaccagcatcatcactatcacttgagatagggccaaaatatgcacattctcaggcccatatgcatcctactgaatcagaaagtgaggggcagggattg

SEQ ID NO: 412025 - DNA, 201 bp, Homo sapiens
gttagtcttactactccctgtggtcaacagcagtccattctttgtatgctaatctgttacatttgtattagaagatggatatctcagcatgacacaaccarattagttttgctgttggaagccaccatggggtactagttggggcacagctgttgcatagccatgggatatccaaataaggggattggggaaggcactgtc

SEQ ID NO: 412026 - DNA, 201 bp, Homo sapiens
tactattcagccattaaaataacaacatcttggctgggcgcggtggctcacacctgtaatcccagcactttgggaggccaaggcgggtggatcacaaggtsaggagatagagactatcctggctaacgcagtgaaactccgtctctactaaaaatacaaaaaattagctgggtatagtggcgggtgcctgtagtcctagct

SEQ ID NO: 412027 - DNA, 201 bp, Homo sapiens
cacaatcagtgataaactttgaagatgctgcagcctccattgagtttctttttgtatatatatacttttatttatttatttatttttttggagacagagtstcactctgtggcccaggctagagtgcagtagcgcaatctcagctcactgcaacctctgcctcccgggttcaagcaattctcctgtctcagcctcctgagt

SEQ ID NO: 412028 - DNA, 201 bp, Homo sapiens
gagccaagatcgtgccattgcactccagcctgggtaataagagcgaaactccatctctaaatacatacatacgtacatgtatacatacatacatacatachtacatacatacatacatacatacaagtcaatagaggcaaagaaatgatagatgcaggggagagaagaaggaaggaagcaatacaaagcctagagagattg

SEQ ID NO: 412029 - DNA, 201 bp, Homo sapiens
acctcaggtgatctacacccccttcggcctcccaaagtgctgggattacaggcgtgagcattgtgccaggtctgagtttctactttaattggctgccttaygcaaaccatgaagaagcccctgcatgaataaggcaggaaactttttagtcccagactaggtgagacatatgccgtatccccaaaataaatgttggggcat

SEQ ID NO: 412030 - DNA, 201 bp, Homo sapiens
taaatatttgcccatcagtgatagagtggatcaagaaaatgtggtacacatactccacagaatactatgcagccataagaaaaggatgagatcatgtcctktgcagggacatggatggagctggaggccattatccttaggaaactaacacaggaacagataaccaaatatcatatattattacttaaaagtgggagctaa

SEQ ID NO: 412031 - DNA, 201 bp, Homo sapiens
atgctggagatacagcagtcaacaaacctgtcttctttgtgtgaggagaggccaacagaaacataacaaatatttaatgtgtcagctgataataagcactrggcaaaaagtggattagggaaaggcaaaaggaagcccttgggtggtggtgcgatggggttttgatttgaaatagagccatctccacgggagggtccactt

SEQ ID NO: 412032 - DNA, 201 bp, Homo sapiens
gtggtacacatactccacagaatactatgcagccataagaaaaggatgagatcatgtcctgtgcagggacatggatggagctggaggccattatccttagsaaactaacacaggaacagataaccaaatatcatatattattacttaaaagtgggagctaaatgatgagaacacatggacacatagagtggaaaaacacac

SEQ ID NO: 412033 - DNA, 201 bp, Homo sapiens
tgtaatgcaccatggtgatttgatacaccgagttcccttgggaggagtccaagactatgacgttgatgcctacccaggtgagcaggtccaggcagtatttktcatcctcatgggtgcccacagctgccctgcacagcagctgcttgtgggaatccttggaggccagaatgtagtctcgattcttcttcaggttggtgtggg

SEQ ID NO: 412034 - DNA, 201 bp, Homo sapiens
acgctttgcttgcctggtcctggtacatggtcctgtgtactgttaagaaaacagattgtcccaggtagatatgtagccagatatttttttctctgtttcctttttttttttttttttttttggagctgctccaccccctggtatggtgcagcttctcctggggctcctctgtaattttacagcagcttctgagctagtgaa

SEQ ID NO: 412035 - DNA, 201 bp, Homo sapiens
aaaagtgggagctaaatgatgagaacacatggacacatagagtggaaaaacacacaatggggccttgcagagggtggagggtgggaggaggaagagagtckggaaagtaactaataggcactaggcttaatacctgggtgatgaaataacctgtacaacaaacccccatggcacaagtttacctgtgtaacaaatctgcat

SEQ ID NO: 412036 - DNA, 201 bp, Homo sapiens
aaaatacaaaaatcagctggatgtggtggcaggcccctgtaatcccagctactcaggaggctgaggcagggagaattgcatgaacctgggaggtggaggtkgcagcaagccaacatcatgccactgcgctctagcctgggtgacagagtgagactttgtctcaaaaaaaaaaaaaaaaaaagaaggaaaattaaaatcaat

SEQ ID NO: 412037 - DNA, 201 bp, Homo sapiens
cacagcagtgccctggggctgaccgcaggccatcacttcctgggtgatgcagatagagctgcagcccataactacatgcagtccatccacaccagtgtcartcaggttcttagcctgggctgctgtcaccacattcctcccaatcacctggaggtggaggtacttctgtttgatgtaatgcaccatggtgatttgatacac

SEQ ID NO: 412038 - DNA, 201 bp, Homo sapiens
cgctttgcttgcctggtcctggtacatggtcctgtgtactgttaagaaaacagattgtcccaggtagatatgtagccagatatttttttctctgtttcctttttttttttttttttttttggagctgctccaccccctggtatggtgcagcttctcctggggctcctctgtaattttacagcagcttctgagctagtgaag

SEQ ID NO: 412039 - DNA, 201 bp, Homo sapiens
ctctctaatggcctggagatatcctacaggctatgctgggtactttgcatagactaccttcaagatgcagagaaaggaaatgcatctaatgctgttagtamcaataataaataatagcaatagattccctgtacatgctggacagtgcaccaagcattttattttatttttcacaataataccatgaggaagctacttttt

SEQ ID NO: 412040 - DNA, 201 bp, Homo sapiens
ttaactcgtcatttagcattaggtatatctcctaatgctatccctccccgccccccaccccacaacagtccccgatgtgtgatgttccctttcctgtgtcygtgtgttctcattgttcagttcccacctatgagtgagaacatgtggtgtttggttttttgtccttgcgatagtttgctgagagtgatggtttccagcttc

SEQ ID NO: 412041 - DNA, 201 bp, Homo sapiens
ggacacaccaaagtgctgagcgtacttggccaccttgtacacagcagtgccctggggctgaccgcaggccatcacttcctgggtgatgcagatagagctgyagcccataactacatgcagtccatccacaccagtgtcaatcaggttcttagcctgggctgctgtcaccacattcctcccaatcacctggaggtggaggta

SEQ ID NO: 412042 - DNA, 201 bp, Homo sapiens
gctttgcttgcctggtcctggtacatggtcctgtgtactgttaagaaaacagattgtcccaggtagatatgtagccagatatttttttctctgtttcctttttttttttttttttttttggagctgctccaccccctggtatggtgcagcttctcctggggctcctctgtaattttacagcagcttctgagctagtgaaga

SEQ ID NO: 412043 - DNA, 201 bp, Homo sapiens
catgctggacagtgcaccaagcattttattttatttttcacaataataccatgaggaagctactttttattactcttgttatacagaggagcaaactgagscttaggaaggtgacgtgacttgccccaactcatccaattagtgagaacctaagttgggatttgaatttggctctcaatctccaagcagtcatgtgtccaa

SEQ ID NO: 412044 - DNA, 201 bp, Homo sapiens
agatgagtaggttgcgaaaattttctcccattctgtaggttgcctgttcactctgatggtggtttcttttgctgtgcagaagctctttagtttaattagaycccatttgtgaattttggcttttgttgccattgcttttggtgttttagatatgaagtccttgaccatgcctatgtcctgaatggtattgcctaggttttc

SEQ ID NO: 412045 - DNA, 201 bp, Homo sapiens
gatatgggagaagtgttcagatactccatgggctgttacaaggtagaaggttaagtcttaattttgttattgttctggggacagacataagagtgaaattattattattattattattattattattattattattattattgttattatttgagacagagttttgctcttgtcgcccaggctggagttcaatggcacgat

SEQ ID NO: 412046 - DNA, 201 bp, Homo sapiens
aagtatcgtttctggctgctgctgctcttctccatggcatctagcgagcccatgccccagtacttcttgagctgcaccctgtctgagaagaagtactcgcygctgggcctccgtggtggtggccagcagggagcccatcatcactgtggaggctccaagggccagggccttgaccacgtgccccacggtctggatgccaca

SEQ ID NO: 412047 - DNA, 201 bp, Homo sapiens
ctttgcttgcctggtcctggtacatggtcctgtgtactgttaagaaaacagattgtcccaggtagatatgtagccagatatttttttctctgtttcctttttttttttttttttttttggagctgctccaccccctggtatggtgcagcttctcctggggctcctctgtaattttacagcagcttctgagctagtgaagaa

SEQ ID NO: 412048 - DNA, 201 bp, Homo sapiens
taccaaatgtaaaatgcagagagcccattacaagtagctccttgaatgagttggggtatgtttagctgcaagtaattatgagaaccttgactcaaagtagmttatacgatgtataaacttattatttcacatgaccagaaactctgacgtagatcaaagttggggactgatggattcagtggcccagtggtatcaacaaga

SEQ ID NO: 412049 - DNA, 201 bp, Homo sapiens
agccttaggaaggtgacgtgacttgccccaactcatccaattagtgagaacctaagttgggatttgaatttggctctcaatctccaagcagtcatgtgtcmaagtggttgccactgggtgggggattctggaagtcctttctgtgtcctcatgctctagatatttttttatttttttctgtagtgagcatacagagattct

SEQ ID NO: 412050 - DNA, 201 bp, Homo sapiens
agccattaagtaaacgagtacgtgaataagtactgtacttttctaatagtcttttgggtgctaaagtcatacatatattgaatgcttgctatataccaagyactatagtgctgagtattttacatccattaaattgcacgtaaatgacaacaacaataacaaactcgcttgaatggtaaatgttattagctcaagtgtata

SEQ ID NO: 412051 - DNA, 201 bp, Homo sapiens
atatgggagaagtgttcagatactccatgggctgttacaaggtagaaggttaagtcttaattttgttattgttctggggacagacataagagtgaaattattattattattattattattattattattattattattattgttattatttgagacagagttttgctcttgtcgcccaggctggagttcaatggcacgatc

SEQ ID NO: 412052 - DNA, 201 bp, Homo sapiens
ccactgctatcctcagtacagctgcttctggtaagcgtgcaggccatggacgccaccctcgatctgggctgacatggtccacttctcaaatttgagctctyctgagtacatcatggagccatgctggttactcgctatgaggtagggcacaaacttctgaatggaccctttgtcctggatggaggccgagacaccctgcac

SEQ ID NO: 412053 - DNA, 201 bp, Homo sapiens
caagcctcagtttcctcatctgtaaagtaggggtgataatatctaaattgtaggatactagagagattagaaagaatctgtaaaaagtgtctaagatactrccaaatgtaaaatgcagagagcccattacaagtagctccttgaatgagttggggtatgtttagctgcaagtaattatgagaaccttgactcaaagtagat

SEQ ID NO: 412054 - DNA, 201 bp, Homo sapiens
tccaggaccctggctacgaagctcgctgtgcctgacttcctcaagccacttgcctcccattttttctttagaggaaacttccactgcctcggatacataakgtcattgcaatcctgtctaaagtctggcctccagggtttgcagtaagatttctctgaagcaaggctgcatctctacccatgagattttgcatcccctagc

SEQ ID NO: 412055 - DNA, 201 bp, Homo sapiens
aaaaatgttcacttcgttttcctttagcatgtagggagttattttaggatatcctgtgttttctggcacaagtttctctgtctaggacagaaggattgacwtagaggacattggggaatggggaaaaaagaaagcaggaggaggagccccctgaccccagtttgaatcccagtattcagagaaattcttctctatacctct

SEQ ID NO: 412056 - DNA, 201 bp, Homo sapiens
tatgggagaagtgttcagatactccatgggctgttacaaggtagaaggttaagtcttaattttgttattgttctggggacagacataagagtgaaattattattattattattattattattattattattattattattgttattatttgagacagagttttgctcttgtcgcccaggctggagttcaatggcacgatct

SEQ ID NO: 412057 - DNA, 201 bp, Homo sapiens
atccccagaagtaaccttcccatgaatttccctgctgctggcttcttttcctttcctgtcttatttttctacttcctcaccacacttcctgtgatcacctyccaactaaaccatgtccccccagtttcttgctttagcatctgctctaaagtaaaacttaactgaagtaattcccctttgcttcattttgcttaagcttcc

SEQ ID NO: 412058 - DNA, 201 bp, Homo sapiens
caaacatcttatgtgtttgcaatcttgcctgtcctcctgggtaggcagaatgcacaatctctcctcaggggaagtgagaagatctagaaggcccaaggaayaattatttttggcatcattgctcctccatactcattatccacatctgttgagcattcctgtggcccagaagctgatggcagtgtcactgtggcaccctag

SEQ ID NO: 412059 - DNA, 201 bp, Homo sapiens
atcagcctggtgggttggaacgaatgtcaactttgagttcaaaggcctgtactgaatcctagcggtgcctctcactagctatgtgacctaggaaaagttayttaacggcatcaagcctcagtttcctcatctgtaaagtaggggtgataatatctaaattgtaggatactagagagattagaaagaatctgtaaaaagtgt

SEQ ID NO: 412060 - DNA, 201 bp, Homo sapiens
tttctgccagaactgacagtaatattgaatgatgagagaaatgcagtaatattgaaggacgagagaaatgagagttgtataacatttaatgattttttttwtaaaaaatcacccaagaacgtgaagatgatttgaaacgcctctgaaaatgatcccttcctgtccataggcagcccagcttgcacatagcccgtgcttgct

SEQ ID NO: 412061 - DNA, 201 bp, Homo sapiens
tgcatctgttatcaatttgtttcagaatctagctggagagactcataatgcaagtgcagtatgattgtattcacgggaccatgggaatgcagaggagggayagcttcatccacaggtctgagggtagggatctggggtcaaattggagagctggtctggaagaggcttgtgtcctgggtgcctgcccctacaggttgtcat

SEQ ID NO: 412062 - DNA, 201 bp, Homo sapiens
gaagtggcaggggataaataaatgccccccagaactgtctttaatgatgagggatagaagttggcataccctggcttctttgctgctcagggagacagtamtgaggtgtgtcctacactgttattggagggcccttgtggggttaaatccctgttatccccagaagtaaccttcccatgaatttccctgctgctggcttct

SEQ ID NO: 412063 - DNA, 201 bp, Homo sapiens
aggtgtttgtcgggagatgctactaatatcagcatgtagggaccagggatgctgtaaaatatcttacaatgtacaggacagcccacccagcaaagaaacaygatctggtcagtagtgcagaggttgagaaaccctggcatagggcaaaagagatttaatcctgagcctcctgtaggcaagtaagcacttgaacaaaatgag

SEQ ID NO: 412064 - DNA, 201 bp, Homo sapiens
atgcagaggagggacagcttcatccacaggtctgagggtagggatctggggtcaaattggagagctggtctggaagaggcttgtgtcctgggtgcctgccmctacaggttgtcatcccccacagctgaagatgagctgtagagggaaggctggctcatggaggagcagaattgagttcacaatctaagccttcctctcctc

SEQ ID NO: 412065 - DNA, 201 bp, Homo sapiens
gatggacagttcccaacacagtgatggcttctcacctcaagcacaggcatctctctgcctaagaatgttctctggccatacgattgtgtttggctcctgcrtatggcagacctgaagtggcaggggataaataaatgccccccagaactgtctttaatgatgagggatagaagttggcataccctggcttctttgctgctc

SEQ ID NO: 412066 - DNA, 201 bp, Homo sapiens
agctcctggaggaggatggaattaatttcaaggggatttgggaagtaattgtcttgttgttagttataaatttttgagagatgatggaaccttatcaagayagcttgctgttgaaatcttatagtttcccgtttagacctctgttattattatctgattatttgattattattatcaagggttttatatgtctaacagtgt

SEQ ID NO: 412067 - DNA, 201 bp, Homo sapiens
tttaaaaactactttgagttactactcattcattcactcaacaaatatttattaagtgcctactatgggtcagccattgatcttggctctggggatactcytgtgaaaaggcaatgccctgcacccatggagtttttcttcccaatgttttattactactcacttacgactgccctttccatcagactctgagacccatgc

SEQ ID NO: 412068 - DNA, 201 bp, Homo sapiens
aatctctgttaagccctctccccagctgtagcccctgagctttttgtagagattcctcctggtgcagagatggagcatatggttcagtgctggaacaatgyggtcattatatgctcctggtccctgtgaacagttcggggatggttatctggtccaggaagacccagtgaggtgaaatgagactttacctcaaacttgagt

SEQ ID NO: 412069 - DNA, 201 bp, Homo sapiens
atcatctatgtcttgggattagggaaaatttccatgtcaaactaaagagtaaaaattcaccaaggttttgatatgctctgatatgatcactactacttgarcctccccctcatcggttttatttcccacccatcatagctcctggaggaggatggaattaatttcaaggggatttgggaagtaattgtcttgttgttagtt

SEQ ID NO: 412070 - DNA, 201 bp, Homo sapiens
tcactgagtcctcttttccctaacttctagaggaagtgcatttaatcatgctgtgatcaagtcagccctgggtacccatgttggcttttaattttaaaaaagagaatgacaggaaaagaaaatgggccagttaggttttgaagatttttctattttattattattaaaggaagcccatgtgggagaatgtctggtgctagt

SEQ ID NO: 412071 - DNA, 201 bp, Homo sapiens
tggaatgaacctgtgtattttttatcttaacactcatttccattcttctggtaattgtatgtaatcaatctctgttaagccctctccccagctgtagcccstgagctttttgtagagattcctcctggtgcagagatggagcatatggttcagtgctggaacaatgtggtcattatatgctcctggtccctgtgaacagtt

SEQ ID NO: 412072 - DNA, 201 bp, Homo sapiens
tggtcgtggtcagcattgctgggtgaggatccttaggctttttgtcaggggttcagggccttctggcttccccaggcttctccaggcttctccggcttccrtctctagagaagactcgggatgaactctgaattcttctagaccccagctaccagttcggctccagacccagagtggcactgctttaatctcggcaaagaa

SEQ ID NO: 412073 - DNA, 201 bp, Homo sapiens
gcatctttaggaacctcagttccagtttcattgtgcatttggccatcatccggcctgtctctgcctcttgttcattgtggtcccacgtgacttctttctgyctggtttgtctccggtcatgtgacttagctgcctggactcttctgttctatgcaggaacagagctagttttcatttactgcaggaaagaccagattggca

SEQ ID NO: 412074 - DNA, 201 bp, Homo sapiens
gcagtggatttaaagtcagctcagggcagtttcaacaccagagttggaggaaagaggttgtgtgtacattgtcctctggggactgctgctgtttatgcctygtggtttcctttgggggagacagatccaccctgctttcctcatccatcttcctacatggatatatcttgttatctagtgctgaaatggcatggacacagg

SEQ ID NO: 412075 - DNA, 201 bp, Homo sapiens
tcatttggtgcaatatccagcctggagctgtctctagcctggagtatgcttagtgaaaccctgagaaagaacttaaatgttgggtataattcctgctgttwagggagtgacaaaaatgtacatgtatagacaccactatttcatatttcaattattatttatttaacattttaaacctgatggcagaaaaatatgcctcag

SEQ ID NO: 412076 - DNA, 201 bp, Homo sapiens
gcgaaataatttaaaatgacttaaaagataagtgtgtccatttttcccttcatcaaatagttaagttgtattagttcgttctcacactgctaatgaagacrtacccaagactgggtaatttataaaggaaaaaggtttaattgactcacagttcagtgtggctgggaggcctccggaaatttacaatcatggcagaagggg

SEQ ID NO: 412077 - DNA, 201 bp, Homo sapiens
attcagaaatgctgttaactggaatgactgctaccagctgtccagggatatgaacttctagtgggtgagggagtgtatgtgtgaattcatttggtgcaatrtccagcctggagctgtctctagcctggagtatgcttagtgaaaccctgagaaagaacttaaatgttgggtataattcctgctgtttagggagtgacaaaa

SEQ ID NO: 412078 - DNA, 201 bp, Homo sapiens
atttttgaaaatggtgtcttgcatgccagctttagattgagcaggactatgtaataaactggctggtgagagattaatcactatgatcagttagagaaggyggagagtcaactctttctttgttgtcggaatcagaaccaaaattattttgggccctcctgtttcaggtctccagtgaatcttatttacagcagtgaactg

SEQ ID NO: 412079 - DNA, 201 bp, Homo sapiens
ctttcaggaatcttctaaactgctgggattcccagggggaggacgggacctttagggatcttgcaaaccccagcagaatatcagttttcttcacagaagcrtgtctaacttccttcagccctggtctgcaaattccagacatgaaactgtgctatttgctagcttggcctggcaggtatttattcaaaggctgcaggactc

SEQ ID NO: 412080 - DNA, 201 bp, Homo sapiens
cactgcatttaggaaatgctcattaagtatttgttgcctggttttctctgcattcagaaatgctgttaactggaatgactgctaccagctgtccagggatrtgaacttctagtgggtgagggagtgtatgtgtgaattcatttggtgcaatatccagcctggagctgtctctagcctggagtatgcttagtgaaaccctga

SEQ ID NO: 412081 - DNA, 201 bp, Homo sapiens
tggagacttcaaggcttaaataacttcctaaaatcactcaattagcaaatgataaacccaggactcaaactccggtcagtcctccctccctcccccctccstcccttgctccaagagtattgctctgttgcccaggctggagtgcagtgacacagtcatggctcactgcagccttggattcctgggctcaagcgatcctcc

SEQ ID NO: 412082 - DNA, 201 bp, Homo sapiens
cccttgcttgtctcaggtgagctgctcctttccctttcaggaatcttctaaactgctgggattcccagggggaggacgggacctttagggatcttgcaaaycccagcagaatatcagttttcttcacagaagcgtgtctaacttccttcagccctggtctgcaaattccagacatgaaactgtgctatttgctagcttggc

SEQ ID NO: 412083 - DNA, 201 bp, Homo sapiens
tgactttacagtttagccatgggtttgggatttttgtttgtttccattgtggtcttttaatcaacatatactgttgttttggacagaccatgcgcacaaaygcagatgataatggttggagacagtggttgatgcctagctggctttctctccctccatttattaaccagagcacaaaatgggttgttttctttctttttc

SEQ ID NO: 412084 - DNA, 201 bp, Homo sapiens
tccatggttctatttcctttttaaaaatttctatttaattttaagttctgggatacatgtacagaacataggtttgttacctaggtagacatttgccatartggattgctgcacctctcaacctatcacctaggtattaagccccatatgcattagctatttatcctgatgctctcccttccccaccaccaacagactctg

SEQ ID NO: 412085 - DNA, 201 bp, Homo sapiens
aggtaggaggttttctgagtgtggggaggagtagcttgctagtaggagctttatgaaaaaactaattgtataacattgatgaaagagaaagaaaagatggsagaaaagcaatgagaactcaaatcattcaagttacagttagcattcctctctgtctgttggcattgtggagtgtaacacagactccatagctgaagatgt

SEQ ID NO: 412086 - DNA, 201 bp, Homo sapiens
gctcctgggggaaaagacttggtattttctattaaaagtgaacctgaaaagatgtagggaataaaatcactgctaccatcttgcttccacttggagccaasaattggagccaacaactagagccaactgtgtggcagcagaacagcaagaaggaggaacacgaaatccagatgacagattttgggtcctgaattcacctgt

SEQ ID NO: 412087 - DNA, 201 bp, Homo sapiens
taaaaatacaaaaaaaaaaaattagccgggcgttgtggcgggtgcctgtagtcccagctactccagaggatgaggcaggagaatggcgtttgcaatgagcygagattgcgccactgcactccagcctgggtgacagagtgagaatccatctcaaaaaaaaaaaaaaaaaaaaaaaaaaagaaaaaaaaaaagtaagtacta

SEQ ID NO: 412088 - DNA, 201 bp, Homo sapiens
ttctagcctctccccttccccccagtcttgcctctcaaatgactatctacacaactctttgtcttctccagaaaggcttcctttatttcccagggtgaatragcctctcatctctccattattccatagcattctgtaatactttaacatttactacattgttctgaaatcataaaatctatttgtctgtctcaccaacca

SEQ ID NO: 412089 - DNA, 201 bp, Homo sapiens
acaaagtgggggcaggaaaattgtgggtatgacaagaaatctgttaatgttatggataaagaggtctaagttggaatcgggaagaaatgaaggcatgaacraatagactaattgagagaagatagagaccagggatgacgctggagaggagacataagaatacctgaatgagagctgtggattttctgaattcagagtcat

SEQ ID NO: 412090 - DNA, 201 bp, Homo sapiens
tccaggagccagaaaactgtttctggttctttcacatatttgctgtaatttgtgaatgaggcttggtggttgacaggtgaggaagtggtggattgactcaragctgggtggaaggtggtgccaggtgggtgtgacaggaggacaagatgggagcaggaaaattgtgggcgtggcaggaaatctgttgctgtgataaagaga

SEQ ID NO: 412091 - DNA, 201 bp, Homo sapiens
tgtgagtacatgcacacatgggtgtgcacgtgtgcatatgggatatgaggaggagagtgggacacttttatatatgtactggttaaaatttagtggcaaarctgcctgaacgtgtgctgtggttaatgattgcttgagctctgccttccactctcagctttggagtgggtggtacgctgtatacagagcacctagcgtgcg

SEQ ID NO: 412092 - DNA, 201 bp, Homo sapiens
tgcttggagctgagattgagctaagagaggtatttactcaccaaagtctactccccaaggaaaagccgaccgaattgaagtgtgtgtgtatgtgtgtgtgygcacatgtgagtacatgcacacatgggtgtgcacgtgtgcatatgggatatgaggaggagagtgggacacttttatatatgtactggttaaaatttagtg

SEQ ID NO: 412093 - DNA, 201 bp, Homo sapiens
ttctgccagaactgacagtaatattgaatgatgagagaaatgcagtaatattgaaggacgagagaaatgagagttgtataacatttaatgatttttttttwaaaaaatcacccaagaacgtgaagatgatttgaaacgcctctgaaaatgatcccttcctgtccataggcagcccagcttgcacatagcccgtgcttgctt

SEQ ID NO: 412094 - DNA, 201 bp, Homo sapiens
ttattggagggcttctgagaaccttctaaagatacaagagcatgcatggaagcacttgtggaatgttggcaggttcccatgttgtgttcacgatggggcaycagccataagatagtttcagcagagggtatgtagggcagagagttggaaggagcaaaatcttgatgacatcattggtctactgacttgaaaactcctgaa

SEQ ID NO: 412095 - DNA, 201 bp, Homo sapiens
aacaaaaatctctgcccttgaggagctcacagtcttgttgagatgtgatttaaaatggttaatcaattcaagaatattagatttctgcaaaagctactgtmgggaaaacaataattatccaaagtctttaaatctattacccactttaattaatttaattaggtaaaattcatggaactgcaatgttggaaggggcccaga

SEQ ID NO: 412096 - DNA, 201 bp, Homo sapiens
cctttgagtataaccaagactaggaccaaagtaatgggagtacaaaactgaagaagctgaagatatgcagtattgcacccatttctggagaaatagaaaartaaataaatgaagacagcagcggaagagaagaaaaaggagaaagaggaaaatgatatttacaaggtgctgtccaaaaccaaagaagcatgatggataggg

SEQ ID NO: 412097 - DNA, 201 bp, Homo sapiens
aaacattctttcttgtaatttgctggacagtatctagttgaattttctttcattcctttttgcaaatataaaacccctggcttccaccttgtcagtgggtrgatgggtaatgggagaaactcctccactgtctgcatcctgtctgtgccttttgtctaaccagccttcttacagcctgacccaagcagccagtggaatgga

SEQ ID NO: 412098 - DNA, 201 bp, Homo sapiens
cactgagtcctcttttccctaacttctagaggaagtgcatttaatcatgctgtgatcaagtcagccctgggtacccatgttggcttttaattttaaaaaagagaatgacaggaaaagaaaatgggccagttaggttttgaagatttttctattttattattattaaaggaagcccatgtgggagaatgtctggtgctagtt

SEQ ID NO: 412099 - DNA, 201 bp, Homo sapiens
ctgtggattaagactatcactttgggaacatcttagaattctgcctgctgtgggtggtaatccaaatcaaatattcttcctgatctttgtgttaagactaycacttttggaacagccattttccaaagctctctcataattccatcgtaggcagagatggagtgtggccatacaatgttttggaggctccaaatctaggta

SEQ ID NO: 412100 - DNA, 201 bp, Homo sapiens
ctgcatgacaaaactctttggaagtccagtgcaaatgagtggacttgtgacctctcacattatttctgtttgtaggttcaactggcaagccaatcatgctyatttatagcgacacgcactgaaaacttttttctcacaagaggttattgaaccaagatgagaggaaataccaaggctctttttggtgttttaattccttca

SEQ ID NO: 412101 - DNA, 201 bp, Homo sapiens
tggaatggaatggaagcaagttggagacacacacacacaacactgcctcaattatccttgcctgttcccttttaaatggaatggaagcaagttggagacayacacacacaacactgcctcaattatccttgcctgttcccttttagattctgcatctctctgacggttgactcctgaaactctattactctgtcttttaat

SEQ ID NO: 412102 - DNA, 201 bp, Homo sapiens
aggtatacactcaaggaagattttacttgttaacctgaaaattgcaaaacaggtgcttgtagagctgtacccacagcagtacattgatgtcgcaagtatcsgggcgggaaaaactacaattgctgcgtggggtggggtgggggtgaccatagttccctttattagccagagatataagtgacaggagtctaaatgagaacc

SEQ ID NO: 412103 - DNA, 201 bp, Homo sapiens
tccatctttccctaggtttcaggaatgctcaagaattacgggatcttgactgggcacggtggctcacacctgtaatcccagcattttggtaggccaaggcragtgaatcatttgaggtcaggagtttgagaccagcttggccaacatggtgaaaccccatctctactaacaatacaaaaactagccagacgtggcggtggg

SEQ ID NO: 412104 - DNA, 201 bp, Homo sapiens
tggaagtccagtgcaaatgagtggacttgtgacctctcacattatttctgtttgtaggttcaactggcaagccaatcatgctcatttatagcgacacgcastgaaaacttttttctcacaagaggttattgaaccaagatgagaggaaataccaaggctctttttggtgttttaattccttcacatctatttctttcatca

SEQ ID NO: 412105 - DNA, 201 bp, Homo sapiens
acactttattcagcagtggggagagtttagcagaattctctttctgcacagtttaagatggagctgggaaaagaacccaagtttttagatacagcagtctrtctgctacttgaatcttttcttctccgccataccaggactggaagacatagattgtgcccaatttctatatcctaattacctaccagaggattgggcatg

SEQ ID NO: 412106 - DNA, 201 bp, Homo sapiens
tgaatgtacccacatatatacagacacaaccactaaagaaaatagattatgtaatatttattcaatgtattttacttgtctgttgtttatagagccctgcytcagttggatgagttatttcagatttggaagtgtctcgttctctagcttgggaatgcagctgaacactgggggcagctgtggccctctttttgtttgttg

SEQ ID NO: 412107 - DNA, 201 bp, Homo sapiens
agatttctgccatattgtggctcttccagtcccctaaatctcactgtcttttctttccaatcagcagaaaaataagtgaggagaaaacacgcccctttctyaagagtcctggcctgaatgtgactttgtttatgctgatcttccattagaaaggacaattggactactgatgatttccgatcaagtagaataaatcaatat

SEQ ID NO: 412108 - DNA, 201 bp, Homo sapiens
atctggatatctgcagtgaactaaggagtctcagagaagtcatcctattattgtgtttaaatcttttctttttctctttcaaaaccaggatttatcaatgstggaatatttcagacatgctgataagtacagagaataaaataacaaacaaccatgtactgacaattcagatttaacaaatgttaatatttttgtcacatt

SEQ ID NO: 412109 - DNA, 201 bp, Homo sapiens
tattttacttgtctgttgtttatagagccctgcttcagttggatgagttatttcagatttggaagtgtctcgttctctagcttgggaatgcagctgaacaytgggggcagctgtggccctctttttgtttgttgccaactcggtctaagatcagcctgagtggactcagtcggaatctaccatctcaataccaggtggtta

SEQ ID NO: 412110 - DNA, 201 bp, Homo sapiens
gctggaaggggaagaggatggattggtaaaggagttgttgtataaagagaagggtgaatgattatttgaatggatgagtggaaagatgtagggttgaatgsatcaagggtggaaaggtggatgagtgaaagggtaaatgggtggagggatgaatggttggttgcttggatatatgtatgggtgaatcaattatattattaa

SEQ ID NO: 412111 - DNA, 201 bp, Homo sapiens
ggtataatggtattagtatgttttatgctttttataaacagtactatatttttccaactactgttttttttttcttttttctttctttctttcttttttcytttttttttttttttttttttttttttttttttttttgagatagagtctcgctctgttgcctgggctggagtgcaatggcgtgatctcagctcactgcaa

SEQ ID NO: 412112 - DNA, 201 bp, Homo sapiens
acttttttgttgcctttgccactactaaccttctaagagttcggaaaagaggcacttagagtttataatgacatatataatatcacaccacctctctctgycccagactgacttcactgtgggtttgggagtctttttcagaagcaacaagggagaaaattttgcttttgatggcaccccatcaatcaaagtgagacacac

SEQ ID NO: 412113 - DNA, 201 bp, Homo sapiens
ttcctctgaagatcagcttatagttttatttggcttcttttttttcgcttggtttacttttggtttctgctttatccacgtaggatattttcctttttttrgctttgtttctttattctgttcggttttttaaaattaaattttaacttcttattgtcactccatattcaaatatatccatttatggatgtattagattgg

SEQ ID NO: 412114 - DNA, 201 bp, Homo sapiens
agattcccctcacagggccatccaggagggattccaggagggcagagtctgacacaacatagatgttcaataaatatgtgttgaatagagccgtcattgascagtccattcattcactacctaggtctcatggctgccttagagctgggaaggtacaggctgcttaggggacccagctgtggtcttccctctcccacccac

SEQ ID NO: 412115 - DNA, 201 bp, Homo sapiens
tctggtctgcttacccactccttgccccctgcatccaccccccttgtatatttttcccttaatgaaaagaaaatagagatcattttaatacagaggtaaarttctagggcctccccagaaaactgtttcatgaatgaggaagctaagaaaaagggccactggctttaaagcccagtaggttaaataggagaacggagaaag

SEQ ID NO: 412116 - DNA, 201 bp, Homo sapiens
tgacatttactggagctggcattctttaattcctactctctgagccactttccaacatgttctattcatcactgtgacttttttgttgcctttgccactaytaaccttctaagagttcggaaaagaggcacttagagtttataatgacatatataatatcacaccacctctctctgccccagactgacttcactgtgggtt

SEQ ID NO: 412117 - DNA, 201 bp, Homo sapiens
ttgactttgtacagaggacaagaggaagagtgtggagttaagctgactgcacttacatctacatcatcctaccacctaactacatggggggcctgggacaygctctcgagtcttagcttcatcatctgaataatgggtctcttactttcctattgctgccataacaaattaccatgaacttcttagcttaaagtggcacat

SEQ ID NO: 412118 - DNA, 201 bp, Homo sapiens
cctgtggctctttatgttggagctggtacaggtaggacccctgctaaacctggcaggggagtagcaatgataataatgatgatcataattatagtaaaatmatgctttttattgagctcttaacatgggccaagcactatgcttggtgctttatatgtacttacttttatcttgtccttacagcatcataggtggcaccat

SEQ ID NO: 412119 - DNA, 201 bp, Homo sapiens
gactctacccactaaatgcaggtagcagtccatagttgtgacaacaaatgtctccagccatagacaaacatttcctggtggtaaaaatctcccccagttgmatgtaaatttgttcagccattgtggaaagcagtgtgatgattcctaaaagaacttaaaacagaattatcaatcaacccagcagtctcattatggagtata

SEQ ID NO: 412120 - DNA, 201 bp, Homo sapiens
atttttgggtgggaggcttatggttgctgtcataagcatctactagaagccaaataccaggttatgtactagaaatggctaggcggggctcatgcacagtkatttgctatgattctaacccatttttaaattataatttcaacttttattttagatccagtggatacatgtgctgggttgtttcatgggtatattctgtga

SEQ ID NO: 412121 - DNA, 201 bp, Homo sapiens
ttgtttgcagggttttttgagattttatgcaaacttttaatgtttttgcctgtcagtgtttccattatttgaaatctttcatattaagtaaaattagccamggccagtgctatattaaagtatcaaaacttttagcatttgctcaccctcctttcctggggagaacaggtttctctacacgattgcctgtatgctttgcta

SEQ ID NO: 412122 - DNA, 201 bp, Homo sapiens
catgaataaagtggcagcttcctcaggggagcctgggaagagggtatttgctccattatcagcccggcttttggcggtgcaagaaatgaaggctactgtaygtctagaagtttccaatattttcaccacctagtgttcttttttattattttgactcctatggacactgtttttaggaggattttatctactgataaaagt

SEQ ID NO: 412123 - DNA, 201 bp, Homo sapiens
ggtggatcacgaggtcaggacttcaagaccagcctggccaacattgtgaaaccccgtatttactaaaaatacaaaaattagctgggcatggtggcgagackgaggcgggagaattgcttgaaccgggacctgggaggcagaggttgcagtgagccgagattgcgccaccgtattcctgcctgggctacagagtgaggcact

SEQ ID NO: 412124 - DNA, 201 bp, Homo sapiens
gccttttaggaaataagcatcaggaactaactaatcaaagtgaaactttctgggagacatctgacagccgcatgcctctaatgaccttcaaaaagatcacrtgctccaggcaattacaggatttgggagaaaatagctcattctgaatagccgaacctgctgcaatgttcatcactttgcagccgtgcccctacctccccg

SEQ ID NO: 412125 - DNA, 201 bp, Homo sapiens
tccattatttgaaatctttcatattaagtaaaattagccacggccagtgctatattaaagtatcaaaacttttagcatttgctcaccctcctttcctgggragaacaggtttctctacacgattgcctgtatgctttgctatgagtcatagtttagagaaaacccccacgttcctgtgcaatgaaagaagcagcataatga

SEQ ID NO: 412126 - DNA, 201 bp, Homo sapiens
ataaagcagaacagaacaatcctattgttctcaccatactgctgagacataaaatcccagaattctagaagggctctaattaggaaaggcttccaggagamggtgactgtggggtcatgaataaagtggcagcttcctcaggggagcctgggaagagggtatttgctccattatcagcccggcttttggcggtgcaagaaa

SEQ ID NO: 412127 - DNA, 201 bp, Homo sapiens
cgggacctgggaggcagaggttgcagtgagccgagattgcgccaccgtattcctgcctgggctacagagtgaggcactctctgtctctgtctctgtctctstctctctctctctctctctctctctctctatatatatatatatatacacacacacacacacacgtatgtgtatatatatatgtgtgtgtgtatatatata

SEQ ID NO: 412128 - DNA, 201 bp, Homo sapiens
tttctttgctgcttcctttcatcttgccaagttacatttagcaggatattcatctaattccttttttaaaattttaatgctccccatttttttggggggtkggggacaaaaagagccttttaggaaataagcatcaggaactaactaatcaaagtgaaactttctgggagacatctgacagccgcatgcctctaatgacct

SEQ ID NO: 412129 - DNA, 201 bp, Homo sapiens
atccctgctgcttggtgcttgaagttcatctgacgtgaagcctttgtgaaaagagtattcaggaacccagtagcaatcttttcctttattttaattagacmatgcttctctcttgtttgcagggttttttgagattttatgcaaacttttaatgtttttgcctgtcagtgtttccattatttgaaatctttcatattaagt

SEQ ID NO: 412130 - DNA, 201 bp, Homo sapiens
catgtgaagcaaagatttgcacctggggttgttagtagcagggtctattgaactatgacatctcttgatatgttttagtcaccatattaatttctcttgcmatttcaaatagcattagaggaaaatgtgaggttaaaaatgtttatcaaggagacctggatcataaaagcttgagaaacatcaatgtagaggcatgaacag

SEQ ID NO: 412131 - DNA, 201 bp, Homo sapiens
aaagaggctgcttcagcctgcaggatgttgttgacatagtattacatctaagtacgcagggagccccgagccagggttgctggagtgtccctattgcaagkgaagttttggcaaacacaatctagggattgaaaaggtaactccttcattagatctgcctggaatttacacatctgcaaatgtgagaggacaaaaaggact

SEQ ID NO: 412132 - DNA, 201 bp, Homo sapiens
ctcccaatgtttgtccaatgtcatgacagagggtcaacctcccatgaaattgagagggttatagtcttggcttgagatggggttggagtaaataatgtatycaatcctcttccagcttagcattcacttggtggccaatgagctcttccataattattaacactactgagcacacgctacaagtcaagaactatgctagat

SEQ ID NO: 412133 - DNA, 201 bp, Homo sapiens
tgtcagttgtaactttttacttgcaatgtcttaagagtcacaactcaggcaatcccacaggtaccttagcaccttactaaatattcaggggtgaacttgtstccacttatctccaaatctagaattctttctaatgtaaacacctgggaagataatcttagcattaaaaacttagtttaacatacatctgtaattactgat

SEQ ID NO: 412134 - DNA, 201 bp, Homo sapiens
agctcagccaccaggtacctaccaaccagctaaacagatctcatcattcaaagtgtggtccatgcaccagcagctttgacatcctctgggagcctgaatgyagaatctcaggtcccatccagactgaccgagctagaatctgcctcttaacaagatccctcggcgattcacgtgcatgttaaagtttgagaagaactgccc

SEQ ID NO: 412135 - DNA, 201 bp, Homo sapiens
tcattcatttattcatccacttaaaatatcgtgagctagggagtgtgctggtgtagcatgtatccgaatgtcctttctttttgaacgctggctaatatttmattgtatgtatttacattttgtttacctgttcttctgtcaatggacatttgggttgttcccacctttggctattgtgaataatgctgctatgatgggctg

SEQ ID NO: 412136 - DNA, 201 bp, Homo sapiens
cagtactcaaaagttatcttttctgctcctctaccgcctcccacccaagaactggtaaattgggccagctttctagaactgcaacaattgtttgcagttgwtacatggtgtattagttgcctattgctgaaataaattaccgcaaacttactggcttaaaataatacaaatttattatcctacagttctgcaggtcagaaa

SEQ ID NO: 412137 - DNA, 201 bp, Homo sapiens
gagtttgaaagctcagccaccaggtacctaccaaccagctaaacagatctcatcattcaaagtgtggtccatgcaccagcagctttgacatcctctgggarcctgaatgtagaatctcaggtcccatccagactgaccgagctagaatctgcctcttaacaagatccctcggcgattcacgtgcatgttaaagtttgagaa

SEQ ID NO: 412138 - DNA, 201 bp, Homo sapiens
agaggtagggtgctctttttttgctcattcatttattcatccacttaaaatatcgtgagctagggagtgtgctggtgtagcatgtatccgaatgtcctttstttttgaacgctggctaatatttcattgtatgtatttacattttgtttacctgttcttctgtcaatggacatttgggttgttcccacctttggctattgt

SEQ ID NO: 412139 - DNA, 201 bp, Homo sapiens
gttgagaaggggaaggtatccagccatatgaaaatgaccaaaaactggagttttcatttgttctgataataaagcagaatattgacaagtcagactccccyacacattcactcacaactcaccacctacccatttattagctgggctaggctatacaggcttgcactctgctctcacagagcttatcaatctagacgggga

SEQ ID NO: 412140 - DNA, 201 bp, Homo sapiens
actctaaagactgcactggaggttccccccataccgcactcagctttaatgaggttaactgacaaagaaaaattgtatatattaaaggtgtacaacacaatttttttttttttttttttaaagaaaacagtgtttcactctgttgcccaggctggagtgcagtggcatgatcatagttcactgcagcctcaacctcctggg

SEQ ID NO: 412141 - DNA, 201 bp, Homo sapiens
cacagatgtgtctgatcagaagcccaaaatacaaaatcaatgccaagagatgaagtgactagtctacgtagacaaagagagaacagcatcatggtcaggaraagtgggctggcgacttcctcccctgtttcactgagcatggcaccggttaggagctgagctgtttggggttagagagcgagtttgatcaacatttacgct

SEQ ID NO: 412142 - DNA, 201 bp, Homo sapiens
cttttctaagcctctcccctgggagtatgtgacatgatgagctgtcactccttggttttattaggccacatggcagaaaggacttctcagttgactttgarttactcaacaaggagattattggggcgagcctcacccaatcacatgacccctttaaaagtagaaagttttgtgcagctattaggttggggcaaaagtaat

SEQ ID NO: 412143 - DNA, 201 bp, Homo sapiens
atatatatcgatttatatatattatatgcacatacgcatatcatgagatgctttatttgacaatttttaagtttttctgtcttattctaagttagactacrgtgcataaaatatatatattaaataagcttatatcttatttaatgatgaaataatgaaaatagatccacataggcacattcaaatgatttttgatcaatg

SEQ ID NO: 412144 - DNA, 201 bp, Homo sapiens
aattcaatatccagttatgataaagatggtaaattcctcaatctgataaagggtatctatgaaaaacctataatatatatatcgatttatatatattataygcacatacgcatatcatgagatgctttatttgacaatttttaagtttttctgtcttattctaagttagactacggtgcataaaatatatatattaaataa

SEQ ID NO: 412145 - DNA, 201 bp, Homo sapiens
ttatgtaatgctgaagtttgagcctctaatgttcctgttgcccaagtagtgtagtgaatgcactacctgataggtagtttttcaacccttgaccccctccytccctcctcccttttgggatccccaatgtctattgttcccatctttatgtccatgagcacccaattttagttcctacttattagtgagaacatgtgttac

SEQ ID NO: 412146 - DNA, 201 bp, Homo sapiens
ttaacagagtaaagggggaaatatggtcatttcaatagatgcggaaaaagcatttgacaaaattcaatatccagttatgataaagatggtaaattcctcartctgataaagggtatctatgaaaaacctataatatatatatcgatttatatatattatatgcacatacgcatatcatgagatgctttatttgacaatttt

SEQ ID NO: 412147 - DNA, 201 bp, Homo sapiens
cagatatattgccattgtgctagaaagatctactggacagctcaacctagggctggctttcattctttctgttgtgctagggaagctccctgatatggttkggcattgtccccacccatatctcatcttgaattaccacatgttgtgggaaggacctggtgggaggtaattgaatcataggggcgggtttttcccatgctt

SEQ ID NO: 412148 - DNA, 201 bp, Homo sapiens
cttttaggaggagaaaaaaaaactttctttctctgtaatagtaggagtagtgtagaaatagccgcagtggttaacacatgcatgttcttcacatgtggtasgagaaggactcaccaaatgtgtccatgccctaatgcttggaaccagtggatgtgttgcctaatttggcaaaagagattttacaactgtgattaagttaag

SEQ ID NO: 412149 - DNA, 201 bp, Homo sapiens
tgttcaactcccacttatgagtgagaacatgcagtgtttggttttctgttcttgtgttagtttgctgagaatgatggtttctagcttcatccatgtccctrcaaaagacatgaactcatccttttttatggctgcatagtattccatagtgtatatgtgccacattttctttatccagtctcattgatggacagcttgatt

SEQ ID NO: 412150 - DNA, 201 bp, Homo sapiens
agagagttggagaggaaggcaagggggagagaaaaggagggagggagaaggagagagagagagaagagtgagactgattctgaaattagttgagaaagatrcatagagatatatacagtaatacaaaaacataaagggagtaagattttgcaaggcaatttgccaatttttataaaaatttaaagagcatactttgtgatc

SEQ ID NO: 412151 - DNA, 201 bp, Homo sapiens
aatgctatgcctggtggtttccatttgtattcaaacccttccctgcccatggtcttctcttctatttgcttcttgtctgttttgatagaaatcaataattwccctcatcttgctcctgcatttagaaaagtgaaccaactgtccagtttccctgcttcattgacacacagaggttaacatctcggggacgtcaatcctcag

SEQ ID NO: 412152 - DNA, 201 bp, Homo sapiens
ccacattctctggaacaatgacagtttactttattgccttagagagaaggagctacaaggcctgagtacagagaagatgggggaagtaacccaggtcaccycttgaaatagctgaaagaaactatccaggaactgacaaatgggctttgcattctgacaggtgcagggccctcttcagcagttcgcattggaaattggaaa

SEQ ID NO: 412153 - DNA, 201 bp, Homo sapiens
taacccaggtcacctcttgaaatagctgaaagaaactatccaggaactgacaaatgggctttgcattctgacaggtgcagggccctcttcagcagttcgcrttggaaattggaaaaatgagcctattgttgaagatctagatcattcattccatttttaagtgagaaaggaggtatttcacactattacctttacttccga

SEQ ID NO: 412154 - DNA, 201 bp, Homo sapiens
tggaaattggaaaaatgagcctattgttgaagatctagatcattcattccatttttaagtgagaaaggaggtatttcacactattacctttacttccgagmgtttgtgccaaagatgtaagatgataacatggagggtgatattccatgtgatggatttcttcttcccttgcctcactacagaatgttcaaaaataaactt

SEQ ID NO: 412155 - DNA, 201 bp, Homo sapiens
ctgcaaaatggttgctgtgagaattagagatgattcaggtaaaccactgagcatgatgctagacacgtccaagtattagctgtacagtctttggatttatstcctgggtagagagaacctcctgccccaagtctggaaagatgttggcttttgtagagtaaactctcgaaatgtattaaattgactccatgcttgggaatt

SEQ ID NO: 412156 - DNA, 201 bp, Homo sapiens
agacatgatggtgcaacagaagaccagaggattacaatgatgtgtccgaaatctgagccaggagcaaaaacaaagaatgcatccttttccccacatgagcygcctgtcctgactcatgatggacctgggatctcttgcctctgttgacttggagactggggtctttacgaatgggggttggagttaggggcagatttaggt

SEQ ID NO: 412157 - DNA, 201 bp, Homo sapiens
gtctgcaaaatggttgctgtgagaattagagatgattcaggtaaaccactgagcatgatgctagacacgtccaagtattagctgtacagtctttggatttmtctcctgggtagagagaacctcctgccccaagtctggaaagatgttggcttttgtagagtaaactctcgaaatgtattaaattgactccatgcttgggaa

SEQ ID NO: 412158 - DNA, 201 bp, Homo sapiens
tcataattatagtaaaataatgctttttattgagctcttaacatgggccaagcactatgcttggtgctttatatgtacttacttttatcttgtccttacarcatcataggtggcaccatgattatttatcctcattttgcagctgagaatcagaacaattaaccttgtatcgtatagctagtatgactctcttgaatccag

SEQ ID NO: 412159 - DNA, 201 bp, Homo sapiens
atcttgacatctccttttcttcactcttgattcctgcccctgacatcaactgtagtgatgcaggctcctacttctcttgagatctggtattcttctattgygtctaagtggtaggttggtgttgtggaagccatatgggctttggaggcagaaaaaccagggtttgcatcttgggcttattttttacaagctgcagatttc

SEQ ID NO: 412160 - DNA, 201 bp, Homo sapiens
gtcatccacccatctcagcctcccaaagtgctgggattacaggcgtgagccactgcacctggcccatcttttcatttctttggtatactgtttttttcctyccagctttattgaggtttaactgacaaataaagtggtttgtattcaaggtgtacaatgtgatgttttgatgagtgtgtagactgtgaaatgattaccacc

SEQ ID NO: 412161 - DNA, 201 bp, Homo sapiens
agacatcttgacatctccttttcttcactcttgattcctgcccctgacatcaactgtagtgatgcaggctcctacttctcttgagatctggtattcttctrttgcgtctaagtggtaggttggtgttgtggaagccatatgggctttggaggcagaaaaaccagggtttgcatcttgggcttattttttacaagctgcaga

SEQ ID NO: 412162 - DNA, 201 bp, Homo sapiens
aaataaataaaattaaaacataaagctaaatattaccaacaaaagaataaattaacgggaaaatacatctattggaaattacccaaatgcagcacagagasaaaaaagaatgcaaatattaaaacaaggtaaataacctagaggagagaatgaaaagttccacagtattttaaagttttcaggaaaaaaaaaaaaaaagat

SEQ ID NO: 412163 - DNA, 201 bp, Homo sapiens
aaatatttaaccactacagcattatcacagctgaatcagaatagacactcactttgtagaattctggagcacctgttatgtgaggtgttaatcctttagtrgctggttatggggaggtagggggttcccaagggaggggctgagtggcagggggcacttggggttcctggaagatgtggctattcacaagcaaaacggaag

SEQ ID NO: 412164 - DNA, 201 bp, Homo sapiens
gggacctgggaggcagaggttgcagtgagccgagattgcgccaccgtattcctgcctgggctacagagtgaggcactctctgtctctgtctctgtctctgyctctctctctctctctctctctctctctatatatatatatatatacacacacacacacacacgtatgtgtatatatatatgtgtgtgtgtatatatatac

SEQ ID NO: 412165 - DNA, 201 bp, Homo sapiens
tttcctcccagctttattgaggtttaactgacaaataaagtggtttgtattcaaggtgtacaatgtgatgttttgatgagtgtgtagactgtgaaatgatyaccaccatcgaattaattaacacatctttcacgactgttggttaccattttgggtgtctgtgtatgtggtgtgagtataattaagatctaatcgcttcac

SEQ ID NO: 412166 - DNA, 201 bp, Homo sapiens
ctgggaggcagaggttgcagtgagccgagattgcgccaccgtattcctgcctgggctacagagtgaggcactctctgtctctgtctctgtctctgtctctstctctctctctctctctctctctatatatatatatatatacacacacacacacacacgtatgtgtatatatatatgtgtgtgtgtatatatatacatata

SEQ ID NO: 412167 - DNA, 201 bp, Homo sapiens
atcttttcattaaaatgggtccacaaatttctgcttagaaatacaattttagcttccctctttgaaatccttacagattaaacatttcctccttgctatcmttgtgacaatatcttccatttattgtgcctctgctgtatgccagacggtgatagatgctttccatgcataatctaattctaatttttacaacttaataat

SEQ ID NO: 412168 - DNA, 201 bp, Homo sapiens
agttgcatgctcaggattttatagtatatatggtttttcttattgtgctttgccctctgtggactttcttagaggattcaagattttctttaattctggaraaaatctcagccgctatctgttggattctttctttccatcattctttctattctctccttctgaatatacatgcatatgtatagtcatgcgttgcttcat

SEQ ID NO: 412169 - DNA, 201 bp, Homo sapiens
ctgcaaatgtggaagctgaggcacacagtaagaaagggtaaacagtggaggctggatgcaaacccaggtagtctgattacagagtttgaaagctcagccaycaggtacctaccaaccagctaaacagatctcatcattcaaagtgtggtccatgcaccagcagctttgacatcctctgggagcctgaatgtagaatctcag

SEQ ID NO: 412170 - DNA, 201 bp, Homo sapiens
gccgagattgcgccaccgtattcctgcctgggctacagagtgaggcactctctgtctctgtctctgtctctgtctctctctctctctctctctctctctcwatatatatatatatatacacacacacacacacacgtatgtgtatatatatatgtgtgtgtgtatatatatacatatatatgtgtgtatatatacacacat

SEQ ID NO: 412171 - DNA, 201 bp, Homo sapiens
tttagcttccctctttgaaatccttacagattaaacatttcctccttgctatccttgtgacaatatcttccatttattgtgcctctgctgtatgccagackgtgatagatgctttccatgcataatctaattctaatttttacaacttaataatagtgataattataaaacaatgataaacagtagctttcatgtatcaaa

SEQ ID NO: 412172 - DNA, 201 bp, Homo sapiens
aggcactctctgtctctgtctctgtctctgtctctctctctctctctctctctctctctatatatatatatatatacacacacacacacacacgtatgtgtatatatatatgtgtgtgtgtatatatatacatatatatgtgtgtatatatacacacatatttatacgtgtatatatatgtgtgtatatatatatgtgtgt

SEQ ID NO: 412173 - DNA, 201 bp, Homo sapiens
ggcactctctgtctctgtctctgtctctgtctctctctctctctctctctctctctctatatatatatatatatacacacacacacacacacgtatgtgtatatatatatgtgtgtgtgtatatatatacatatatatgtgtgtatatatacacacatatttatacgtgtatatatatgtgtgtatatatatatgtgtgtg

SEQ ID NO: 412174 - DNA, 201 bp, Homo sapiens
atgaagtgttagcagtgaggtgacttccctctttttattaatggggcaactgaggcacagacagatcctgcaatttgctcaaggtcacaaacttacgttgrgattcagttttttttttttttggagatcaacacttccttggacttattgggaaatggatgatcattgttaaaaacacgttttccaaaaaaaatatttttt

SEQ ID NO: 412175 - DNA, 201 bp, Homo sapiens
ccctgggtgtccctccgggcatgcaacacacagatggcaatgttccgagtgttgcaatacacatttgtgtttctggttactttaatatcagccccatgtcmtgatgttcgtgtcattggcatggatgctaacaggctgtctagaaaatgtgcaatatattttttattttgcctaaatagcacatctaattgttcagcatga

SEQ ID NO: 412176 - DNA, 201 bp, Homo sapiens
gtttatcttccttcacatccagaaattctgttggacactcacttccaccccaaactcctcaaatcaaaagccttcaaaacacgaggcactcttggatctaycctgagtatcctccaaactgtggatacagtttagtgagacaagcaatttctcccttctgagttattctctctgttggtggcaaaccacttcatagcacca

SEQ ID NO: 412177 - DNA, 201 bp, Homo sapiens
tctactccaatccctgcccaccccactcctctcagctgctgtttttctcctggactctttctcaccctgtcttcacgcagtcctccctgggtgtccctccrggcatgcaacacacagatggcaatgttccgagtgttgcaatacacatttgtgtttctggttactttaatatcagccccatgtcctgatgttcgtgtcatt

SEQ ID NO: 412178 - DNA, 201 bp, Homo sapiens
aaggtggagctgtaactctggggcattcttgcttatgacaatgaggatttccaaggtgtctgcaactcagagattctgggacctagagaatcagagcaacstcgggttgggagatgagttttctttcctgctcatcttcatggtgaaagcggagctggggtgcacggtgtgtggggggtgactggcagtgcaggcatgccc

SEQ ID NO: 412179 - DNA, 201 bp, Homo sapiens
taaagcctgcagaactgtgagccaattaaacgtcttttctttataaattacccagtctgaggtatttctttatagcaatgcaagaacagactagtacaggrtctctgcctttcttatctgttgttgaatatccagcacccagctccaggctcagagtagacactcaatacatgttggttaaagaactgagtgaattagtaa

SEQ ID NO: 412180 - DNA, 201 bp, Homo sapiens
tgggacctagagaatcagagcaacgtcgggttgggagatgagttttctttcctgctcatcttcatggtgaaagcggagctggggtgcacggtgtgtggggrgtgactggcagtgcaggcatgcccagctgtgagtgccgtggcaccaggacaatcacctccctggatagagtttccctcgtgcagcatcagcaataggtgg

SEQ ID NO: 412181 - DNA, 201 bp, Homo sapiens
acagctcacaggtgattcatcttgaacatacagccaataaacacccaaagactttcccatcttgtaccaaggcaggtggatttttttttttttcaagactkaatctctgttgccaggctggagtgcagtggcacgatctctgctcactgcaatctctacctcccaggttcaagcgtttctcccaaggcaagtggattttga

SEQ ID NO: 412182 - DNA, 201 bp, Homo sapiens
gacagatttaaaaccctttcatggcatcttgtagcctttggaataaaatccaacatcctcaccatggcctatgaagagaccctgcatgatttgggcactasgtgcttttttggggctttgtttgctgtcattttcctccttgttctttccaaccctaggggctttgtcctcatggttccctatgcctggaatgctcttccc

SEQ ID NO: 412183 - DNA, 201 bp, Homo sapiens
tgtttgtattgagcatatttttatgtgcttagtggctgtttgtatgccatcttgtaagaaatgtctattgagaccctttgccttttttaaaaacggagtcrcctttctattgttgagttgtgagtgttctctatgtaccctggatactagacttttatgagatatataatttgcaaatattttctgtgtgtcgtgttttca

SEQ ID NO: 412184 - DNA, 201 bp, Homo sapiens
ggtggtgctggcccttttcttgcttccagtgcctgaattcatccatcaattccacaaatatttattgattgtgagctaggtgccaggctctgtgctagttsctagggatacagtggtgaaggacatagttcatgctataaaaaggctggggagacagataaacaggcaattattcttatatataaatataccatgatgcta

SEQ ID NO: 412185 - DNA, 201 bp, Homo sapiens
caggacattgtgggacttgattgctgcagtgtgaaatttatggttttgtaagacagatttaaaaccctttcatggcatcttgtagcctttggaataaaatmcaacatcctcaccatggcctatgaagagaccctgcatgatttgggcactaggtgcttttttggggctttgtttgctgtcattttcctccttgttctttcc

SEQ ID NO: 412186 - DNA, 201 bp, Homo sapiens
ttgctggatcatataggagttctatgtgtagctttttgaagaactgtcgtactgttttccatagcagctgtaccattttacattctcacaatcagtgtacrgggtttcttatttctccacatcctggtcaacatttgttatttccattcttctgaatttagccatcctggtgagtgtgaagtgctatctgattgtgatttt

SEQ ID NO: 412187 - DNA, 201 bp, Homo sapiens
atggggttcatgagagaaattcttggcccctgttgctgtcaggaaggcttttagactaaaaagaatggagctaatgaaagcagttggatagggcaagcgtrtgagcattggctttcactggcttagggcagctccaactcccccagaaaaggctctttgtttatggtgaggtcaggacttcagagtgtgactcagaaggtc

SEQ ID NO: 412188 - DNA, 201 bp, Homo sapiens
tgtctccctttgtccccagccctagaaaccatggatctactttttgtctctatggatttgcctattctggaaatttcatgtaaatggaattgtataatacrtggccttttgcgtctggtttccttcacttagcataatgtcttcaatgcccatccatgttgtagaaggtatcagtacttcattcctttttatgggtgtata

SEQ ID NO: 412189 - DNA, 201 bp, Homo sapiens
aatgtggctgagatggatgatagacttgagatgcctgttacacatcctattagtattttttccctttgctgctataacaaattacacacagtggcttaaarcacatcaatttataatcctactggtcacccacatctcactgggctaaaatcaaggtgcagtgctgtgttctttctggaggctgcaggggagaatccattt

SEQ ID NO: 412190 - DNA, 201 bp, Homo sapiens
tctgcccaccttggcctcccaaagtgctgggattacaggcatgagccaccacacctgtccagttatttcttatttaaatgattataacaaccttctaatgycctcctgcttttctattcactcatcctcctgtagatgctaaatttttttttctgaaatataaatgtcatgttcctattaataacccattacttgttgata

SEQ ID NO: 412191 - DNA, 201 bp, Homo sapiens
tcatggctggtgaaaaacagaaagacactggggattcagaatgcacaacaatgtttgcaattgcaatgcagagacggtgatgtggcaggcagtcagtcagycagtcagtcagcgtgctccctttccgggatctgccagtggagtgcactgtgccccatggatgggcttcggagggggtagtggtgacatcagctccccagc

SEQ ID NO: 412192 - DNA, 201 bp, Homo sapiens
aatggagctatgagcataaggctgtattgttattgttgtcactgtcatgatcatggctggtgaaaaacagaaagacactggggattcagaatgcacaacartgtttgcaattgcaatgcagagacggtgatgtggcaggcagtcagtcagccagtcagtcagcgtgctccctttccgggatctgccagtggagtgcactgt

SEQ ID NO: 412193 - DNA, 201 bp, Homo sapiens
ccccagcagcttctcacctctcttggcctgaagggggctgtgccctttgtttcactgcagctgctgcagacagagaaaggaggagattcccagcctcgagkttgcctcgcagggcagtagcaaccgagggcagagcacagaggagcagctgcattctccatggggacatgactacgtggcctggcttctccttcccccagg

SEQ ID NO: 412194 - DNA, 201 bp, Homo sapiens
caatgtccctgcccttatcaaacttatattccaggggatggggacaaaatataaacacggtaaatatataatgttagattgcattaagtgccacaggcaargcagggtaaagagactgaaagtgacaggagatgccctttaagatagggtttcaggaaagctggatcagctaggatggatgaggccctgctgcacaaacag

SEQ ID NO: 412195 - DNA, 201 bp, Homo sapiens
actacccagtcagttctctcctattattctctagcttgcactttatttctttcacagcctttatcatactgtgacattaccattttttttggttgttattrtccatatgcccctctcctccattccctactagaaattaagctcccaaaggcacaggccttgtgtatcttatttgtgctaagatggtgcctgacacctagt

SEQ ID NO: 412196 - DNA, 201 bp, Homo sapiens
attattctctagcttgcactttatttctttcacagcctttatcatactgtgacattaccattttttttggttgttattgtccatatgcccctctcctccaktccctactagaaattaagctcccaaaggcacaggccttgtgtatcttatttgtgctaagatggtgcctgacacctagtgagtcctcagtgagtgtggtat

SEQ ID NO: 412197 - DNA, 201 bp, Homo sapiens
agtagagtgtttagaaaaatgtttataaaatacctataaaaatgaaaattagcttttctccttgtgtatacctgatgggtttatcatatttgaaatgactycatcactgtccagattccctgctaaactccacctgggcaggagcatatccccttcatagagtccccccagcacctagatactgcctggcaagtgatggat

SEQ ID NO: 412198 - DNA, 201 bp, Homo sapiens
ggagcaccataatctcctgcttatatctcagaccaaatcctgctctcttttcccttggtcctttatctttctggaacattcctcacactcacctttgcacktgttgttccgtttgcttgggaatttcttcccctggacctttctgtggttgtcttgttctcaccattcaagtttcgtctcaaacattgctgactgtgacag

SEQ ID NO: 412199 - DNA, 201 bp, Homo sapiens
attttagttcctacttattagtgagaacatgtgttacttggatttctgttcccttgttaacccacttaggataatggccttcagctgcatccatactgctsgaaaggacatgatttcactcttttttatggctgtgtagcattccatagtgtatatatatcacattttctttatccattccattgttgatgggcatgtggg

SEQ ID NO: 412200 - DNA, 201 bp, Homo sapiens
ttttgttgactttgtcaaagatcagttggttgtaggtgtgcagctttattttagggggtctgtattctgtttcattggtctatgtgtcttttaccagtacyatgctgtttgggttactgtagcattgtagtatagtttgaagttaggtaatgtgatggctttggctttattctttttgcttaggattgccttgcccattca

SEQ ID NO: 412201 - DNA, 201 bp, Homo sapiens
caaaattaatgttttataaaaggaagaaatataaaaagtctttaggccatctgtattggcctaatgcctaaaatcatttagcgaggtctgggccatgttarggttagggttagattctgttttttcataattagtaatctggttgcagggaccagacatgctctgcaataacaaacagccataccagtaagtatcaaatta

SEQ ID NO: 412202 - DNA, 201 bp, Homo sapiens
ggttagattctgttttttcataattagtaatctggttgcagggaccagacatgctctgcaataacaaacagccataccagtaagtatcaaattatgtgctyagtgaaaagtggagtccctaatacaatgtctcttactggagtctatggacctcctgcatcaatgatgccaagtatgctggttcagaatatagattcctgg

SEQ ID NO: 412203 - DNA, 201 bp, Homo sapiens
gagctgagagccacacccccttagcacgcagctgctggactcccctttcacgttttggtgaactcttctccaggggcttctgtcacatcaactgcagtggkattgctgcctccagtttgtgtcttctggtgctagcacagaaaccccaccttcttctcttctgtttctggaaaacaccagcctcctcttaccttactgaga

SEQ ID NO: 412204 - DNA, 201 bp, Homo sapiens
aactcttctccaggggcttctgtcacatcaactgcagtgggattgctgcctccagtttgtgtcttctggtgctagcacagaaaccccaccttcttctcttmtgtttctggaaaacaccagcctcctcttaccttactgagatcagaattcttataacacccaccactgtttcatcttagggtcctttttcacatacagtct

SEQ ID NO: 412205 - DNA, 201 bp, Homo sapiens
cttagggtcctttttcacatacagtcttatggttttctatttgaaatggcccacgtgcatctgctttgcctcctaaacgaagctaaatgtcttctgatcaygtctccttttaataactcatctctttaaaaaagtcatatcatttgattcttctaaatgtaaaagtaactactctcatcgtagaaaattggaaagccacgt

SEQ ID NO: 412206 - DNA, 201 bp, Homo sapiens
ctttaaaaaagtcatatcatttgattcttctaaatgtaaaagtaactactctcatcgtagaaaattggaaagccacgtatcagggccaggacaaggaagargagattaagaatccctccttggatgcaaaatttaaaagggtgccaaacaattaagttatcaaggtaaataccatttcagtgcaatattttagagaataga

SEQ ID NO: 412207 - DNA, 201 bp, Homo sapiens
agcaacaacggatgaaaataagcatgggacgttgccaacaagggaagctcactgagccttggcgtgcagagtcttttttggggtctgctgttgagttcttrtatgggtgaccttggcttccaggtcctctggaggttgagctcatgctatgtgattctaagcccccactctaaatcacactgttagactctctggtgtgac

SEQ ID NO: 412208 - DNA, 201 bp, Homo sapiens
acatgcactcagtctactgtaacctgtgcagaaatgatttcccctcctgccttctttcatgatccccagcccccaggtagtcttctctgactgccgccccmccaagactcatcaagtgccctatcatgctgccattgtagcacttaacaacgtgtaatgattatctattaatcgtgtaatgattatcttaatgtgtaatga

SEQ ID NO: 412209 - DNA, 201 bp, Homo sapiens
tcatgaaaggtccaaccgtgagctgccagtggtgatcttcctacggaatcatggacagtgccaccttctcagcaacaacggatgaaaataagcatgggackttgccaacaagggaagctcactgagccttggcgtgcagagtcttttttggggtctgctgttgagttcttatatgggtgaccttggcttccaggtcctctg

SEQ ID NO: 412210 - DNA, 201 bp, Homo sapiens
aggccatttcacttggggcttgatcacctgctcattgtcggctctggactcaaactcatttgccccagtagcagcatgctcttcagaggacagaaagaggsccataggctctgatcccttagttggtaaacaatcatttctctagatctgtgttcatccatcatggcccattaagcagcagtggcctggggccattttcca

SEQ ID NO: 412211 - DNA, 201 bp, Homo sapiens
gaatcatgaaaggtccaaccgtgagctgccagtggtgatcttcctacggaatcatggacagtgccaccttctcagcaacaacggatgaaaataagcatggracgttgccaacaagggaagctcactgagccttggcgtgcagagtcttttttggggtctgctgttgagttcttatatgggtgaccttggcttccaggtcct

SEQ ID NO: 412212 - DNA, 201 bp, Homo sapiens
tgttatagctgaaggatacagactaaaatcagccaaaagagggacacataggcagaatcatgaaaggtccaaccgtgagctgccagtggtgatcttcctayggaatcatggacagtgccaccttctcagcaacaacggatgaaaataagcatgggacgttgccaacaagggaagctcactgagccttggcgtgcagagtct

SEQ ID NO: 412213 - DNA, 201 bp, Homo sapiens
aaccaaacaacgctcaggtatccaaagtgtctttcctgactgtcccccactccactgcaccattgcaggctgaattagggggcctcttctctgcgcctctyacattaccctgggtttcccgtgctcaggccatgcctaccacttttttttttttttttttttttgagatggagtttcactcttgtcacccaggctggagtg

SEQ ID NO: 412214 - DNA, 201 bp, Homo sapiens
cttttcttgccttttgttgaattaaaattctttaacttctcagctatctcatggatctttgcatctgttttgcatctgtttcttagcagcctagcttggckcatggtgctttatagagacatttagcatgtaaagatatttataaaggagggattctcttctatttttgcccagtcatctgttggagagagggggagcagc

SEQ ID NO: 412215 - DNA, 201 bp, Homo sapiens
aaggaaaccaggcaagtggaattaaccaggcaccttaatccagggcatcagctcccactccatcctagctggctgtcccttagaataagtgtgggaaggcrtagcagtgagtgcagttgcctcatgctaacctcaggacgaagcatgtaagagcctcggaaattgccccatggtagatatttatattaacgacatttgacc

SEQ ID NO: 412216 - DNA, 201 bp, Homo sapiens
cccaggctggtctcaaactcctgggctcaagagatccacttgccttggtctcccaaaatgctgagattaaaggcatgagccatcgcaccctgcccaatctkgttttcttaatactccctcctccctaataccttaccaaccccctgattattttaatgcaaatctcagaacttatatcattttaatttaaagtttcagtaa

SEQ ID NO: 412217 - DNA, 201 bp, Homo sapiens
tttaatcagttccatagcctgaccctggtccagtgagcatcagatttggagactgtgccatttatgaaacaggcaggtattggagagactccaaaaagctygtctcatgtgtgcttccctgcaaaaacagccagttccagctagaaactttatcttcatgaaaggaaacctctaggcagagagaagttctatttgttttta

SEQ ID NO: 412218 - DNA, 201 bp, Homo sapiens
acccaagaactggtaaattgggccagctttctagaactgcaacaattgtttgcagttgatacatggtgtattagttgcctattgctgaaataaattaccgyaaacttactggcttaaaataatacaaatttattatcctacagttctgcaggtcagaaagctgaaatgggtctcatggagctaaaatcaaggtgttagtag

SEQ ID NO: 412219 - DNA, 201 bp, Homo sapiens
catctaaaatgatcttgtacaccatcagtataccacacactggaatacaccacgttaaggaggcccttagcggaaggcgttgtccactttcttctttgaawggtatgaaaggtcttacagtgtccttgttttcacaacccagacagagttagtcagtgcctggagcaaacaccagcgacatgcataccaaccatgaaatct

SEQ ID NO: 412220 - DNA, 201 bp, Homo sapiens
gctggtcgagtgagtaagaacgatgacaaaacccatatcttgaatcacatgcatctttattaaaatcttcctccagctttccattttacctagaattaaartcaattgcttgctgtggcctagaaggagcaccataatctcctgcttatatctcagaccaaatcctgctctcttttcccttggtcctttatctttctggaa

SEQ ID NO: 412221 - DNA, 201 bp, Homo sapiens
gctgtgggtggtaatccaaatcaaatattcttcctgatctttgtgttaagactatcacttttggaacagccattttccaaagctctctcataattccatcktaggcagagatggagtgtggccatacaatgttttggaggctccaaatctaggtaaagtggaaccactggagacagagtgccatcttgtttctggagtcag

SEQ ID NO: 412222 - DNA, 201 bp, Homo sapiens
ctgaggcatgaggatcactttaacctgggaggcggaggttgcagggagccaagattgcgccactgtgctccagcctgggggatagagtgagactcccttcaaaaaaaaaaaattatttatctcatctctctgggttctgcacatatttgaatttgctgcacctgatacagaccaaatcagtgtttcctaaacctctctgat

SEQ ID NO: 412223 - DNA, 201 bp, Homo sapiens
aaacctacaagtcacctttgatttctctctccctcttacctgctatgtagaaaccatcagcaagggcttctagctctgcccttaacacagatccatgaaamatgcttctaccttcactgcaactccttatgaaatctgcattcagtgacagcagcatcttctaaactggtatcttcttccagctttgacatcctatgatca

SEQ ID NO: 412224 - DNA, 201 bp, Homo sapiens
taagagaagggacttgagttaccgtttagtttgaatcccgtctctactagcttgctgtgtgatcttggacaagtcacttaacccatctgtgctctagtttrcttatttgttaaaagggataaaatagaactgacctcatagagttgttatgagcattaaattagttaatatattttatatgtttgaaacagggcatgtcac

SEQ ID NO: 412225 - DNA, 201 bp, Homo sapiens
tagaaataaaaataaaatcctaaaccaccccaactaattaaatggaaccccttcttggccagggggatcccagagaaaccttgaaaactgagttcctagcyataaccagacaggagctcagacttaccacattatatcctctcccttgctaaccatcatttggctttctttcctaagggttaaacagaaacaggccatctc

SEQ ID NO: 412226 - DNA, 201 bp, Homo sapiens
tcagactgacggagggctcctttctaggtcattgctaatctcatggaagagggaaaagagaaggatgtagatgaagagatggatcttaaagattctcctgsaagtggcactgtcactcccacttacattccgctggctcccagcccaacattggcgaggattccaattgtccagtagggaggagtcctgtagagaggaggg

SEQ ID NO: 412227 - DNA, 201 bp, Homo sapiens
tgaagtttggcacccacagaggtctatgcttaggtaacggggtgcagatggcttgtcgtttgcagagacagtggctaataaccatctcccttccaccttckctttctgcaaaagcccagggcctggcagagtcacattgcttgcaaaggaagcctaatcataaaaaggtgccttttggtggcttaaagataaggtaatcag

SEQ ID NO: 412228 - DNA, 201 bp, Homo sapiens
tctcaaaaaaaaaaaaaaaaaaaaaattagctgggcatggtggtgcatgcctatagtcccagctacttggaaagctgaggtgggaggatcacttgagcccmgatggaggctgcaatgagctgagatcatgctactgcactccagcctgggtcgcagagtaagaccctgttccccaaccctgcccaaaaataaataaaaaag

SEQ ID NO: 412229 - DNA, 201 bp, Homo sapiens
attcgagacgggaatgaaggaatgggctacctgagcttggagggtggagatgtggctgggaaacactttgaaagcccttcaaaggctgttcaagtataatrgggacagtcatatgacagggctgggcctccttgaggtgggtgtttggatggtaagagggtcccaggcattgtcatctggctgcaatacaaggatctgcaa

SEQ ID NO: 412230 - DNA, 201 bp, Homo sapiens
atctcctccttgaagttcttgttgctatttgagcttgtttttagctggagatttactcttggattttagttgttttcgccttcatctgttgaagaggtggsatgatattgcgtgtgtgtgtgtttgtgtgtgctggaagttatgcttccaatatttacaatattggctttccaaagcagaagatgatgggctttctgggag

SEQ ID NO: 412231 - DNA, 201 bp, Homo sapiens
ggtggctcacacctgtaatcctagcactttgggaggccgaggtgggcagattgcttgagcccaggagttcgagaccagcctgggcaacgtggtgaaacccwgtctcaaaaaaaaaaaaaaaaaaaaaattagctgggcatggtggtgcatgcctatagtcccagctacttggaaagctgaggtgggaggatcacttgagcc

SEQ ID NO: 412232 - DNA, 201 bp, Homo sapiens
ctcaggtacaactcagaattgtatgagcaacagtggattctgcagtacaagatctcagagtctaacagggaggcgaagatattcactggggcagaacattygagacgggaatgaaggaatgggctacctgagcttggagggtggagatgtggctgggaaacactttgaaagcccttcaaaggctgttcaagtataataggg

SEQ ID NO: 412233 - DNA, 201 bp, Homo sapiens
gaggttgcatattctcagcattggtctctaagctgtggaggatttaatgtgctttctagactctgaagaacttgtaccttgagataattacccatatgttrtaaaaaaaatatgatgatgattatggcctaggggctatagattcaccactttgattcccccacacacccttttttaagagacgagaggctgcagtgagga

SEQ ID NO: 412234 - DNA, 201 bp, Homo sapiens
tgggatagtctaggaaatgctggcttcgcacaacacagccgagtgggtgggagccaaaaatagccagtcctttgagtagaaactcctctagggaggaaacwtttctttgaaattggacacacaaattagctaatgatatccagacactaaagaactgcatgttccccagacagcccgcggccccaggatcagacgctgatc

SEQ ID NO: 412235 - DNA, 201 bp, Homo sapiens
gttcatggagctagctttcttaatgcctcaatcatacttttaatcagaaaaaatttagagcattaatcttcagtgcttgttcttgccatttccagccactmgacactttttcataaacaaagtgacagtttgattgaatgtggtttttaattaagctgccttcacttggaacaactttctgggggcatatgtaaggagcag

SEQ ID NO: 412236 - DNA, 201 bp, Homo sapiens
tcccaaaacaaacacccttcctgcctggggattgcctaaagccagaggatgagaaattatggtttaggagtcatgcagttgaaggctgcaagactctaaasctccccaaattgctcctggggataacatcactattgtaaaacctaagatcggtacttgagatattttgcagacccttcatctgatggatcagttagcacc

SEQ ID NO: 412237 - DNA, 201 bp, Homo sapiens
aaaaaaaaaaaaaaaagaccctgctgcttccctgatctggcaaattaaaaatataaaacctttcgttaaaccccagagccacgagtttcctataagcatgrtagttttatgattcagctgcaccattagtaatctccagtcttcttagcccctcccatctctctgccacctctttcaattttcttctttactcattcctct

SEQ ID NO: 412238 - DNA, 201 bp, Homo sapiens
atgtgtgcttccctgcaaaaacagccagttccagctagaaactttatcttcatgaaaggaaacctctaggcagagagaagttctatttgtttttacaactrtccccagttgtatttgaagatggcaaaatgttgggcttaaggcctgccctgggttcatggagctagctttcttaatgcctcaatcatacttttaatcaga

SEQ ID NO: 412239 - DNA, 201 bp, Homo sapiens
atacatgggggaagaagcatgcgtttactgtattctgcccttcttgtatcagttcttcctcaggccaaatagctgacaaaggaagatttctctttttggcrtagttccgggtaataaatgaagaaggaatagtagaattggaatatccctacattgcaaacgttaatgaactaatggatccaggcaattattgtcaatgcc

SEQ ID NO: 412240 - DNA, 201 bp, Homo sapiens
aggctgctgtgagttgtaattacaccactgcactccagcctggatgacaaaacaagaccccatctcaaaaaaaaaaaaaaaaaaaaaaagaccctgctgcktccctgatctggcaaattaaaaatataaaacctttcgttaaaccccagagccacgagtttcctataagcatgatagttttatgattcagctgcaccatta

SEQ ID NO: 412241 - DNA, 201 bp, Homo sapiens
aatagctagaaaagcagactttttaatgttctaaatacaagaaatgacaagtttgaggtgatggataagctaattaccttgccttgatcattacacattgyatacatgtattgaagtatcacaccgtaccccataaatattaatatacaatgtcaatttaaaaagtatcagtatgaacttatgatgtatttttacttaaaa

SEQ ID NO: 412242 - DNA, 201 bp, Homo sapiens
tccacttagagtttggtttttaaattattttccactgagggagaccactgggaaagtgggtgattcaaggtgtagggtggaaatgaacaagataaaccttyctagagtgtcttgtcactgcaatgagcaaagcagttaccaaagactacaggtcaaagggactcagaagccaatctgaaatcaactggccaaagatggaac

SEQ ID NO: 412243 - DNA, 201 bp, Homo sapiens
tgacttttagagatgtatactgaaatatttacagatgaatgatatgatatctggagttcacttcaaaataatgcattggaaggagaacattggtaagaatrtggacaaaacaagatcagtcacgaattgaaaatagttaaaattgagtggaggatacatgggggtttgttatactattttttctgttttctatgtttgaca

SEQ ID NO: 412244 - DNA, 201 bp, Homo sapiens
atcatcacaataaaccagcaaggctgggaattatcacctttctcgaaatgagcaaactgagggtaagcaaggtgaaaagacttgcccaagttcacacagayaggaagaggctgagccaggtccctgtaactgcatttgcctgagtcacatagcttctccgtggatactttgaaaagtgagtggcccttgctttctagacca

SEQ ID NO: 412245 - DNA, 201 bp, Homo sapiens
gccaactttaaagaggaggcttgggttccactcttaatgctaataaaagactcacagaacagaggaaggaacgttcaacaaaggatcagaacaccgggatstggcagcaacttgtttggttacaggagaccagttagtgtcctgtcctcctttggacatgtgagagagttaggttacataagtgtttcccagaatatgggg

SEQ ID NO: 412246 - DNA, 201 bp, Homo sapiens
gttgtctatttttccttttagttccattctgtatttttgggggttctgttattaagttcatacacatttatggttattatatctttctgatgaattgaccyttttctcattatgaaatgcccctccgggaatactgtcttgaagtctgttttatctgatgctaataaagatggtccattcttctaacattttctggttgtg

SEQ ID NO: 412247 - DNA, 201 bp, Homo sapiens
atcgattgaacaaggtttacattattttctttacctgcttctccatgctagatgttgcatttgtgattcttgagttaaagggctggtctggataaccattyttcctgtggttatcctataattagaaatgaaatttagcatatgagggttaaatgcattaatacaaccctttgaggggctggagatcaggtataaaaggtg

SEQ ID NO: 412248 - DNA, 201 bp, Homo sapiens
catttatttgcagtctgtggatggcaggctggtctttgctcctagagacttctttctcatgctttccatgtagctcctccagcaatggtgaatgaagatcytctgacactttgagtctctctgacttcttctctgctacttctctgactccagctggagaaagttctctgtttttcaggggacttgtgagtaggatccatg

SEQ ID NO: 412249 - DNA, 201 bp, Homo sapiens
attcttcctgtggttatcctataattagaaatgaaatttagcatatgagggttaaatgcattaatacaaccctttgaggggctggagatcaggtataaaakgtgtgagaaggaactttaagttctttaaaagtgatgcttttattgtttgcaggatgtcacataatcagttcaattcaacattgaatctgtgctctgttct

SEQ ID NO: 412250 - DNA, 201 bp, Homo sapiens
agaaaacatttcagattgtaaatgagtaagaatgatgttattatagaaatgaccttgaatgtgctgtagcttacaaaaaaagccaaaatcatttccaagtwtcactgattggactgggatcctaactaattagtgcatcacacctcacagctgctcatgatccattagttttgaggacctcttatctatgctatggtctcc

SEQ ID NO: 412251 - DNA, 201 bp, Homo sapiens
attaagtacttacatgtgtggtacagacactaggtgctcaggggtttggacaggcatcatggtgaaccagccctgaacgatgcttggtgaacgtcatcccrccacaaagcagattcccactttctgattctgcagtagggcagcaggtagatgaaaccaacactgggtaacttagattaaaaaaaaataattaattagcat

SEQ ID NO: 412252 - DNA, 201 bp, Homo sapiens
gagcatctgagaaaacacgctagatgcagccaaacctctttaaaccctggcaccaaggaacaagagtgggtcccccctctgcctttcttttccactcactstctatcatctagttgatcaacagacatcagtggggacattggggggtgggaggggatgtctgctccctgccgggcgggcactgtgctagcgtcaggggca

SEQ ID NO: 412253 - DNA, 201 bp, Homo sapiens
gtaacttagattaaaaaaaaataattaattagcatgtttcaagggtgctctgcaaaaagcgtgcatctgcaatgaataaggagagcctctctagggatccrtgaaggaggatctgacaggcagttacttcagcacacagcagtcagtgaatcggccctgaccttgtgtttttcctcctgtgttggaaatgtttggagaatg

SEQ ID NO: 412254 - DNA, 201 bp, Homo sapiens
ccccctctgcctttcttttccactcactgtctatcatctagttgatcaacagacatcagtggggacattggggggtgggaggggatgtctgctccctgccrggcgggcactgtgctagcgtcaggggcacaaaatagaagcagacctggtttcagtctgatgtgggaaagagctaaagtaaacacgcagtgaatttgctgc

SEQ ID NO: 412255 - DNA, 201 bp, Homo sapiens
caggtaaactgatatcccaagggtttgtagtacagattatttcagcacccaggtattaagcctagtacccattagttatttttcctgtctgtggaataagrttctcttgaaaactctggaggactaagaaaaataaggctgtggaaactcacctaggtgaggattcttcttgtattagtgtacaaagtaaaagctagatat

SEQ ID NO: 412256 - DNA, 201 bp, Homo sapiens
atcatctagttgatcaacagacatcagtggggacattggggggtgggaggggatgtctgctccctgccgggcgggcactgtgctagcgtcaggggcacaaratagaagcagacctggtttcagtctgatgtgggaaagagctaaagtaaacacgcagtgaatttgctgctgtttgggggatgagggggccagggggcttcc

SEQ ID NO: 412257 - DNA, 201 bp, Homo sapiens
taccgtttagtttgaatcccgtctctactagcttgctgtgtgatcttggacaagtcacttaacccatctgtgctctagtttacttatttgttaaaagggayaaaatagaactgacctcatagagttgttatgagcattaaattagttaatatattttatatgtttgaaacagggcatgtcacatagtaaggagtctataag

SEQ ID NO: 412258 - DNA, 201 bp, Homo sapiens
aaagtaaacacgcagtgaatttgctgctgtttgggggatgagggggccagggggcttcctggaggaggtgacactgccctgatttttgaaggactagttgsaattatctaggccaggggacatttggcaatatctagggtgggtttttgttttttttgttttgttttgttttttgttttttttttgagaaggagtctcatt

SEQ ID NO: 412259 - DNA, 201 bp, Homo sapiens
cttatatcactgagctccctgcaagcaagacccttgaggaacatgtggggtgggtgcccaggtgagctcaggcacagactctattgcaacccccatcctgyccaggtctccctgtttgttaccactgcctttcctggtctgagtctaggggttgtgccgtccttgggaattgagccgaatcacaaataaaagggcacttat

SEQ ID NO: 412260 - DNA, 201 bp, Homo sapiens
ggattacaggcgtgagccaccgcgcctggccggcaatatctaggtttttctgttgtccaaactggggataaggtggagttgctactggcatctagtaggtrgaggacagggatgcttgtaaataacctacagtgtgtgcaggacagccccctccaatgcagagttatccagccccaaatgttcgcagtgctggggttaaga

SEQ ID NO: 412261 - DNA, 201 bp, Homo sapiens
gttttgaataggcaatacccacatgggattacaaaaattaaatcagcatctgtatgtgtctagcaagtattttttcttctaagcttccttcctggaggaaytgctgtttcttgtacatcattttgtctgagtatgtatttggctaagcctttcaaaatcaccttctttatggatcaaagtggtcacttaccagcaaattga

SEQ ID NO: 412262 - DNA, 201 bp, Homo sapiens
tctaggtttttctgttgtccaaactggggataaggtggagttgctactggcatctagtaggtggaggacagggatgcttgtaaataacctacagtgtgtgsaggacagccccctccaatgcagagttatccagccccaaatgttcgcagtgctggggttaagaaacacaggtctagacaagaggaggaaaagtgctgtggt

SEQ ID NO: 412263 - DNA, 201 bp, Homo sapiens
caaaatcaccttctttatggatcaaagtggtcacttaccagcaaattgacatgattcacccaaattccagcataaatacgggactttatcagcacttgacrtataacgtattttcatctgtattagtgtattgcctgtctctctccatcagagtgtaagctaaatggagccagggcttgttttgtttactgctaaatctcc

SEQ ID NO: 412264 - DNA, 201 bp, Homo sapiens
ggtggaggacagggatgcttgtaaataacctacagtgtgtgcaggacagccccctccaatgcagagttatccagccccaaatgttcgcagtgctggggttragaaacacaggtctagacaagaggaggaaaagtgctgtggtttgaatgttagcgtccccctagaattcatatgttgaaatcttgatctccaaagtgatag

SEQ ID NO: 412265 - DNA, 201 bp, Homo sapiens
gttcgcagtgctggggttaagaaacacaggtctagacaagaggaggaaaagtgctgtggtttgaatgttagcgtccccctagaattcatatgttgaaatcytgatctccaaagtgataggctgaggtggggtggagcctttgggaggtgattaagtcatgaatgggattagggcaagccaggcaaggcaaaaatctctaga

SEQ ID NO: 412266 - DNA, 201 bp, Homo sapiens
gggtgtggtggcatgcgcctgtctcagatactcaggaggctgaggtgggaggatcacctgagtccaggaggtagaggctgcagtgaactctgatcactccrctgcacaccagcctgggtgacagtgcaagaccctgtctctaaaaaataaaaaccaataataaaagaaataggagtagagaagctgtcagatggagatgaa

SEQ ID NO: 412267 - DNA, 201 bp, Homo sapiens
ctcctgaaactctattactctgtcttttaatgttgtcagcattaggaaaagagtgaccttgacaccttgctccttctactgaacttacagctttcctcacratggtgcagaactaagtggttagtagagatacttgtggctggaaacatctcccctgaaaacagatataggaagaacaggtgcaagttcccatgggcgcaa

SEQ ID NO: 412268 - DNA, 201 bp, Homo sapiens
tccaggtcctctggaggttgagctcatgctatgtgattctaagcccccactctaaatcacactgttagactctctggtgtgacccaaggcccccacaagcaaaaaaacactcctatccaggcatgacattcccagggcttagtaagacaccaagggtaaagaccagacttctttttgggcgaggtttaattctttactatg

SEQ ID NO: 412269 - DNA, 201 bp, Homo sapiens
ttgagtctctctgacttcttctctgctacttctctgactccagctggagaaagttctctgtttttcaggggacttgtgagtaggatccatggaataaaccwggataatctctccgtttttaggtccataatcacttttttcatgtaacataacacattcagaggttccagggttaaaggtgtggacatctttgggggattc

SEQ ID NO: 412270 - DNA, 201 bp, Homo sapiens
gtgacaattacgttccactgtgacaaattctatacaaaaaaaaaaaaaaaatccaggatgttatggtagaggaaaccatggcgtcatatttacattcctgkgccttcagggaagacttcctgaaggtggatacctctgagctatacaccaaagatagctattgccaagttttcagcacaaataccatgcagctggtatatc

SEQ ID NO: 412271 - DNA, 201 bp, Homo sapiens
caggataatctctccgtttttaggtccataatcacttttttcatgtaacataacacattcagaggttccagggttaaaggtgtggacatctttgggggatycattttgcccattatatctgcctttttatggatttttagagtatttacacactttgttttaacttatttattggcttttaatctatacctctcatctcaa

SEQ ID NO: 412272 - DNA, 201 bp, Homo sapiens
ccccagcacttataaagacattattccactgtcttctggactctgtagtttctaatcttaagtctgtgaaaaatttgaatcattgttctctatatataatktgctatttttctcttgctaattttgagattttctttcttttgattttcatcagtttgactgtgatgtgcctagcatggttttctccacatttgtcctatt

SEQ ID NO: 412273 - DNA, 201 bp, Homo sapiens
agccagaggatgagaaattatggtttaggagtcatgcagttgaaggctgcaagactctaaacctccccaaattgctcctggggataacatcactattgtamaacctaagatcggtacttgagatattttgcagacccttcatctgatggatcagttagcaccacccagattgataaactggctcatctggccttgtggccc

SEQ ID NO: 412274 - DNA, 201 bp, Homo sapiens
gtcttagcaggtaactaacctggttatacttacatttccatatctgtctctcaggtggaggcttagttctcagtcctgttgggtttaaatgcaaactactytgagccttgtctactcaccctttgttcaaggactggccagaggcttgggcagagtttacatatacatgccaagaattcccttctctaagtctcctctttc

SEQ ID NO: 412275 - DNA, 201 bp, Homo sapiens
atattcttgctacaagatacaggagctagaaacaagaatcattttattgtcagtcacagttctgtgggttgactgggctctactaggtggtttttctgctscatgtaataacagctgaggctacagttccctgagagcacagttgggctgaaatgtatgagatggctcatgacatggctaagtggatggagctggctattg

SEQ ID NO: 412276 - DNA, 201 bp, Homo sapiens
agttgggctgaaatgtatgagatggctcatgacatggctaagtggatggagctggctattggcttgggggcgtagctcactgcctaatgtaacctttttawgtggcttggatttcacaaagcatggtggttgagttttgagttgacatacccaagggcaattgttatatcagggaagaagtggaagcttctgttttactga

SEQ ID NO: 412277 - DNA, 201 bp, Homo sapiens
attggcttgggggcgtagctcactgcctaatgtaacctttttaagtggcttggatttcacaaagcatggtggttgagttttgagttgacatacccaagggmaattgttatatcagggaagaagtggaagcttctgttttactgaaaattaggcttttctattggtcacatagtcactgtgctggtcagattcaagaggaga

SEQ ID NO: 412278 - DNA, 201 bp, Homo sapiens
aacaaaaccaggaactgtgctaagttatatatattatatatgtatataatatataatatatatacatattaatagagaataagtttgctatactctctctmtatatatatattatattctctatttttatatataaattttgtcctcactgcaacaatattaggtaggctatgtaatcattattatcttcactcaagaagt

SEQ ID NO: 412279 - DNA, 201 bp, Homo sapiens
cctctccccttccccccagtcttgcctctcaaatgactatctacacaactctttgtcttctccagaaaggcttcctttatttcccagggtgaatgagcctytcatctctccattattccatagcattctgtaatactttaacatttactacattgttctgaaatcataaaatctatttgtctgtctcaccaaccagtctgc

SEQ ID NO: 412280 - DNA, 201 bp, Homo sapiens
agttaaattattcacctggaggcctagcaggttgtatcctgaaggctgaagtcaagtgcttactcaaacattgaatttgagctgcttttttctgtatcagsgatcccaatgcttggtgcagaacaagaactcgagatttctttgacgtcaaggttggctctacctagagtgtgattcttgaactgtagtgtgtataagatt

SEQ ID NO: 412281 - DNA, 201 bp, Homo sapiens
gttctgcccttttattcccatgtcttgttccaagcttgggtgggtattgggggcaggggtaagggaaagcaaggtcagaaaaacataataatgaccaaaawaaaaaaaaaaaaaaagacaaaactccaaaaaacaaaaccaggaactgtgctaagttatatatattatatatgtatataatatataatatatatacatatt

SEQ ID NO: 412282 - DNA, 201 bp, Homo sapiens
tagactttatcttagggaaggggaaacattaaagtgttttaagcaggttttaagtaacttagtccaatatactttttagaatgatcactctggataatgcrtgtcgggtgcggtggagggtggcagggctgcacacggcggggagaggcttcaaatgcgggctgttagtgcatgcaagcggagaagtgatcaccatgtttc

SEQ ID NO: 412283 - DNA, 201 bp, Homo sapiens
tactttttagaatgatcactctggataatgcgtgtcgggtgcggtggagggtggcagggctgcacacggcggggagaggcttcaaatgcgggctgttagtrcatgcaagcggagaagtgatcaccatgtttccacaaaagaacttagaattggtttagttaatgcagtgcaatggaatgcagttatacaacagggtcgttt

SEQ ID NO: 412284 - DNA, 201 bp, Homo sapiens
gaggagagatggtatgaagatgcatacaatcttaaaaaaaataatactggccaggcacggtggctcacgcctgtagtcccagcattttgggaggccgaggygggcggatcacgaggtcaggagatggagaccatcctggctaacacagtgaaacgccatctctactaaaaatacaaaaaaaaaaaattagccgggcgttgt

SEQ ID NO: 412285 - DNA, 201 bp, Homo sapiens
catacaatcttaaaaaaaataatactggccaggcacggtggctcacgcctgtagtcccagcattttgggaggccgaggtgggcggatcacgaggtcaggasatggagaccatcctggctaacacagtgaaacgccatctctactaaaaatacaaaaaaaaaaaattagccgggcgttgtggcgggtgcctgtagtcccagc

SEQ ID NO: 412286 - DNA, 201 bp, Homo sapiens
aaatttgcattgagcatctactttataccaggtagtattctaggttcttcaagggagaaaaagcagcagaaggaaaaaccaggcaaaatccctgcttttaygaattctatattccagtatgtgaatatccagaaattctgaaataaaaatcgcaccttgaattgaatgtcaattgatccatatcatctcattctatagttt

SEQ ID NO: 412287 - DNA, 201 bp, Homo sapiens
gttcagtacgctagtcaaagagggccacgaggcaggaaatgattaatttgaaaatgattggaacaggctgtaattggtaatgagaaatgtgcatttgctcttttttttttttttttttttttgaaattgaagtctgctttaccatgttgatttcctctaaaaagaggtattgtttgggcaaagggcagaaggaaatctttt

SEQ ID NO: 412288 - DNA, 201 bp, Homo sapiens
cacttgagcctaggaatttgaggctgcagtgagctctgattgtgccactgcattccagcctgggcgacagagcgagatcctatctcaaaaaaaaaaaatawatatatataaagaaatccatcaactcacacaaaaatgttgttgatgggactttgcattattcttataattaagaaaagcaaaatgaaaattcagtaagca

SEQ ID NO: 412289 - DNA, 201 bp, Homo sapiens
aggcaggcggatcacttgaggtcaggagttcgagaccagcctggccaacatggtgaaaccccgtctctgctaaaaatacaaaaattagccaggcatggtgrcaagcacctgtagtcctagctactgggaaggctgaggtatgagaattgcttgaacccaggaggcagagtttgcagtgagccaagatcataccactgcact

SEQ ID NO: 412290 - DNA, 201 bp, Homo sapiens
cttgagcctaggaatttgaggctgcagtgagctctgattgtgccactgcattccagcctgggcgacagagcgagatcctatctcaaaaaaaaaaaatatawatatataaagaaatccatcaactcacacaaaaatgttgttgatgggactttgcattattcttataattaagaaaagcaaaatgaaaattcagtaagcaaa

SEQ ID NO: 412291 - DNA, 201 bp, Homo sapiens
caaacatctatttcttatagttctgtaggctgcttaagtccagggtcaaggcaccagaagattcatgtctggtgagggcctgcttcctttttcatagatgrctgtcatcattttgttttgttcttcattggtaatggaaggggccgttgatctctctggagcctcttttatcagggcatgaatatcatttatgagggcttg

SEQ ID NO: 412292 - DNA, 201 bp, Homo sapiens
ctgcctcagcctcccgagtagcagggactataggcatgtgctaacattccggctaattttttggatttttagtagagatagggtttcaccatattggccargatggtctcgcacttctggtctcaagtgatcagccttcctcagcctcccgaagtgctaggattacaggcatgagccaccatgcccggccctgagccagtt

SEQ ID NO: 412293 - DNA, 201 bp, Homo sapiens
tgagcctaggaatttgaggctgcagtgagctctgattgtgccactgcattccagcctgggcgacagagcgagatcctatctcaaaaaaaaaaaatatatawatataaagaaatccatcaactcacacaaaaatgttgttgatgggactttgcattattcttataattaagaaaagcaaaatgaaaattcagtaagcaaaac

SEQ ID NO: 412294 - DNA, 201 bp, Homo sapiens
accagtctgaaggcagataaacacaaagcctttgtctatgggacacttatgatttggttgcagagaaggtggaccttcacactgccaatctcagttctcayggccgcctggcatcaggaaggcattaatctctgccaaggctctgtcctcttcacctttcagcaggtgttccttgctggttgtttggcccggttgatagga

SEQ ID NO: 412295 - DNA, 201 bp, Homo sapiens
tatcctaggagcctggtgtgcttaaaagcatggtgtagtcatgggttcgagaaactctccactgggtaaggacactggatatatggacacaagaaactctycattggttaaggacaatgataaggaaactctccattgggtgaggacactgaactctttcacatgagcagagacttatgttaggagttgcagctgggagtc

SEQ ID NO: 412296 - DNA, 201 bp, Homo sapiens
aggggaatctcttgaactagggaggaggaggttgcagtaagccgagcttgggccactgtactccagcctgggcctgggcaacgaaaagagactctgtctcaaaaaaaaaaaaaaaaaaaaagggggtcttgtcactgagtttcctcatcttgcctctgcctctgagcacatttttccttctgcttctccaccataatgaaa

SEQ ID NO: 412297 - DNA, 201 bp, Homo sapiens
tatccacagttggtgcaatgtcatgaaccacatgtaccaagacctgtgccacagactgggggtacaaggagaataaaacaagatccctgccctgaataaastcacctcccagtgacaattacgttccactgtgacaaattctatacaaaaaaaaaaaaaaaatccaggatgttatggtagaggaaaccatggcgtcatatt

SEQ ID NO: 412298 - DNA, 201 bp, Homo sapiens
agatctgtggatcacaaactaatcaaggagacaggagccttgtgttatccacagttggtgcaatgtcatgaaccacatgtaccaagacctgtgccacagaytgggggtacaaggagaataaaacaagatccctgccctgaataaactcacctcccagtgacaattacgttccactgtgacaaattctatacaaaaaaaaaa

SEQ ID NO: 412299 - DNA, 201 bp, Homo sapiens
aataaatctttgagcttattttctatatggtggtgtattgaatttgcacctttcatctgaagacctaggaactaccgcagactgggttttccctcggggakactacaaggttgggcttccagtgccagagcgatgatcaggcagacataaactggacatgggtcagacaagagctgcaagggcatcagcagttataaataa

SEQ ID NO: 412300 - DNA, 201 bp, Homo sapiens
catggcaccggttaggagctgagctgtttggggttagagagcgagtttgatcaacatttacgctgttgagtttggccaggggtaacatttgtgagactccsgctaattctggaaatctgtcattctttgtttccaacagcaaaatggagctaatgataatacccaccccttggggttcctgtgaggatattaaagctacta

SEQ ID NO: 412301 - DNA, 201 bp, Homo sapiens
gcatggcaccggttaggagctgagctgtttggggttagagagcgagtttgatcaacatttacgctgttgagtttggccaggggtaacatttgtgagactcycgctaattctggaaatctgtcattctttgtttccaacagcaaaatggagctaatgataatacccaccccttggggttcctgtgaggatattaaagctact

SEQ ID NO: 412302 - DNA, 201 bp, Homo sapiens
cttcagttgacagaaagggagagttagagatgaacctaatgccctgcttaaatcagagggcgaagtgatatgaagtttgaatttaggaaggactttttttytctctctctaatggcctggagatatcctacaggctatgctgggtactttgcatagactaccttcaagatgcagagaaaggaaatgcatctaatgctgtta

SEQ ID NO: 412303 - DNA, 201 bp, Homo sapiens
taaaaaagaaactgaaaagcagtgagataattttacttgctgaaaagaggagctatttcttggcatgtagaactgagcaacacagcataggttaccttggrgttacaagagaagcatcacacccaaatggctgaagcccctggccagagataagaactcagaggcatctccccaacctgggagaccaggctccatgctttc

SEQ ID NO: 412304 - DNA, 201 bp, Homo sapiens
ggatgctcaagttcctgatataaaatggtgtagcatttgaatataatctatgcacatcttatactttaaatcatctctagtttacttataatacctaatgsaatataaatgcgatctaaatagttgttacaccgtatggtttaggaaacaatgacaagaaaaaaaagtctgtatatgtttagtgcagacaccattttctcc

SEQ ID NO: 412305 - DNA, 201 bp, Homo sapiens
tagacaaagagagaacagcatcatggtcaggagaagtgggctggcgacttcctcccctgtttcactgagcatggcaccggttaggagctgagctgtttggrgttagagagcgagtttgatcaacatttacgctgttgagtttggccaggggtaacatttgtgagactcccgctaattctggaaatctgtcattctttgttt

SEQ ID NO: 412306 - DNA, 201 bp, Homo sapiens
ggacttaaagaatggcatttctggctttgaagtaaaggtgaacaggggatcccataagtcccatctatctcatgcattttgtgattttcaaaaaaatgatygtggggtttgaagaagcagaagaaagaccataaaggtcaaacccttctcatatctgggggccagaacaaaagatactgagaagaacaagaatgcctaatt

SEQ ID NO: 412307 - DNA, 201 bp, Homo sapiens
atacaaaatcaatgccaagagatgaagtgactagtctacgtagacaaagagagaacagcatcatggtcaggagaagtgggctggcgacttcctcccctgtytcactgagcatggcaccggttaggagctgagctgtttggggttagagagcgagtttgatcaacatttacgctgttgagtttggccaggggtaacatttgt

SEQ ID NO: 412308 - DNA, 201 bp, Homo sapiens
ggagcctggtgtgcttaaaagcatggtgtagtcatgggttcgagaaactctccactgggtaaggacactggatatatggacacaagaaactctccattggktaaggacaatgataaggaaactctccattgggtgaggacactgaactctttcacatgagcagagacttatgttaggagttgcagctgggagtcaggcaga

SEQ ID NO: 412309 - DNA, 201 bp, Homo sapiens
gagaccggcattaaactgtgttcgttcaaccctgaatccaccactttctaggggtgtgcctactggaaagttttcattttccttggtgcctcagttcctcrtctgtgaaatggggataatgatagtatttacctttgaaggtgggttgcaagggctgaaagttaatttatataaagcacttggaacacatggtaaatgtct

SEQ ID NO: 412310 - DNA, 201 bp, Homo sapiens
cagttcctcgtctgtgaaatggggataatgatagtatttacctttgaaggtgggttgcaagggctgaaagttaatttatataaagcacttggaacacatgstaaatgtctggctgttttgatgagaagattcaatgagatactgacttttcataatgcaaaaggcgctaaaagaaactcagcagaggtggcatttagatca

SEQ ID NO: 412311 - DNA, 201 bp, Homo sapiens
attgcctgagaagaccctggtgcttggagggtaagagtgaaggaggtcagagcagaaccgtgctgagaccctcaggccacatttgggtgttgcatctttgytataagagcagaaagaaaccactaaagattttaaagccagggtggatggtggtgaacatgagatttaccttccagaagcatcctctggtggccacgtgga

SEQ ID NO: 412312 - DNA, 201 bp, Homo sapiens
ggtggatggtggtgaacatgagatttaccttccagaagcatcctctggtggccacgtggagaactggctgcaggggagaggagtgcaggcagtaagttacrgttgctaagaaacattcaccattccatgggtaattattgtgcaccactgtctacgggctctctgctgggtgccaggaacgcagcactgaccacgacaaag

SEQ ID NO: 412313 - DNA, 201 bp, Homo sapiens
aggaacgcagcactgaccacgacaaagcccctgccttagagagatgacgtttctgtataaggacagagacggcaaatggacaagcaagtgaatgaatgtgkcaggaagcagtgtggctgggaagaaatacttaaaagcagggcgagagactagagcatattggctgccatttaggcaggaaaaacctcttgtgctgacatt

SEQ ID NO: 412314 - DNA, 201 bp, Homo sapiens
taaaaagaagggaaagatgagagaggcccctttataactcatcaatgtaaaaaacacaaaataaaaagtcttgagcttaagagagaatgcagtagaaaacrtcaacaagaaaacctttctgtctgaaaacgcctgatccttgtgtgagacctttccaggatatgtgggttttcaggtagcatcttcacccccagggcaaca

SEQ ID NO: 412315 - DNA, 201 bp, Homo sapiens
ctaacctgaggttcccacccaacttgattactttataactttctccatcttcctcctcctactgaactctgctgggttttaaagccaatgggctttttttyccttagcttcgtaattcaaaggataatggtagatgctataacaaataagccctcaaatatcagtggtataacatagtagaagtttgcttcctgctgatgt

SEQ ID NO: 412316 - DNA, 201 bp, Homo sapiens
taacctgaggttcccacccaacttgattactttataactttctccatcttcctcctcctactgaactctgctgggttttaaagccaatgggctttttttcycttagcttcgtaattcaaaggataatggtagatgctataacaaataagccctcaaatatcagtggtataacatagtagaagtttgcttcctgctgatgta

SEQ ID NO: 412317 - DNA, 201 bp, Homo sapiens
aactttcagatgaagtgactgagccataggggagttaagggaatttgccaagaccacatagtggctgatgtagctaggtagctgaatttctgatcccaagstgtgatcttccattccactaaatcaagcccatactttaatgatgtcatccatcttcaggagggacaagggatcagtttcattttgtgggaggggctgagc

SEQ ID NO: 412318 - DNA, 201 bp, Homo sapiens
gaggcagggagaattgcatgaacctgggaggtggaggttgcagcaagccaacatcatgccactgcgctctagcctgggtgacagagtgagactttgtctcaaaaaaaaaaaaaaaaaaagaaggaaaattaaaatcaataaataagaggtgaaaataatgctcgatgtagatgaagttctaatcttatcttggcttggcca

SEQ ID NO: 412319 - DNA, 201 bp, Homo sapiens
tgacgccagctgaatggcttcagaggacatgcatcatttgtgaggctcctaaaggtgggagctgtgcgcctgtgatttcattactggaattagagtgccgrctttcatttttctattaattccactgatggtattagtcgtgttaaaaagacagcacaaacttggctctaagtgttcttggatgctgaatgccaccagcac

SEQ ID NO: 412320 - DNA, 201 bp, Homo sapiens
aatccttggaggccagaatgtagtctcgattcttcttcaggttggtgtgggagacgatggccactagctcatggcgatcattgaccataggcagcttcccytgctaggctgaaggatctcatttgcctgtttcaatgtcatgcctgctggagccaccatcagcttgatccttggcgtcatcacctcactgaggagggtggt

SEQ ID NO: 412321 - DNA, 201 bp, Homo sapiens
catcctactgaatcagaaagtgaggggcagggattgtcagtctgtgttttaacaagccttttgggtgattctgatcgaggcttatacactgttggtgggartgtagattagtgcagctgttgtggaagacaatgtggcaatttctcgaagacctaaagacagaaatattcaacccagcaatcccgtttccaggtatatacc

SEQ ID NO: 412322 - DNA, 201 bp, Homo sapiens
atacaaaaattagctgggcatggtggcacacacctgtaataccagctactcatgaggcagaggcaggagaatcgcttaaaaccaggaggcagaggttgcaktgagtcgagattgtgccactgcactccagcctgagggacagagcgagactcaatcacacacacacaaagaatacattatactgcgttggtgtaccatcgt

SEQ ID NO: 412323 - DNA, 201 bp, Homo sapiens
ggaggtggaagttggtgctcttgtaacctggcagctccagagtttggatgcgagtgatgggccttcccattaaacactgagagctctcgaaaagggcagaygcacagatcggaatgttggtggagcccactcagctcctgctaaagaggcatcaggtagttcctgggagagtggggagacctatctttagtcttttccatg

SEQ ID NO: 412324 - DNA, 201 bp, Homo sapiens
ataactagtatctttaagaataaaggacagaatgattcataaagaaaacacgtgtggcaagatttagacaaagaatagaatgggccagggttcacagaagmctcagccatttattcatccagcaaccagcaactctttattgagtacctcgattctgcttggtccctaaaaggtaacacttgagtgagaacctgaagactg

SEQ ID NO: 412325 - DNA, 201 bp, Homo sapiens
tcctaaaatcgaaacgtttctagtaattcacatatataaatttatatcacacgtgtatatatacacatatgtagacatacatatacacacgtgttatgtaygtggtatatattcttatgtatgtgtatatatatacatacatatatattcttaggtgtgttgggtagataagagaatggtcaaggagaaatacgagacata

SEQ ID NO: 412326 - DNA, 201 bp, Homo sapiens
aaaatatctaatcctaaaatcgaaacgtttctagtaattcacatatataaatttatatcacacgtgtatatatacacatatgtagacatacatatacacaygtgttatgtatgtggtatatattcttatgtatgtgtatatatatacatacatatatattcttaggtgtgttgggtagataagagaatggtcaaggagaaa

SEQ ID NO: 412327 - DNA, 201 bp, Homo sapiens
tccatgttggtcaggctggactcaaattcccgacatcaggtgatccacctgccttggcctcccaaattgctgggactacaggcctgagccaccgcacccgsccaagaaggtacatttttattagtgcttctagtgattcagatgtaggtagtccatgtctttgagaggttagttagttgactattgagaaatggagttctg

SEQ ID NO: 412328 - DNA, 201 bp, Homo sapiens
ttattttctttgtagagctgtatttttttccttcatagaattcaacaaaattgataaatatatatttacttgtatgatttatttattgtctatatatccayttgggaagaggccttggatattttgctcctcatctagtggaggccccagaacatttatattggaagggcctaagtgccaccaacatagttacaagtggca

SEQ ID NO: 412329 - DNA, 201 bp, Homo sapiens
aaactttttttgcagacctatatgcattctagttttctcctccaagaagcagccccttaagttcaaccaagtttatgtttgggtttttataataacagatrcagatatagaaacagaattgtgttgtgttggccaacaatatctcaaatataacatgatacagaatgaagatgaaatcctcctttctaaggccccttacat

SEQ ID NO: 412330 - DNA, 201 bp, Homo sapiens
taggtgaggattcttcttgtattagtgtacaaagtaaaagctagatatatgtgctgaaatgaacagcttgataataataaaataaggaaagaaccaggtasgccttgctgttctctacccttatcagaaaggagaaaggaactgagatgttcatctatgtgcctgagggcacagtactagggagtagaaagcaggaattca

SEQ ID NO: 412331 - DNA, 201 bp, Homo sapiens
aagttgggtaaatgaactggcagatctgctggtgtctggtgtaccattgtccaaatccccacagtcagcttcctgaggatctgcttcatttggttaagtcytggccaaacacaaagagtaaatccacactgcccagttttccatgtgatagaaaatagctctcctgagaaatgtgctcatttccttttcatttccatcact

SEQ ID NO: 412332 - DNA, 201 bp, Homo sapiens
atatagcattgtaagtttataatttttcagtattccattaatggtggcatccacttatttgttcgattgctctaattctttcctaaaaatttgtctttctstcttcccctttctagatttatggtcaatgttacatgggatggcaaagacttatccttcactgaggaaggctaccaggtgcaccccaggctggtggtgatt

SEQ ID NO: 412333 - DNA, 201 bp, Homo sapiens
tgaggatatagggggacccactcaaaggaaaggggatgagggctttggaaaatgtaagtgcaagaatcacaaacattataagcatagcatacactgggagrtcagaggtgttattagatgactgggaccttgggtgatttatgtgtttggggaagtttcattatgactgggagtgaatagactggtttggacccctccttc

SEQ ID NO: 412334 - DNA, 201 bp, Homo sapiens
aagaccacagtggacaacagctttgtgggctgggacatgcagaatgtgatcacactggacacttcctttgaggatgcaaagacacaagtccagctgaagargatccactcttctgtcatcttgctctactgttccaaagacgaggctgttctcattctgagtgaggcccgctcccttggcctcaccgggtatgatttcttc

SEQ ID NO: 412335 - DNA, 201 bp, Homo sapiens
attggaaattggaaaaatgagcctattgttgaagatctagatcattcattccatttttaagtgagaaaggaggtatttcacactattacctttacttccgwgagtttgtgccaaagatgtaagatgataacatggagggtgatattccatgtgatggatttcttcttcccttgcctcactacagaatgttcaaaaataaac

SEQ ID NO: 412336 - DNA, 201 bp, Homo sapiens
catggtttcagataaggggaatttgatgtactcagacaacaggtcctttcaggggaaagagagcatttttggagacaacatgaacgaactccaaacatttstggccaaccggcagaaggataacctcaataactatgtattccagggacaacatcctcttactctcaatgagtccaaccctaacacggtggaggtggccgt

SEQ ID NO: 412337 - DNA, 201 bp, Homo sapiens
gacacacacatgcaaggcagaattaattccttccagctttgtatacttggagcactttaaaaactactttgagttactactcattcattcactcaacaaatatttattaagtgcctactatgggtcagccattgatcttggctctggggatactcctgtgaaaaggcaatgccctgcacccatggagtttttcttcccaat

SEQ ID NO: 412338 - DNA, 201 bp, Homo sapiens
attccctcaaactgtactttcccagaacttcagctctccccaccagagggtaagcatcactgtagcaggcactttgcacgttttgtgcacctctgtacccycactgccttgatcagtgtggtcagacaggcactgaaaaatgcctgtgaaatggattcttctttttgttgcttatgaaatctgcaactgtgagttgagtgt

SEQ ID NO: 412339 - DNA, 201 bp, Homo sapiens
cctcccatagtgttaggattacagggattagccactgcatccggactgcctaactgaattccaaaattgtttggatgtggtaacttgttttttcttttcawtgattccttttttgatcaaaaacccctgtaactgatatcccatgcctgttccacaattgcatctggggagcagataatccgttttctagttttacaggtc

SEQ ID NO: 412340 - DNA, 201 bp, Homo sapiens
cgtcagtaatgaaatgaatttcatttattatgtagtgaagagtcttaaggtatggtgaccctaaagttgcttaggttaactgaggagccatggctttaagaaaaaaaaaaaaacaatttaaaaatgtatttcatccttttttattggctgcatcctcagggtggtgataagatgtgatctagatatgccagcaaccagaaa

SEQ ID NO: 412341 - DNA, 201 bp, Homo sapiens
aactgatggtgaagctgtgtcccactttgaacctctctctcacgtagccagagcagtgcagattcggagtcttaggagcagaacattcgggagccagtgcaaaaaaaaaaaatttgcaagaggcctgagagagagcctgctgtacaaaaggatgtaaaccagccagagacccttggtaaacataagaaggaagaacatatt

SEQ ID NO: 412342 - DNA, 201 bp, Homo sapiens
gtcttttctggctttggaagcaggtttagcccacctgcagggggagtgaaggtgctggaagcagccaacggtagggatttgtggataagcactccagtcckttgtcttgtaggcaggataactgtgatgtagagtagatatttcatgctatatcccagatgtctctagtgatcttaaggcccagttgccttaagcagtcac

SEQ ID NO: 412343 - DNA, 201 bp, Homo sapiens
aggtgaaagcattaggtcattgcagacctccaggtgtgggtgatatggctcaaactaagatggagaaaataggaacacctgtcagcatgtgtagggggcargaatgtgactttagagtcaggcctgctttcaatccagcctcctcatttaagcaagttactttatcttctctgagcctcatttttgttctccttttaaatg

SEQ ID NO: 412344 - DNA, 201 bp, Homo sapiens
ttataagaatggtcatcatcttggctatttcagatggggaagtacgcatgcctcattttatccaagtttctcacagttctataagtcttttttcacacacagttccatacacaaaaggtggctttgcaaaaaacttcttttaacatagctggcaggctatactgtacatatatctatacacatgtatgcatgtatgtgcat

SEQ ID NO: 412345 - DNA, 201 bp, Homo sapiens
ccggcttccatctctagagaagactcgggatgaactctgaattcttctagaccccagctaccagttcggctccagacccagagtggcactgctttaatctyggcaaagaagactaaagacttttttgtgtaacgaattaaaagtttgcttcaggcttcttttattttatgcctctgctgcactctcgtaacatttagcacc

SEQ ID NO: 412346 - DNA, 201 bp, Homo sapiens
aagctagagaaaaatcagctgaggctcctggagaatgaaccaggtcagagtgagtgatggttggggggaaaacggactggactcagtggatgtatagaatwtcaatagtggagctgggggaagattggcacatgggatccatggagttgaaccatcattatgtccacgttaaatgctaactttggcaaaaataaaccattt

SEQ ID NO: 412347 - DNA, 201 bp, Homo sapiens
gtgaactgaacatgaaaccaagaagggtgatcaagctagagaaaaatcagctgaggctcctggagaatgaaccaggtcagagtgagtgatggttggggggraaacggactggactcagtggatgtatagaatttcaatagtggagctgggggaagattggcacatgggatccatggagttgaaccatcattatgtccacgt

SEQ ID NO: 412348 - DNA, 201 bp, Homo sapiens
tcacaattgcagtaaggatgaaagaaagccacatatgtaaatgtatcttgtagcatatgaatccctctgcagacatgaagcgctattgtgcaagtctgtcrcattatgggatcaaaagtgcaattcctagaagtgattggaggtatggtggaagcagcaggaagcaatgtcctggaagagaggatttttcaagaaagtggt

SEQ ID NO: 412349 - DNA, 201 bp, Homo sapiens
tttattcctcagataatgagcagtgtagaactgtgattaagggcctcaactctggagttagacttgtctgggttcaaagcttgtctcgtccactttctgtwtgacttgcacatcattttacttttctgggcctcaggtgtttattgcaaagtgatgataatagcacctaatttctaggcagtggttctcaagcctcagcag

SEQ ID NO: 412350 - DNA, 201 bp, Homo sapiens
ccagctaccagttcggctccagacccagagtggcactgctttaatctcggcaaagaagactaaagacttttttgtgtaacgaattaaaagtttgcttcagkcttcttttattttatgcctctgctgcactctcgtaacatttagcacctccccctgttgtcatatcatttatcatatcgtggagtttcaggtgtcttattt

SEQ ID NO: 412351 - DNA, 201 bp, Homo sapiens
tcctcctacactctgcgctcacaagggacatggaaacctgtcctgtttctcctcataccctgccgtcgactgcggcccctgcacacagtggggtctacgawgttgatgggagccaagggattgttgtactgattttttaaggctggatatttatttttcggtatgctttgcactttttgcctagggaatcaggactcagta

SEQ ID NO: 412352 - DNA, 201 bp, Homo sapiens
ccatcttttagggtatggctatggggagagttctgacctcagcactattgcttgtcaagaaggtgacatggatttaactagcggaagagtgggtttatcawtaaaggcaatggtgaactgaacatgaaaccaagaagggtgatcaagctagagaaaaatcagctgaggctcctggagaatgaaccaggtcagagtgagtga

SEQ ID NO: 412353 - DNA, 201 bp, Homo sapiens
cctacactctgcgctcacaagggacatggaaacctgtcctgtttctcctcataccctgccgtcgactgcggcccctgcacacagtggggtctacgatgttsatgggagccaagggattgttgtactgattttttaaggctggatatttatttttcggtatgctttgcactttttgcctagggaatcaggactcagtacaga

SEQ ID NO: 412354 - DNA, 201 bp, Homo sapiens
tcttttcactgtctccatagttttgccttttccagaatgtcatatagttggaatcatacagtatgtaaccttttcagattggcttctttcacttagaaatrtgcatttaaggtccctcaatgtcttttcacggcttgatgtcacacttcctttttgcgttgaataatattctattgtctggatgtaccatcttttagggta

SEQ ID NO: 412355 - DNA, 201 bp, Homo sapiens
gtcgactgcggcccctgcacacagtggggtctacgatgttgatgggagccaagggattgttgtactgattttttaaggctggatatttatttttcggtatsctttgcactttttgcctagggaatcaggactcagtacagaaacttgtctctgtcatgtgcgcaccctggagaatccaatcattggaaaaaataaaaatac

SEQ ID NO: 412356 - DNA, 201 bp, Homo sapiens
aagggattgttgtactgattttttaaggctggatatttatttttcggtatgctttgcactttttgcctagggaatcaggactcagtacagaaacttgtctytgtcatgtgcgcaccctggagaatccaatcattggaaaaaataaaaatacacatagagaacaccattccttcccataaccacgtaaaattgtgctcgtgc

SEQ ID NO: 412357 - DNA, 201 bp, Homo sapiens
gcctgctttgtctgctttgtaaatttgggagtcacaattgcagtaaggatgaaagaaagccacatatgtaaatgtatcttgtagcatatgaatccctctgcagacatgaagcgctattgtgcaagtctgtcgcattatgggatcaaaagtgcaattcctagaagtgattggaggtatggtggaagcagcaggaagcaatgt

SEQ ID NO: 412358 - DNA, 201 bp, Homo sapiens
gtaaggtcaccttgctttcctctccatctgagggttggtcttaactgctctcctttcaggaggaagagattcaggtgcctctcattgagatccatcaactygaatgcacaaaagccagaaggttttttctctttaactcaaattgtcctctttctcaaagtttttgaaacagaacattaaggttagctctcctagacctaa

SEQ ID NO: 412359 - DNA, 201 bp, Homo sapiens
actgctgccagagataatgtggtaaatcaaatagagattttctatcaggcagtttagaatttagttgtgaaaataacatgtagacacacaaactaataatmacagattataataaatatcaagaagaagaaaaaaacatagtgacatgatagtgatggggtgcagacactacgttagataagatggtccaatgggaaagga

SEQ ID NO: 412360 - DNA, 201 bp, Homo sapiens
gctgtcattttcctccttgttctttccaaccctaggggctttgtcctcatggttccctatgcctggaatgctcttcccactattctgcactggttgacgaygacttcttcacaacttggcttttggggcatttcctttgagagggcttcgtgacagtcctgctaaccttttccataggagccctcatgtcattagctgtac

SEQ ID NO: 412361 - DNA, 201 bp, Homo sapiens
gttagctataactcattaaaaggatcccactctagccagggtttatgtcatacacgttatgccattttgagtgggctttcctcagtgggcactaccttctmaatgggtgttatcagaaaagtgtcaggaccaaatctctttcccaaaaaatgacttgatatggtagaggatggaacttgaagtctcatatcccccaaaaag

SEQ ID NO: 412362 - DNA, 201 bp, Homo sapiens
gtcccatccagactgaccgagctagaatctgcctcttaacaagatccctcggcgattcacgtgcatgttaaagtttgagaagaactgccccagaaattctrtgaatataaagtaagtgccattttcctgaagtcaaaagctggagatttagagcatcagtgttcttagaaacaacgtgcgacttcagtatcttgcaaacta

SEQ ID NO: 412363 - DNA, 201 bp, Homo sapiens
cagtgagtcgagattgtgccactgcactccagcctgagggacagagcgagactcaatcacacacacacaaagaatacattatactgcgttggtgtaccatygtatgaatggttttgggtcactgatattgcttgtaataccagaaaagtatggtttatgtacttcaactgatggataaaacaaaatgaaatattttaatct

SEQ ID NO: 412364 - DNA, 201 bp, Homo sapiens
tgaaaccaatttgtggacaccaactccaagcccattgtcttattcttccactgtcttcatttatatgtaatgttggcatccagtgaaactttcatgtttcrttctcttcagtgaaatattgactaacaggattttggacactgccttacattcagagcgctatggatttactgttttcatttttgataatccatttaagct

SEQ ID NO: 412365 - DNA, 201 bp, Homo sapiens
ccaacctggggctcccattctcctgtgcaccctggagtggagctcccgctatcagccacaggggctgaggatccgcactgggggcgtcgtgggcatcgggmttcagcttcccccctcttgtctagcccccctgggcgcataggggggcttgtgagcactgcagactgcagccttcccctcaaccctccctcccctcgttgg

SEQ ID NO: 412366 - DNA, 201 bp, Homo sapiens
acccagtagtgaaattgctggatcaaatggtagatctacttttagttgtttgagaaatctcccccctgggaaaacagttatattaaagtcaactaactttmttatatttttccagagacaaaaataactttatctcttaaagcaaattgtaaactgaaaccaatttgtggacaccaactccaagcccattgtcttattctt

SEQ ID NO: 412367 - DNA, 201 bp, Homo sapiens
cgcgctccgcggcgcttacccaggaacgtcgaggcctcttggagttcgcctcaacttcccccggctccagcagcgtccgtcccgagaggcgcgcgtcaggrcacgcgtgcacgaccgtgctggtatttgcaggtacgcagggctgtgcacctgccgcagttcatgcgtgtgcaccacctgaggacatgtgaggactccggc

SEQ ID NO: 412368 - DNA, 201 bp, Homo sapiens
aacatagtaaagcattatttttgtctttaaaggaaagtgttgtattaactgtttggttatcataaatgagttttgactgtaactatcttgttgaatatcaygaaattcagatcactaattcccccttggcactcccatataagtgggtttgtcccaaattagggaaggttaagacaaacgtgaatctctggaggaaaactg

SEQ ID NO: 412369 - DNA, 201 bp, Homo sapiens
ttcagaagctcccaatgctatgcctggtggtttccatttgtattcaaacccttccctgcccatggtcttctcttctatttgcttcttgtctgttttgatasaaatcaataatttccctcatcttgctcctgcatttagaaaagtgaaccaactgtccagtttccctgcttcattgacacacagaggttaacatctcgggga

SEQ ID NO: 412370 - DNA, 201 bp, Homo sapiens
tatgtctgttctcaaatcccagtaggaaaggtctgaactaaggataatttaaagacagtgaagtctgggttgcagcattacactaataagtgttgactatrtagcaatgatcatagaagtttgcctaaacttcctaattgtgtaccatagtcattgccatatgaacgaaccctctgtattttcatgtactcagtcttttgc

SEQ ID NO: 412371 - DNA, 201 bp, Homo sapiens
gaaaactcctgaagccatctttgccactggtcattccagtcacagaagcttatgtatctctattgtttaagatggtttgaattttctgtcacttgcaaccrggtgaatcctacctgatagatgcacccaggtagtagataatagagccacaatttaaacccaggacttcatggttccaatattggtgccatttcttctcct

SEQ ID NO: 412372 - DNA, 201 bp, Homo sapiens
gaagacagagcaggtttgacccacacctgctctttagtaatttctgcatagaaacttgtttgtgcataccacacaggggaaaattgagttccaaagtgacrcttgatttcagcagactggttttctgggatactctttagatcaggtattggtttaaaaaacatcactgaactcaactgcaaagtcctccagatacagcat

SEQ ID NO: 412373 - DNA, 201 bp, Homo sapiens
atataatctgaagaacagtgtttgcgtctcagtaatcactctgctaattccatctgattttactaccaaatggaagaaaagggaacaagtggagaacatgkagatgggaaattaaagaaggagattttaagtaaatccaaagaaaggtgctcaactgcgtatgctaccttcttgattaaaacaatcactgttttggctggg

SEQ ID NO: 412374 - DNA, 201 bp, Homo sapiens
aatgcaagtcacatgtaacttaaattttctggtagcccattaaaaaagtgaagagaagcagataaaattaattttaataatatattttatttaacccaacwtgcctaaactactccaacatgaaatcaacctaaaattatttatgagaccttttactcttttgaaaaatacgaagtcttcaaaattctgtgtgtattttta

SEQ ID NO: 412375 - DNA, 201 bp, Homo sapiens
actgtctcactgtaaagcctattctctttcctcgatgtcatgaaacctcaacaacatagaagcagcaagttattcttttattcattctgcacatgttcagmaccagctctgtggcgcacaccctgtttagcactagaaatataatactaagcaaggcagatgaggtccctgcttccatgattacagtctaccagttaaaaa

SEQ ID NO: 412376 - DNA, 201 bp, Homo sapiens
tagacacccactggacagagagacaaagtagggctcatcatcaaaaggaaaaacgaaagaaaacaaaaagacagagagttgagacttttgttcattccacraatttgcattgagcatctactttataccaggtagtattctaggttcttcaagggagaaaaagcagcagaaggaaaaaccaggcaaaatccctgcttttat

SEQ ID NO: 412377 - DNA, 201 bp, Homo sapiens
gggctcacctccttcttttacagtacttcctataagttatgcatatcataccttctgtcttcctattatccagaaaattgtcatagggtcatgcctagctrctagggaagctagaaatgtaagctttattattggaggttctgtgcccctctaaaaatagaatttctgttactaaggcagaagaaaagaggatattgatga

SEQ ID NO: 412378 - DNA, 201 bp, Homo sapiens
ctactgctccagccatcatatctgcattgcaactagaaggaaggaggaaggaacaaagacgggctcacctccttcttttacagtacttcctataagttatrcatatcataccttctgtcttcctattatccagaaaattgtcatagggtcatgcctagctactagggaagctagaaatgtaagctttattattggaggttc

SEQ ID NO: 412379 - DNA, 201 bp, Homo sapiens
aaaataaagaagtgtgtggtaccacccccccatttttcagagagggcaactgaggtgtagggaggttaaatgagtgctggtgcgccttaattcaaagcctwtgaaatctgaaagattttggttcaaataaccagttgactgcttaactcagctaaaattatttttttaaatggcagaaattctaaaacataaaagtagctt

SEQ ID NO: 412380 - DNA, 201 bp, Homo sapiens
aatatcgtagagttggaaaaataaagaagtgtgtggtaccacccccccatttttcagagagggcaactgaggtgtagggaggttaaatgagtgctggtgcrccttaattcaaagcctatgaaatctgaaagattttggttcaaataaccagttgactgcttaactcagctaaaattatttttttaaatggcagaaattcta

SEQ ID NO: 412381 - DNA, 201 bp, Homo sapiens
ccatctccacgggagggtccacttgagaacaggcaggtggaataggagagaacttgatcgtttctgtgattgagaaagagaggggactggaagtgcagttsttcctgaggttcgttcacctgaatctgaaagcacctgatttcaagttctgcattgttttggggtgggaggaagtgagagaaaagcagacctggttcttgt

SEQ ID NO: 412382 - DNA, 201 bp, Homo sapiens
gtgtagggggaaggctacacacaggaagagatcccccgggatagaatctggatggacctatcatcacaccattactgtaccatttggagtgggaacattgkgagtggggagtgttgaatggtgagagcttttagactcagccttttccctgttgtcataagctgacttcaattatagcatctccaacactagtgattactg

SEQ ID NO: 412383 - DNA, 201 bp, Homo sapiens
tatgctttgctatgagtcatagtttagagaaaacccccacgttcctgtgcaatgaaagaagcagcataatgatctcaactcaggcagaatggcctggaaastcacgatatgtggctgcacccagtcggtacctttgctttgcttgtgttggaggtctcttgcattagtgttgtgaaaatagatgatgagctcgtgcctctg

SEQ ID NO: 412384 - DNA, 201 bp, Homo sapiens
gctaagtgctgtcacatgaggaatggattaagaaaaccaagagaggccgggcacggtgactcacgcctgtaatcccagcactttgggaggccgaggtggcrgatcatgaggtcaggagattgagaccatcctggctaacacagtgaaaccccgtctctactaaaaatacaaaaaaattagctgggcatggtggcacgcgat

SEQ ID NO: 412385 - DNA, 201 bp, Homo sapiens
ctggataaacataaatgacagaagggaagatctgacctttgctcctggtgggaccaaatgtgtgaaagtggaatcctcagagaatagcaggagacaatgtrttgctaagtgctgtcacatgaggaatggattaagaaaaccaagagaggccgggcacggtgactcacgcctgtaatcccagcactttgggaggccgaggtg

SEQ ID NO: 412386 - DNA, 201 bp, Homo sapiens
aagtctgctggataaacataaatgacagaagggaagatctgacctttgctcctggtgggaccaaatgtgtgaaagtggaatcctcagagaatagcaggagrcaatgtgttgctaagtgctgtcacatgaggaatggattaagaaaaccaagagaggccgggcacggtgactcacgcctgtaatcccagcactttgggaggc

SEQ ID NO: 412387 - DNA, 201 bp, Homo sapiens
caaaattatgttttccagcttgagtatggtgtcgcacacctgtaatcccagcactttgaaaggccaaagtgggagtatcacttgaggccaggaggtccagkctgccatgagccatgatcacatcactgcaacccagcctgggcaacagagcaagagcgtgtctcttaaaaaattgttctgtcaaatctgcccaccttcatg

SEQ ID NO: 412388 - DNA, 201 bp, Homo sapiens
agatctcatcattcaaagtgtggtccatgcaccagcagctttgacatcctctgggagcctgaatgtagaatctcaggtcccatccagactgaccgagctasaatctgcctcttaacaagatccctcggcgattcacgtgcatgttaaagtttgagaagaactgccccagaaattctatgaatataaagtaagtgccatttt

SEQ ID NO: 412389 - DNA, 201 bp, Homo sapiens
gcacatatcccatgactgtacagtgttgaggtcactaatcatcacatgtaaatatacacagatgtggcctcctactacccccccactaagggtggtggatsacagcaggtcatccagcctctaggcaagagagtaaagtctctatggtggtctgggttgacagaagcagagtggttgagtacaagtcactgacaggatgtg

SEQ ID NO: 412390 - DNA, 201 bp, Homo sapiens
aatagctgcagatttggttaggatccctttccagtccctgggtttcaggaaggcttagggaccaggaggaagagcaaaagtgttctctgccagcccctctratgaaactgctgatccaatctcactggagactccattcctttcctgttgcttcatagatgagatcatggtaggatgcagtctccaagacaccaaaatgat

SEQ ID NO: 412391 - DNA, 201 bp, Homo sapiens
aaggtggctattattaagggtggtggacttgattcaagtcctcccagttttgatgtgttccttgaccagttgattcttatttccctgacttgtaaattgcygtcagcttcagcttgccttattaagaattctgtatagttggccgggagtggtggctcacgcctgtaatcccagcactttcggaggctgaggcgggcggat

SEQ ID NO: 412392 - DNA, 201 bp, Homo sapiens
taaactggctgaggtttccagggagaccaaagaatgccactatatgcctgtgaccttgaatcttaaacctggggcacctaaaacttctctctaatcttccrgaaatcttgaccaggtgaaggaagagcctgtgataggggaagaagggaaggaacatagaatgaaggtgatacaaatgaacagaggtagggaaagggcatc

SEQ ID NO: 412393 - DNA, 201 bp, Homo sapiens
ataattggcagatgagaaattgttgcagcactctcaataatcccaggaaggaagtacagatgttgattaattaacaacaaccaaaggtattatcacatctrcagtaattagcatttatcaagtgcctagagtgtgtctggcatactgtgctaaattctatttattaatcaatctaattctcacaacaaacctgtcatgtag

SEQ ID NO: 412394 - DNA, 201 bp, Homo sapiens
ttacttcctcgtttcaaactccagtctcagctattatcacacaagatgcaagtgcccagatctcagtccttgagatcaggattttaaagatataatatgtrattgctaaatgtattgtgaaggcctgttttggtttggagaaaattttatcagtgaggtcacaaatgtcagcctctttgaagttgaaatcctgaatacatc

SEQ ID NO: 412395 - DNA, 201 bp, Homo sapiens
ggtacaagtccttctccgactgtgagccggatgacaaccatctcagcatcgtcaccctggaggaggccccattcgtcatcgtggaagacatagaccccctraccgagacgtgtgtgaggaacaccgtgccatgtcggaagttcgtcaaaatcaagtgagtggcaggaatgctgtcacctgaacgtgcccaaccctttgaaa

SEQ ID NO: 412396 - DNA, 201 bp, Homo sapiens
ccacctgcggggctgtaaaggtatcagtgcctgggcactgcctccagagatgcaggttgattcctctggggatgagggcggctgggatggagaactgcccyatattctgttttctctttatgcccgtttgtcttagcacagaagtagatgcatatgttgagatatgtggcagaaaggcccttgagacggatggatgtctct

SEQ ID NO: 412397 - DNA, 201 bp, Homo sapiens
cattctccccagcctgttacatatcatagcgtgaataaatgaacatgtgtgtgtgtgtttaaccaaattgctctactcgccatcctatcttaaaaagaaakgtatcagcaatgctggacaattttgtaattagccacaggaaatgtttctttatagccagcaaaaattttccagcccatatgatgaggtaatcttagagag

SEQ ID NO: 412398 - DNA, 201 bp, Homo sapiens
agtcattctgttttagccatcattattcctaggctggcactgggacatcgtaggtcttcaataaatctatgtcgaatgaatgaagaatttgatgcgctcarcattctccccagcctgttacatatcatagcgtgaataaatgaacatgtgtgtgtgtgtttaaccaaattgctctactcgccatcctatcttaaaaagaaa

SEQ ID NO: 412399 - DNA, 201 bp, Homo sapiens
acttggatgtgtcaggaacagggagtagaacttggagaagatttaggaagttattgcactctgggggctcataaacctttgcaacttttctctccatgagygagcgttggactgaaacttttgcctgactcccatggtgtgggggttgtgatgtggtcaatgacatcaccaaagattctgctagtctttgccttaatttac

SEQ ID NO: 412400 - DNA, 201 bp, Homo sapiens
gattctgaaccctcttgtcctgtgccatgtaaaggagagaagagaggggttctgtagcaatgaagttgatgcctgaaaactcaatgggatccatatgtgcwtatacatgtacatgtatacagcacacacacacacacacacacacacacacaagcgtgcttgcctgtcctggttgtgtataaatataaccagaagtttggc

SEQ ID NO: 412401 - DNA, 201 bp, Homo sapiens
tggcaaaaatgtagaactctatgatgagcccttcttccatgtttcaatgtccctgtgaaatctactggctatttttactctacagagccttcaggtatatwttttttttccttctagctttaattttttacctgtttgggtgtgggagggaatctgttaagagatttcctaccataccagaagcagaactctggctatctt

SEQ ID NO: 412402 - DNA, 201 bp, Homo sapiens
tattctttttgcttaggattgccttgcccattcatcaaccctatattttttattttgaggcaaagaagatggatgttcagagagcaccaaagtcttatcasgtcacgtatcaagattcaacattgtttcctttccttatttggacagaataatggaccaagatatcaagtcttcaatattggcttgaagggaaaatgagag

SEQ ID NO: 412403 - DNA, 201 bp, Homo sapiens
aagcggcaatgggagacagagaagacgtggtaatgacatagtttagctgagactgaaacatagttttgcttaaaactgtgcgtgacattggctgggcacgktggctcacgcctgtaattccagcactttgggaggccaagacgggtggatcatgaggttgggagtttgagaccagcttggctaacatggtgaaaccccatc

SEQ ID NO: 412404 - DNA, 201 bp, Homo sapiens
acacctgctctctcattctccagtgaaatgaaatataacaagggttgcagggtttgagtagctattcagaaacacacattgaggaagaaaagaggtaaacygggtgcatcctcctattgagactttagttcaggaaacatcctgacttgctaagctcagcaagtgttgagattgcagcaccacaaagattttctgttctgt

SEQ ID NO: 412405 - DNA, 201 bp, Homo sapiens
ttctttctttctttctgtttttttaatttcccactggttctttctactcagatatatcactaatcttcccttatagggctgtacttcccacatcagtaagrcaggagtaaaaacacctgctctctcattctccagtgaaatgaaatataacaagggttgcagggtttgagtagctattcagaaacacacattgaggaagaa

SEQ ID NO: 412406 - DNA, 201 bp, Homo sapiens
tcttcatgtggggatttaagaactcagtctccactatcttgtggctctgccatcttctaataacttaggattttctgcaagcagccagaaaatccaggaarcaggaaggagagaagaaagggtgtcctatctctccaaaactctggcccacatcctgttggatgaacgagtcacatggctacacccagatgcagaggtgct

SEQ ID NO: 412407 - DNA, 201 bp, Homo sapiens
aaaaattattaaatgtgggtaggttctggaagaaaatgcaaagtttttaggtaaagcacaaaagggcagaaaaaatgtcatgcttcctctgactctgcagytagaggaacagaggtggggagtttgagaagccctgggccagaggagcggaggagagacccgttcctcaaggggagtgggtgggagtggaaagaattaact

SEQ ID NO: 412408 - DNA, 201 bp, Homo sapiens
ggagagtctcaaaatgcaagaaagagtgtacaaaaatcagttggctctgaatgagagggagggtcttttttgtggacagcctgggagctttggtttggagwagaagggagagagatttgaagatttgaaggcgatgttatgacagcctggtttgggaattacacagaagtggagggaaggaagaaggctggaatgaagaag

SEQ ID NO: 412409 - DNA, 201 bp, Homo sapiens
gattcgatactcctgattgttgttgggactttcagagttggtcttggagacattggccactctctgtgattctggtggaactgtagggagatgaggcaagktggcagggaagcaaagagctcagtggaggtaacatcggggtatatgtctggtccccatgtggaacggtgatattgagaggagttgggtgataccaagaga

SEQ ID NO: 412410 - DNA, 201 bp, Homo sapiens
gtagggagatgaggcaaggtggcagggaagcaaagagctcagtggaggtaacatcggggtatatgtctggtccccatgtggaacggtgatattgagaggakttgggtgataccaagagaagttggtttaaaaggtcgtattttgagaaactggggatgtatttagaaaggagattgtctgagaggtgaacagcccttcctt

SEQ ID NO: 412411 - DNA, 201 bp, Homo sapiens
aaaacttagaatataatcttatgggaccagcattgtgtacttgtggtccattgttgacctaaacctccttatgcagcacatgactgtactatatatatatrtgtaatttctcagtcaattctccatgtatcttgtttttttttttttccagttctctgtttgtgctgtgtttgggaaggtttcttcaattctatactccag

SEQ ID NO: 412412 - DNA, 201 bp, Homo sapiens
taatcttatgggaccagcattgtgtacttgtggtccattgttgacctaaacctccttatgcagcacatgactgtactatatatatatatgtaatttctcartcaattctccatgtatcttgtttttttttttttccagttctctgtttgtgctgtgtttgggaaggtttcttcaattctatactccagttaactacatcat

SEQ ID NO: 412413 - DNA, 201 bp, Homo sapiens
tttcaacaaggatatactttatttccaagataataattggttcctctttacacctccctgtttttttgtgttataaataatgaaaaactcttctcactttktgcatgtaactccctcccctgtcccttcaaagattaaaaaatatgtattataaagttcttctctgattgctctagcatctttccttcttcagttgtgaag

SEQ ID NO: 412414 - DNA, 201 bp, Homo sapiens
aattggttcctctttacacctccctgtttttttgtgttataaataatgaaaaactcttctcactttgtgcatgtaactccctcccctgtcccttcaaagaytaaaaaatatgtattataaagttcttctctgattgctctagcatctttccttcttcagttgtgaagtccttcatttgtagaatcagttagttggatgttc

SEQ ID NO: 412415 - DNA, 201 bp, Homo sapiens
tgtgtgtgtgtgtgtgtgtgtgtgtgtgtgtgtagaggttcgagtatatgtgtttgtgttaggtatgtgtgtatttgtagttgtacgtgtgggtgtgagcrtatgtgattataatgtgagcgtgggtaggcatgaatgtacctgtatataagtgtgcttttatgtagaggttcatgtatagatgtataggaatatgtatac

SEQ ID NO: 412416 - DNA, 201 bp, Homo sapiens
tcaagataccctcttctcatccctttacctacacaaccgattgatcagcacccatttttgtgggtgaggaactggaaagggatggatttcctatttttttwaaaaaaaactcattaacatgtatgcttttttttctggttaatacatttgagaactttaatgagtcacttagtctgtaaaaagaaaactaggaaaatctct

SEQ ID NO: 412417 - DNA, 201 bp, Homo sapiens
ggctctacttttcactgcaatggcttcactgataggctcacacccccacatgatggtaagtctgcaactccttctatccaagcatccacatctatcccccyctcaaagagtatgatgagcctcacatgaatttcatgccttcctttagatgaatcaatgtgtgcatggagaagagattttctgattggccacttaggacac

SEQ ID NO: 412418 - DNA, 201 bp, Homo sapiens
atattactccaaggtagaaccaaaagagagaaaacactattaactttttagctaattacaagaacccatcacttttaagagcacacaaagaattaaaagtratccaaagaaataggactcctatctttccccagggatctggcaacaaaggaactctggaggactgaagattatacatgaactcctgaagaaaatgatggc

SEQ ID NO: 412419 - DNA, 201 bp, Homo sapiens
aagaaagagtagaaaatgagaagacatatagatggaggtgcttgtatttgggctgcccaggagcccttaagtcattcagttccctggatggatttaaaggyggtgtcactgtgtcatcagaactcttcactgtgactagtaactaaaacccagttctaactacattgaatagactcacacacaaacaaacacacaaggaat

SEQ ID NO: 412420 - DNA, 201 bp, Homo sapiens
gcattatattactccaaggtagaaccaaaagagagaaaacactattaactttttagctaattacaagaacccatcacttttaagagcacacaaagaattamaagtaatccaaagaaataggactcctatctttccccagggatctggcaacaaaggaactctggaggactgaagattatacatgaactcctgaagaaaatg

SEQ ID NO: 412421 - DNA, 201 bp, Homo sapiens
ttttttgccttggaagaacttcattaattaggatttgaaaaatggtgaaaactctttggttaaaaacatctaattgcagcaaaccaacacagcacatgtayacatatgtaacaaacctgcacgttgtgcacatgtaccctagaacttaaagtataataataaaaataaataaataaaaatctaattttatatgctattgtt

SEQ ID NO: 412422 - DNA, 201 bp, Homo sapiens
gctctgctgttagaggtattttctgtggtggaattcaaggtcctcagaagagtcaattcacaggcaaatggaagaagtaaaactgtcatgagtaaaagcamactgtaagaccacctctggctgctttctccccacctcctgtgctccacatggaaagaaaatgttgccccttcccaaagtggaagactgtgcatattgggg

SEQ ID NO: 412423 - DNA, 201 bp, Homo sapiens
acttgccatagagtaagagaagtcatatctatagtcatgttcagtcataattttcaggctggtaagaatgaattgattatcacaataaataaaaggctttytcagctgtcagcccaggatcacagtctacctctcttagccactttctaactcttattggcaagtttgctgagggaaaaaaaacttcttaatatcattcag

SEQ ID NO: 412424 - DNA, 201 bp, Homo sapiens
ccctttcatttggaagaaggaaaatgtccatctcaaaaacttaaatttattattttgccccagatacagaagaacaaatgcccatcagagacctgctaccragttccagacatttcacctctcacaacgcaataacttttcacaggcgagggggatgaaatgctgttccactgattgatacctccaggttctgtaacctta

SEQ ID NO: 412425 - DNA, 201 bp, Homo sapiens
agcttctaagcttttgtgcatgctgttctctgatcctacacatcccttctttccactctgacttttcaggtcctttgcaaactgcacaactcccctccatygcactccttcatgatttcttccttccctcatcagatctgcctctcacttctgaagccctctgcatttcttgcacctttcaccctttggctgttagcattt

SEQ ID NO: 412426 - DNA, 201 bp, Homo sapiens
taaatagagacagggtctcaatatattgcccaggttggtctcgaattcctggtctcaagcagtcctccctctcagtctcccaaagtgctaggattacagawgtgagccactgtgccagaccactttttcttatgtgtaaattaaaaaagaatttgaacaggaatgaaagataaaaagaaaaaaaaaaacacttccccaaac

SEQ ID NO: 412427 - DNA, 201 bp, Homo sapiens
aaaaaaaaaacacttccccaaacaaaaaaaaaaaactctttcacttataagaatggtcatcatcttggctatttcagatggggaagtacgcatgcctcatyttatccaagtttctcacagttctataagtcttttttcacacacagttccatacacaaaaggtggctttgcaaaaaacttcttttaacatagctggcaggc

SEQ ID NO: 412428 - DNA, 201 bp, Homo sapiens
aaaaaaaaaaactctttcacttataagaatggtcatcatcttggctatttcagatggggaagtacgcatgcctcattttatccaagtttctcacagttctrtaagtcttttttcacacacagttccatacacaaaaggtggctttgcaaaaaacttcttttaacatagctggcaggctatactgtacatatatctatacac

SEQ ID NO: 412429 - DNA, 201 bp, Homo sapiens
atggggaagtacgcatgcctcattttatccaagtttctcacagttctataagtcttttttcacacacagttccatacacaaaaggtggctttgcaaaaaayttcttttaacatagctggcaggctatactgtacatatatctatacacatgtatgcatgtatgtgcatatacatatacctttgcatatatatgtttatgca

SEQ ID NO: 412430 - DNA, 201 bp, Homo sapiens
ccatacacaaaaggtggctttgcaaaaaacttcttttaacatagctggcaggctatactgtacatatatctatacacatgtatgcatgtatgtgcatatayatatacctttgcatatatatgtttatgcatacattttattttgctttatttagaattattatttttggagatagagtcttgccttgtcaccgaggctggc

SEQ ID NO: 412431 - DNA, 201 bp, Homo sapiens
gaaaaacagtatggcggctcctcgaaaaatttttaaatttttattatcggttggtgcaaaagtaattgtggtttttgcaattaaaagtaatagcaccagcstaatggaactatcttatgatccagcaatcccacttctgggtacatatcccaaagaattgaaatcaggatctcaaagaaatatctgtaccctcatgttcac

SEQ ID NO: 412432 - DNA, 201 bp, Homo sapiens
cattaagcacagtttgcatgttaggcacattgctgggcacaggggatacatggatgaacagggagggcaaaagactaggacctttccatcatggaacttaygtggttagaaaacaattcgaccaggaagaaatgggtgaccccatgttgtaataaaccttgtgatgaacagaaagagagtggtgtgagaagagagtacatc

SEQ ID NO: 412433 - DNA, 201 bp, Homo sapiens
atgaaaaacagtatggcggctcctcgaaaaatttttaaatttttattatcggttggtgcaaaagtaattgtggtttttgcaattaaaagtaatagcaccarcgtaatggaactatcttatgatccagcaatcccacttctgggtacatatcccaaagaattgaaatcaggatctcaaagaaatatctgtaccctcatgttc

SEQ ID NO: 412434 - DNA, 201 bp, Homo sapiens
ccaaatgtgcgtttctcaagggagagggtccaaaggtttcatgagtaaacaacaacaaaagctttcaacaaggtatgggatgtctccaaaagggtgagaayccatgatgatgatactgataatagcaataataaagtaacttttctgagtgcttagaatttgctaaggccaggcgtggtggctcacacctgtaatcctagc

SEQ ID NO: 412435 - DNA, 201 bp, Homo sapiens
gtggggcccaccaaggaagggcaagtgtacatcccatgattcatgattcataattcatcatgattcataattgtgtgaaacagaccatgttttggggtcakgaatgttttaatgatttttgctgaattcctttacagtgaaataacacagacattgttataagtaaaattgttataaataaattgttttaatacagaatga

SEQ ID NO: 412436 - DNA, 201 bp, Homo sapiens
aagtggtttgtattcaaggtgtacaatgtgatgttttgatgagtgtgtagactgtgaaatgattaccaccatcgaattaattaacacatctttcacgactrttggttaccattttgggtgtctgtgtatgtggtgtgagtataattaagatctaatcgcttcacaaatttcaagtgtatagtatgatattactaactgtag

SEQ ID NO: 412437 - DNA, 201 bp, Homo sapiens
cttcatttgtagaatcagttagttggatgttcacatatgttctttaatttttgtttgtgaacttattttcaaggcaactttatgatttcttatgccctgtrtctgtgagggtgtgtattttaagccagagcccatgtcagcagctcaggtttgtactctcttcccattctacgtggcctgtggtacaggcttaggagtcca

SEQ ID NO: 412438 - DNA, 201 bp, Homo sapiens
agataatttggggtgattttggggggagttggggaccactttaaaatctaatgaaggctacggacccttccagaggagtgcgtgttcataaacatgcagtyaaaattatgtgcaatttcaggggatcacagaccctctgaaaccctttcatagacttccttggatttgatttatttattggtttattaaacacagttgatc

SEQ ID NO: 412439 - DNA, 201 bp, Homo sapiens
agaggtggggcccaccaaggaagggcaagtgtacatcccatgattcatgattcataattcatcatgattcataattgtgtgaaacagaccatgttttgggrtcaggaatgttttaatgatttttgctgaattcctttacagtgaaataacacagacattgttataagtaaaattgttataaataaattgttttaatacaga

SEQ ID NO: 412440 - DNA, 201 bp, Homo sapiens
ggttgatttaatctacttgagggcataccgttttctagccttgggtagataaattgtttatgtacaaggaatgctgctaactagaaatgtgttttatcttktcattaaaatgggtccacaaatttctgcttagaaatacaattttagcttccctctttgaaatccttacagattaaacatttcctccttgctatccttgtg

SEQ ID NO: 412441 - DNA, 201 bp, Homo sapiens
atttatttttagggattactctctatttttgatctgtgattctcttttcttatttgcaagcaatactatgtaaatttaaaaataactaaaggtttctttawaaattctatgtcttaggagcagaaaaggaaggttactgagtgtgttcactcggattttgaccccgttttatttcacaacctgcttttatatattttttta

SEQ ID NO: 412442 - DNA, 201 bp, Homo sapiens
acaaggaatgctgctaactagaaatgtgttttatcttttcattaaaatgggtccacaaatttctgcttagaaatacaattttagcttccctctttgaaatscttacagattaaacatttcctccttgctatccttgtgacaatatcttccatttattgtgcctctgctgtatgccagacggtgatagatgctttccatgca

SEQ ID NO: 412443 - DNA, 201 bp, Homo sapiens
tctagtcattggctccgatgccagcttgttggagcttccggatgaacatatcacaatatggttcagggcattcgtgcagtgtttgttccctcaatgctgastgatttcataggtgtttgccaatttttctcttctctctagtgggcagataattaccagccatcctgaggattagcataaattggggggttacatacgaaa

SEQ ID NO: 412444 - DNA, 201 bp, Homo sapiens
caaactcctgacttcgtgatgtgcccgcctcagcctcccaaaatgctgggattacaggtgtgagccaccatgccgggcctaattgtcctctttatttgtgwgttctcaaccctctccgtgaaactttcccagcccccttttgattccctttcatgggtaatagtgagaggcagcacacacagggaaccaggacagtaaaca

SEQ ID NO: 412445 - DNA, 201 bp, Homo sapiens
aagtcatcagagaccaacaggcgtcctcccggtagcgtgactcacactccaagtagccctcaggggttgctgacaatcgtttgggccctgaagagctgtgrtctggtgggtttgcagcggtgtttatcttctttctcatagcctcagatggaaaatgctactgtaggcagagtgagtggggaaagagagagaaagagggct

SEQ ID NO: 412446 - DNA, 201 bp, Homo sapiens
cctataacacctggccctgttgagcccactggccttaaggccttctcaacacagtactccaggcagccatgatgaatcaacttgagttggaagatccaagraaaccttggacaaagagtctgaagaatgaaattcaattttcaaaaatacctgtgtgaccttagaaaaggcccttcacctgtctgaacctctggttctcct

SEQ ID NO: 412447 - DNA, 201 bp, Homo sapiens
tggcaacaaacataccaaaatatgaatagcagttatctttggggtggtagactcatggctgctttaatcttttaaagaatgtcattatcaagtggttaatrtattgtactttgagttagattgcctgaatttaaattcagggattccacctcttactggctgggtgatcatggggaagttcttaatatcttgagcctcaat

SEQ ID NO: 412448 - DNA, 201 bp, Homo sapiens
tttgtagagttgtgagatttaaatgacatcatggatattagtccatgtctcagtgcctaccttataataaatgcttattacaggaatgctattgttattgygtctgcattttttagtttttatttttctccagtgtacatgtactttttaataaccagaaagagtgattaaggatgatgtggttacatgagggtatgctct

SEQ ID NO: 412449 - DNA, 201 bp, Homo sapiens
agaactgtcagaagtggagggtctaacatgaaatgatttgtattttcttaactgagacaatcagaagcttcctttgcctttgtaggacttgctgagagctktatcctggcaaacggaagctaaatgtggccagcatgaaagtgatcgtaggagaagactatctcattgacctttgcactaaatgactccaccaactggacc

SEQ ID NO: 412450 - DNA, 201 bp, Homo sapiens
gaggcttagggatttagagtgtggacatatatagtttctcattttatctctgccaaggattaataactcagtgatagcctggggaacctggcagctccaamggtatttgtttaaagaatctctattttcagatgaggaaataaaggatctgggagttgcagtaatttgtgcattgttcaaagctgtaactagaacctaggg

SEQ ID NO: 412451 - DNA, 201 bp, Homo sapiens
gcagtggcatgatcatagttcactgcagcctcaacctcctgggcttaggtgatcctctcatctcagcctcccaagtagctaggaacacaggcgtgtgccaygatatccggctaatttttaaatttttggtagagacgggggtctcaccatgttgcccaggctggtcttgaactcctggactcaagcaatcctcttcccttg

SEQ ID NO: 412452 - DNA, 201 bp, Homo sapiens
ctgaaaagaatcgagatgatgtttcttatatcagactgccctccttacaggcttacaaacctggcttggtttgaggcaacaccgaaaggaagatgttctgrgaatctgatgagtcatagtgagaagacccatttttgtgtcctcccagactccaaagggtctgagcacggtggctcacgcctgtaatcctagcactttggg

SEQ ID NO: 412453 - DNA, 201 bp, Homo sapiens
ctccagcctgggcgactgtagtgagaccccatctcaacaaaacaaaacaaaatacctccaaagggaggggggacgtcaacagcacattgtatttccaaagrgatggcattggtgtttttgtgagaagaggaagcagccgtgcaggtctgaggtacatggtgggcagagaaatctggatgagtttgagatagtgttggtgga

SEQ ID NO: 412454 - DNA, 201 bp, Homo sapiens
aagcaagttggagacacacacacacaacactgcctcaattatccttgcctgttcccttttagattctgcatctctctgacggttgactcctgaaactctawtactctgtcttttaatgttgtcagcattaggaaaagagtgaccttgacaccttgctccttctactgaacttacagctttcctcacgatggtgcagaacta

SEQ ID NO: 412455 - DNA, 201 bp, Homo sapiens
ctactttcttcaatcaaattctacaaagcaagtgcaattgtgccatgctgtgggagatagagaatttaagtgggaagcgaatggagcttagttttccttgyatcattccaaaaaaaaagtgcctaatagtttttaaactgtgattccatcacaggtcctgagccaaccactttatgtacattaccacattttatgttcact

SEQ ID NO: 412456 - DNA, 201 bp, Homo sapiens
tctgaaccccatttgtctgactccgaagcccatgctttgactactaacttctgctactttcttcaatcaaattctacaaagcaagtgcaattgtgccatgytgtgggagatagagaatttaagtgggaagcgaatggagcttagttttccttgcatcattccaaaaaaaaagtgcctaatagtttttaaactgtgattcca

SEQ ID NO: 412457 - DNA, 201 bp, Homo sapiens
ttttttcttatttgtcagatttattgggcctttgttttgtccttttgagagtttttaaatttgtctttaaaacaacatgggtgttgggtcaccacagggargagagaaaggaatgagtttctcactgctgcatctgggagggtggacttgcctcacatggctttgagtcaagatggtggaattaatgaagttgggccctca

SEQ ID NO: 412458 - DNA, 201 bp, Homo sapiens
tctatgtggtccagcagattatagctgatggcatatgttttctttccacaattaaagtgtgtttgaagaaactaggacaggcagatctaacataggaaagsagggcaacaattagttttgggtatcagatcctgacatccatgctgtatacagggaaagcagaaacatttacctgcttttaataggtgaagagactaagat

SEQ ID NO: 412459 - DNA, 201 bp, Homo sapiens
ggactagatttactcttcttgttctccctggtctttaatactatgcctggcatacacagggggtgccataagtattttgctgagtgagttggtgaatagawgtgttcctttacaaagtactgttttgatcatctcataagaaagtcacatggtacctgggtggcctgagggaaaagcaaggcaggtctccagggttgagtt

SEQ ID NO: 412460 - DNA, 201 bp, Homo sapiens
gagagcagcggtgcaatctcagctcactgcaagctctgccctaccaggctcaagagatcctcccacctcaggctcctgagtagctggggccacaggtgtgyaccaccatgcctgcatgcctggctattttttttttttttttttttttttgtatttttagtagagacggtgtttcaccatgttgcccaagcctggtctcga

SEQ ID NO: 412461 - DNA, 201 bp, Homo sapiens
gctggagtgcagtggcacgatctctgctcactgcaatctctacctcccaggttcaagcgtttctcccaaggcaagtggattttgaaatcaagaaaatgggkttcatgagagaaattcttggcccctgttgctgtcaggaaggcttttagactaaaaagaatggagctaatgaaagcagttggatagggcaagcgtatgagc

SEQ ID NO: 412462 - DNA, 201 bp, Homo sapiens
caataaacacccaaagactttcccatcttgtaccaaggcaggtggatttttttttttttcaagactgaatctctgttgccaggctggagtgcagtggcacratctctgctcactgcaatctctacctcccaggttcaagcgtttctcccaaggcaagtggattttgaaatcaagaaaatggggttcatgagagaaattctt

SEQ ID NO: 412463 - DNA, 201 bp, Homo sapiens
acatacagccaataaacacccaaagactttcccatcttgtaccaaggcaggtggatttttttttttttcaagactgaatctctgttgccaggctggagtgsagtggcacgatctctgctcactgcaatctctacctcccaggttcaagcgtttctcccaaggcaagtggattttgaaatcaagaaaatggggttcatgaga

SEQ ID NO: 412464 - DNA, 201 bp, Homo sapiens
actggggttgtcttttggtcttagtggccttggtgttggaccccaggttccaggaagtcttttatcccagcagcagtttttcggagagaagactcacttayatgcaagactgacatgaaaaggggtttgctctgtatgaggctgtgagctcagccccatgcttaaagtgctgagtgggaaaaagggcagagactatgcctg

SEQ ID NO: 412465 - DNA, 201 bp, Homo sapiens
gggatcacagaccctctgaaaccctttcatagacttccttggatttgatttatttattggtttattaaacacagttgatccttgaataatgcaggcgctasttgcattaacccccatgcagtttaaaatccatgtataacttttgattcccataaactatagcccactgttgatcagaagccttaccaataacatagacag

SEQ ID NO: 412466 - DNA, 201 bp, Homo sapiens
agagaggttgggaggtagttagagcttaattccaaggcttctcctcactcctcttctgtaactgagcctcagtggagtcaagacacctcagctcagaaccsagacctccacctgctctaacactgactttgttcttctcatgtgggctccctttctggacactaggctcctgctttgaggaactgagtccctgtcttagaa

SEQ ID NO: 412467 - DNA, 201 bp, Homo sapiens
ttctaggttcaatgcttctcaggaatttttactcaaatagtcctagggggtgtggtaggcagaatcatgtccccaccaccccctcttccccacccaaagayatccacattctaattcctggaacctgtgaatactaaccttatatggctaaagggactttgcaaatataattaaattaaggatcttgaaatggagagactg

SEQ ID NO: 412468 - DNA, 201 bp, Homo sapiens
agctggaaatcaaggcttgcattctattctgctagggagtttgtattcacttattcaacacatatttatcaagcacctgctatatgttggatgctgtggtrttttgatgtgtgcctcataatcacagtaaaacctccacaggtgaaggggatagggaaagacattctagacagagggaagagatttctagaggtgtcaagg

SEQ ID NO: 412469 - DNA, 201 bp, Homo sapiens
cctcttacagccctggagggcagaagtctgaaatcaggttccctgcaccaaaatgaaggtgtcagcaaagctgtgctccctctggagactctggggaagartctgtttcctttcctttactagcttccagaactgcattccttgacttgcggcaaactctgaaattcagtttctcctgcaagtaagaaagttgggctaaat

SEQ ID NO: 412470 - DNA, 201 bp, Homo sapiens
caatctacagttgtagcctcaacctcttgccctgggttcctgacctgttcccctaggtgcttggtgggcttctctccttgacatggccatgggtgcctcayactgaacctgcccaggcctgtcctctttgattcatgcttattctggatttcttctctctgtcaatggtattcctgttgtccaagccttccttgcttggaa

SEQ ID NO: 412471 - DNA, 201 bp, Homo sapiens
  misc_feature (1)...(201): n = A,T,C or G
gcccaggcctgtcctctttgattcatgcttattctggatttcttctctctgtcaatggtattcctgttgtccaagccttccttgcttggaaggaacatganggacggatgtatattgagctccctgatgtgcaggcagagtgttgcaggcagggatccgaggaccaccaccctcattgtagagaggaggaaagtgaagccc

SEQ ID NO: 412472 - DNA, 201 bp, Homo sapiens
caaaaggagaccagtaaccatcaagcagttacgatctatttccccacccctccagctcctggaaacctttaatctgctttctgtatctgtggatttactcrttctagatgggatgggatcgtctgttatgtgaccttttgcatctggcatctttcacttagcataatgttttcaaggtccatccatgtcgtagcatgaatc

SEQ ID NO: 412473 - DNA, 201 bp, Homo sapiens
tgacactatacctggccctctggtgttttccattcttccactgcccaactcttggttcgtctccatccctggcacctggtccttatcaccttccacctgarctttgattccagtcttctgagtttcctgcttatacgggaagctctcctactcaaggggcgcattggacatgttactctccactcttaaagctttggtgat

SEQ ID NO: 412474 - DNA, 201 bp, Homo sapiens
tcttcctcccacctccatctttacttttggaaagcacagttgaaatctacctctcagggttcttattaggatcgaatgaaataaggtgtatgaaaaccctsaaaactgtaagaagaaatacaagtgtgaaacatgtcattgttagtcccgctttgcctttaagtcctttaagttttaagtgtcaagttctccaaggtgcct

SEQ ID NO: 412475 - DNA, 201 bp, Homo sapiens
tttattttggttttgtgacttctcagcattatacagaaatggaatattctgacatttaaataaggaatatttatctcccaaattcaatctatttgtgtccmgaatcttgtactatttcctatcaccaccaccatcaaaagtattttttcacttcggcaaatagttcagtgaccctctgagatcgtgagaacagaggtcaca

SEQ ID NO: 412476 - DNA, 201 bp, Homo sapiens
aaatggctgacctcatgcatagcaagagagttgaaaatcactgtgggggacaggagctcttctagggagaaagaagtcaggtatgcgtgcaggtgcagagkgggcagatgggcaggaagcctgacagttttcctggaccctgggctagatcacccttttcatcgtccagggtccctcctaccacttaaaatggatttctgt

SEQ ID NO: 412477 - DNA, 201 bp, Homo sapiens
taatcacgtggcctgtgaaatcctgcaatgtgacaagtagcaatgaacttaacaatactcaagtttcatccatggagcagaaatctcagttggaaggtggyggtgaaacatttatgccaaagacagcctgtccctgcctctaactggatacatttaagcctagccctatttttattttggttttgtgacttctcagcatta

SEQ ID NO: 412478 - DNA, 201 bp, Homo sapiens
tcccccaactccatccaacttgtgcgactaatcacgtggcctgtgaaatcctgcaatgtgacaagtagcaatgaacttaacaatactcaagtttcatccayggagcagaaatctcagttggaaggtggcggtgaaacatttatgccaaagacagcctgtccctgcctctaactggatacatttaagcctagccctattttt

SEQ ID NO: 412479 - DNA, 201 bp, Homo sapiens
tagagttgtccaatcttttattgtccaatcctctttttaatttttcttctgaaagagacactggttgggaagctgcacaagttgtagttgggttttttgtkgttgttgtttttgagacagtttcactcttgttgcccaggctggagtgcaatggcgcgatctcagctccctgcaacctccacctcccaggttcaagtgatt

SEQ ID NO: 412480 - DNA, 201 bp, Homo sapiens
cccctggtcatggataggaaaactaggcatgaggttgtctactaggtaaaagaagcatcctgtgaaaggcacgtgtaaacacccagatttacttcccctcrttggtcattagggcagggttgttagctgctgtagtactggaaacccagtttagccagtggctctcaaaacagcacgggatctgaagttattgctatcctt

SEQ ID NO: 412481 - DNA, 201 bp, Homo sapiens
ttataaataagttcctcctgggagagatcccctggtcatggataggaaaactaggcatgaggttgtctactaggtaaaagaagcatcctgtgaaaggcacrtgtaaacacccagatttacttcccctcgttggtcattagggcagggttgttagctgctgtagtactggaaacccagtttagccagtggctctcaaaacag

SEQ ID NO: 412482 - DNA, 201 bp, Homo sapiens
gagaaaaaaatctaaagttggggaaaaacaagagaatcaactcgtattcccttaaagggagttgtagaatgactcatagaaaccaatggcctctcacttaygttgtctttaactttaacattgaaacaaacaatttgaatcggaagaatcctaattcctgttgattcctaccgtgctggcctctatgtggtccagcagatt

SEQ ID NO: 412483 - DNA, 201 bp, Homo sapiens
aaactaatcaaggagacaggagccttgtgttatccacagttggtgcaatgtcatgaaccacatgtaccaagacctgtgccacagactgggggtacaaggasaataaaacaagatccctgccctgaataaactcacctcccagtgacaattacgttccactgtgacaaattctatacaaaaaaaaaaaaaaaatccaggatg

SEQ ID NO: 412484 - DNA, 201 bp, Homo sapiens
ctccttgtgtatactaagcaatggggaatacagatcaaatggaagtgatccatttcgcttctggattttacagcttcaaggaacttgttgacaacacttcrataaaaaagaaactgaaaagcagtgagataattttacttgctgaaaagaggagctatttcttggcatgtagaactgagcaacacagcataggttaccttg

SEQ ID NO: 412485 - DNA, 201 bp, Homo sapiens
tggagctcagtggctgctgtctgggcctgcttctcactttctttccattgtctctgttctattatttccccatttgcctgctgatggaacagacaggaatracatctgtccctaagaaaatggacagaacagagagctgctccccccagcaatctgcttctggctacaagtggctctgtcagcctgcctctgtagctacag

SEQ ID NO: 412486 - DNA, 201 bp, Homo sapiens
aatcttgtactatttcctatcaccaccaccatcaaaagtattttttcacttcggcaaatagttcagtgaccctctgagatcgtgagaacagaggtcacagsctccagaatattatttctgaacccagggttacttgggtcttatttttctctagctcatttttttttcttatttgtcagatttattgggcctttgttttgt

SEQ ID NO: 412487 - DNA, 201 bp, Homo sapiens
tccttctctcttcattccacaactaagtctccgatgcccattaagctccttgtgtatactaagcaatggggaatacagatcaaatggaagtgatccatttygcttctggattttacagcttcaaggaacttgttgacaacacttcgataaaaaagaaactgaaaagcagtgagataattttacttgctgaaaagaggagct

SEQ ID NO: 412488 - DNA, 201 bp, Homo sapiens
tgtgaaatgagcataaacaggagaggtgcacatggcacactgggacacctactccagcctgggcactggggaggtgaaaaaacttcctgaaagacctaagytaggaccaagtcctaaaggataaagaagagctatccaaagggtgacagtcatcttatccattctagtaactgaaccacaaacattatttttctttatttc

SEQ ID NO: 412489 - DNA, 201 bp, Homo sapiens
catgtgccttttaagccatgtcagcttgaccgtctttatttgtgtgaggcagattggttaagcagattccagaagtgcttggtatataataaggtttcctrgattcctacaaggtttctgccgtcttacttcaaagaattgtatctctccaacttcatccagtaatggaaaattatgaccatgtgtattgtttgatgtttg

SEQ ID NO: 412490 - DNA, 201 bp, Homo sapiens
gtaaaccaatttacattcctgccagcagtgcaggtagtttctccaatttgcaagtgctccttttcgactttctgtaagaggtaaagctggcttgtgcaacwgaactctaggtgtcttcatcagtggctgtgtggttggctgttgccaccagtcatttagagatccagattcttgccccaacatcaacattgccttattttg

SEQ ID NO: 412491 - DNA, 201 bp, Homo sapiens
ccctgagctccggaagcccacactatttattggtgatcaaacaaagaagcaggtggtgaggacgtgcggatgtgggggtaaacaggtgaggacatgaggaygtaggggtagaaaggtagcagtgcatcaagcatagctgtgatggtttagcattttctttgacacatatgtaatatgctctgctacctgagataatggaga

SEQ ID NO: 412492 - DNA, 201 bp, Homo sapiens
ttccaacaattggaagaatttaactaaacatgactggtttccccttatccttaaagaaattttctctttttgtaaagaaatatcacgcttaaaaaagtttrtatttttctctcctctggtttagaaagtctgttttcttcaactttccttattattacctcacttaacccccaaagtaaaagaacacttatacctgtacta

SEQ ID NO: 412493 - DNA, 201 bp, Homo sapiens
agtaggtacaggcgaagcagagatgactaataaaatatccccgggattttagggaatgttggggtgatcagacccaacaccaggctgtgggggctacaaartccggcagagtcaaaggaatgggaaaagacaggttaagagtatataaggtgggtccaggaggccaacgctagtgtatggaggctgcaaaggccctgagct

SEQ ID NO: 412494 - DNA, 201 bp, Homo sapiens
gccatatgggcatccattcactcttgaacccacccacttacccactattgatctgtttaccaagcattcactgattactgactcagtgccaggcctgtagyaggtacaggcgaagcagagatgactaataaaatatccccgggattttagggaatgttggggtgatcagacccaacaccaggctgtgggggctacaaaatc

SEQ ID NO: 412495 - DNA, 201 bp, Homo sapiens
cagccatatgggcatccattcactcttgaacccacccacttacccactattgatctgtttaccaagcattcactgattactgactcagtgccaggcctgtrgtaggtacaggcgaagcagagatgactaataaaatatccccgggattttagggaatgttggggtgatcagacccaacaccaggctgtgggggctacaaaa

SEQ ID NO: 412496 - DNA, 201 bp, Homo sapiens
agaaaggattcaaatttaggtcttgtgagtctccaagtttagtgcttgttccagtactttgcacagttcctaggatgaatgatggaaattttcatataggwtgtggagattcacagggatggtatctgccttggaagttgagtggaagttgggggtatgacaatacctaggcttttgtgtggacttaactcgtattcttta

SEQ ID NO: 412497 - DNA, 201 bp, Homo sapiens
gtctgaatatgacgtaaataaatagtaagcatttgttgagcacctattctataccaaaccttacagtatggccttctgtacttattatttcactttagccrcataataaccctgtgaagtgagtctctgatttcatatttgagtcatgcaaacttagagatgttctatgatttttaaaaaattaatagctgagaaaggatt

SEQ ID NO: 412498 - DNA, 201 bp, Homo sapiens
cttcatctgattggtatgttatgttgaggttcaaagtgagcttccatttggggaaaaataaaatatttctaaaataagtttgaaagcaagtagaggaaggrgattgactgtagtagttgtctgaatatgacgtaaataaatagtaagcatttgttgagcacctattctataccaaaccttacagtatggccttctgtactt

SEQ ID NO: 412499 - DNA, 201 bp, Homo sapiens
atttttgctataaaagggaacagagagaaatggagaattatctacagagggacacgaggtcacataagggttttcatttctgtttttaaggtagaagctaygcttgtattttggggtgatcctcctcatgattttgctatggttggaccctgtatacacttcttcttcttcttctttttttttttttttgagacagggcct

SEQ ID NO: 412500 - DNA, 201 bp, Homo sapiens
ggtaggacaaggaatgagaattgtcctgtggatttgacaacacagaggttgcaggatacctttcagtagcaccgtcgtggccacacctgaccagagttcgyagaggaaagaatagcacagaagtaggcagggtggttatagccaactctctagatcatttttgctataaaagggaacagagagaaatggagaattatctac

SEQ ID NO: 412501 - DNA, 201 bp, Homo sapiens
atttgaggataattttagagttgtagaaaagttgcaaaattagtacagagaatttcagtatatgcttcacccaggttgccccactgggcaaagtcctagakttctttcttaaatttttaaaattgttaattattgtgcatacatagtaggtgtatatatttgttaggtatatgggatattttgacagaggcatgcaaatgt

SEQ ID NO: 412502 - DNA, 201 bp, Homo sapiens
ccctcaatgtttccctgaacctggcctggaaattcagcttgctttaccatttgaaccctgccgtggagtcccagggaccagcgttccaagtctgcctctaycatttcccagccatgtaaccttgaatgagtctcttggcttttctgagtctcattgtctttagcatgtccccatacctatctctccttcttactttcttgt

SEQ ID NO: 412503 - DNA, 201 bp, Homo sapiens
agctgcttgtgggaatccttggaggccagaatgtagtctcgattcttcttcaggttggtgtgggagacgatggccactagctcatggcgatcattgaccayaggcagcttcccttgctaggctgaaggatctcatttgcctgtttcaatgtcatgcctgctggagccaccatcagcttgatccttggcgtcatcacctcac

SEQ ID NO: 412504 - DNA, 201 bp, Homo sapiens
gatccgtcttgagatgagagcctcatccaaaattatctggtgggcccaatataattgtgactgtacttataagaggcgggcatggaagagtcagagaaggrgatgtgaccatggaaacagagttagagtgatgtggccatgagctaaggaatgtgggcagactctacaaactggaaaaggtaagaaatggattctcctcta

SEQ ID NO: 412505 - DNA, 201 bp, Homo sapiens
ttaattccttccagctttgtatacttggagcactttaaaaactactttgagttactactcattcattcactcaacaaatatttattaagtgcctactatgrgtcagccattgatcttggctctggggatactcctgtgaaaaggcaatgccctgcacccatggagtttttcttcccaatgttttattactactcacttacg

SEQ ID NO: 412506 - DNA, 201 bp, Homo sapiens
acaggcatgagtcactgtgcctggtctgatgagattttgatgaaaattttggactttgacactatcgtgagttagttttggggagatggagtgaatctttsggagcaagatggtggcctggcaggcagaactacgacctctcaaagatgttcaccttctaaactctgactcctgtataaatgttatgatttatggcaaaag

SEQ ID NO: 412507 - DNA, 201 bp, Homo sapiens
caggtgcagagtgggcagatgggcaggaagcctgacagttttcctggaccctgggctagatcacccttttcatcgtccagggtccctcctaccacttaaartggatttctgtgcgattatttattcttgccccttcttttgaagtcctttgagcctttgaacttgatatggtttggctgtgtccccacctaaatctcacct

SEQ ID NO: 412508 - DNA, 201 bp, Homo sapiens
ttgccttcagataaaatgtaaactcctggctgcacaaatccctgatttctgacccctgctgaccttttgagcttcaactcagttctctcctcattttgcartttgctctagactttcccaaagagggctctgaggaatatgaccctacagaaaaaagtttaagccaaaataaatttaagagatgctgtacatcatgggatc

SEQ ID NO: 412509 - DNA, 201 bp, Homo sapiens
agccaaaataaatttaagagatgctgtacatcatgggatcctcagatatttacaatgcacatgagcctcttcaaagctctgagaagtcctgcgctacagamacggtttaaacttatttcctgctgtttgaacgaatgtttcccaaatctatttgatcagaagactccccttctgttttttatacaacacttgttcttgttg

SEQ ID NO: 412510 - DNA, 201 bp, Homo sapiens
caaagctctgagaagtcctgcgctacagacacggtttaaacttatttcctgctgtttgaacgaatgtttcccaaatctatttgatcagaagactccccttytgttttttatacaacacttgttcttgttggcttgataaaatatgacaaaaaccattgccctgattgctaaaatataacaaaaacccacattgctctaaat

SEQ ID NO: 412511 - DNA, 201 bp, Homo sapiens
caggggatggctcacatcagtatccttgagtggaccccgctctggtgtctttattttcatctctgggaaaaagttatattttccctggagtcaaatgaggyggtattccagcctccttgcttaaatatatctcaaaggttctgctgtgtcaggcatggtgattcacgcctataattccagcacttagggaggccgaggcag

SEQ ID NO: 412512 - DNA, 201 bp, Homo sapiens
cccttctgttttttatacaacacttgttcttgttggcttgataaaatatgacaaaaaccattgccctgattgctaaaatataacaaaaacccacattgctytaaatgtgcctctttcacattttctggcacttgtctgtgctgctatttctgtctgtctcatatccttcaaaactcatctcagaagccatgccctctgaga

SEQ ID NO: 412513 - DNA, 201 bp, Homo sapiens
cagctgccttgggaaaagctgtagtgtcagatgaggagggtcggaggtcagacagaggctgggctgttttggtgactcagattctttcgtttataacacgytggtaattccacttggggagcctttaatgcctcgaactcggaggccttggtagagactaagttaatggatttgaaatttctttgaaaagctgaaattact

SEQ ID NO: 412514 - DNA, 201 bp, Homo sapiens
aagctgcctctttacatactttaaaggtttctccataagtagtgaactgcaacctaactggatgtgtaaacagactgtaacccactgttgtccaaacaacygagtttcagccaatcaagggggaccaactgttcaaactgggctcaagtagggcaaatgccaagctgtaatggatccagctgtttctgcacctcgcttcca

SEQ ID NO: 412515 - DNA, 201 bp, Homo sapiens
gtgtcctatagctgtctctgagtaagactgaattcataagaatttattaatttctctaaagagaggagactcagggtcccagtaactgaatgctgttcttmtttcagtctttcctgtatcaccttcctggattttgccatatcaaggtatcacctactttacggatctataaactatggcctgccacctgtctttgtaaat

SEQ ID NO: 412516 - DNA, 201 bp, Homo sapiens
agaggagactcagggtcccagtaactgaatgctgttcttatttcagtctttcctgtatcaccttcctggattttgccatatcaaggtatcacctactttasggatctataaactatggcctgccacctgtctttgtaaataaagttttattagaacagaattgcacccatctgtagatgtgctttctatgggtgctttcgt

SEQ ID NO: 412517 - DNA, 201 bp, Homo sapiens
attagcaaacatacaagaatagagagaatgtgtaatgaacactcatgtaccctcaattcagcttcaactcatggtcaattttttttttttaaaaacagctscattgacatctaaataatattaaaaactgcgtgtgtttaatatacataatttgatgagtttggatgtatgcatgtgcctgtgaaaccatggccacaatca

SEQ ID NO: 412518 - DNA, 201 bp, Homo sapiens
aagttttactggaacacaaccacactcattcctgtattacgcattgtctatggctgtttttgtgctacaaaggcagagttgagtagttgtgatagagaccrtatggcctgtagtgctgaaaatatttactaattggccgtttaccataaaaaaaaaaaaaaaaagattagtgacctctggcttaaacaataaaagtgacat

SEQ ID NO: 412519 - DNA, 201 bp, Homo sapiens
tttaattataattattggttatatatacttttatagtccatgatttttcacttattattacattttaagcattcttatgtaactatactatctgctttcayaattattttaattttttgcataaaatgtcatcatctttattaaaccagaaaccattacattattttccaaatgctacacattttgatatttggctagtat

SEQ ID NO: 412520 - DNA, 201 bp, Homo sapiens
ctttaacataattgtttttaatttatgtattatctcctgatccctgttacttgcagacacatttctttaattataattattggttatatatacttttataktccatgatttttcacttattattacattttaagcattcttatgtaactatactatctgctttcacaattattttaattttttgcataaaatgtcatcatc

SEQ ID NO: 412521 - DNA, 201 bp, Homo sapiens
tagtacaaggtcagcatgccaggcccatgcctgacaagcagtgaattgctcaaaccagagaaagtcaaatgtcaagagaaccatcaaagtggaaataagayataatgaatggcttgttggtaagtcaaacattgatgtcacataggcttgtgcaaaatttatggcatggataaacagtggccccaaatccctctcagtcta

SEQ ID NO: 412522 - DNA, 201 bp, Homo sapiens
tgagaataatggtcttcagctccatccataaggtttaagaatcactctttaaagtaacaatatttaccatttagaaacattttatcctgtgattggcagaygttgagtacacatatcagttgccatccaatcactcagttggggtccatgatattgaatctttgccctgagttttattcattctctttctctcagggcttc

SEQ ID NO: 412523 - DNA, 201 bp, Homo sapiens
aggggagagagaggggggagagggagagaggaagacggaactggggagaggaagggggagagagaagggggaagagggagacgagagagagagaacaaagwaacagtggactttaaggcaaattttcttttctaattatattcccttgaatgctgattcctttcagaacttagagtgccaccagggtctctgggtgggtag

SEQ ID NO: 412524 - DNA, 201 bp, Homo sapiens
agtatctctgtgttggagttattatttttctgtcttgacttttttttttttttttttttttttttttttgagacggagttttgctcttgttgcccaggctrgagtgcaatggtgcgatctccactcaccacaacctccacctcctggattcaagtggttctcctgtctcagccacatgagtagctgggattatagatgcct

SEQ ID NO: 412525 - DNA, 201 bp, Homo sapiens
ctcatcctttagctctcccttgaaagtgagaacatggggtatttggttttctgttcctttgttagtttactgagaataatggtcttcagctccatccatamggtttaagaatcactctttaaagtaacaatatttaccatttagaaacattttatcctgtgattggcagacgttgagtacacatatcagttgccatccaat

SEQ ID NO: 412526 - DNA, 201 bp, Homo sapiens
cagtacaatatgttaggtcacagtgaggaaaatatagtagatctctagcaaattaacacattcaactgaaataagtgatgccatctcccaaagcatgtgtstgtgcaactgtgtgtgcgtgtgtgtgtgtgtgtgtgtgtgtcttgcactggttcttttgttgttgctgttgttgttgttgttgttgcagttgtaacatca

SEQ ID NO: 412527 - DNA, 201 bp, Homo sapiens
tgcaatgtcattagcatgaatagagaattctaaaaccccaacaaccaggaatgataattgcacagttttgacttagccagaccctttgccaaactggatcragctcctactgtgttctttgctaaacttgctgctgcagtcctaagaatttaaacactcaaaagcgtcctccttaatttatttatgtgtttgtgtgtgtgt

SEQ ID NO: 412528 - DNA, 201 bp, Homo sapiens
ctgcatgttttataagcctccctagtgattctcatgcccattaaagatgtaaagctactgctttagggcatagacttactctgtgtaaccctgaaatggtkttatttaggtcatcctgttatcaagattcttgcttcttagcttttgtgcttctttcttcctttggaatatactgctcagtagcaatgcttaggagaaact

SEQ ID NO: 412529 - DNA, 201 bp, Homo sapiens
acattctaccggcagggagaaacatattacaactctctttgcttagaaagacaatagcagcccattggtaaagccatgaattctggccacggctagcactkagagctcatggtgtgttttcagtctctcctttaccattatatctctggtattcaatagcagaggctcaataaggatttggagaatgaatggaaagactct

SEQ ID NO: 412530 - DNA, 201 bp, Homo sapiens
taattatagaatgctatagctccctcctatctaaattattgtattttagctccctctccttgccatctctttcccatcactactaccacatttagcctagyagggcccagtgagtttcaagatctcaagaaaacatgcaggttgttagtgtcagtttgcttctgtgtgtgtttgtgtgtgtgtgtgtgtgttgtgtgtgtg

SEQ ID NO: 412531 - DNA, 201 bp, Homo sapiens
ggaggtattctagaggagaaatttagggagttcctcctcctacccttagaaaggtgtctgcttcctttcctctcactggatgcaattgattctacctgaamccagctaattagaactcagggtataggcatttattgcatctcccagaccttgtaatttttaacttttttttagagacatggtctcactctgttaccaggc

SEQ ID NO: 412532 - DNA, 201 bp, Homo sapiens
tgacaattttacattcattatctcatttagtcatctgagtaggtatttgtttaatagcacttctaaagtaggtattcttctccctgcttcagagatggaarttctggttcagagaaccagagtttctctctggttagtgaccagcttaagatctcccagctggtgtgtgatggaagaaggatgtaagtggaggtccgcctg

SEQ ID NO: 412533 - DNA, 201 bp, Homo sapiens
tgggtgacagagcaaggttttgtctcaaaacaaaacaacaaaaccttaaatccttcagatcgggatacccagcacaattaactaacagttttcactgagcwttcatatttaaccccctgacatgaataccaattataataacaatatccattgcttattgatcacctcttgtattgatccttcagttgatccaccggagcc

SEQ ID NO: 412534 - DNA, 201 bp, Homo sapiens
ggtggctcatgcctgtaatcctagcactttgggaggccaaggcagtcagattgcctgagctcaggagttcaagaccaacctgggcaacatgatgaaatctygtctctactgaaatacaaaaaattagcccggcatggtggtggtgcctgtaatcccagctactcaggaggctgaggcaggagaatcacttgaacctgggag

SEQ ID NO: 412535 - DNA, 201 bp, Homo sapiens
tacttgggtgaggaggtactggtggaggtggtgaaactgaccagtttggggatgtgcttggaaagtggactgctctgtacttgctgatggatttgatgtgmggagtaacagaaagaaaagaatgagagagaaagaatgattcttagggcttttatttaatcaactttaaaatttgaggataattttagagttgtagaaaag

SEQ ID NO: 412536 - DNA, 201 bp, Homo sapiens
acctcgcttccattttctgtctgccactttccttctctgtccataaattttctttgtggtagaaatggagcctcttcacacctgttctggttcgagatctstacaattcttgaatcattctttgttcaattaaacacaattaaactttttaaaagagcagtttgggttttatttcaactgtgatggaaaaccactggaggg

SEQ ID NO: 412537 - DNA, 201 bp, Homo sapiens
acagaatgtacagagatatcccaaataccccctgccctacacatgaatagccatccctgtgatccacatcccccaccagaatagtaccaacttgtaacaayattaattgttacaactgataggcctacatggacacaaaattatcgcctaaagtccatagtatacattaaaattcacccttggtgttgtacattctatggg

SEQ ID NO: 412538 - DNA, 201 bp, Homo sapiens
tctcaagtgattctcccacctcagcctcctgagtaggttggactacaggcatgcaccaccatacccagctaatctgtttttgtattttttttttctttttyagaggtggggtttcaccacgttgtccaggttggtctccaatgtctgggctcaagcattccaaccaccttggcctcccatagtgttaggattacagggatt

SEQ ID NO: 412539 - DNA, 201 bp, Homo sapiens
ctcccgctcatctgttcctttaattgaaccctcaataatacagattttggtgccaagaatagggctctgttgtaacaaataccttaaaaagtggcagtggycttggaattgtgtgttgggcagaggctagaataatttggagacacatcagagaaaaagactagacatccttcaacagactgtgagtggaaatacgaatgc

SEQ ID NO: 412540 - DNA, 201 bp, Homo sapiens
tcaagttagtaacacagaaacaacttttgtggtgctaaacagaaaaggtcttctttgcaccaaataaaaaataaacagtaaaagcatccagatgggccagrggtttgttcatgtacttacagaacatctaggttctcatcgatattttctgttctggctcattgccttcctggtcagacttgggtttgggaaatgtctcta

SEQ ID NO: 412541 - DNA, 201 bp, Homo sapiens
actaatgaaacagcatcattaccctgcagaaggtactgggcaaaatcactttgcgacagaagtttagggtgggagagaaaatgacctacactttttttccrttgttcatggtgaaggagactcgtccatgcctcaggccccagcaccgtgggagcaggcccagcctaatttttgagatcattcaaccctgccagtttgggg

SEQ ID NO: 412542 - DNA, 201 bp, Homo sapiens
atgacatctcatccatccttcagcctctgcgctcctctgtgaatactcccataaagacctctaagctagataccctgcctgtgaactcccttatctctacrcttgtggcatttagcaaagcaagagaagtgaaataagtaagatgaaggttctgcagtttcctagtggtgtgacctggggcaaattaatttcttagagtct

SEQ ID NO: 412543 - DNA, 201 bp, Homo sapiens
gctaattttttatatttttggtagagatagttgcaccatgttggccaggctggtctcagactcttgacctcaagtgatccacccgcctcagcctcccaaaktgctgagatcacaggcgtgagccacgcgcctggccaaaaactgtgtgtgtgttttttttgtttgttttttaataaacgtacacatacacacacaaatctt

SEQ ID NO: 412544 - DNA, 201 bp, Homo sapiens
gcatttattttcctcatggtagtgcaggttgagtggagaagctctgcctggggtggggatagtgcctctgcttcctgccacaagcgtacgaatcagtggtrtggtctctgctccacacgtgtttctgctgtgtctcgggctgaaaaggtagcagctacctggggaagctcttttcctggccatggcagaagcacagaaagg

SEQ ID NO: 412545 - DNA, 201 bp, Homo sapiens
aaacaaaagtctcaatgtgtttagaagaattgaaataatggagggtgcattctttgatcataacagcattaaaataaaaattagtaacaaaaatatatctrgaaaatctccaaatatttggaaatggcaacacacttctaaacctataggtcaaagaagaaatcagaaagacattagaaaatactttagtcagaatgataa

SEQ ID NO: 412546 - DNA, 201 bp, Homo sapiens
aacatgtgagtctttgaattctccatagggcatttgtaccttcctcagatcactggccatgttctctgctgtgtaataatgatttgtggctgtgttggtcmgctttttgctgtgagatcttagaggcgtacaacagtaagcatttattttcctcatggtagtgcaggttgagtggagaagctctgcctggggtggggatag

SEQ ID NO: 412547 - DNA, 201 bp, Homo sapiens
gcacttcctcagccttgcctcacccctatttcactttcttatagcatactctcccgtcccttgtatcatttgtcataaatctgtgtttaatcaattcatgwctatcctcccccttagactctaaacttcttgagggtgggaatcatgttcattttcttatttaccctgaaccaactagctgagtcctgacatatagcaaat

SEQ ID NO: 412548 - DNA, 201 bp, Homo sapiens
agattctcacagtgccatcaggcattctaaatgtgttttatatttaactcccaaatgagaacatgtgagtctttgaattctccatagggcatttgtacctycctcagatcactggccatgttctctgctgtgtaataatgatttgtggctgtgttggtcagctttttgctgtgagatcttagaggcgtacaacagtaagca

SEQ ID NO: 412549 - DNA, 201 bp, Homo sapiens
gggtttctccatgttggtcaggctggtctcgaactcctgacttcaggtgattcccctacctcagcctcccaaagtgctgggattacaggtgtgagccaccrtgcctgcaccttcccacggttttaagacagacatttaacatggtctctaaaatcctgcactttctgttcctattcatcttctcagcctcacctgatctca

SEQ ID NO: 412550 - DNA, 201 bp, Homo sapiens
atgattacagaacgtgttatgccaggctacaggtgggagagaaaaatctagttaccactacagtgaaatgcaatatcaaaataggcagaggttagctagtkcatagggttagtgtgaattcgaatgaagtgcacaattacttgtggcttcttatcttctttctattcacagagttaaatcctagattctcacagtgccatc

SEQ ID NO: 412551 - DNA, 201 bp, Homo sapiens
tttcatggcatagttctggtacagggtgtgatacataggagatgctcaaacatgcctaatggatggaagaatggatgaacgtattaatgaatgtattgacrgatagatggatggatggatggattaatggattgatgaatgtattgatagatggatgaatggacaggtaaatgtattgatggattgatggatagatgaatg

SEQ ID NO: 412552 - DNA, 201 bp, Homo sapiens
gatagtgaataagtctcatgagatctgatggttttaaaaaggtggagtttccctgcacaaactctttttgcctgctcccttccatgtaagacatgacttgstcctccttgccttccaccatgattgtgaggcctccccagccacatggaattataagtccattaaacctctttttcttcccagttcaggtatgtctttatc

SEQ ID NO: 412553 - DNA, 201 bp, Homo sapiens
aatattaccacggatcccttcttccttcttgagtttttctaaaggagtgatagactggaaacagtaaccatactgaaagtgaaatttctggatccatgagsgtttggcacaacccaatggagaaatctgggaaaagctgaattggaaaaggtggtgtgagactgggaggttccgggtaggctttggctcttacttctaagt

SEQ ID NO: 412554 - DNA, 201 bp, Homo sapiens
gtcgtctctattccttgcttgcgttactacaaagcctcatctgtttgcccatctgcctcttacaaacttgcatttcaagcctccattccaaataaacacargatgaagtctaaactcagtctatatagtacttgcttatctgactcctgcgtctgtctctagcgtcctctcccaagttactttcccacttgcccccaactt

SEQ ID NO: 412555 - DNA, 201 bp, Homo sapiens
tcacttaagagtaagaagagaaaaggaatcaggaaagggcaagaggaagatgagaaaagacatttccagagaaataaagaatagagacttaagaggggttkgagagaagaagaatgaaagggtccattggttcaaaaatggaggaggggattcgatactcctgattgttgttgggactttcagagttggtcttggagacat

SEQ ID NO: 412556 - DNA, 201 bp, Homo sapiens
agtttttgtactgaaattccattgcagttgcctgcctatctgtccaatctcttcattccacctgttgctttctttgaccgtcgtctctattccttgcttgsgttactacaaagcctcatctgtttgcccatctgcctcttacaaacttgcatttcaagcctccattccaaataaacacaagatgaagtctaaactcagtct

SEQ ID NO: 412557 - DNA, 201 bp, Homo sapiens
taaaagcagaaggatttctgagacatcttggacatgtgagcaggtgactcacagacgttctagaaaccatatttcaaagacaatatttttggcagaatcaratggttgctttgtggtcgtttcagggagttccagcaataacataaagaaaattaacagaaaccaacaaatggtagggaaaaacgttggtgatacgtgcca

SEQ ID NO: 412558 - DNA, 201 bp, Homo sapiens
ccatctcccagctccgtctcacctggaccacctggaaaaacctcttgtaccccataatttcagtgcccctgtctgtatctgaggctatggaaaagctctcyacccaagcaccaaggaatcctgcccttttccgcttgcccggataaacaaagagttatcaaggctaagttgccagttatgttggcttcttctcctgtttgc

SEQ ID NO: 412559 - DNA, 201 bp, Homo sapiens
aagacagagagttgagacttttgttcattccacaaatttgcattgagcatctactttataccaggtagtattctaggttcttcaagggagaaaaagcagcrgaaggaaaaaccaggcaaaatccctgcttttatgaattctatattccagtatgtgaatatccagaaattctgaaataaaaatcgcaccttgaattgaatg

SEQ ID NO: 412560 - DNA, 201 bp, Homo sapiens
cctgtgctcttttttccctatacatcgtggcctaggttttggaacacacaagggcacgcacacggcccttctcagactatgacaatatagtgcactgcaakacctcgcttttttaacaacctaagctgatgggttgagttgtgagagtcagaagcttgcaatttcacttcatctgtctctggagactattctggctttcta

SEQ ID NO: 412561 - DNA, 201 bp, Homo sapiens
ccaatagctgcagatttggttaggatccctttccagtccctgggtttcaggaaggcttagggaccaggaggaagagcaaaagtgttctctgccagcccctstaatgaaactgctgatccaatctcactggagactccattcctttcctgttgcttcatagatgagatcatggtaggatgcagtctccaagacaccaaaatg

SEQ ID NO: 412562 - DNA, 201 bp, Homo sapiens
atagctgcagatttggttaggatccctttccagtccctgggtttcaggaaggcttagggaccaggaggaagagcaaaagtgttctctgccagcccctctartgaaactgctgatccaatctcactggagactccattcctttcctgttgcttcatagatgagatcatggtaggatgcagtctccaagacaccaaaatgata

SEQ ID NO: 412563 - DNA, 201 bp, Homo sapiens
atatccagacactaaagaactgcatgttccccagacagcccgcggccccaggatcagacgctgatcttgtggagcacagattaagagatgccgcaggtctrgggtgggtatagattgttgtgtctgccatcctcactcacagccctgagcacagaggtgaggacgcagccaggggccagcactctccttccatgtgtgcca

SEQ ID NO: 412564 - DNA, 201 bp, Homo sapiens
tgttcttcagttgacagaaagggagagttagagatgaacctaatgccctgcttaaatcagagggcgaagtgatatgaagtttgaatttaggaaggactttytttttctctctctaatggcctggagatatcctacaggctatgctgggtactttgcatagactaccttcaagatgcagagaaaggaaatgcatctaatgct

SEQ ID NO: 412565 - DNA, 201 bp, Homo sapiens
aagagcagtcttaggttcacagcaaaattgaacagaatgtacagagatatcccaaataccccctgccctacacatgaatagccatccctgtgatccacatmccccaccagaatagtaccaacttgtaacaatattaattgttacaactgataggcctacatggacacaaaattatcgcctaaagtccatagtatacattaa

SEQ ID NO: 412566 - DNA, 201 bp, Homo sapiens
tctccttgtgtatacctgatgggtttatcatatttgaaatgacttcatcactgtccagattccctgctaaactccacctgggcaggagcatatccccttcrtagagtccccccagcacctagatactgcctggcaagtgatggatggccaatatatccagtacttgtggactggttggcagagggagggaaagctatgcag

SEQ ID NO: 412567 - DNA, 201 bp, Homo sapiens
acaaaatttattttgacttgtcctctgactcaaggccaggatcttatgttctagcacaagaaacaaggcagaaatatgtaaaatcaccctaactatagtasagtgtttagaaaaatgtttataaaatacctataaaaatgaaaattagcttttctccttgtgtatacctgatgggtttatcatatttgaaatgacttcatc

SEQ ID NO: 412568 - DNA, 201 bp, Homo sapiens
gctcaaattctttttcagggcctcaggtcataataatgataaaacgaaacattgtatgttaagtgcttagcacagtcgtgaggcccaaggtcagttccccsataaatggtagctgctataaacatcatcatcattaccatccttgtgaaggtggagtgaacttattctttcaagacatttccactgacagataaattcatc

SEQ ID NO: 412569 - DNA, 201 bp, Homo sapiens
atatttgttgattgaaaaggtagatgtccacatggtatttatgatactctgtattatgtgggagccgtatgttcaagtgacagaaaccctactcaaactcyttaaatgaacatagaaactcactggcttgtataacaaaggggtccaggagaaatggcttcatacttggcagactctaggggctccaaatatatcgttaga

SEQ ID NO: 412570 - DNA, 201 bp, Homo sapiens
tcctcttaccagtgtttcctgggatcatttctcaaaccactgggagctcaaattctttttcagggcctcaggtcataataatgataaaacgaaacattgtmtgttaagtgcttagcacagtcgtgaggcccaaggtcagttccccgataaatggtagctgctataaacatcatcatcattaccatccttgtgaaggtggag

SEQ ID NO: 412571 - DNA, 201 bp, Homo sapiens
ttcagcccttactttgtgctaagcatgtcacactctctcatttaatgctcttaaccctacaattacccccattttacagaggaggaaactatagtgtctcrcacagaataggtgcacagtgaatttttattgaaaagaagaaaaatggcacgtgagttgaattaaggaaatgtaggccagggctggggcaggaaggcatac

SEQ ID NO: 412572 - DNA, 201 bp, Homo sapiens
acaggggctgaggatccgcactgggggcgtcgtgggcatcgggcttcagcttcccccctcttgtctagcccccctgggcgcataggggggcttgtgagcamtgcagactgcagccttcccctcaaccctccctcccctcgttggtgggctgaccctgcctctccttctctcctccgccccgttagagccctgctgcagagc

SEQ ID NO: 412573 - DNA, 201 bp, Homo sapiens
cccacacaagggctgtaataggaaccaacagacgttcccaattacaagctggtctgcaattccataattactgtgataaattcaactattgcctttgctgsgtgcctttttcatcctgtgtccccaaggcccagttccatgtcttgtgcacagtaggcacttagtgggtgcttgttgggtgaaaatgcgtcattgatcatt

SEQ ID NO: 412574 - DNA, 201 bp, Homo sapiens
ccaaaaatgagctcggtatgaggaggatagaaaggctcaagccagagggcagaagccccgttcaaatagtggaggctatattcagagatgattacagaacrtgttatgccaggctacaggtgggagagaaaaatctagttaccactacagtgaaatgcaatatcaaaataggcagaggttagctagtgcatagggttagtg

SEQ ID NO: 412575 - DNA, 201 bp, Homo sapiens
tcaaaagtcaagggaatgccattgaagaaactcagatctccatttgtcaattagttcttctgctacagaggctcattttcctgaagataagtttaacaaaygttgaattaatgataatagttccacgtatggagacctttctgtgtgccaggaactgtgcattaagagatgtttgttgttattatcttataagtaagcctc

SEQ ID NO: 412576 - DNA, 201 bp, Homo sapiens
gcttggaatggcaggttggtttcctttcaattgccaacacggaggaaataggaaaagcaaagtcagctcagatagcaggttaacaccaaaaatgagctcgstatgaggaggatagaaaggctcaagccagagggcagaagccccgttcaaatagtggaggctatattcagagatgattacagaacgtgttatgccaggcta

SEQ ID NO: 412577 - DNA, 201 bp, Homo sapiens
ggtaagtcaaacattgatgtcacataggcttgtgcaaaatttatggcatggataaacagtggccccaaatccctctcagtctatattttttaaacactttmatttggaaaggcaatatattatatatacagttgtccctcagtattgtggaggattggtttgagggtctcctacagacaccaaaatctgtggatgctcaag

SEQ ID NO: 412578 - DNA, 201 bp, Homo sapiens
tcatgttcttatcccgtggaggaatgaaggaaaggcaatctctattgcagtctaatgagactgtggcatttatagaactgtaaagccgcttgggccagctrtgtcaccagaagcatttcctcctgtctgccctttctacttcatagctggtgatctcactatagcccggggtttcctggcatggcctctagaggctggccg

SEQ ID NO: 412579 - DNA, 201 bp, Homo sapiens
ctcaaaccagagaaagtcaaatgtcaagagaaccatcaaagtggaaataagatataatgaatggcttgttggtaagtcaaacattgatgtcacataggctygtgcaaaatttatggcatggataaacagtggccccaaatccctctcagtctatattttttaaacactttcatttggaaaggcaatatattatatatacag

SEQ ID NO: 412580 - DNA, 201 bp, Homo sapiens
tcactaacatgttaacaaaggttgaatctgagttatagaattataggtagctttaattttaattgtatttttaatacttttctatattatttggatttttwaaaattctgcaataatttctgtatgataaataagcagcacatgtatttcttttgggaggaaaaaatattcctatttagttcctttccccttcatacacac

SEQ ID NO: 412581 - DNA, 201 bp, Homo sapiens
agacaactaacattatttttttaattgaccacaatagaatttgtgttgaaagaataaacaatacttttctccttataaaaatccttttcttctttctgttyctttatgttgtggtttctgagcccattttagagtatctctgtgttggagttattatttttctgtcttgactttttttttttttttttttttttttttttt

SEQ ID NO: 412582 - DNA, 201 bp, Homo sapiens
gcagagtttaatagctgcaacagagacggtatgtcctacaaagcctcaactatttattatcttgtctttatagaagaaagtttgccaatctctgtgtatgygtgtttgtgcatactcactaaaacatttggaaggctgttcactaacatgttaacaaaggttgaatctgagttatagaattataggtagctttaattttaa

SEQ ID NO: 412583 - DNA, 201 bp, Homo sapiens
gccaaggcaggtggatcatttgatgtcaggagttcaaaccagcctggccaacatggtgcaaccctgtctctactaaaaatataagaattagccgggagtgrtggcaggtacctgtaatcccagctactagtgaggctgaagcaggataattgcttgaacctgggaggtgaaggttgcagtgagctgagattacaccactgc

SEQ ID NO: 412584 - DNA, 201 bp, Homo sapiens
gggtggttcaataggaaaccttcagaaccagtggggttggatggtggagcagagtgtaaaagggagagtgatgaaaagtagagtgattgaaaggataagcrcatctgcttttagacttgctcacttaacttatatgtgcttatctggaccttggccccaggggaggagatagaggaatgcgtgagaagctgtcttgagtgt

SEQ ID NO: 412585 - DNA, 201 bp, Homo sapiens
caaagttcgtttgtttacacattctctatggctgctttggcactatgtcttggtttcctagggcagccataacaaaggaatgcaacctgagcagcttaaasaacagaaatgactgtctcgcagctctggaggctagatgtccaagatcagggcatctgcaggaccacgcttccaccgaaggctccagggagggatctgttc

SEQ ID NO: 412586 - DNA, 201 bp, Homo sapiens
ctactaaaaatataagaattagccgggagtggtggcaggtacctgtaatcccagctactagtgaggctgaagcaggataattgcttgaacctgggaggtgraggttgcagtgagctgagattacaccactgcactccatcctgggtggcagagtgagaccctgtttccaaaaaaaaaaaaagttgctgtgacattcagttc

SEQ ID NO: 412587 - DNA, 201 bp, Homo sapiens
actaaaaatataagaattagccgggagtggtggcaggtacctgtaatcccagctactagtgaggctgaagcaggataattgcttgaacctgggaggtgaasgttgcagtgagctgagattacaccactgcactccatcctgggtggcagagtgagaccctgtttccaaaaaaaaaaaaagttgctgtgacattcagttcat

SEQ ID NO: 412588 - DNA, 201 bp, Homo sapiens
agtgagaccctgtttccaaaaaaaaaaaaagttgctgtgacattcagttcatgttacgcaaccttgtgaatggctctccccaggagcaagtgtctttatcraaaccaaaacatttgttccctgatccagcatttccaaacagataacaaactggatatttccaaatttcttgataatttactaaatttttcagttttccca

SEQ ID NO: 412589 - DNA, 201 bp, Homo sapiens
gaggagaggtgagtgggtctggtcaacacagacaagcctggatttggcacttagcttttcacacgaggtgttttcctcgaggttggtattacaaataaagyggtgacctgtggtgtcaagcaatggcgtgtgggagcaggaggagaagggagaaagagcggtgcgggggcagcttcctcccagcgtgtatgtgaatagcgc

SEQ ID NO: 412590 - DNA, 201 bp, Homo sapiens
gctcggcttccaagaatagcctagcctgagggatccaagctcggaatcccttccaactttctgggctctgaagtttggcacccacagaggtctatgcttargtaacggggtgcagatggcttgtcgtttgcagagacagtggctaataaccatctcccttccaccttcgctttctgcaaaagcccagggcctggcagagtc

SEQ ID NO: 412591 - DNA, 201 bp, Homo sapiens
gcagggctgtgctcctctgtaaactctcagattatgattcactgtctctacagcagtggtcctcaatctttttggcaccagggaccagtttcgtggaagamagtttttccacagaccggggttgggctgatggttttggaatgattcaagtgcattccatttattgtgtactttatttctattattacattataatatata

SEQ ID NO: 412592 - DNA, 201 bp, Homo sapiens
cctggcccatcttttcatttctttggtatactgtttttttcctcccagctttattgaggtttaactgacaaataaagtggtttgtattcaaggtgtacaawgtgatgttttgatgagtgtgtagactgtgaaatgattaccaccatcgaattaattaacacatctttcacgactgttggttaccattttgggtgtctgtgt

SEQ ID NO: 412593 - DNA, 201 bp, Homo sapiens
atcttaatggcttataacaataaaggcttatttctcgttcatgcaacgtgcccaccgagggttggctacgacttctgcgccatatcgcctcacttgtgggmccagatggagcatggctggttgttgtggtgtaggtggggagggggatgtggtgagtcatacgctggctcttaagggcttcagctcacatttgattgccac

SEQ ID NO: 412594 - DNA, 201 bp, Homo sapiens
atgtgatgttttgatgagtgtgtagactgtgaaatgattaccaccatcgaattaattaacacatctttcacgactgttggttaccattttgggtgtctgtrtatgtggtgtgagtataattaagatctaatcgcttcacaaatttcaagtgtatagtatgatattactaactgtagtcaccatcctcagaacttattcatt

SEQ ID NO: 412595 - DNA, 201 bp, Homo sapiens
agttaccagtctccgatatgtctttattatcagtgtgagaacagactaatacagagctctttcagtggaaaagataatacattaaatcgttataccaaacrttataatcatggatggtattgcagtcacattatctgccaggagaattggcagggactgtagaagggatgtccactatttaacttgaaccatcatacagat

SEQ ID NO: 412596 - DNA, 201 bp, Homo sapiens
aatgcttgaggtgatggaaacctcattttaccctgatgcgattattatgcattaaatgcctgtaccaaaatatctcatgtactccataaatatatacaccyactatgtacccataacattttttaagaaataaaatgaaatttacatgattgggttcttctagccacagccagaatgtcatctctttaggagtgatagatc

SEQ ID NO: 412597 - DNA, 201 bp, Homo sapiens
ttataaattacccagtctcagatagttctttacattgtgaaaatgaaccaatacagtctcacagttgaatagtgatcgaatgtggtttcaaactcagccckctctgacttctgagtcttcagtgttaaccatctcacacacttatatgatttaggcttgatggaaacagcccacttttcatgaagcattatctacagagcc

SEQ ID NO: 412598 - DNA, 201 bp, Homo sapiens
aagaaactatgccaggtactttaaatatctcatttaatcctcacagtaagtctgggatgctggcactattcttacccctgcttgacagatgggaaaactgrggctcatagaaggaaacagagtgcacagtgtctctgatatggtttggctctgcgtccccacccaaatctcatctcaaattgtaatccccacgtgtcaggg

SEQ ID NO: 412599 - DNA, 201 bp, Homo sapiens
tagcatctccatggcccctcactactacagcccactctacatgctgttctgggcctcattaaaacctgttctccactagcctcggtgtttaatatttatckatcacccacagcatgcaagctggtcaataagtgttttcagaagcctcactccatgccatcttgatcagcccctgccgctattttccatcatgccagctct

SEQ ID NO: 412600 - DNA, 201 bp, Homo sapiens
cgatgaatttccccccgagttggtttgctttgtctttgtaactgagaacagcctagggagaagcatggacatgggggacctgcaggcatgagactggttgsttagcatctccatggcccctcactactacagcccactctacatgctgttctgggcctcattaaaacctgttctccactagcctcggtgtttaatatttat

SEQ ID NO: 412601 - DNA, 201 bp, Homo sapiens
aaaaaaaaaaaaaatgggataagtggtgagaagagactggagcggcaggccttggccatgctaggagggaccctttagcttccaacttcccgatgaatttscccccgagttggtttgctttgtctttgtaactgagaacagcctagggagaagcatggacatgggggacctgcaggcatgagactggttgcttagcatctc

SEQ ID NO: 412602 - DNA, 201 bp, Homo sapiens
cgacctctcaaagatgttcaccttctaaactctgactcctgtataaatgttatgatttatggcaaaagggattttgaagatgtgattaagttatggatccrtcttgagatgagagcctcatccaaaattatctggtgggcccaatataattgtgactgtacttataagaggcgggcatggaagagtcagagaaggagatgt

SEQ ID NO: 412603 - DNA, 201 bp, Homo sapiens
gaacttggtaaagtgttgaaggggcagcctggtttcttcttgctccttttagtaaaatgtgagaggaaagagattgaagcaagaactgttaagcaaaaagmaagcaagatttgatgacttgggaaattctcagcctatctggattgcaaaagatgctaaaattaggagatttactatcaggaaagcatgttaggaaagggt

SEQ ID NO: 412604 - DNA, 201 bp, Homo sapiens
tgggcctgattcaatcagtcagatgccttaagagtagagctgaggcttctctgaagagtaaattccacctgaggagagaaggtttagctcatgcccagaarttccagcctgccctgtggatattggacttacctacccattccccacaatcatgtaagccaattccttgtcatgtatttcttaatatatgtctcccgctca

SEQ ID NO: 412605 - DNA, 201 bp, Homo sapiens
ttacaatattggctttccaaagcagaagatgatgggctttctgggagggtggttcaataggaaaccttcagaaccagtggggttggatggtggagcagagkgtaaaagggagagtgatgaaaagtagagtgattgaaaggataagcgcatctgcttttagacttgctcacttaacttatatgtgcttatctggaccttggc

SEQ ID NO: 412606 - DNA, 201 bp, Homo sapiens
tttagttttcttacccattttagagttgagacattcatccctgcattccacagtgatcatttcagcctcgttaaataactttaacatttggaaacaatatmcaggactactgatagggatctaatcataattagcacctgtaatcccagcactttgggaagccgaggtgggtggatcacttgaggccaggagttcaagacc

SEQ ID NO: 412607 - DNA, 201 bp, Homo sapiens
tgcccagttctcttctgctgctgcttgatctgattccctttaatactctcagagcctaaaaccaagtctctgatacccctaccttgagatcaaagcttcakagtgtttctgtggatgagacaagtcctacagttttgcgccacctcaaaccattatagaaacaaaaaaaaattaaaatgaagaacacggctgtaaacctgc

SEQ ID NO: 412608 - DNA, 201 bp, Homo sapiens
cttgctactggacagttgtgaggcctcagtgggatgatgtctgtgaaatgctaagtattattttataaaacatcttgcagacaatggccatctcttttttwaaagtgattattagtgattccatttgttattatttattttaattcatagtttgttcctgcatcagtttgctcaggataatggtgtgcacctccattcatg

SEQ ID NO: 412609 - DNA, 201 bp, Homo sapiens
caagccccaggctgccttaggctttctgaaccttgtctgcttatagacagaatagaaaaataataacaataataatatcttgctactggacagttgtgagrcctcagtgggatgatgtctgtgaaatgctaagtattattttataaaacatcttgcagacaatggccatctctttttttaaagtgattattagtgattcca

SEQ ID NO: 412610 - DNA, 201 bp, Homo sapiens
ggttttataatataaagtctggaaatatcaccaacaagccccaggctgccttaggctttctgaaccttgtctgcttatagacagaatagaaaaataataayaataataatatcttgctactggacagttgtgaggcctcagtgggatgatgtctgtgaaatgctaagtattattttataaaacatcttgcagacaatggcc

SEQ ID NO: 412611 - DNA, 201 bp, Homo sapiens
ggggtttctccatgttggtcaagctggtctcaaactcccgacctcaggtgatccgcccacctcggcctcccaaagtgctgggactttaggcgctagccacygtgcccggcaagttggctccatttttcatagggaaaactgagcctgagaaatgcagttgctttgcccaaagtccctgttgacaaatctcagagatttagg

SEQ ID NO: 412612 - DNA, 201 bp, Homo sapiens
catgcagtcaaaattatgtgcaatttcaggggatcacagaccctctgaaaccctttcatagacttccttggatttgatttatttattggtttattaaacasagttgatccttgaataatgcaggcgctagttgcattaacccccatgcagtttaaaatccatgtataacttttgattcccataaactatagcccactgttg

SEQ ID NO: 412613 - DNA, 201 bp, Homo sapiens
tccattaaacctctttcccttataagttaccagtctccgatatgtctttattatcagtgtgagaacagactaatacagagctctttcagtggaaaagatartacattaaatcgttataccaaacgttataatcatggatggtattgcagtcacattatctgccaggagaattggcagggactgtagaagggatgtccacta

SEQ ID NO: 412614 - DNA, 201 bp, Homo sapiens
tggttccctatgcctggaatgctcttcccactattctgcactggttgacgatgacttcttcacaacttggcttttggggcatttcctttgagagggcttcstgacagtcctgctaaccttttccataggagccctcatgtcattagctgtaccacaactttaacttgtatgtgttcatttacatgtttctgtctcttctgt

SEQ ID NO: 412615 - DNA, 201 bp, Homo sapiens
aaaggttctcaacatcattaatcatcagggagatgcaacacaaaaccacaacgagtgactgtgaaattatctcacacctgttaggatggctattataaaawtgaccaaagataacaagtgttggcaaggatgtggggacattggaacccttgtacactgttggtgctaatgtaaaataatgcagctgatatgaaaaacagt

SEQ ID NO: 412616 - DNA, 201 bp, Homo sapiens
tatgcctggtggtttccatttgtattcaaacccttccctgcccatggtcttctcttctatttgcttcttgtctgttttgatagaaatcaataatttccctyatcttgctcctgcatttagaaaagtgaaccaactgtccagtttccctgcttcattgacacacagaggttaacatctcggggacgtcaatcctcagggcag

SEQ ID NO: 412617 - DNA, 201 bp, Homo sapiens
attaattcacagcttgagcccagggtttgtttgttatgtaattgctgccttcggcttcaggataaaaccccctccccaactgcacccactcccacttctcrcccccctgctctcggcctggctctgagcccctcccggtgcccggatgggctgagccgcctgctttctggacgctctccaagcccctgggctgtaggaggg

SEQ ID NO: 412618 - DNA, 201 bp, Homo sapiens
cccccacttctctccaggctgtttctttttttatgactgtaaacatagatagtgctttattttgttaataataagataatgatgagtaacttaaccagcasatttctcctgtttacactcgggggatttttttgttttctgatgacataataaagacagatcatttcagaatctggcccttgtgcaggggaggagggaggc

SEQ ID NO: 412619 - DNA, 201 bp, Homo sapiens
ccgggccaccctgggctggggctgaaagaccatgaagccagcatagccctgacacaacttggagaaagtgaagtaagtaactgataccagtactgacaaastgaggggagggagggacagggcaggatgtttcgggagcacccacgaaaagttccctgaaagacataacataaagatctggagggtggggaggagaacagg

SEQ ID NO: 412620 - DNA, 201 bp, Homo sapiens
aggcactgtctcctataacacctcctttggttgctacgtgcagatttgctgtgcagcacgggtcaagttacttagcctctctgtgtttccgcttcctaackgaaatgccattaatcacaatgctctcacttgagaagagagaacattagaagggtcacatgagaagagtctagaatagtgcgtgggaatcttatccaggtg

SEQ ID NO: 412621 - DNA, 201 bp, Homo sapiens
caatgagttttgtccctgaagaaaatccacctgtgaagtgcttagcttgtgatcactcagtaaataggcactgtcattatctttctgatgaggggcttccrtatgtgacctgccctgggctacaactcgaacatggaaatcagaagcttagcaacactattatttccactgcatcaaaggcctgggagccctcccctgcct

SEQ ID NO: 412622 - DNA, 201 bp, Homo sapiens
ctgtgtctatcttccctccccctcctcagttcactgcattatgaataactcagctttgcacactctggagtagccttcaactttttaaaaaattttttttrtttttgaaatggagtctcgctgtgtcgcccaggctggaatgcagtggcgcgatctcggctcactgcaacctccgcctcccaggttcaagagattctcctg

SEQ ID NO: 412623 - DNA, 201 bp, Homo sapiens
ggtgcaggagttgctggggatgtgagggcagctgggtcctggggtcttatatcactgaagtgttcggtagcacctgtcctcaagaactcaaggagtgtgcstgtgtgtgtgtttacattctttagtactcctgatctaaacctaacctgttccactgtttgtccagacccttgctctggcagaaaacaggagagactagtg

SEQ ID NO: 412624 - DNA, 201 bp, Homo sapiens
aaagcagctgctcttctcaagcaggcctgtgcttggggagggggagagggaggtaaaagaggtacccagggaccctctcccccaaaggtgagacccagagktgctctccattgggggcggggtggcattgtgcctgggctgttgccttttcatggacaagtgggcccagaggataccaactaagggccagtgcccagcacc

SEQ ID NO: 412625 - DNA, 201 bp, Homo sapiens
agtgtgcgtgtgtgtgtgtttacattctttagtactcctgatctaaacctaacctgttccactgtttgtccagacccttgctctggcagaaaacaggagaractagtgttcctgggctgtcactagaaagatttttttaaattatatgtcctgattggtggccacggagggatgttgggcagggcagatggagctcgaggg

SEQ ID NO: 412626 - DNA, 201 bp, Homo sapiens
aatcaaagtattcatcacacagaaaggttcctgacttgactaaagcaagcaccctagtctattcctttaaacaggacatctcccagggcatttaaaatatmcaatttctgcctggtatagtgacacacgcctgtaatgccaacactttgggaggctgaggcaggaggatcccttgagctcaggagtttgagaccagcctgg

SEQ ID NO: 412627 - DNA, 201 bp, Homo sapiens
cagaaaacaggagagactagtgttcctgggctgtcactagaaagatttttttaaattatatgtcctgattggtggccacggagggatgttgggcagggcaratggagctcgaggggccagttgttttcaagactgaggctcctccagtgtcagcgcaggactctgtcaactgagacatcaggtattttgtcctgagcaggg

SEQ ID NO: 412628 - DNA, 201 bp, Homo sapiens
gttgggggtggtggcgtgtgcctgtaattccagctactcgggaggctgaggcaggagaatcacttgaacctgggaggcggaggttgcagtgagccgagatygtgcccttgcactccagcctaggtgacagagtgagactctgtctcaaaaaaaaaaaaaatgcatttgtatacatacaaacatgcacagacacatgcacac

SEQ ID NO: 412629 - DNA, 201 bp, Homo sapiens
ggcaggagaatcacttgaacccgggaggtagaggttgcagtgagccgagattgcgccattgcattccagcctgaatgcaacaaaagcgaaactccgtctcaaaaaaaaaaaaaaagaaaagaaaagaaaaaaaaacttgcttatgaatgaaaaacaaaaccaccttcagaaaaaaagatttgatagaaataggccaaattg

SEQ ID NO: 412630 - DNA, 201 bp, Homo sapiens
catctgcagggtcgtaggtgccagtgaatttggccatcagaaagcaggctgggggcagggtatataagtcacagccaagagtgtgtggagtgggagtgcaygctctgaggaggcctggaggggagatgggtttggggttgaatcaagtgtgcatccatcaccgttccccttctctgccccacagcccgcaggctggccagg

SEQ ID NO: 412631 - DNA, 201 bp, Homo sapiens
tgaggcaggagaatcacttgaacctgggaggcggaggttgcagtgagccgagattgtgcccttgcactccagcctaggtgacagagtgagactctgtctcaaaaaaaaaaaaaatgcatttgtatacatacaaacatgcacagacacatgcacacatgcgtgcacacacacacacacacacacacacacacactctttctc

SEQ ID NO: 412632 - DNA, 201 bp, Homo sapiens
ctctgcaagtggcgcaggcaggctccattgagctcttcacccatgttcacctggtcccttggcatagctggcaggagtgagcgaagcttgtagcctgtgaraccaggggttttcctgccccaggttgactattacttcccttgcatcatccgtaccagggccaagggcctggttcccttgacttccattgtgggagcagca

SEQ ID NO: 412633 - DNA, 201 bp, Homo sapiens
tgcactccagcctaggtgacagagtgagactctgtctcaaaaaaaaaaaaaatgcatttgtatacatacaaacatgcacagacacatgcacacatgcgtgmacacacacacacacacacacacacacacactctttctctctctcgctgtcgctctccaactctgttgggctcagaaacagccagtcagtatctggcctcg

SEQ ID NO: 412634 - DNA, 201 bp, Homo sapiens
gggttgggaagggcgggaacccagtgaagatgccagtcagtgtgcaggggcagtgtggagtgaggggataggagcctccaagcagtgctttggggctgggkagggcagtggttggaaccaagctggtccagtgccgagccattgcccatcttgtggtgctgggacctcgtcaagcagggtgtctgctgttctgtgctcatc

SEQ ID NO: 412635 - DNA, 201 bp, Homo sapiens
tctgtctcaaaaaaaaaaaaaatgcatttgtatacatacaaacatgcacagacacatgcacacatgcgtgcacacacacacacacacacacacacacacactctttctctctctcgctgtcgctctccaactctgttgggctcagaaacagccagtcagtatctggcctcgttagttgggccgtcagtccactagtcccgt

SEQ ID NO: 412636 - DNA, 201 bp, Homo sapiens
tgggaagggcgggaacccagtgaagatgccagtcagtgtgcaggggcagtgtggagtgaggggataggagcctccaagcagtgctttggggctggggaggscagtggttggaaccaagctggtccagtgccgagccattgcccatcttgtggtgctgggacctcgtcaagcagggtgtctgctgttctgtgctcatccagg

SEQ ID NO: 412637 - DNA, 201 bp, Homo sapiens
gtgcaggggcagtgtggagtgaggggataggagcctccaagcagtgctttggggctggggagggcagtggttggaaccaagctggtccagtgccgagccawtgcccatcttgtggtgctgggacctcgtcaagcagggtgtctgctgttctgtgctcatccaggacttttctccttgctgccttttccatagtggagtatc

SEQ ID NO: 412638 - DNA, 201 bp, Homo sapiens
ggatctcagcctctgatcagtttcacaaagtttgttccctaaggaaatcaaatcccattgtcacctaactctgaagatctaaatagcccttggatcagtaygggaaccccaaatcccacagggccagatgtggagtctgtgtctgcccccgtcttctctccatcctcaaagcccccacttctctccaggctgtttcttttt

SEQ ID NO: 412639 - DNA, 201 bp, Homo sapiens
ttggaatctctattttacacatgaagaaatgggggttttgagaggtgaagtctttcccccaacttgccagagctgcctgggtttcttttgactaagttttccttggctatgactcaagtcagaaacaactgcaatcctgtaagaggtgaagacagtggccattctatctctgctggaccagagcctgttattttgcaccga

SEQ ID NO: 412640 - DNA, 201 bp, Homo sapiens
cgacctgtctccctggggtcacatgctttgtttccattcttgtcctggctggaccagccactgtgggaccaacacccctcccacactcccccagactgctmgtctatcaccaggatcgctttgtactttgtgcaaaagggtctggctgtcccttgctgttttcatctctgccaagcctattgtgcctctggctgctgtatg

SEQ ID NO: 412641 - DNA, 201 bp, Homo sapiens
actgtcccctggtggcagcctgcaggagcttcaggcctggggcctcagaggaattggcttaatgcaagggaatcccaggccaagcttgtgagtgacacatktcctccacagagcccacgctgaatgcccctaccttgacgaggtgaggccacccggatcctaagaaagaaggcagtagtaagagcactgtaataggagtca

SEQ ID NO: 412642 - DNA, 201 bp, Homo sapiens
tcaaagtgctgggattacaggcatgagccactgcccccggccaataccttcctcttagaactgttgggaggctaatggctgatgatgtctgcggcagcagygctccatgaatggtaagggctctggggttttctgttgccagacaagtgtcggttgagctaggcctattccaccaagggatctaggtgtccttgcccttga

SEQ ID NO: 412643 - DNA, 201 bp, Homo sapiens
ttttatgactgagtgtgtggtgtcttggcgtgcgctagaggacggttttagcacagggcattttgagcccagccccgtgtggggaggcactcctctggacrgcatggcattcccatgcgagcccagacagccctggggagcaggatgaatgggcttccctcccactctcatgcccgccggcctcagggtccagatttctct

SEQ ID NO: 412644 - DNA, 201 bp, Homo sapiens
ctgtcccctggtggcagcctgcaggagcttcaggcctggggcctcagaggaattggcttaatgcaagggaatcccaggccaagcttgtgagtgacacattycctccacagagcccacgctgaatgcccctaccttgacgaggtgaggccacccggatcctaagaaagaaggcagtagtaagagcactgtaataggagtcat

SEQ ID NO: 412645 - DNA, 201 bp, Homo sapiens
gtgctgggattacaggcatgagccactgcccccggccaataccttcctcttagaactgttgggaggctaatggctgatgatgtctgcggcagcagcgctcyatgaatggtaagggctctggggttttctgttgccagacaagtgtcggttgagctaggcctattccaccaagggatctaggtgtccttgcccttgagaggc

SEQ ID NO: 412646 - DNA, 201 bp, Homo sapiens
tacaaagattttctcctctctgggggtgctttgagatcggtccttattgggcagctcccctgggtaagtctccaggaagctgacaccaccggaaaaagtgraattcaaatgcagctgtgctcctgagccccctcccccagccacattcaggggtgaagctgagtgtttgaaaagggctctgtgctgggagggccggccagg

SEQ ID NO: 412647 - DNA, 201 bp, Homo sapiens
gtgactgggaacagagtcagtgtggggtaggggtcattcctgctgttgaactgatctgataagatgagatcagacctgacctctctgggcttagcacagasggctggatgcacaggcccagcctcccctctgcatcccaccccagcggccaccacctcgcctcgtcagggatcaggacaccatgcctggcactcagcaggt

SEQ ID NO: 412648 - DNA, 201 bp, Homo sapiens
acaaccacactggcagtttttgctgcagtttcaaagcccggatgtggagtcagacactttgccacagccccgcacaggatgcttctgtgaggcttgtctcrggtacctcataaaaccttctagtttggaagggcagggagcatctactcctcagatttggcagatgaggatattggaaattgtctaggtagtggggcttcc

SEQ ID NO: 412649 - DNA, 201 bp, Homo sapiens
cgagtaagctgggactacaggcacccaccaccaggcccggctaatttttgtatttttagtagagacggggtttcaccgtgttagccaggatggtctcgatytcctgaccttgtgatctgcccgcctcggcctcccaaaatgctgggattacaggcgtgagccaccgcgcccagcttttctccttccttccatgacttctgc

SEQ ID NO: 412650 - DNA, 201 bp, Homo sapiens
cccccaagctccagcccaggggaatttcaggggctcctgggtcagtgtccccgccctgcctccatcctcacacccatgcgctgtacctgggctctctgctyggctgggcaggcccactcccctagatggcagcagatacaggcagaagtggtgatcctaggggtaagacgccatgtagggaagcagggaggcactgccaag

SEQ ID NO: 412651 - DNA, 201 bp, Homo sapiens
cgcaggactctgtcaactgagacatcaggtattttgtcctgagcagggagcctgtctgggttgttgaaggtctgaggtggctgctcttttgtttatgcaawtcaggcaggccagaggctcaaggaagttgctggattgttaggaacatgggtgggtactgagtcttaagctggcagttggatatccctatacaggccaact

SEQ ID NO: 412652 - DNA, 201 bp, Homo sapiens
tgggaacacaggcacctgccaccaagccaggctaatttttatattttttttgtagagatgacgtcttactatgttgcccaggctggtctcgaacccctggrcctaaacagtcctcccaccttggcatctcaaattgctaggattgcaggcatgagccacccactgcacccagccagaatgatcatttttgcattgtcattg

SEQ ID NO: 412653 - DNA, 201 bp, Homo sapiens
cagcccctaatggtcctgggacatagcaattgctcaataagtttctgatggatgggtggatagatggatggatgtatagatgaacaagtaaaaagtctcartggggtctgtttcactgtggagcagggacccaagagagcctagcagagaaggagctccagcttctggtcatgattcaccagctgtccaccctgcgggacc

SEQ ID NO: 412654 - DNA, 201 bp, Homo sapiens
acagggcagttggggagggagcatggagtctgggatttattttgtaggctgtggggtgcatgtgaacatttgagaagtgagtgtgtcgttctggctttgargggtggggagtggaggggagactggccagaagcaggacctgctaggtgattctagcagcaggggatgatacctgaactagggcagtgacagagagttatg

SEQ ID NO: 412655 - DNA, 201 bp, Homo sapiens
ctgtctcaaaaaaaaaaaaaatgcatttgtatacatacaaacatgcacagacacatgcacacatgcgtgcacacacacacacacacacacacacacacacwctttctctctctcgctgtcgctctccaactctgttgggctcagaaacagccagtcagtatctggcctcgttagttgggccgtcagtccactagtcccgta

SEQ ID NO: 412656 - DNA, 201 bp, Homo sapiens
gtggagggtgaggagggttttctgtcttagccctcagcctgtgtggggtatgaggtcccccaccctcatgcgaacaacctctccccaccctccagccctaytgaaggagtctgaagtcactcaaccatccttgtgaggttttggttctggcctgttccatgagggtggggtagggtggggaaagaagggggaataaaatgt

SEQ ID NO: 412657 - DNA, 201 bp, Homo sapiens
aagaatggaagagggattgtgaggtgggttcctgagaaggaagggagggcagagcagagatgccgcttagcgccccagctggctgaaggcctctgactctrtataatctcttttttttttgagacagagtctccctcagtcacccaggctggagtgcagcagtgcaatcttggctcactgcaacctccgcctcctgggttt

SEQ ID NO: 412658 - DNA, 201 bp, Homo sapiens
ggtttcctttttgaggagtagtaggagtgtagaggctaaagtagactggcctgtccataagaaatacccattactcaattccagccaatttttaccacaamaacaattgagctagaagttcaaatctagatttttatgtgttatctcttgatttttaagtattggtaactaattataaaaatgcatttgtaggctgggcgt

SEQ ID NO: 412659 - DNA, 201 bp, Homo sapiens
tcaggatctcgctggaagtccatgaccaaccaggagaagcagccctactatgaggaacaggcgcggctgagccggcagcacctggagaagtatcctgactrcaagtacaagccgcggcccaagcgcacctgcatcgtggagggcaagcggctgcgcgtgggagagtacaaggccctgatgaggacccggcgtcaggatgcc

SEQ ID NO: 412660 - DNA, 201 bp, Homo sapiens
gagggattgtgaggtgggttcctgagaaggaagggagggcagagcagagatgccgcttagcgccccagctggctgaaggcctctgactctgtataatctcttttttttttgagacagagtctccctcagtcacccaggctggagtgcagcagtgcaatcttggctcactgcaacctccgcctcctgggtttgagcgattct

SEQ ID NO: 412661 - DNA, 201 bp, Homo sapiens
aacatagcaagaccctgtctctacaaaaaaaatacaatactcctggcctcaagcaatcctcctgccttagcctctcaaagtgttgagattacaggcatgarcccctgtgcctctagattacttataatacctaatataatgttaatcatatataaatagtttttgcactatattgtctagggaataatgacaagtctactt

SEQ ID NO: 412662 - DNA, 201 bp, Homo sapiens
cggcagcacctggagaagtatcctgactacaagtacaagccgcggcccaagcgcacctgcatcgtggagggcaagcggctgcgcgtgggagagtacaaggscctgatgaggacccggcgtcaggatgcccgccagagctacgtgatcccgtgagcaggcccccccgcaggcagccaggagactgtgtgtacatgtgtagct

SEQ ID NO: 412663 - DNA, 201 bp, Homo sapiens
ggaggattgatggtgctccccttcctgccagcgtcagaggccctggagaggggctgtccatggcagctggtctttattcctccctcatgagcacagggtcgggggggtccccattcttggaagaggttgagaagactcctgggcttcagcctctcccacccagccctgcccctcacctgcctgccctcccctcccccactc

SEQ ID NO: 412664 - DNA, 201 bp, Homo sapiens
ctcagtcacccaggctggagtgcagcagtgcaatcttggctcactgcaacctccgcctcctgggtttgagcgattctcctgcctcagcctcctgagtagcygggattacaggtatgcaccaccatgcctggctaatttttgtatttttagtggagatggggttttaccatgttggccaggctggtcttgaacccctgacct

SEQ ID NO: 412665 - DNA, 201 bp, Homo sapiens
gatccttggtaagggccagtggctggggccatggttcagtgtgacctggttgcaggagccagctgggtctattcagggcttgcttggtgatattccatacwgtgttggactccagtggaatctgacgacaggggtgcaggagttgctggggatgtgagggcagctgggtcctggggtcttatatcactgaagtgttcggta

SEQ ID NO: 412666 - DNA, 201 bp, Homo sapiens
ctcaggtgatcaacccgcctcagcctcccaaagtgctgggattacagatatgagtccggccattctatacagtcttgaagcagtgctgccccaaaagctgygtgaactcaacatctcctgacctcagtttctctgtttataaaatgtgttgaggttgggcaagagaggaaactgggcacgcaggagcacttccatccaagc

SEQ ID NO: 412667 - DNA, 201 bp, Homo sapiens
tcagtgcctcctgctggtcaagtaggggacgtctctctgctggccctggggcactctcctgaccccagacaggctgcttggctgacttcactcctgtctcscaggctcccgccacttccccgagtcccgaaacagcagccacatcaagaggcccatgaacgccttcatggtgtgggccaaggatgagcggaggaagatcct

SEQ ID NO: 412668 - DNA, 201 bp, Homo sapiens
tcgagcacttactgtgtttcaggcactgtgctaggctctggagctacagtgatgagcagaaacaggtatatttttggctactgggtgactccaaaataaattttttttttttttttttgagaaggagttttcgctgttgttgcccaggctggagtgcagaggcgtgatctcaactgactgcaacttccacttcccaggttc

SEQ ID NO: 412669 - DNA, 201 bp, Homo sapiens
taggcccactcttctctagaactttttgtttaaaaagcaaaaaacaaaacaaaaaagcatgagggatacaagaggctttgctgatttttctgtgggttcayaagtaagcttgccctttctgtgagtgtgcccatgtgacaggcaccaggaggcacttgggtggggtcaggggagcaaacagtagggtcactgcctctgggc

SEQ ID NO: 412670 - DNA, 201 bp, Homo sapiens
tgcccagcctcctggtcctggagggagggatgagcttcctgcaaaaggagaaccaattctgagggctgactgctttgctccctactgccaccccactccayggcttgccccactgtagaaagcagggtgtggttagggctgggcagactgggcaccagggctaatgtccgtgaccccctctgcctactctttccctctccc

SEQ ID NO: 412671 - DNA, 201 bp, Homo sapiens
ccagccaaggagcggctggaggacggctgtgtgcacccactggaggaagccatgctgagctgcgacatggatggtgagggctcaggcgcagggctgatgcrcaggagggcccaactctgtattccaccagggccagggctgtgtctgcctctgatctcttccctcccttggtctgttgggtcctttccaggtgtgtgtgcc

SEQ ID NO: 412672 - DNA, 201 bp, Homo sapiens
tggactcatccccagccaaggagcggctggaggacggctgtgtgcacccactggaggaagccatgctgagctgcgacatggatggtgagggctcaggcgcrgggctgatgcgcaggagggcccaactctgtattccaccagggccagggctgtgtctgcctctgatctcttccctcccttggtctgttgggtcctttccag

SEQ ID NO: 412673 - DNA, 201 bp, Homo sapiens
tggagtgggagtgcacgctctgaggaggcctggaggggagatgggtttggggttgaatcaagtgtgcatccatcaccgttccccttctctgccccacagcycgcaggctggccaggtgcagatgagctcctcagatgtcctgtaccctcgggcagcaggcatgccgctggcacagccactggtggagcactatgtccctcg

SEQ ID NO: 412674 - DNA, 201 bp, Homo sapiens
gcgagatgtaccggtacagcgaggacgaggactcggagggcgaagagaagagcgatggggagttggtggtgctcacagactgatcccggctgggtgggccyggccccttctcctctggggaagaccttgtcccaactcgatgggcacagccagccaacctaagactatgttggtacttggacttgttcgtgccccagagat

SEQ ID NO: 412675 - DNA, 201 bp, Homo sapiens
tcctttggaaaactgtccctgctttatcccctgtgcctcttgtccatgggtccattctctgtgccatgggctgaccatagctgggtagctctttgggtccytggggactcacacagggtttctttgccttcagcaggttaacatgccttatgtcatgatcccagccttccccccaagccaccaacctctgcctgtcacccc

SEQ ID NO: 412676 - DNA, 201 bp, Homo sapiens
cctcagcctcttgagtaactgggattacaggcatgaaccaccatacccggctatttccccccgtgtgatagatgcatgaagcaagaaatcatttacttttrccttatctccactgtaagaagaagactatatgtcttatatatagaagaatatatgtcttatatagttaatacttggtttcctttttgaggagtagtagga

SEQ ID NO: 412677 - DNA, 201 bp, Homo sapiens
ggatggctcccccaacacccccttccgtaaggtatggtcccccactcccttgagcctaggggcagcaacagatggtggccaggagtggaagacacagtctsaggccaccaagagaggagcatggggaggagtggggtgatgcagaggaggctgatgtcaggttgcccctgtcaacctaggacctcatcagcctggactcat

SEQ ID NO: 412678 - DNA, 201 bp, Homo sapiens
gaccatagctgggtagctctttgggtccctggggactcacacagggtttctttgccttcagcaggttaacatgccttatgtcatgatcccagccttccccscaagccaccaacctctgcctgtcacccctgactcccagctggccttacccattcagcccattccctgcaaaccaggtgagtgtgagaagggaggttccac

SEQ ID NO: 412679 - DNA, 201 bp, Homo sapiens
tgcggggtgtggactggtgagccctggcatcctgtgttcttgttcacccgctccttctgcgtccacttttctgtctgtctccttgtgtgttctgggtatgstcacctcacttcctctctgtcctgctgtgggagtgtcctttggtgtctgtcatcctctgacctgctgggtctccctcaggagccctcccagcccctgaac

SEQ ID NO: 412680 - DNA, 201 bp, Homo sapiens
cttgctatgttgctcatgctaatgggcaacatagcaagaccctgtctctacaaaaaaaatacaatactcctggcctcaagcaatcctcctgccttagcctytcaaagtgttgagattacaggcatgagcccctgtgcctctagattacttataatacctaatataatgttaatcatatataaatagtttttgcactatatt

SEQ ID NO: 412681 - DNA, 201 bp, Homo sapiens
tggaggaaggaggtggggggtgggggcactggtgatcaaggaaggcttcctggagaagtagagcctcaagctaggccttaaaggatggggaggactttgaygagaagaggagtgaggcaggcagtggggagtgtgagtaacttttgccagcccctacctgctcccctatgcagcccagctggtgtagtgggtatgttcaag

SEQ ID NO: 412682 - DNA, 201 bp, Homo sapiens
gggagacagtgaggacattagacggatgtcaagaaggaagggagagtagaatggaagaaaaaggaagagtcagaacagccagcttctggtgccccaagcasgttggggtttcaatcccagtatacctggggaggagcagtagtgggctatcacccccttccctccttttgctgtcaactttgtttccggggcagtcatgga

SEQ ID NO: 412683 - DNA, 201 bp, Homo sapiens
aagctggtccagtgccgagccattgcccatcttgtggtgctgggacctcgtcaagcagggtgtctgctgttctgtgctcatccaggacttttctccttgcygccttttccatagtggagtatccgctgcagctgctgcacagcccccctgccccagtggtgaagaggcctggggccatggccacccaccaccccctgcagg

SEQ ID NO: 412684 - DNA, 201 bp, Homo sapiens
ttctagacacttcaattagggatgttaattatggccttgtgaacacaggctctcccaaggcagccgctctccagccctgctgcccccatgttgtcccctcrccagtcagtgaggctatgtttatggtctcgcctctgtccatctgcagattaaagatgccctgaaagcataacttattagcagttttttgttctctccatc

SEQ ID NO: 412685 - DNA, 201 bp, Homo sapiens
ccttcctccctcctctcaggccccgcccagagatcagtgaccaggtcagccaggggatgctgtcttccagattcacccccttgcctctcagggtttgttgytgcttgagacagaggtgagactagaccatgtgggggtgaggtgcattagcctgagaggtaggaaatctgcctctgagcgaatccaccagccctgaggtct

SEQ ID NO: 412686 - DNA, 201 bp, Homo sapiens
tatgagcgcagaccttctggtttagagcttcagtctggaccattgtgctgtgtcctctccaggcggggagggcatcaggagtaaacctccttccacggccmtgagccgtacagtaagtctcccagggttgtacggcaaggcaggggcagagctgttctgtaaacaggcgtcagttcagttgccttgaaaccgccaactcta

SEQ ID NO: 412687 - DNA, 201 bp, Homo sapiens
acaattgtacctgccacaggctcatggggctattgtgatggtgaaatgtaaagatgtaaagtatagagaaaggatgtaaaactgcccgacatatagtaagkgccatttaaaagatgcctgttattgtccctcttcttgagagcatattaagggctcaaatctagccagagtctggcgggtacagaggtaaacaaataatgg

SEQ ID NO: 412688 - DNA, 201 bp, Homo sapiens
gtttggaagggatttataaaggacatctaggctgggttttgagtgaggtatgggagttcgctggtcaagaatgtaggaattacaaaagcagaaagtgcatrtttaaaaaaaaaaaaaagatccaggcctggtggctcacccctgtaatcccagcactttgggaggccgaggcaggtgggtcacgaggtcaggagatcaaga

SEQ ID NO: 412689 - DNA, 201 bp, Homo sapiens
  misc_feature (1)...(201): n = A,T,C or G
cccattatgtgtctgtcggctctgtctctgagtctgctttcctaagttttgtgactgctgagtttctgctctctcttgaggccataccgctgtgattttcntgtgtgtctgtctctggttccctggctgggcctctgcggataatttgctgtttcttctgccccatctgctcctgccttgctcctcctcggctggctgctg

SEQ ID NO: 412690 - DNA, 201 bp, Homo sapiens
ggaagggatttataaaggacatctaggctgggttttgagtgaggtatgggagttcgctggtcaagaatgtaggaattacaaaagcagaaagtgcatgtttaaaaaaaaaaaaaagatccaggcctggtggctcacccctgtaatcccagcactttgggaggccgaggcaggtgggtcacgaggtcaggagatcaagaccat

SEQ ID NO: 412691 - DNA, 201 bp, Homo sapiens
accctcacctacccccaacaacgctgggcagtggcggctcctccctggccgacttgggtccttgtggagagggatggcagcctctaaggcagtgcgtggctgtgtgtgtgtttgtgtgtgtgtgtgtgtgtgtgtgtacgcgcgcgcgcgcgcgcgttcaccacgcgggtcgagcttagggtgcacccccaacccgctcct

SEQ ID NO: 412692 - DNA, 201 bp, Homo sapiens
ggacatctaggctgggttttgagtgaggtatgggagttcgctggtcaagaatgtaggaattacaaaagcagaaagtgcatgtttaaaaaaaaaaaaaagakccaggcctggtggctcacccctgtaatcccagcactttgggaggccgaggcaggtgggtcacgaggtcaggagatcaagaccatcctggctaacacggtg

SEQ ID NO: 412693 - DNA, 201 bp, Homo sapiens
ccctcacctacccccaacaacgctgggcagtggcggctcctccctggccgacttgggtccttgtggagagggatggcagcctctaaggcagtgcgtggctgtgtgtgtgtttgtgtgtgtgtgtgtgtgtgtgtgtacgcgcgcgcgcgcgcgcgttcaccacgcgggtcgagcttagggtgcacccccaacccgctcctc

SEQ ID NO: 412694 - DNA, 201 bp, Homo sapiens
cagttggacctcactaagtgagtgaaaagtagttactaatgggctgctgcttgggttccttagagtgatttttttttttttttaagatacagtctccctgkgtcgcccaggctggagtgcagtggcacaatcttggctcactgcagcctcaacctcctgcatgatcctcctatctcagcctcctgagtagctgggaacaca

SEQ ID NO: 412695 - DNA, 201 bp, Homo sapiens
aggagctaaactggaggtcagggggacactaacatttattggttgaggaccatgtgccagatcctggactaagagctttgcatatattagcgcttcttctyctttttttttttttttttttttttttggagagagacagctcgctctgttgcccaggctggagcgtagtggtgtgatttcggctcactgcaaagttcacct

SEQ ID NO: 412696 - DNA, 201 bp, Homo sapiens
catgggaatgtgcctcggcctccaaggggctttgtcctggtgcccccgcccctggtcccaacctgatcccacgagggagttgggacaggaggattgatggkgctccccttcctgccagcgtcagaggccctggagaggggctgtccatggcagctggtctttattcctccctcatgagcacagggtcgggggggtccccat

SEQ ID NO: 412697 - DNA, 201 bp, Homo sapiens
tccaaagggtgctggtgatggaaagcggggtgctgggcagattggggtgaaagctggctgctttggggattgtttgatgagcattatagtagattaagctrcttctccccttccttccctgcccttattgaaaaggcgccaaagccaggaaaaacaaacagccacccataaataaagaggaccatgaaataacaaaatcga

SEQ ID NO: 412698 - DNA, 201 bp, Homo sapiens
tgtgttaggggagctggtggtgattaggcttacatgaggcatgagtgtcatcccaccaagaacccctgggatgggggacaccttaggcttaagcgggctgygccaacgggaggccggtgtgccagtctggcctagagccttggctgccatgatcatagagctgctgctcacctcctcaagggctggccaagctgggagctg

SEQ ID NO: 412699 - DNA, 201 bp, Homo sapiens
cggcagctgctgcacagccacagtggggccttggatggctcccccaacacccccttccgtaaggtatggtcccccactcccttgagcctaggggcagcaayagatggtggccaggagtggaagacacagtctgaggccaccaagagaggagcatggggaggagtggggtgatgcagaggaggctgatgtcaggttgcccct

SEQ ID NO: 412700 - DNA, 201 bp, Homo sapiens
catggcttagacttgtcacaaagcaaaagccgataatgcccagcccaccccagtactgggagaaggagtgtttggcaaaggtgagatttcatcagcctggygggtaaacatggctgtttgcagactagttgcgcttgtcctttccgctgtctgtagtcatccctatggtccccaccttcctctccctctggggttggcagg

SEQ ID NO: 412701 - DNA, 201 bp, Homo sapiens
  misc_feature (1)...(201): n = A,T,C or G
agttgttgactggttagaagaggaagtggctggtgatttgttttgggcagaaaggggctaggtttgtgtgcgcctgtgggttggtggggttcagaggggcngtgacagggctggttgtggggaggagagaggaagaggatcggcacctgcagcgggctttgtcatataagcgccatgctttgagccactgtccctccatgg

SEQ ID NO: 412702 - DNA, 201 bp, Homo sapiens
gaagaggatcggcacctgcagcgggctttgtcatataagcgccatgctttgagccactgtccctccatggaggcgggtgcctctctataccttgtctcagrtgctggatttgggggcctcggggcctggtaggcacaagctgagactcaaggctctgcatgtcaagggcgaagatggctggagccctctccttagaggtct

SEQ ID NO: 412703 - DNA, 201 bp, Homo sapiens
tgccctttctgtgagtgtgcccatgtgacaggcaccaggaggcacttgggtggggtcaggggagcaaacagtagggtcactgcctctgggcagaagtttaygactggggactcacctcagctcactctgtccctcccccaggatgtccatgaggagccccatctctgcccagctggccctggatggcgttggcaccatggt

SEQ ID NO: 412704 - DNA, 201 bp, Homo sapiens
cagaggggccgtgacagggctggttgtggggaggagagaggaagaggatcggcacctgcagcgggctttgtcatataagcgccatgctttgagccactgtycctccatggaggcgggtgcctctctataccttgtctcaggtgctggatttgggggcctcggggcctggtaggcacaagctgagactcaaggctctgcatg

SEQ ID NO: 412705 - DNA, 201 bp, Homo sapiens
atgctgcctgaggaagagctgctaaactggggtgtccgatgagcgagcctgtgttaggggagctggtggtgattaggcttacatgaggcatgagtgtcatyccaccaagaacccctgggatgggggacaccttaggcttaagcgggctgcgccaacgggaggccggtgtgccagtctggcctagagccttggctgccatga

SEQ ID NO: 412706 - DNA, 201 bp, Homo sapiens
atataagtcacagccaagagtgtgtggagtgggagtgcacgctctgaggaggcctggaggggagatgggtttggggttgaatcaagtgtgcatccatcacygttccccttctctgccccacagcccgcaggctggccaggtgcagatgagctcctcagatgtcctgtaccctcgggcagcaggcatgccgctggcacagcc

SEQ ID NO: 412707 - DNA, 201 bp, Homo sapiens
tgttaataataagataatgatgagtaacttaaccagcacatttctcctgtttacactcgggggatttttttgttttctgatgacataataaagacagatcrtttcagaatctggcccttgtgcaggggaggagggaggctggcctaagtccagaattcccaaatatgccaccagcctgggcaccactgtcccctggtggca

SEQ ID NO: 412708 - DNA, 201 bp, Homo sapiens
cccagtggtgaagaggcctggggccatggccacccaccaccccctgcaggtaccgccctctacccactggcctggggctccctctcgagcttatgacggcyggctgccgtgttagggaactgcggggtgtggactggtgagccctggcatcctgtgttcttgttcacccgctccttctgcgtccacttttctgtctgtctc

SEQ ID NO: 412709 - DNA, 201 bp, Homo sapiens
gaaccttagggctagtgggattttggggcttgcctgtcattcattcattgaaaaggaaaaggatggcttgggtggcccacagaagccagcatctgtgaccycaaatggatgagtccctgcaaactgggaaggctgcccagttcctcttcctcttcccaagtggcccccgtcctgccactcccttctatgagcgcagacctt

SEQ ID NO: 412710 - DNA, 201 bp, Homo sapiens
tatggccatgggctgagcaggctgagcacctcagcctttagggcttatggccaggggacactgtatgactctcctctcctgcaggtgtctatccacctggrgtatggcatctaccgacctgtctccctggggtcacatgctttgtttccattcttgtcctggctggaccagccactgtgggaccaacacccctcccacact

SEQ ID NO: 412711 - DNA, 201 bp, Homo sapiens
tagaagggtcacatgagaagagtctagaatagtgcgtgggaatcttatccaggtgttggctatttgttgctgtgattattctgtttttggagtgacccccrttcagtcaaagaagcaagggtgagagctgctgtcccaagtgtatcagcatagggacgtggggacgtgggggaggtggactggggcatggacctcgctatg

SEQ ID NO: 412712 - DNA, 201 bp, Homo sapiens
cctcacctacccccaacaacgctgggcagtggcggctcctccctggccgacttgggtccttgtggagagggatggcagcctctaaggcagtgcgtggctgtgtgtgtgtttgtgtgtgtgtgtgtgtgtgtgtgtacgcgcgcgcgcgcgcgcgttcaccacgcgggtcgagcttagggtgcacccccaacccgctcctcg

SEQ ID NO: 412713 - DNA, 201 bp, Homo sapiens
cttcactcctgtctcccaggctcccgccacttccccgagtcccgaaacagcagccacatcaagaggcccatgaacgccttcatggtgtgggccaaggatgwgcggaggaagatcctgcaagccttcccagacatgcacaactccagcatcagcaagatccttggtaagggccagtggctggggccatggttcagtgtgacc

SEQ ID NO: 412714 - DNA, 201 bp, Homo sapiens
ctcacctacccccaacaacgctgggcagtggcggctcctccctggccgacttgggtccttgtggagagggatggcagcctctaaggcagtgcgtggctgtgtgtgtgtttgtgtgtgtgtgtgtgtgtgtgtgtacgcgcgcgcgcgcgcgcgttcaccacgcgggtcgagcttagggtgcacccccaacccgctcctcgc

SEQ ID NO: 412715 - DNA, 201 bp, Homo sapiens
gaggggagggagggacagggcaggatgtttcgggagcacccacgaaaagttccctgaaagacataacataaagatctggagggtggggaggagaacaggtyagagggaagaggaggtcataagggtaggtcccctccacatctcccaggggccccacctgggcctctaagggcatgtcagatggtcctattcctcactaag

SEQ ID NO: 412716 - DNA, 201 bp, Homo sapiens
acacctgcagcctcagagaggagggtgagggcacagatgacaggcactcggtggctgatggcgagatgtaccggtacagcgaggacgaggactcggagggygaagagaagagcgatggggagttggtggtgctcacagactgatcccggctgggtgggcctggccccttctcctctggggaagaccttgtcccaactcgat

SEQ ID NO: 412717 - DNA, 201 bp, Homo sapiens
agtgttggtgtgtttggcagtttagagagggtctgttggactgttgacaccctttattgagcctgagtcctcttgggccaattggccacaggtgtaaggarcctcctgattcctgagtcaggactgatggggtttaggagctctcagatggggcaggtaagactgaaaggaggcacgtggggaagagaggaagtttctgcc

SEQ ID NO: 412718 - DNA, 201 bp, Homo sapiens
acccccaacaacgctgggcagtggcggctcctccctggccgacttgggtccttgtggagagggatggcagcctctaaggcagtgcgtggctgtgtgtgtgtttgtgtgtgtgtgtgtgtgtgtgtgtacgcgcgcgcgcgcgcgcgttcaccacgcgggtcgagcttagggtgcacccccaacccgctcctcgccgaccgc

SEQ ID NO: 412719 - DNA, 201 bp, Homo sapiens
tccaagcagtgctttggggctggggagggcagtggttggaaccaagctggtccagtgccgagccattgcccatcttgtggtgctgggacctcgtcaagcarggtgtctgctgttctgtgctcatccaggacttttctccttgctgccttttccatagtggagtatccgctgcagctgctgcacagcccccctgccccagtg

SEQ ID NO: 412720 - DNA, 201 bp, Homo sapiens
ttaatttgtttttcagattgagtctctgttactagcaatttattacatccgggtctccagccaagcacattctgttctccagtgttgggggaagatgcatgggggggtggggaagaggctggacaggaaagaggagcagatcaacaattttatgactgagtgtgtggtgtcttggcgtgcgctagaggacggttttagcac

SEQ ID NO: 412721 - DNA, 201 bp, Homo sapiens
cccccaacaacgctgggcagtggcggctcctccctggccgacttgggtccttgtggagagggatggcagcctctaaggcagtgcgtggctgtgtgtgtgtttgtgtgtgtgtgtgtgtgtgtgtgtacgcgcgcgcgcgcgcgcgttcaccacgcgggtcgagcttagggtgcacccccaacccgctcctcgccgaccgca

SEQ ID NO: 412722 - DNA, 201 bp, Homo sapiens
cctctcgagcttatgacggccggctgccgtgttagggaactgcggggtgtggactggtgagccctggcatcctgtgttcttgttcacccgctccttctgcrtccacttttctgtctgtctccttgtgtgttctgggtatgctcacctcacttcctctctgtcctgctgtgggagtgtcctttggtgtctgtcatcctctga

SEQ ID NO: 412723 - DNA, 201 bp, Homo sapiens
acaacgctgggcagtggcggctcctccctggccgacttgggtccttgtggagagggatggcagcctctaaggcagtgcgtggctgtgtgtgtgtttgtgtgtgtgtgtgtgtgtgtgtgtacgcgcgcgcgcgcgcgcgttcaccacgcgggtcgagcttagggtgcacccccaacccgctcctcgccgaccgcagaggac

SEQ ID NO: 412724 - DNA, 201 bp, Homo sapiens
ttgctctgttgcccaggctggagtgcagtggcacgaccctagctcactgcagccttgagctcctgggctcaagtgattctagctgtgacttaggcatgtghtactacacatggctaatttttaagtttttttgtagaaacaaggtcttgctatgttgcccaggctggtcttcaaagtctgccttggtctcctgaagcacgc

SEQ ID NO: 412725 - DNA, 201 bp, Homo sapiens
aacgctgggcagtggcggctcctccctggccgacttgggtccttgtggagagggatggcagcctctaaggcagtgcgtggctgtgtgtgtgtttgtgtgtgtgtgtgtgtgtgtgtgtacgcgcgcgcgcgcgcgcgttcaccacgcgggtcgagcttagggtgcacccccaacccgctcctcgccgaccgcagaggacta

SEQ ID NO: 412726 - DNA, 201 bp, Homo sapiens
cagtggcacgaccctagctcactgcagccttgagctcctgggctcaagtgattctagctgtgacttaggcatgtgctactacacatggctaatttttaagkttttttgtagaaacaaggtcttgctatgttgcccaggctggtcttcaaagtctgccttggtctcctgaagcacgctggattataggtgtaggcccaccac

SEQ ID NO: 412727 - DNA, 201 bp, Homo sapiens
gagggagtggccccttcagcccctgctgtttctcaggcttgcccggctcctcttttcttggctggtggtggggtgtgtgtgggggggagggaagctgagtrtgatgtgtgtgtgagtgtaatgtgagtgtgatgtgtgtgtgggtgtatgtgtggggggccaggtgtgtgtgtgtttgtgaagggctgagcgtgatgtgtg

SEQ ID NO: 412728 - DNA, 201 bp, Homo sapiens
tgtgtgtgagtgtaatgtgagtgtgatgtgtgtgtgggtgtatgtgtggggggccaggtgtgtgtgtgtttgtgaagggctgagcgtgatgtgtgtatctrtgagtgtgatgtgtgtgtgtggagggccaggtgtggtgtgtgtgtgtgtgtgcacatatgtgtgcaggcaggcaggggcctgtgctctggagaccctggc

SEQ ID NO: 412729 - DNA, 201 bp, Homo sapiens
tgtcggctcactgcagcctccatctcgtgggctcaagcaattctcatgcatcagtctcccaagtagctgggtttacaggcacccgccaccacacctggctmatttttgtatttttagtagagatggggtttcaccatgttggccaggctggactcgaactcctgaccttgtgatccacccacctcagactcccaaagtgct

SEQ ID NO: 412730 - DNA, 201 bp, Homo sapiens
gtgtatgtgtggggggccaggtgtgtgtgtgtttgtgaagggctgagcgtgatgtgtgtatctatgagtgtgatgtgtgtgtgtggagggccaggtgtggkgtgtgtgtgtgtgtgcacatatgtgtgcaggcaggcaggggcctgtgctctggagaccctggccaggctcctccaacccatgggaaccaggcagggcctc

SEQ ID NO: 412731 - DNA, 201 bp, Homo sapiens
gcagtggtcagacctcctagaggctgtgaggtgaggaggaagtggctgaggtttcccctgcctcctcctaaggtcatccatgggcaaaccaaagctgcagsatgtgctgtgtgtgtggcctggtatctcagagtcctgggtgtgcacagggtgtgcacagctaggagacgtcccgagatctgtacccacatgttgagggct

SEQ ID NO: 412732 - DNA, 201 bp, Homo sapiens
gaagtggctgaggtttcccctgcctcctcctaaggtcatccatgggcaaaccaaagctgcaggatgtgctgtgtgtgtggcctggtatctcagagtcctgrgtgtgcacagggtgtgcacagctaggagacgtcccgagatctgtacccacatgttgagggcttcagccaggggtgttttttgggggagcggaatttgtgt

SEQ ID NO: 412733 - DNA, 201 bp, Homo sapiens
tcctgggtgtgcacagggtgtgcacagctaggagacgtcccgagatctgtacccacatgttgagggcttcagccaggggtgttttttgggggagcggaatktgtgtggcatagtagaggaaaagaaggaagaagtggggacagtatctccagctgccacctttcttcccaaatagctttggatacccaggcccttttggtc

SEQ ID NO: 412734 - DNA, 201 bp, Homo sapiens
aatcgaaaaagaaaacttgctttagtggcgggcttggctgacgatagggtagataatgggagaggaaacgcagcctttggagagaaaaagaacggaacgckttgttcactggaagaatgaatgctgcctgaggaagagctgctaaactggggtgtccgatgagcgagcctgtgttaggggagctggtggtgattaggctta

SEQ ID NO: 412735 - DNA, 201 bp, Homo sapiens
tcccaaagtgctaggcatgagccaccacacccagccccatttgacttctaaggttttcatttctttttctgtaaaatgggatgatgatgtattcagccccwgttatatatcacataccatgtattattgtcagatgatacatatgagacgttctacacaacaggcagccgcttttgtgccctgtgcccagtaggtacaaaa

SEQ ID NO: 412736 - DNA, 201 bp, Homo sapiens
caaccaatcttggggggcaacctccttgcaagagcctggagcacttcaccatcacccccatccctccaatgggagatggagcctgacactggggtctcacmaagtgaggactccagtgggccaccctctacctttgatgtacttgaagggattgcttgctgacctgctgcctctcacccaggctgagttccctgagcctgg

SEQ ID NO: 412737 - DNA, 201 bp, Homo sapiens
ggagctagactaaagtttggtcaagcaaagtctttgccagtacacacagaattcaactatatttcagctttggtagaagagcagaagtgacattggaatcratctttttccaccctcacagttcctcttcacagctctgatcagatttcattcacttactgagttgtccctgtgccaggcccatgctaggtgagacccagt

SEQ ID NO: 412738 - DNA, 201 bp, Homo sapiens
gatactggaggataagaggcctgatcagatattgagagtgattagatattgaggttgattagatatcgatgtgggtggttctttctgaactgactcaccayggttcttcctaaaactgggttttacaaagaagtgcacagataagtctagaagaagattcaggagctagactaaagtttggtcaagcaaagtctttgccag

SEQ ID NO: 412739 - DNA, 201 bp, Homo sapiens
gtccaggagtttgagaacaacctgggcaacatagacgttgtttcaaaaaaaaaaaaaaaaagaaaagaaaagaaaaagaaagaaagaaagaaaagaaaaaraaataaaagctaaaaaccaaacaagccaaaaagtaaaaaaaaaaaaaaaaaaaaaaaatagccaggtgtggtggcccccacacctgtggaccagctactc

SEQ ID NO: 412740 - DNA, 201 bp, Homo sapiens
agttatcggagaagtgatccaccttctaggatgcaccttgcaactccaagttagctcttgtcacagacaacacagagaagaaattcagagattgtgatgcrttaaatcagaattgtaccacattgaaattcaggtaactcccaacttttgcagagttatgcttggaaagctggcatttcatgtatctccttttagctcacc

SEQ ID NO: 412741 - DNA, 201 bp, Homo sapiens
ttttaattaatttaaatatgattacactcatgtgtccagtggctactgtatctgatagcacagtacttattctctcctgtgtgtaaagactgacagtaccsaagaggtccccataaagttatcggagaagtgatccaccttctaggatgcaccttgcaactccaagttagctcttgtcacagacaacacagagaagaaatt

SEQ ID NO: 412742 - DNA, 201 bp, Homo sapiens
tgccccagatctccgaatctcacatcaaagctgaggctaactcattcacccagccctccttccttctttcttgccgtcacttctttccttcctccctcccrttttcctcacaaatatttgttgtgtctagccgccatggtgtcttctgtgattccaagactttaggagactcagtaaagtttgaaaaaaatttctgaaagg

SEQ ID NO: 412743 - DNA, 201 bp, Homo sapiens
attcttgagacatctcagccatatttggaacaagctgaaaaacacctcagcactgtccagcagaactttctgtgatgatgaaaacgttctaaatctgtgcrgtccaatatggcagtcactagccacacgtagctgtttaacacttgcaaggtgactcctgtggccaaggaactgcatttttaattttaattaatttaaata

SEQ ID NO: 412744 - DNA, 201 bp, Homo sapiens
ccaaatggatgtgtttattcttgagacatctcagccatatttggaacaagctgaaaaacacctcagcactgtccagcagaactttctgtgatgatgaaaaygttctaaatctgtgcagtccaatatggcagtcactagccacacgtagctgtttaacacttgcaaggtgactcctgtggccaaggaactgcatttttaatt

SEQ ID NO: 412745 - DNA, 201 bp, Homo sapiens
tgtgtatactaggagtcggactgctgggtcattaggcaaccctttgtttaacttttgaggaactaccaaactgtttttcaaagtggctgtgcccttctacrttgccataaatgtgagtttttagaacaagaacaaggaagaacatgttcgtgggccaaatggatgtgtttattcttgagacatctcagccatatttggaac

SEQ ID NO: 412746 - DNA, 201 bp, Homo sapiens
agatggacatttgagttatttccttctttcggccattatgaataatgctgctgtgaacatctgtgtgcaagtttttgtgtgaggacatgtttccaattctytcctgtgtatactaggagtcggactgctgggtcattaggcaaccctttgtttaacttttgaggaactaccaaactgtttttcaaagtggctgtgcccttc

SEQ ID NO: 412747 - DNA, 201 bp, Homo sapiens
agaaccaagaagaataaaactggggagtgagaatgtgtgtgtgtgtgtgtttgtgtgtgtgtgtgtgtgtgtgtgtgtgagagagacagagagagagagagaatgagagccaattgtggtagtcagtcagtcacccaggtaacaatatactgattggaaggaaatcatcacaaaattttaattacaaaatgagaaaatgtt

SEQ ID NO: 412748 - DNA, 201 bp, Homo sapiens
ctgaattatggtctccacgtggttcctgaacctgctaaaattgtgggcaacattcctatattttcttggttagggtccatagctgtcgtcatggtctcaargggatcagtaaccctcaaagggttgagactcccccatcccaggtctaaagcttgctaagcattcatcattctgccacctggaccaccatttacttagcgc

SEQ ID NO: 412749 - DNA, 201 bp, Homo sapiens
gagaaccaagaagaataaaactggggagtgagaatgtgtgtgtgtgtgtgtttgtgtgtgtgtgtgtgtgtgtgtgtgtgagagagacagagagagagagagaatgagagccaattgtggtagtcagtcagtcacccaggtaacaatatactgattggaaggaaatcatcacaaaattttaattacaaaatgagaaaatgt

SEQ ID NO: 412750 - DNA, 201 bp, Homo sapiens
ctttccaataccagctgaattatggtctccacgtggttcctgaacctgctaaaattgtgggcaacattcctatattttcttggttagggtccatagctgtygtcatggtctcaaggggatcagtaaccctcaaagggttgagactcccccatcccaggtctaaagcttgctaagcattcatcattctgccacctggaccac

SEQ ID NO: 412751 - DNA, 201 bp, Homo sapiens
agagaaccaagaagaataaaactggggagtgagaatgtgtgtgtgtgtgtgtttgtgtgtgtgtgtgtgtgtgtgtgtgtgagagagacagagagagagagagaatgagagccaattgtggtagtcagtcagtcacccaggtaacaatatactgattggaaggaaatcatcacaaaattttaattacaaaatgagaaaatg

SEQ ID NO: 412752 - DNA, 201 bp, Homo sapiens
ggtattggttttaaaggaagagagaaccaagaagaataaaactggggagtgagaatgtgtgtgtgtgtgtgtttgtgtgtgtgtgtgtgtgtgtgtgtgtgagagagacagagagagagagagaatgagagccaattgtggtagtcagtcagtcacccaggtaacaatatactgattggaaggaaatcatcacaaaatttt

SEQ ID NO: 412753 - DNA, 201 bp, Homo sapiens
aggtattggttttaaaggaagagagaaccaagaagaataaaactggggagtgagaatgtgtgtgtgtgtgtgtttgtgtgtgtgtgtgtgtgtgtgtgtgwgagagagacagagagagagagagaatgagagccaattgtggtagtcagtcagtcacccaggtaacaatatactgattggaaggaaatcatcacaaaattt

SEQ ID NO: 412754 - DNA, 201 bp, Homo sapiens
tgactcatgggctccatttcccttggtggcctcctctatttgcaccacacagaggcagtgattccataagagaaaaatcactcataccaagcgcaatggartgattgtcctcctaaaatccatttgttgaagtcctatcctgccaggtgatggtatcaggaggtggggcctttgggaggtaattaggtcacgagggtggag

SEQ ID NO: 412755 - DNA, 201 bp, Homo sapiens
cccacccctcaggactgtaagcttcatggaggcagtggctttgcctgtttttttcactcttgtatctgcagtgccttgaagagtactcgagacagggaagstacttaatagatatctggctgtgtgatctttacaagcctctcactgtctgaatttcaatttccatatctgtaaatttaggctaataacaagcttctcccc

SEQ ID NO: 412756 - DNA, 201 bp, Homo sapiens
cacacagaggcagtgattccataagagaaaaatcactcataccaagcgcaatggagtgattgtcctcctaaaatccatttgttgaagtcctatcctgccakgtgatggtatcaggaggtggggcctttgggaggtaattaggtcacgagggtggagccctcatgaatgggattcatacccttataaaagagatcccagaga

SEQ ID NO: 412757 - DNA, 201 bp, Homo sapiens
taactatggaaacaccagggttgccaggcaatgagtcccagatgacattcatcagatgccacttcttacaggaagccctccctgaccagaactgctccatyaatttagaggtaggaccccctgccatgtgcttcccatagcactctattctgctattatagcattttcacagtcatggcagggtagtacacatttattcac

SEQ ID NO: 412758 - DNA, 201 bp, Homo sapiens
cagacaccaagcatggaggagaactattgatgcggatctcgctgaccccctccttgtccattcccatctctgttcctctccatttccctcccagtttgctycaggagttccaaattcatataaatgtcttttgtcacttttcttatgtctcttttcaggcgagcatttctgtcctgtctcctggcagctttggtgtcagcc

SEQ ID NO: 412759 - DNA, 201 bp, Homo sapiens
cctctgctcccaagcagttttgtaaatctcttgtgaagatgctgtttctctgaataaggccatgagcaagggccaaagctgtttgtcttactaatcccaaygaagttgtctccaaagatagcttatctgaggactgtgcaacgaggaggggagaacaaaagctggagtgacagatccacagagcttagctattgtctctgg

SEQ ID NO: 412760 - DNA, 201 bp, Homo sapiens
tatgtttaaggggtggctttttactatctttttttgtttttctgattcttttaaattttctacaatgaaaacacgcatataacttcttgtaataaaacgttaactaacccagtaaaagttactttttgaaaacatgatgactgatttctgttgaaaaacgctttgtggctttgaatcatcatttttgtgaaggttcctttc

SEQ ID NO: 412761 - DNA, 201 bp, Homo sapiens
tgagagcaaagacagggtttgctcaagtccttggctccaagctttgtgtaggtgtttaagaatagcttgtagaatgaatgaatgaaaaaacaaatgagtgmatgaagtactgtacgggtgtccgtgcttgattgggtttcaggtgctgtttggtgaggacatagcatgcttctgacagtagtggctgacacaatatttgag

SEQ ID NO: 412762 - DNA, 201 bp, Homo sapiens
gtgcttccttccaggtacaaaggaggattgtccaggctgggggtgcacagaacaaggttggttggctgcatgactcaaatcctggctctgccacctagaarccatgttatcttggactaattaccttgacttttctaagcctaaaaatgagacagtaataatgtctacctcattgatgtgttgttctaacattgtggtttt

SEQ ID NO: 412763 - DNA, 201 bp, Homo sapiens
tattttgtgatattcattcatatttctgcccccacccatcctttccctggattcaatcaggtagcaggcttcgtgcctccctccttcaagtgaggtgttgsggagggagggaagcaggagaaacttgcaattttcctggcttttgttttctaaaagctagagaccagaaagaggatagaggtaggtgggagcttggaggag

SEQ ID NO: 412764 - DNA, 201 bp, Homo sapiens
gtggttactttcaaccctgaattctgcagcaggtgcgtcctcatcaatccctgcactacataagattttgaggagtggccttcagcaggattaactgaacrtcatccacatcagattgagtcagagccacgtcctgcatgtgtgtgcacgcacgttcagagcatcttagtaactgccttcggatagggactgatgaaacat

SEQ ID NO: 412765 - DNA, 201 bp, Homo sapiens
aatcaaacttcaaatcctaatttcggttcggctggcacccttgccacattcccacggctaagacggtgatgaagatcgttgttcatcactgtatcttaagygtgtctggctgagaagaggccccaatggcacgcggtgagcgggtgttgaaggaatacctgtctctgttaccttagtaatgagagtgagagaccgtggtgc

SEQ ID NO: 412766 - DNA, 201 bp, Homo sapiens
ctcatttacttttcaaagagatcattctggtagctggggaggagctgcaaattgacagttttctgaggtggaagcacagaggttagttaggaggcaactgyagttgttcaggctggagaagatgcagtggtggtggcagtggaggtggtgcaaaatagatggattctgggcagcttctgatgcttgatgtggggtttaagg

SEQ ID NO: 412767 - DNA, 201 bp, Homo sapiens
aggaaacagcaagagcaaaggccctaagaagggactgtccctggtgtgttcattaaggggacccatgtggctgaagtggagtgagggagggggtagtgtcrgaagaggaggtgggagagcaatcagagaggggcagaccattgcaaagtgtggattttattgtgatgggaaatcactggagggttccagcagaggcatagt

SEQ ID NO: 412768 - DNA, 201 bp, Homo sapiens
gtgtactaacaataggaataatataatgaatgtttattgagtgccaaatgtggtgtttgatagactctaccatttactaactgtgtgatcttgggcaaggyactgaacctctctgaactctagttccctcactgtaaagacagggatgacgatgcttgctctgcaaagctttccaggggtttctaggcatggggaggactt

SEQ ID NO: 412769 - DNA, 201 bp, Homo sapiens
aaacatacatatacgcatgtggatatgtatgcttacaaataaatagactattttggaaagcatacacaatctggtaacaatgtttacttcaggagaaaaartactgagagtgttgggtgtgaatgtggggtaggtaagagcagaataattttttcattttttttttctgattcaaataagaatctatgcatcattaaaaaa

SEQ ID NO: 412770 - DNA, 201 bp, Homo sapiens
ggctcagggacaaatcactggaagatctctgggagatcgtcgcatgatagtcggaaagttttcatcgcaaggagaagagaaacaagatagcatcaaggtgkcaagaacctctcactttttattgtgtggaagctcaggacctgagatgctagggggacaaagtctcagaaaggcacagacagaaaggagagagacgatggg

SEQ ID NO: 412771 - DNA, 201 bp, Homo sapiens
gcatcccccaatttcccccactgctgcaatgcacatcctcaatagctcagccacttcttgagaccctgacaaggccttccctaggtgggctggaagttagycttcattttaatgctgggcagctgaagattctctgacatcttgcaaatggctcatggagtaagaaatactgctatattctattccaattatttcctgtcc

SEQ ID NO: 412772 - DNA, 201 bp, Homo sapiens
cctccactgcccctgcctagtctaggtcatcatcatctctcactgccactgcaaagcctcctacctgtctcgtctgaagtgtatgctccacacagtggctkcagtcacttttaaaagacacgattcagacagtatctttcatctgcttcgaaccctgctgtagtgaccaacacacttaagataaaaatctaaagtccttaa

SEQ ID NO: 412773 - DNA, 201 bp, Homo sapiens
atttagagaaaatgctaacctttctatcatgacctacaaggcctcacaggatatacatgcttccttcctgtctgacatcatctgccacctctctcctcctscttctgtgcagtccagcactctggctgccattttccatgtcactcatgtcaaatgcattcctatctcagggtctttgcatttactgtccttgctgcctgg

SEQ ID NO: 412774 - DNA, 201 bp, Homo sapiens
aatggaaacaattatgccatcctcaaagggttgtgaagattaaataagataacgtactgaaacacctagctcactgctagggacatcataagtgctcagtmaatattagttctccaccagtgtcttgtcttctggacaaagccctgaaatcatgtctttgttctatgctgcaaactcatgtgtcgtggtcctacactctgt

SEQ ID NO: 412775 - DNA, 201 bp, Homo sapiens
tattagtcctgcttttagttttagttttcatgttgttgatgcatcaatcctctggcaagcccagaagttcttaatggtgtttgtgagccactgaaaaatargaggttatttgatgtgcatatgtacattttctgcgtagctgtttcatagcttccctcagattttcaaaagcgcccatgtaccaaaaaaaggataagagcc

SEQ ID NO: 412776 - DNA, 201 bp, Homo sapiens
ggagtaacacccctggaccaccagccccagtgagagcatgagaggaagcgagaagccctcactgatggggagtccctgccacacacagtcccccatgacaytgagactctcccctcctcacagtttccatacagaccccctgaagagggaggggcctagggagccccaccttgtcatgtactatcaataaagtcccctgtg

SEQ ID NO: 412777 - DNA, 201 bp, Homo sapiens
gaacaggttacaaaatagtacatttgatatgccatagaaaaatggctgaataaatatgttttcaacatttcagtggttatgtttaaggggtggctttttaytatctttttttgtttttctgattcttttaaattttctacaatgaaaacacgcatataacttcttgtaataaaacgttaactaacccagtaaaagttactt

SEQ ID NO: 412778 - DNA, 201 bp, Homo sapiens
atataggcagctgtgacagaggctcttaatcaccacaatgcagctcacaggaaaacaaaatatacatacttatgtgtgtggatatatatatatatatatatactttttttgtttattcactgtcaagtctcaacataatgctcatgtatagaaaggtctgggagggtgtgtactggaatgtcaactgtgcttatctttgag

SEQ ID NO: 412779 - DNA, 201 bp, Homo sapiens
caaattagccaaaatgctcgcttgaacccaggaggtggaagttgcagtgagctgagatcgctccattgctctacagcctggtctgtgtcaaaaaaataaawaaataaataaataaattcagatccctcatgaagtcagagaccaaagccttgcccatccctgctggggcgtgcctgcttccctagactttcaccacagcgg

SEQ ID NO: 412780 - DNA, 201 bp, Homo sapiens
tacacaaattagccaaaatgctcgcttgaacccaggaggtggaagttgcagtgagctgagatcgctccattgctctacagcctggtctgtgtcaaaaaaawaaataaataaataaataaattcagatccctcatgaagtcagagaccaaagccttgcccatccctgctggggcgtgcctgcttccctagactttcaccaca

SEQ ID NO: 412781 - DNA, 201 bp, Homo sapiens
gcaccatggcagctaagaggccattcaacagaacacatgtagcattaggaagggggcataaattttactttccccctatgtctgcgcggcatacgttttttggttgttcttcacgttcatcacactggaagcaccatgtcagggacaatgatgggctagatttttgcctctgttttcttacaatgtaccctccaaggacca

SEQ ID NO: 412782 - DNA, 201 bp, Homo sapiens
cagctcctggaccttgttttgcccccaacatttgctcattagccccagttagtatctgcccttgctcagatgatttggatttatgatttgttttcttctgkttttttttattgtgaggtctcccaaaatagtacttatctcaggagagttgaagcatctcataatctaccctcgagagagagtcctctaatacctcttacc

SEQ ID NO: 412783 - DNA, 201 bp, Homo sapiens
gtccttttccagaccctttggtgtgctggtaaatagctctacaaaaaagaaaagaaaaaggagccctgatgtgtagtgtttgtcaatttctgtggtgtacrtattcccatcagcatatttcaagctgttggtacaatgtcactgaacacaaagttgaacagagatgcttataaactgctctgagccggtacaagtcagctt

SEQ ID NO: 412784 - DNA, 201 bp, Homo sapiens
ttccccttctcaacaaatggtacctccatctacttagaaaccccagggttattctgaacacatttcctctcttgcggactctcttatgccgtcaccaaccmatccccaggtcttgaagctgtctgcttctccacctccactgcccctgcctagtctaggtcatcatcatctctcactgccactgcaaagcctcctacctgt

SEQ ID NO: 412785 - DNA, 201 bp, Homo sapiens
aaggtccaaattataacttgcatctgcccagtgatttgcatttcggtgtttatactacaatgatctcgttgaatcctttgtgtgtcctggtgggctgtgakgatcatgtccatttgctagaccagaagaggcaagatgaactgcccaaggtcatgcagagccaagacttgaaccaaggccctactgactccaaattccatt

SEQ ID NO: 412786 - DNA, 201 bp, Homo sapiens
ctctgagcttctgtttcctcatctgtaaaatgaggacaataccagtgcccacttcacaatcctgtggacaggtataaatgagggaatacagagaaagaacycctagccagcatggagagcacagtaagcctggcactcgatgagacctaataaatggtagctattagtattactattatcaaatgtggttaggaagcacag

SEQ ID NO: 412787 - DNA, 201 bp, Homo sapiens
catatggtcaccctattagaaaacagtgatatattacccaacagaaagacccagtgtgtcttcagagcattcgcaaagctggggcacctgtatttttggtraaataatctgatattaaagaaatcaaagttacctccatggaaagaatcagaatattgttggccttccttacattttttttagggttctatgcatacgtgt

SEQ ID NO: 412788 - DNA, 201 bp, Homo sapiens
acagattctactgtatcctgagctgactcatggtgctgtcatgccaggaggggtgatgatgggtggggtgaagatggccctccccctgcactgattccagmcttacaagtccttaaaacacagctcactttccttttcctcccccaaatcttatttcagcccactcttctttctgtctcctctgcattctgaagacaccca

SEQ ID NO: 412789 - DNA, 201 bp, Homo sapiens
gtatagaaaatctcatatcctgaagtacatctttgtaatgtcccgaggcagggtttttattctggagttagagggtccataaacttgggtgagaaaaaaamccctctttttaaaaaaaaaaaaaatacaaaaaccaaaaaaaacccaaactaaactttggctgaaagtttgcatttcctttgataggaaagtgggcaagca

SEQ ID NO: 412790 - DNA, 201 bp, Homo sapiens
aggagcccagagaggagaagagggcatagaagggttcttcggtgaccccgcactccttgtcatcgttgggtgccggctccttccacccaaggagaggcccratggagatgacggtggacaagacccagacactgagcagcgccaagatggccttcctccgggtgaccagcgtgggatactgcagagagtagcgcaccccga

SEQ ID NO: 412791 - DNA, 201 bp, Homo sapiens
cagattttccttccctggttctatttccagaagctagtgccttagcgtgttctactaacacctgagttggtttttagccagctccccaatctgcaaaccckttgcagaacaaacaatattattcaatctccgaacacgcacagactgcataagaaacaaaacccacaaaaaactttagagtaagctcatcagtaaacccaa

SEQ ID NO: 412792 - DNA, 201 bp, Homo sapiens
aaatgaaaagactcagtttcatcgatatgataagaagtcagtcaggatgacttgctgatcagtgaaaaaagcactgggtgatccaacttgtgttaatacaygcaacaacacacacagaaaattctgcaaagttgcataggcaaatactaaaacatggttatatcgatggtgctatggtctgaatgtttgtgtctcccaaaa

SEQ ID NO: 412793 - DNA, 201 bp, Homo sapiens; identical to SEQ ID NO: 33474

SEQ ID NO: 412794 - DNA, 201 bp, Homo sapiens; identical to SEQ ID NO: 33475

SEQ ID NO: 412795 - DNA, 201 bp, Homo sapiens; identical to SEQ ID NO: 33473

SEQ ID NO: 412796 - DNA, 201 bp, Homo sapiens
ttccgacctcaggtgatccacctgccttggcctcccaaagtgctgggattacagatgtgagccaccacatccagctcttgacattgtcactttcaaagaamgttcctataaaagtgattccatattcacatgttttgaggacataggagctggaagggcaggaaatagcatcccccctgtgtaactgcaacagggcaagtg

SEQ ID NO: 412797 - DNA, 201 bp, Homo sapiens
ggggttggaacacatctgtcacatagaaagatctagtaagagaaaacatttctcatttggggccaggcagtgtggagtcttgttcgggctctccctcacamtagctatgtgacctaagaaagaaatcttttagagtgtcattttcctcctctttcgggtggagattattgtacctgttcagcctgtcacatgaaaaccgta

SEQ ID NO: 412798 - DNA, 201 bp, Homo sapiens
aaaaacaagccaaaagatgctgtgcgtattgggtccttgttatgtgccgccaacttttttagctcctgtttcatttaatcctgacaacagctccctgagcrgggtgggattatccctattttacagatgaagaaatgggtagacggcagcaccagtgcgaggtccctcacaggtgagagacaggtttaaaatgaaatgaga

SEQ ID NO: 412799 - DNA, 201 bp, Homo sapiens
atcgtttcccctgggcagccaaacagacctgtcactggagaagagtgtggtgggtgaagctgctgggtgaggggagtaaatacaacaggaagtgtgggttyctggaaggcctggacactctgtgctggaagtcagggctgcgctgggctctttaacaatgccactaaccccctgtgcatgttcccgagcctggccctgagc

SEQ ID NO: 412800 - DNA, 201 bp, Homo sapiens
gtatgtgacattaccaataataagttgtgaagctgaaaaaagtcttctaaagcatcaataatacaagagaaattttgacttatcttcctagaggaacgacscaattatttttatcttctttatggtctcaccaggatatggtgcctcttggttgctgaatgacgggcagccacatgctttttctttcctccttctagaata

SEQ ID NO: 412801 - DNA, 201 bp, Homo sapiens
aataaatagactattttggaaagcatacacaatctggtaacaatgtttacttcaggagaaaaaatactgagagtgttgggtgtgaatgtggggtaggtaasagcagaataattttttcattttttttttctgattcaaataagaatctatgcatcattaaaaaataaactagttgatttttaaaaattgctacaagtaatc

SEQ ID NO: 412802 - DNA, 201 bp, Homo sapiens
gtgaaagcagaaggcaggaatgaacagcctgagaagacccgctaagatccagatgacttacacacccgacctattaatgttttcatcttcacaataggcaygagggtgcctcgtgtaacgccttgggttccgtaactcccaatttacaaatgtggaaatggaagctgtgagtgtatggaactcacccaatatgacacagat

SEQ ID NO: 412803 - DNA, 201 bp, Homo sapiens
aattggtcaatacaagatacttcaacagaatggattctggatggagttttgatagttgctggtgtgtagaggaggatgaaagaaaaccaagagttaattcrtttctgctgtgcaacagtcactgggctagatatgttcacatatattatctcatttaattcttttaacaaccttgatatgaatgtattattatcactgata

SEQ ID NO: 412804 - DNA, 201 bp, Homo sapiens
ccaaattagctgcaaggatttgaagctttcaagacatcttatcacctcaggaggaagtcaacgtagatgcctgaaacttcttgtgcctcaggcagtgagamgctatcagcataaaaactggcttcttcatcaatgttgaaacagactttgtggatgtgcaaattgctacacccttcccagagagtaatttgacaatataca

SEQ ID NO: 412805 - DNA, 201 bp, Homo sapiens
ggctcactgcaacttctacctcccaggttcaagtgattctcctgcttcagcttcccgagtagctgggactatagtgcatgtcatcacgcatggctaatttytgtattttttgatagagacaggatttcatcatgttgaccagactggtcttgaactcctaacctcgcctcggcctcccaaagcgctgactttacatattct

SEQ ID NO: 412806 - DNA, 201 bp, Homo sapiens
gaaatctgggtgagtatacaccaaactgttcatagctgttatctctggaatgtgtttatgtgaacattttcactttgtatttaaaattctttttgcaatgracatttttgttgtttgtttactttgaaacgggtctcctcctgtcatccaggctggtgtgcagtgatgtgatcatagcttgctgcagcctcaaactcctgg

SEQ ID NO: 412807 - DNA, 201 bp, Homo sapiens
cggccatggccaggttgacaatgaagtagttggtgggcgtccgcaggtgccggttgcaggccacagacaagatgactaggatgttgcccacgatggcaaaraggatgaaggcgcccagcaccaggcccacagagatggccctggtgatgtccagctggggcagtgtggagttgctcgaggtctggttggggccagtgaagt

SEQ ID NO: 412808 - DNA, 201 bp, Homo sapiens
ccagagggatgtagaaggagcccagagaggagaagagggcatagaagggttcttcggtgaccccgcactccttgtcatcgttgggtgccggctccttccayccaaggagaggcccgatggagatgacggtggacaagacccagacactgagcagcgccaagatggccttcctccgggtgaccagcgtgggatactgcagag

SEQ ID NO: 412809 - DNA, 201 bp, Homo sapiens
atcactccatggttggaagactttgaggataagggcccctggttgaaatgcagatgtcattttggaggcaaatgcagaaaaccattattatgaattaacayctgaggattagctcatcatattagctaattggtcaatacaagatacttcaacagaatggattctggatggagttttgatagttgctggtgtgtagaggag

SEQ ID NO: 412810 - DNA, 201 bp, Homo sapiens
cgctaatgatttgatattggagtgatatgtggggtggagaaaggctaggaaatctctccccagtggtcttccatattccctaacgtttccatcattaatcmctccatggttggaagactttgaggataagggcccctggttgaaatgcagatgtcattttggaggcaaatgcagaaaaccattattatgaattaacacctg

SEQ ID NO: 412811 - DNA, 201 bp, Homo sapiens
ttaaatgctggcaaatgacccattagtctttgatttcacttctttttttgcattgttcacatctatcctgagattcagatgcctgtagttcatttttcctytttgaagccaggtgcagccttgaaggcatattttctgttctagtctcattacccattctctgggattccccatccacttacgctaatgatttgatattgg

SEQ ID NO: 412812 - DNA, 201 bp, Homo sapiens
gggcatgatagagccaggtgtgttcagggaagggagactgctcctgtgtggctggaggagcaacagcaggggccacgtgtgattgcctgccttactggctrttaattctcttatcaccccaacgaggtaagtaaaatgtcatctctgtcttacaggcagaaaaaatgagagctgagagaacttaagtaacttgcctgaggt

SEQ ID NO: 412813 - DNA, 201 bp, Homo sapiens
ttttccaccctcacagttcctcttcacagctctgatcagatttcattcacttactgagttgtccctgtgccaggcccatgctaggtgagacccagtctccygggagagatggacatcaagaagcccagtgtgacaaggctctgatgggcatggagtgaggacagagatcgcacaagagagacagtagccactgcctgggga

SEQ ID NO: 412814 - DNA, 201 bp, Homo sapiens
gattgcaggcatatgtggtccgcagtatagcagctgttacctctcctgatatcatggcacatgactgtgtcatgataaactccctccattcattttctgtrgtgtcccccagggataggagaaggaatcaaagcagatcagtgcctcagaggaaggacaagggatccccaggccatgtggacagcatgtgacagatgcccc

SEQ ID NO: 412815 - DNA, 201 bp, Homo sapiens
gaaagaatcagaatattgttggccttccttacattttttttagggttctatgcatacgtgtgtgtgtgtgtgtgtgtgtgtgtgtgtgtgtgtgtgtgtgyatgttttaatttataattttattattcccttttcaataccttaggcctttagaggtctctatctggctctgctataaagtcactggaatagtttcctctt

SEQ ID NO: 412816 - DNA, 201 bp, Homo sapiens
aggagggataaatcgaggaacagatgttgccgtgagcccacccacatcacttagtctttgagtgcccaagggcgatttagagggactgagaagtgcaaggrtcaaaggctcacattgagcaggatatacacagggaaaaacatttcttggctggacatggccccagcaggtcatccttaagctgacattcaacaaatctga

SEQ ID NO: 412817 - DNA, 201 bp, Homo sapiens
ggcatgagtcactgctcccagcatgggccaaagcaatttctaagtgttccggggctggtaatcacagagcgggagatatattaaatatatataatatatayattattaaatatatataataaatattataaaatatatatattatatatatgttaaattagattgaaaatgactaagaacaacaatcttcttttttggcca

SEQ ID NO: 412818 - DNA, 201 bp, Homo sapiens
gtgctatctctagatgtcatttcaatcttgcacaccacccaaatccatagtgaatttctcctgctatgtaggtgcagccctgggaaaccacatgtgggaarcatttctattattttattcttttttttccggggtggggtggtgaggggaggagggataaatcgaggaacagatgttgccgtgagcccacccacatcactt

SEQ ID NO: 412819 - DNA, 201 bp, Homo sapiens
ctcaagggatcctccccactcagcctccctagtagctgggactacaggcctgtgctaccacatgaggctaatttttattttttatttgtagagatggggggtctccctatgttgcccagattggtctcgaactcctgggctcaagtgatcctcctgcttcagcctctcaaattgctgggattacaggcatgagtcactgct

SEQ ID NO: 412820 - DNA, 201 bp, Homo sapiens
gtgctggctgcataagagtcgcctgggaaacttgttaaaattaagattcttggcactacaaggagagaatctgatgcaagaggtctacaatggggtccaargatctattcttttaaaaacagccccctcctccagatgtttctgatgagcagctagatttgctgttgctcacagcccctggcttttgggttggacattctg

SEQ ID NO: 412821 - DNA, 201 bp, Homo sapiens
tagctccagactgtggtgtgaatgaggcctgctccctctttctcgaaaagggagattagcagtggttgagaggtgctgaagacattttggccctaaactgmgaggcactgctctctgaggaacctaaaggattgaaagagaagtgaacagggaaccactttgtctctggagagcccaggccctggcacacgtagtaggtgc

SEQ ID NO: 412822 - DNA, 201 bp, Homo sapiens
aatctgctcaagcagccagctccttgcttcttgagtggtgctcaattgagttttcaattcgtgagtctggcatcttccagggccaatccgaattttgcaamtaaaatgtggtgcatttgccatgccctgatctaaatatacgctgtctactgcattccctcaatccacacaggcccccacggtggggtaggggtgagcttg

SEQ ID NO: 412823 - DNA, 201 bp, Homo sapiens
cttcaagtccctattccttctagtacagcaactcaagcaggagtcttgaagagctaacaagggtgtctcagagaagagaaggtgccagccgtcttcctcargacgagggggtgggaaggcggtgacagaggcaggtgacaggaagggctttcctggtcagattctgggaatcacttggtgagcccaggcttctggcttagt

SEQ ID NO: 412824 - DNA, 201 bp, Homo sapiens
aacctgggagttggagcttgcagtgagccaagatcgcgccactgcactctagcctgggtgacagagcgagactctgtctcaaaaaaaaaaaaaaaaaaaaagaaacccagtacccattagcagtcatctcatttccccttctcctcagtctctgcgaacactcatctactttctctctctgtgcatttgcctattttggac

SEQ ID NO: 412825 - DNA, 201 bp, Homo sapiens
aagaggggagggagagaatgcagcctctgcaaagctcttgagaagcgtggcttctgctctagccctggaaatgctgaatgaatgctgcctttctgtgtacragctgcctccctgcttcccaaatgccgcgtctgcagtaactacaaactattttgtatgctgcattagtgacgctgccttagccgacacatcattactact

SEQ ID NO: 412826 - DNA, 201 bp, Homo sapiens
caacctgggagttggagcttgcagtgagccaagatcgcgccactgcactctagcctgggtgacagagcgagactctgtctcaaaaaaaaaaaaaaaaaaaaagaaacccagtacccattagcagtcatctcatttccccttctcctcagtctctgcgaacactcatctactttctctctctgtgcatttgcctattttgga

SEQ ID NO: 412827 - DNA, 201 bp, Homo sapiens
gggggtcccgtttgctgcactggcctgccttggtggaaaccaagaagctgtcgttaagtaacaagatgctaagcctgttaggcatgtaagaggatgtgtgrcagggatcgtttcccctgggcagccaaacagacctgtcactggagaagagtgtggtgggtgaagctgctgggtgaggggagtaaatacaacaggaagtgt

SEQ ID NO: 412828 - DNA, 201 bp, Homo sapiens
agaatgatgtcaacctgggagttggagcttgcagtgagccaagatcgcgccactgcactctagcctgggtgacagagcgagactctgtctcaaaaaaaaaraaaaaaaaaaagaaacccagtacccattagcagtcatctcatttccccttctcctcagtctctgcgaacactcatctactttctctctctgtgcatttgc

SEQ ID NO: 412829 - DNA, 201 bp, Homo sapiens
cctgctggggcgtgcctgcttccctagactttcaccacagcggggcagtgtgggtcagggactggaccgccaggctgccacagatgccacaaatttttcgrccccctccttcctccttcttcctctgccagcacagtagctgctgggattaggggggtcccgtttgctgcactggcctgccttggtggaaaccaagaagct

SEQ ID NO: 412830 - DNA, 201 bp, Homo sapiens
gaaccaagaagaataaaactggggagtgagaatgtgtgtgtgtgtgtgtttgtgtgtgtgtgtgtgtgtgtgtgtgtgagagagacagagagagagagagaatgagagccaattgtggtagtcagtcagtcacccaggtaacaatatactgattggaaggaaatcatcacaaaattttaattacaaaatgagaaaatgttt

SEQ ID NO: 412831 - DNA, 201 bp, Homo sapiens
ttggagaggttaaatgacttgccccaggtcacacagcatgcttgtaatatatctgggatttagactaaattctatttgaataaaaatgtgttttttttttwaaaaaatgcaattaataatactctgtgtaaagatgagaaaatataaaaatgcaaaaagagaaactattttaaaagcacatataaaactctgcagtgccaa

SEQ ID NO: 412832 - DNA, 201 bp, Homo sapiens
caaaggcgtaaatgggacctaggggagccagcactaattgtcctcaagacgtggtgagagcggctcttctggggtggagactggagggcaggggaatggaragcgaaggaccctaagacctaggaccgggtcaaatccgaagcggaaggaagaggaaacgcaaggctctgcctgccgctcgtccacaaaccactcaaagcc

SEQ ID NO: 412833 - DNA, 201 bp, Homo sapiens
ggccccaaggatccatatcttatccagaaacgtctgcagtttggatgtcttttcgagttctgtgggcacaggcaaacaatcagtggagtgctggcctgggratgcaaaggtgaggggaagggaaccagcccctctctctgcctgagcttcatcatctctcaggaaacaggcccatttaggggactggccggggaaccccag

SEQ ID NO: 412834 - DNA, 201 bp, Homo sapiens
tgggtcctcctagagcctggctacaaggaagtgacttggaaaggccagcaaaatgtagactctggctagggccagatctggaccctagcaccctctagggkatgtaagccactacttggccagtcttccttctggaaagaaacaggaggctgctaccgcctctctatgctgcctgggtgacctccaaacaccagtaatgaa

SEQ ID NO: 412835 - DNA, 201 bp, Homo sapiens
gaaaaaggtcatgtcctttgcagtgacatggatggagctggaggtcattatccttagcaaactaatgcaggaacagaaaaccaaataccatgtgttctcastgtaagtgggagctgaatgatgtgaatgcatggacacatggggaggaacaacacacactggttggaaggtgaggagggtggtagtagggagagcaaccgg

SEQ ID NO: 412836 - DNA, 201 bp, Homo sapiens
gtgttgtttccacttggggttactgcaaatataactgctatgagcattcttgtacctgtctttaggtgaacatatgtattcaattcttttgcagatatatmtaggattgagattgctggatcaaggtgtatatgtatatttgggtttctaaaaagctttctttgggtaatttttttttacctattataaaatcactgattt

SEQ ID NO: 412837 - DNA, 201 bp, Homo sapiens
tcttgttatttctactggttttaaaagtaatttaatgaacagattcattcactgtacttatgcttgaggcttttattttaagcaaagggtatgatttaaawtttttttcaaaatgactttggttctccagagagtctcttacagggtgggagctgagctgatgtgcaacagaccttcctgaggctgggccgcaagccaagg

SEQ ID NO: 412838 - DNA, 201 bp, Homo sapiens
gacatgcaacagaggtgtggctcatctgttcagtcgctgccgctgctcaaaccccttacgggaagcggagcatgcaggtgaacaggtggaggagcccaagwgggcatgtgttacagtgtgcccttttagccctgccatccatggacagcttgagtgttaatcagctcagtggaccctctgcctttctgcaagggcagaggg

SEQ ID NO: 412839 - DNA, 201 bp, Homo sapiens
actatgtgttcaattttggaataagggtggtgtggtgctgaaaaaaatgtatattctgttgatttggggtggagagttctgtagatgtctattaggtccgyttggtgcagagctgagttcaattcctgggtatccttgttaacgttctgtctcgttgatctgtctaatgttgacagtggggtggcatccttctattcttta

SEQ ID NO: 412840 - DNA, 201 bp, Homo sapiens
agggccagtgtgacagctttctgtatcccgagctcttgtccagtgtcccggaagaatcgagtcacacacgaacttgaaggatgaatgcagggttttattgygtggtggaggtggctctcagtgggccggatggggagctggaaggggggatcgagtgggaagatgatcttcccctggagtttggctgtccagcagccaaac

SEQ ID NO: 412841 - DNA, 201 bp, Homo sapiens
ggaggctgaggcatgcagatcacgaggtcaggagatcaagaccatcctggctaacatggtgaaaccccatctctactaaaaaaaatacaaaaagttagccrggcgtggtggtgggtgcctgtagtcccagctacttgggaggctgaggcaggagaatggtgtgaactggggaggtggagcttgcagtgagctgagattgcg

SEQ ID NO: 412842 - DNA, 201 bp, Homo sapiens
catatgatgtttgtctttttgtgcctggcttattttccttaacgtaatgatctccagttccatccaggttgcagctaatgacagaatctcattctgaatcrtactccattgtgtataagtactacattttctttatccattcatctgttgatggatacttaagttgcttccaggatcttggctattgtgaacagtgctgca

SEQ ID NO: 412843 - DNA, 201 bp, Homo sapiens
ttatcacttgatttgcagaactgttctcaccactattcgccttcctataatcatgcaacttccccgcctccccccaccgacttctctgacccaagattaarggaggacaagcaagtcttagtccagctctgtttataatgggtctttcatcccgcagtgtagaatgctagactgtccagtagggatggcagaataaagact

SEQ ID NO: 412844 - DNA, 201 bp, Homo sapiens
ctatagaaggtaatttgtggaaaacagtgttggtttgaaattatatttcccaaattaaccaaaggaaaatataggattgtaaaatgtccatgttggcaggraccttaaatagtatttagttcattatttctcgtataacttcatatccgagtcacctgaggatctcgtttatcctgtcacaggacctaccttatacctaaa

SEQ ID NO: 412845 - DNA, 201 bp, Homo sapiens
tgtgtactactaacgcaagtctgaatatggatgcctttgtgtgaaataaaattcagccatatattttttaaatgtgtctggtaattgaactaaggtagacrcttggtgttagcttacatcgtgggtagagaaacatatccttcctgttctggaagcatgatagaaattgtatttttaggctaacatttcacatatgacttt

SEQ ID NO: 412846 - DNA, 201 bp, Homo sapiens
atgtattattattaataaatgcctattatagtcaattttaataatatataaaagtataagttacttatgataggaagatattcctgcacagaaatagtatsttggacatacttttatattatcctttaagtctttttctctacatatatctgttttctttgtatgcaatgtagttcatattaaatatataatattatcttt

SEQ ID NO: 412847 - DNA, 201 bp, Homo sapiens
tctccaactcctgacttcaagcgatccttctgcctcggtctcccaaagtggtgggattacaggcatgagccaccatacctggccagcagttgcttttgaaygtcctcattgtccaaggaaaccattcatctgccccccatcagctttttctcccatgtcttagccagtgtattgtttgtttcaactataataatatggccc

SEQ ID NO: 412848 - DNA, 201 bp, Homo sapiens
agtgagtcacttaagtttttggtctactagcattataaactgccagctgtccgattcatagtaaataccatcattaatgatgtgtactactaacgcaagtytgaatatggatgcctttgtgtgaaataaaattcagccatatattttttaaatgtgtctggtaattgaactaaggtagacacttggtgttagcttacatcg

SEQ ID NO: 412849 - DNA, 201 bp, Homo sapiens
tttcattcagccttaaaaaagaaagagatgtgccatttgcgacaacatggatgaacatcataatgatattagcccaaaagagaaagaaaaatactgcatgrtctcatttatatgtggaatttaaacaacaaaaaaaaattcagtggtttttgtgtaaattagtacaatagaagatccaaggtagagtactttaaattagca

SEQ ID NO: 412850 - DNA, 201 bp, Homo sapiens
ggttgcttgccttgtctccattttccttggtctgagagcaaatactcaggctcagtaagtccatgcatatgataggtttgaaaatgcaggatggaggaggrtgatgaaactagggagagaaagaagaaatcggaaaagagagccaaaaataaccaacaagcttaagctttcctagaacatggtctaacaggttagctttgt

SEQ ID NO: 412851 - DNA, 201 bp, Homo sapiens
gtgccatttgcgacaacatggatgaacatcataatgatattagcccaaaagagaaagaaaaatactgcatggtctcatttatatgtggaatttaaacaacaaaaaaaaattcagtggtttttgtgtaaattagtacaatagaagatccaaggtagagtactttaaattagcaagatatttctaactgtgcattttaagaac

SEQ ID NO: 412852 - DNA, 201 bp, Homo sapiens
ttttgagatggagtcttgctctgtcgcccaggctggagtgcagtgacacgatcttggctcactgcaacctccacctcctgggttcaagcggttctcctgcytcagcctcctgagtagctgggactatatgcatgtgccaccatgcccagctaatttttgtatttttagtagagacagggattcaccattttgcttaggctg

SEQ ID NO: 412853 - DNA, 201 bp, Homo sapiens
cattttttaatggttgccttagagcttgcaatatgcatttgtggttagtttatgtccacttttcaaattccagtaacgtagttatgggttgtacaggatcmacagactatttccaatttctccatttagtcccttataatggtactatcattctttttacttatttgtaagatacaatcaccaaatgtatcattacaatta

SEQ ID NO: 412854 - DNA, 201 bp, Homo sapiens
agcactgagttcaatgcatcacaattgctgtgttctccctcctccagcagccagagatgttctctgaaacatgctgctgctgccaggagttggcagggtgktggtgtctgcaattctggactgttttatctatctcctcagtgtcctttcggcgatatgaagttacaaccaggtactttgtactatgagtgcttacatgat

SEQ ID NO: 412855 - DNA, 201 bp, Homo sapiens
ccaaacaatccttgcaactctaaaaattgtatttttatggcaccttatgacttcattgttatttatcaaacttcaggtaatagctgattcaaaaagacttsaactataacttaaatattttgtgatttatgaaacttcttaaaacaacttaaagtttatatcttgtggccaaggtactatagacctagttgggaagggcct

SEQ ID NO: 412856 - DNA, 201 bp, Homo sapiens
ccactgaaggcatattttgctaaactgcttctccaagtattttgttttggaaaatctatcacagtagggcacagctgtttactggatgagcagaaaaaggragatatgcttgtggcaaccaaaaagttttaaggtctttcaagttgtataaaatggacctacagaaacgtttaagtgttctcaggatgcaaaattgaagct

SEQ ID NO: 412857 - DNA, 201 bp, Homo sapiens
cgggaggctgaggcacgagaatcgcttgaacctgggaggcggaggttgcagtgagccgagattgcaccactgcactccagcctaggccacagagcaaaacrccctctcaataaataaataaataaataaataaataaataaataaataaataaaagtgttctttgtttaatttaatgctttttggcttgaaatctattttg

SEQ ID NO: 412858 - DNA, 201 bp, Homo sapiens
gggactattcagggtggctaacatgttttagaggataataaccattttgaaatgtcaaattgcatttgggcaaaaatggtatatgtgtgtgatgtgctacrtatcatgtcttaatccaggtaatggaaataaaaaccaagaaaatacaactgtaataatattggagctaaatgaactgtcagcagtatggaaaaaagttag

SEQ ID NO: 412859 - DNA, 201 bp, Homo sapiens
gctcgttggaggtttggactatttctattcatctctggatccccagtacctggcacaatgccaggtacaagtaaatgctcagccaatgtttttttttttctttttttttttattattattatactttaagttttagggtacatgtgcacaatgtgcaggttagttacatatgtatacttgtgccatgctggtgtgctgcac

SEQ ID NO: 412860 - DNA, 201 bp, Homo sapiens
tggaggtttggactatttctattcatctctggatccccagtacctggcacaatgccaggtacaagtaaatgctcagccaatgtttttttttttcttttttyttttattattattatactttaagttttagggtacatgtgcacaatgtgcaggttagttacatatgtatacttgtgccatgctggtgtgctgcacccatta

SEQ ID NO: 412861 - DNA, 201 bp, Homo sapiens
taatttttattgtatttcagtgcctatttatctctctgtctcttttcatctcattgattatctctctctctgtgtgtgtctctgggtgtctttctccgaatctctctgtgtgtgtgtgtgtgtgtgtgtgtgtgtgcatgtgtgcatgtgtgtgtgtttgtgcatatatatgtgagaattttgctcaatccagttgcccag

SEQ ID NO: 412862 - DNA, 201 bp, Homo sapiens
aatttttattgtatttcagtgcctatttatctctctgtctcttttcatctcattgattatctctctctctgtgtgtgtctctgggtgtctttctccgaatctctctgtgtgtgtgtgtgtgtgtgtgtgtgtgtgcatgtgtgcatgtgtgtgtgtttgtgcatatatatgtgagaattttgctcaatccagttgcccaga

SEQ ID NO: 412863 - DNA, 201 bp, Homo sapiens
taacccttcagtggaggaagtaactgtagatgtggtagaaatagcaagagaactagaattagaagtggagcctgaagacgtgactgaattgctgccatatsaggataaaagttcaatggatgagaagttactttttatggatgagcaaagaaaatggtttcttgaggtggaatctactcctggtgaagatgctgtgaacat

SEQ ID NO: 412864 - DNA, 201 bp, Homo sapiens
atgcatgcatagcaaatcattgggctttgggatcaaagcactgtccggctgataatctagtttccatcaaatagtgatgtgttttgaggagggctgggtgttttttttttttcatttcttttgttaattaattgtaataaaagcctctaaaggatttttctggagactgtctaccaaatcttctgaacagggaaaatttta

SEQ ID NO: 412865 - DNA, 201 bp, Homo sapiens
ctggataactttattttaccacaatgggagactctctagtgtattcctacagtgtcatatgccagtagacctcatgaagggacctcattccaagctcccakctcctaagtaatgtccctttgcctgctgataaaattccaactaccacatatagtcaattcttgttattcatggtagttatgctctgtaaagtcaatgtaa

SEQ ID NO: 412866 - DNA, 201 bp, Homo sapiens
ttttaaaggctttttttgacctggtgcaatggcccacaactgtaatcccaacacttggtaggccaaggtaggcagactgcttaagtccaggagtttgagaycagcctgggcaacaagtgagaccctgtctctataaaaaatttaaaaattacccaagtgtggtggcatgtgcctgtagtcccatctacttgggaggctgag

SEQ ID NO: 412867 - DNA, 201 bp, Homo sapiens
gcaagttggagccctgcccagaggtggacgtggggaagttggtgtctaggctgcaggatggagggaccaagatcaccccaaaggccaccaatggacccatrccaggctctgggcccaccaagaccccctctttccacataaagagaccagctccccggcccctggcccaccacaaggagggtaagtgcttgggaatcccat

SEQ ID NO: 412868 - DNA, 201 bp, Homo sapiens
agtgcaaggtgattataacttaaactaatggaaaataaaaataccatccctctgaaaggtgactatattgccaacttttctgtttgtcctttatttttatrttggtagcttcagtccccaatgttgtttgaatatttgctaagccctgaggctaggcattattcagaacaagtgatgtggcccctgctcatatcacaaagc

SEQ ID NO: 412869 - DNA, 201 bp, Homo sapiens
atgagaatcgcttgatcccgggaggcagaggttgcagtgagccgagatgatgcactgcattccagcgtggggacagagagagactctgcctcccccaaccmaaaaaaaaaaaaaaaaattcatttgaaattagagaaaacttccctgccaacattggtccttaagagtgtgattaggagctctcagaagtcacgggtttta

SEQ ID NO: 412870 - DNA, 201 bp, Homo sapiens
actgcaacctccgcctccggggttcaagtgattctcatgcctcaacctctcaagtagctgggactacaggcgcatgccaccatgcccatgctaagttttgwaatttttttttttttttttttttttagtagagatggggtttcaccatgctgtccaggctggtctcgaactctcgacctcaagtgatctgcctgcctcagc

SEQ ID NO: 412871 - DNA, 201 bp, Homo sapiens
gaaggagccccaactataagcatggagctaaatgttttgaaacatctgggctgaatcacttctccatttttcaaatggcctctttagcactggcctagaaktgtcccccattcccccaatttacctttccagtcctgatttctagaatcttagtgaaacgtctttctttatccacagttctcaaggcagacttcctggaga

SEQ ID NO: 412872 - DNA, 201 bp, Homo sapiens
atcaaaatgccctttgtaacttaatttttattcttttttatgagagaggtgcatgtttttcaagtacatttatctgttaacaaaaatagttggagttcgcraaagcctattatttaggcaaagtcttcctttgcaaagattcagactaaagtactagcaggttttaaataatacatgatttattatattttcttgtttttg

SEQ ID NO: 412873 - DNA, 201 bp, Homo sapiens
ccattccgattgaatttcagccctagcgaccttgattcttggaattctaggttactgcatcctagccaatttgttagaatatactggtgtggatcacaaayatttagtatatcagactgttcttgctcttccactttcacatctttcctgtttttgaggctgactgctgttcaaacccacccttccacacaccaacacctt

SEQ ID NO: 412874 - DNA, 201 bp, Homo sapiens
tacactaaaatatattctaaaattcaaaatcattgaccaaaaataaaagcatttgtttggccatgtcaccctgattgttttcattcgttgctttcttaggycaggtctcttgataaatactctgtgaacaagttaaggagtcttcgtcttccagatagcatcctaacccaggctgtcatctggttaacatgtaaaatgtcc

SEQ ID NO: 412875 - DNA, 201 bp, Homo sapiens
acaatgggagactctctagtgtattcctacagtgtcatatgccagtagacctcatgaagggacctcattccaagctcccagctcctaagtaatgtcccttygcctgctgataaaattccaactaccacatatagtcaattcttgttattcatggtagttatgctctgtaaagtcaatgtaaacatttagttagtgaatact

SEQ ID NO: 412876 - DNA, 201 bp, Homo sapiens
gagacttagggaatggatatgacacacccaagatatctgaaactccagagctggggttcaaatatagactttctgaagggacagttgccagaaaaattacaaaaaaaaaaaaaaaatagccagagttgttagtcaccaagaagaaatggaggccaaggaagttggcccaggtaactctcatattgggtgcctgctcatgag

SEQ ID NO: 412877 - DNA, 201 bp, Homo sapiens
cttagctgagttcagcctgattttgctttcttccatgtgacagggtagcacggagttcaatgcagtgtctcacaattgctgcactctctctttctgaagtrcacacattccagtgtctctttttttggagaaatgtttgctcatattttcttacccattttttacttgggttatttgttttcttgttatttagttgtttga

SEQ ID NO: 412878 - DNA, 201 bp, Homo sapiens
tctgagcctcagtttcccagtttctaaaatgagaaggttggaaccttctaactctgacacctctcgggcctttaaggaaaccaggaacatgctttctgatrttataacagatgccaagaggctaccttagtgtctgtagatggattcattcctgcagaccaaatcattatttcagtcttacccacctgaaccttcattctt

SEQ ID NO: 412879 - DNA, 201 bp, Homo sapiens
ctgcctgacccttaaatttagtgactttcaattccaaggttttgtgtgattttaagtaaccttcctctttcatttctttttctcctagccaaactatggcrcgcttttacagattgcctttgaatcaaatttattaagaatcctaggctgtgacattttgggaaagtacatttacttctctgagcctcagtttcccagttt

SEQ ID NO: 412880 - DNA, 201 bp, Homo sapiens
gatttctaataatctcaatatccagaataaagctgggagtctagaggcttgcctttccaaaaacggtctctaatagcttaagtggttttcgctgtgcactrttccgtgggagagaatgttgtcctgattttattggctcttcatttaaattctgatgtggtttctaccccttagaaatttagaagcagaatctagggattt

SEQ ID NO: 412881 - DNA, 201 bp, Homo sapiens
tctgagacttttgctcttgttgatgttttcttcagtggctgccttatgttaaacatgcccctacccatttgctgcactggtcttgttccagcttcttcaayatgctacgtaggctctttcatctcctataccttgctcacgtggtttctctcaaattccaattttttttttttcctttttgtacctagcaaactcctacat

SEQ ID NO: 412882 - DNA, 201 bp, Homo sapiens
gccatgttaaacagctaacccatcaacaagaagtagaaaaatgtgacaaatgtggcactaaatagaccaggaaaaggacaattgttttatagtatgagagmtgaaacaagaaggcagtatcccccttttcaagctcagaatgtatatattggtgactcacatttttcatagctatttgcatgtccatgaatgagtgggcaa

SEQ ID NO: 412883 - DNA, 201 bp, Homo sapiens
tttttttttacctcttccttcagagattctgattcatcagaactaagatgataatctgcattttaaacaagcaatccaagtgattctgatttaggttgccraaagatttttttctttaagaaacaatgctttaggcaaggatgttattaatctttctttaagaaatttctgataaagtagggaaatgcatatctttcccct

SEQ ID NO: 412884 - DNA, 201 bp, Homo sapiens
tgtatacagatatgtatacatgtgtatatgtatacagatatacatatgtacatatatatacctgtacatacatatacacacatatacacacacacacacayatatatacacacatatatatccaacaatttgattgctggattatatggtaactcaattttgagattttttgtggaacctccaagttgttatctatggtgg

SEQ ID NO: 412885 - DNA, 201 bp, Homo sapiens
gttacttcctgtcttttacataaaagccattttaatgagataagatgatatctccttgtagttttgatttgcgtttatatgatgatcagtgacattaagcrccttttcatatacccatttgtcttcttttgagaaatgtctgttcattattagactttttttctacacagtagtttgagctccttatataccctgactatt

SEQ ID NO: 412886 - DNA, 201 bp, Homo sapiens
gaggtaaataattgtgataaaaactatatggcgggcaaaatctaaagtgtatatgtggccctttacagaaaaagtttgccaacctctggcctctaggcagstgtctgaatcctgaagccactgttacactgtgtgctgtttactgacattttttcccttaggtggtgtcatagtcctgcatttttggcttcttaatctagt

SEQ ID NO: 412887 - DNA, 201 bp, Homo sapiens; identical to SEQ ID NO: 16144

SEQ ID NO: 412888 - DNA, 201 bp, Homo sapiens
aattgctaacatttgccaagtacctcctttgtgacaggcactgttatcagccatttaagcgtataatttcctttagtcgtcaccacagtcacatgagggargtgatgttatttgaattttggtttgtgaatctgtatcatttttgtgttaacaatggatgaccccattcaagatggctgtggaagtatatattgttgccag

SEQ ID NO: 412889 - DNA, 201 bp, Homo sapiens
aacagcctgactgtggagctcacacaggatttcctcccatacaaacaacagctccaactcagtttacagaatgtgagtttgcatgtggatttttctcaccrgtctttccattccgattgaatttcagccctagcgaccttgattcttggaattctaggttactgcatcctagccaatttgttagaatatactggtgtggat

SEQ ID NO: 412890 - DNA, 201 bp, Homo sapiens
ggtacaataattaatcatggagaagcaggttttatgggaaagatgctgagctcaattttggacacagtgattttgaagacacagttgttaaatttatacamattttttaaagacactttgagacttaggtagagatagatgttcagtgggtaactgcaacttaggctagcagttggagctggatgtatgtatacatagatt

SEQ ID NO: 412891 - DNA, 201 bp, Homo sapiens
ttctctcatctctaatgaaaatgatgatctttttaaactttgtcttgcccctttttggtccccatttgtatacctgactacggcctagcgtttgaatgacrtcacccccttattcatttcccttacacaatttaaacataaataactaagaagaaaatgagtagtggctcatcaagaacataaaggaggtgagaacatttc

SEQ ID NO: 412892 - DNA, 201 bp, Homo sapiens
gcccttcagcaaaggcttggagatatttgttcaaaccatttaaagaaatctctgtccaatcacttgttgaccagtaagcttactgaccagagactttagtggtttcatatgacaaagaatgcagactatagaatgagtccatgaagccaatgtaacaacaagcaaccacaagaacaacaagctctggggaaagagaggagt

SEQ ID NO: 412893 - DNA, 201 bp, Homo sapiens
ggatagtatttgcgcccataggattgctataacaacaaagtgagtcctctacatgcctagcacatcaagagtactcagtaaatgatagcagttgttttgcyttcataggagactattactagctacttgatcttagttagttcagctttacttctttgagccagttttctcaactgtaagtggggacaataccaccattga

SEQ ID NO: 412894 - DNA, 201 bp, Homo sapiens
gtggttaaaagctcaggctcctgaatcttccagatgtgagtttgaatcctggctctgcctcttcctagctgtgggactttgggcaggttacaacctctctraaccttagttttctcatttgtataatgaggatagtatttgcgcccataggattgctataacaacaaagtgagtcctctacatgcctagcacatcaagagt

SEQ ID NO: 412895 - DNA, 201 bp, Homo sapiens
agaaggttgggtaactcaacttatactcgtcacagtaaaatttgtcttgtctgttgccaagccttgagactggccagattctatcagctcagcgcacacartaactcagccctccttccctccctcctgcaaagttcaatcccagtggcattcccctcttccccttcctccagtcctaccctgggctgctggcggcagcta

SEQ ID NO: 412896 - DNA, 201 bp, Homo sapiens
aagaaatggagacatagataagtgaagaaataaatgccttcagtggaataattgctagtgtggagactacacccattctaaatgtgcctctgccctcctaytccactaagaccatttttgtcaggtttgccaataatctccatgaggccaaaccaaatagctacaacattgttctcatcatactcagtttgtgagtagcat

SEQ ID NO: 412897 - DNA, 201 bp, Homo sapiens
attgtatgattttacattcccatcagcagtgaaagttccagttcctccatattcttttcaacatgtggtatggtcagtctaaaaaatttcaaccattctartaggtgttcagtggcatcgcatcatgtttttagcatgcatttccctattgacttaatgatgttgaactttttttatgtttgccatttgtatgttttcttt

SEQ ID NO: 412898 - DNA, 201 bp, Homo sapiens
tagtgaagttgatttttatgttcacaagctatttcattttcttttcctttgtatgtccttttcagtggctggtcgcttcaaaatcctcccctctccaggcyactcccacactaaactcttcacctaaggcaaccactaatcagttctgttagtataatttgtgtttcctaaagttttgtataaacggaataatgcagtata

SEQ ID NO: 412899 - DNA, 201 bp, Homo sapiens
tgtgatatcttgtttgaattgtagttttataattattagtgaagttgatttttatgttcacaagctatttcattttcttttcctttgtatgtccttttcartggctggtcgcttcaaaatcctcccctctccaggccactcccacactaaactcttcacctaaggcaaccactaatcagttctgttagtataatttgtgtt

SEQ ID NO: 412900 - DNA, 201 bp, Homo sapiens
cttaataggggttttaaaagtagggagatcagaggtcttgcctatttaaaatcatgattgctactaccagattgacccccaatatggataaaccaaatcaycctcccaataacagcttataaaggtgactgtttttacccacttctttgtcagtttaggacaatatcgatttttcttaatttatcagtctaataggcaaaa

SEQ ID NO: 412901 - DNA, 201 bp, Homo sapiens
actttaggagccaattcatcttcactctgggagaataggcaaagggaaaatccaagtagtatgtccagcatgagtagatgacttgctgacctacttgactrtcctctcattgaatgcttcttggtaggtctccacctgattcccttcagttctgttctgaatagttctatactgagggaccccaaagcttttaatcccttt

SEQ ID NO: 412902 - DNA, 201 bp, Homo sapiens
ccagcatgagtagatgacttgctgacctacttgactatcctctcattgaatgcttcttggtaggtctccacctgattcccttcagttctgttctgaatagytctatactgagggaccccaaagcttttaatccctttgggatgggtgtagtgccatggtgtgcgggaggagttggtgatataatatgcattcttgctcagc

SEQ ID NO: 412903 - DNA, 201 bp, Homo sapiens
taactagggtagcctccatccttttttcaggtagcaccttcctcttttacatatatatcatgagcctggcctgaaatagctagtaggtaccagtgtggctrtttctggtgtttacagccagcatctctgttgagtgatagaactttgtgccaatattagttattaagtatttggagatcttccacctccacagattataac

SEQ ID NO: 412904 - DNA, 201 bp, Homo sapiens
tgcccgcctcagtgtcccaaagtactgggattacaggcgtgagccaccacacccggctgcttgttcatatttttgaatggaatttgtgtgcattgtttcattttttgttcatttgattctaaggtgaggacagtatttcctacttttatgtagttgggagcagtaaatggaaatgtttgtggaaagctcctcataaaattt

SEQ ID NO: 412905 - DNA, 201 bp, Homo sapiens
aatgcaaactgccaggcctcatcatggacccaatgaattaatctcttgcattgggatccagagatctgcattttaaacatctgcccaagtgactctcatgsagtttggtacctgactgtagacttatttttgagatgcaaagtttaatgcataccctaccaaatcatgaccccagtgcacctcttaagtggtcatctctgt

SEQ ID NO: 412906 - DNA, 201 bp, Homo sapiens
gaaagacagggtcttgctctgtttacccagactggtcttgaactcctgggctcaagctatcctcccaccaccttggtctcccaaagctctgtgattacagrcatcagctaccacacccagtcttttgcttcttttttttttttttttttttttaagatggagtcttgctctgttccccaggctggagatcagtgggctcac

SEQ ID NO: 412907 - DNA, 201 bp, Homo sapiens
cttagactgttaatctttaatttctctatcttagtgatattgtcattttcctgattttttgttctgcatgttttcctttagctcttttagcatatttaagrcagtgtttttgaagtctttgtctactaaatctgatgtctggacttcctcaggaacagtttcagtcagtttattttgttctttgagtaggctgtactttcc

SEQ ID NO: 412908 - DNA, 201 bp, Homo sapiens
aaagatggactgcatgttcttcaggcaatcctctatgaatactgtcttgtcacaaagatgtatgtaagaattacagactatggccgggcacagtggctcakgcctgtaatcccagcactttgggaggccaaggctggtggatcccttgaggtcaggagttcaagaccattctggccaatatggtgaaaccctgcctctact

SEQ ID NO: 412909 - DNA, 201 bp, Homo sapiens
tttattttttcttcagtcacccctcccccatatacgtttctccccactttccgtttatttagcccaggtcagagtgaagagtgatcaggtaactggcaaasgttcctccttagggaaacaattccaaactcactccctggtcaagttgcttctagatcttggctttgtcaccagtaacactgaggcaaagatataaacagg

SEQ ID NO: 412910 - DNA, 201 bp, Homo sapiens
cactttctggcagtctcacagtatgtaattttgtctgcttgatgatgtctcaatgacccttagactgttaatctttaatttctctatcttagtgatattgycattttcctgattttttgttctgcatgttttcctttagctcttttagcatatttaaggcagtgtttttgaagtctttgtctactaaatctgatgtctgga

SEQ ID NO: 412911 - DNA, 201 bp, Homo sapiens
gtatactctaaagatacacctccaccaatacaaacaacacatgcacaagatttctcattgcagcacaattttcaaaagcaaaagattggaaacaacacaartatctgaaaataggggactagtcgagtaaataagggtgtattcaacagtgtagtattatgcagtaatttaagaaaagaatgaggaagatctctatgaact

SEQ ID NO: 412912 - DNA, 201 bp, Homo sapiens
gtacctgggaataaaatttctggcttgtatattaaatttatgtttagctttgtgagaaactgaaaaactgttccaaaatgactgcactattttacattccygccagtaatgcatgaggagagggttcctgtttctacacatcctcaccaacgttcattattttctgtcttatatttattatagctatttacgagggtctga

SEQ ID NO: 412913 - DNA, 201 bp, Homo sapiens
atctcgtcactctgattttatcctgggcaatttctctgaagtagcgttttaggaatgaagactgtttataaagcttgtgtagtagatgcaagctagaaaayttcagaaaattctaaactagtggtatgcaagcatatttggataatttggattcctgcttttaaagagcttataagtttataaagtattctcaaacagtac

SEQ ID NO: 412914 - DNA, 201 bp, Homo sapiens
agttttgtctgctttcttctttgtcatatatttcagctaattactctacttcttgtatgttttgtaaagtagaggttatatctaaaggctagatggattcmagttaactatttgttggctggaacaaatcacatgtgatgttgtatacaccatatgctgcatcacatctgaagatgcataagattggttgattcaccttac

SEQ ID NO: 412915 - DNA, 201 bp, Homo sapiens
taaagtataaaaaaaaaattaaaaaaaagtttaaatcataaaaaaagagttctgtttctctttcctttatcaagctataactatcttattaatgaaaatgycccccattgtcattatagtcttaataatcatgttgtgctccagagactcttaagtatttcacaatggagcagatgggtgagatggggcatggacagcaat

SEQ ID NO: 412916 - DNA, 201 bp, Homo sapiens
gggcgcctgtagtcccagctactcgggaggctgaggcaggagaatggcgtgaacccgggaagcggagcttgcagtgagccgagattgcgccactgcagtcygcagtccggcctgggcgacagagcgagactccgtctcaaaaaaaaaaaaaaaaaaaaaaaaaaaaagaaactagcagaggttggttcatgatgtttaagg

SEQ ID NO: 412917 - DNA, 201 bp, Homo sapiens
actccgtctcaaaaaaaaaaaaaaaaaaaaaaaaaaaaagaaactagcagaggttggttcatgatgtttaaggaaataaaccagttccatgacataaaagygcaaggtgaagcgacaagtgctgatgtaaaagctgtaccaagttatccagaaaatgcagctaagatcattgatgaaggtggcaacactaaaaaacacatt

SEQ ID NO: 412918 - DNA, 201 bp, Homo sapiens
ctccgtctcaaaaaaaaaaaaaaaaaaaaaaaaaaaaagaaactagcagaggttggttcatgatgtttaaggaaataaaccagttccatgacataaaagtrcaaggtgaagcgacaagtgctgatgtaaaagctgtaccaagttatccagaaaatgcagctaagatcattgatgaaggtggcaacactaaaaaacacattt

SEQ ID NO: 412919 - DNA, 201 bp, Homo sapiens
tggccagattattgagtactttgtgtgctaactaaggaatttggcctttgtcccgaagacagtgaagagtcattgaaacattttaagcagtggagtaacayaattagattagagttgagaaagatcactctacctgcacttgggtagacagattaaagacaggagtggctggagacagaaggaacaattaggagactatta

SEQ ID NO: 412920 - DNA, 201 bp, Homo sapiens
tgacagcttgctatgtgtcagacatggtgctatacatttgacacaaagcatctcctcgatttctcacaactttatgtagtatttacttacaggtaaactgmggtctacagaggttaagtttctatggactatcaaaatcaaatatctgtttttattttctttttggaggcttcgagtgtgtgtgggtggggaagaatatag

SEQ ID NO: 412921 - DNA, 201 bp, Homo sapiens
aatgatagcattttttgacagcttgctatgtgtcagacatggtgctatacatttgacacaaagcatctcctcgatttctcacaactttatgtagtatttasttacaggtaaactgcggtctacagaggttaagtttctatggactatcaaaatcaaatatctgtttttattttctttttggaggcttcgagtgtgtgtggg

SEQ ID NO: 412922 - DNA, 201 bp, Homo sapiens
ctggaggcttctcacaaccaacctcagtggactagagagttcaagattcctttgctgtcaaataacatcacatactcttgtttttggtttcattcatcttrttaacccacaatttggaatgttacttatcccccatactgattttcaaaatatataataaaaagagagacactaaatgcaaagcaatttccccaaagaata

SEQ ID NO: 412923 - DNA, 201 bp, Homo sapiens
gcgttatcgtgcatctctagtcccagctactcgggaggctgaggtgggaggatcacctgaacctgaggaggtcaaggctgcagtgagccatgatcatgccmctgtactacagcctgggcgagtaaggccctgccaaaaaaaaaaaaaaaaaaaaaaaaaaaaaaaaaaaagagcgggggagggccttgaaaagtctgaatt

SEQ ID NO: 412924 - DNA, 201 bp, Homo sapiens
tagaagttattctgttgatggtgtgtctctaagtgagtggcgggaaaatggtggtctaaagaatgtctgcttgtttaaatgtggcagccacttctcaccasgcccatttctctcatgtaagttacctgccttgcccctctagacatttaaatttatgacctctaatctaaaccatgcaatcagaatcattttattctgtac

SEQ ID NO: 412925 - DNA, 201 bp, Homo sapiens
gagagactgtttgttatgatttctgttattttgcatttgctgaggagtgttttggcagtacatatactaaaattggaacgatacagagaagattagcatgrcccctgcccagtgcctttttttatgatactgttttaccaacaagagaagaccaattgtcctgtagaatgttacttcctagttttgtctgctttcttcttt

SEQ ID NO: 412926 - DNA, 201 bp, Homo sapiens
gctgtcagacagggacatttaagtctgcagaagattctgctgccttttgtttggcaataccctgcccccagaggtggagtctacagaggcaggcaggcctycttgagctgcggtgggctccacccagtttgagcttcccggctgctttgtttacctactcaagcataggggcaatggcgggcgcccctcccccagcctcgc

SEQ ID NO: 412927 - DNA, 201 bp, Homo sapiens
ccaggaggacaccggcagacaccaggaggacaccggcagacaccagcagatgccagcaggacaccggcagaaccagcagttgccagcaggtcatctatggmgggaagacgctgagttcagccgagggcggtcagaggagaggcaggagagctcggcggctgagcggcctgactcctggggaaaaccaacttcccactccat

SEQ ID NO: 412928 - DNA, 201 bp, Homo sapiens; identical to SEQ ID NO: 102841

SEQ ID NO: 412929 - DNA, 201 bp, Homo sapiens
acatgaacttgtgttgttcagctcttttatgtttttcatagcactactattttataaacaggatttagtgtctatctggatttcttattcgcaaactcatrtatcacattgcctttttgtttctgtacccctcttccttgaaatatacatgtgtttgtgcccatagatacacaccacatgcattttcaaagtcaaagctaa

SEQ ID NO: 412930 - DNA, 201 bp, Homo sapiens
gtaccttggtttccagatctgtaaaatgggaaaacagttcacctgttagaattattattgctaggattaaaaggaatgacaaaatatctggcgtataatcrgcattcaaaatatgatattgatttccctcccctgtccctcttctcactatgacttggctcttctgagacatagccaagaaaaggaaaactttaatgtaga

SEQ ID NO: 412931 - DNA, 201 bp, Homo sapiens
ggaatggacatttctaattcctgtttgttgaagggaagttgctggaaagagcatcagtacttgtttctatgcagatgcctgggccgtagcttgtctgtagmgtctgtataattataatgttgcccagtgtgagggaaagagctttcctacttgcactcttctaccaaggccctgttagtgcactgattatagtactgacag

SEQ ID NO: 412932 - DNA, 201 bp, Homo sapiens
aaaccaaatttcatcagttctaataacactttttctcaaattgtaatctgaattctgtacacatctgaaaatcaatggtttcttaaaattacacttatcargcagcagttttgatgtaattatcatggcctccatatgcatgaacttgtaatagctgctcatattatagtcacttaagttaaattatgttcattgttgagt

SEQ ID NO: 412933 - DNA, 201 bp, Homo sapiens
gaattcttttatggcctgctccaggggagaaggtagagaaaccttcttgcttctgctgtttccacaaacgccaaagtgccatattttgggatagcaggtcytgaactccatcaaaactaaaaagaaatcaatgcttacacttattcgaaccccatctcattccaaaagtatatatggtagcatattttatattgcacataa

SEQ ID NO: 412934 - DNA, 201 bp, Homo sapiens
ctacttttcattggaacgagcctatttttcattacttttcgtaatgaacccaaagggatgtttaaaaatgcatatttgataatgccacttctccccacccmcagccctctgccccccaaaatcattgtcttctgtgactcaaaggcagagtttgtattcctgagcatggcattcatggacttcatgatatagccccaactt

SEQ ID NO: 412935 - DNA, 201 bp, Homo sapiens
tcagttccatccatgttgttgcaaatgacgggatctcatttttttcattcttttatttctgatgccacttctttgtgtatttactctcttacttatttaaygtggctaaaatattaacaattttattgatttttttcaaagaaccagctttttggttttgttgatttcctgttgttaatttcgttgatatcttcatcttct

SEQ ID NO: 412936 - DNA, 201 bp, Homo sapiens
gcgggccaaatgccaccacctttgaggatatcttctcagttagaattaaccctttgttccttgatgttcacttacatgttgtttacactgtacttgtagcygtctgtctcattactaagttagctgtattgtgaatatctcccttccttctttggagagggattggttctgatttattactgtatatctaatatggtttgg

SEQ ID NO: 412937 - DNA, 201 bp, Homo sapiens
tttaaagtgctccaaataacatagtaaacatggacgtgttttataaggggaaaatactgattatgtaagcatggtttttagttatctttagttactcacargattctgcttgtggaaatatgatttgggaattttcttagtttaaaatatttgcttttaaatgtactaagaagagaccaatatgtgtggtttccctggacc

SEQ ID NO: 412938 - DNA, 201 bp, Homo sapiens
taacattcttcacattttttctcagcaattaaaaataacaaaagcatggtgcatgttaaattgcttttttccatgacagtcaactttaaaataagaatcartagtgtttgctgatggaattttatcaaggatccttttctgttccagacatgagcttgatactttcactcttctgttgcgtctaatcattgtgataggcct

SEQ ID NO: 412939 - DNA, 201 bp, Homo sapiens
cgctacagtttacctagggttttcttctatcccaccctttccaaatgttagatggcaacaaggtgttgttcctctcccctctccttccttctttggtttayaaaataaaccgacccacacagctgacccttagcaagggctgtgtaggtctgcgaagtttaataacagttgcagatagattggctaagagaagtcagctgg

SEQ ID NO: 412940 - DNA, 201 bp, Homo sapiens
tctgtttttaatatcagctttttggagtgaagtgcttaaataataccaagtaatttattaaaaagagacaatcccaggttcctatttctttggaaatgttytacttattattagctgtctaagtgcattgtagattaaccttttcatgacaaatatttacttccatttgtgttatgtcttcttcctttgtaagaaaatttg

SEQ ID NO: 412941 - DNA, 201 bp, Homo sapiens
aaaaaattaaaaaaaagtttaaatcataaaaaaagagttctgtttctctttcctttatcaagctataactatcttattaatgaaaatgtcccccattgtcrttatagtcttaataatcatgttgtgctccagagactcttaagtatttcacaatggagcagatgggtgagatggggcatggacagcaatgagactggttgt

SEQ ID NO: 412942 - DNA, 201 bp, Homo sapiens
ggagactgctgccaaggtgcgcctggccacagaggtctgccttttatgccatagaaaataactgctttttaaaaaaataaatctttaaaagaaaaggtttrttcattgtagtttcttgtctagtttcaggaaggggttaaatttggctttgattagtagtgggtttggatggagttatcataaattgtgtccagaaaaatc

SEQ ID NO: 412943 - DNA, 201 bp, Homo sapiens
ttgattagtagtgggtttggatggagttatcataaattgtgtccagaaaaatcagaaaagctatttttttcccaaagccatcttctcaaaagattctattkaaatgttggcccgtcttctctcaggggctgaaagctttgatgttcttctttctctggcttgtggtattgtatcagtaagttaattgctggttcacaacag

SEQ ID NO: 412944 - DNA, 201 bp, Homo sapiens
aagtgtcaactcccccttcatcttctaccatgatgtaagcttcctgaggcctccccagaaaccgagcagatgttagcaccatgcttcctgtatagcctgcrgaaccgtgagccaattaaacctcttttttttaattaaattatgcaatctcaggtatttctttataataatgcaagaataatacagcaactgaccagatta

SEQ ID NO: 412945 - DNA, 201 bp, Homo sapiens
tacctttaccagagatccttatgtcttaatgtggttttgagtaactgtctagcatctcttttttttttttttttgagacggagtctcactccattgcccargcttgagtgcagtggtgctatctcagctcactgaaacctccacctccccggttcaagcaattctcctgctttagcctcccaagtagatgggattgcaggg

SEQ ID NO: 412946 - DNA, 201 bp, Homo sapiens
cgcttaatcagttgtaggtttaattttttggcaaaaatactttagaggtggtattcagttttaattttacagattaagccaggtaagttcctggttatttktcatttgtttgttttgttttgtttacaacatggtttttaagtacacgggctctatagtcagactatctgggtttgtattccagctccacaacttagtagc

SEQ ID NO: 412947 - DNA, 201 bp, Homo sapiens
gtttattgggggctagttatgaaggcaacctctgtccagcacatatgaaaatgctagacccccagaaggaatgcaggtattcagcataaaccacattgtayaggcattctaggcatagtgagtcatgttgtcagttctagtagtcactgtctcctcacttagccccattaacagctgtggatgggcctttgtcatcaccaa

SEQ ID NO: 412948 - DNA, 201 bp, Homo sapiens
tttctaagttcctgatgttttctttttactttttttcataaacgttaatgtctaaattccaactatggttccttttctcaactgaaacttatttgtgtgaytatgcaaaccttctttatacttaatgcttattatctgtgctattgttttttcagtgttgttcttagtccttcactttctatcactgctaccctttatggt

SEQ ID NO: 412949 - DNA, 201 bp, Homo sapiens
aatgatgagtctttatgtcaacaagttggaatctactacccatatatttggaggttttcaatgcaataacagtttgtgataggtgatatgaatgataaccragatgtaagctggttttcatcaacctatatcatttcttttatttctgtttacaaaatcaggcataacttcttgacaatgtacatatattataattacttt

SEQ ID NO: 412950 - DNA, 201 bp, Homo sapiens
aactatacacgttaaactttaactccccattcccagctgccctcagcccctggcatccattgttctactttctgtctttatgaatttgactactctataartggaagtacctcatgtaaaggaaagtatacagtttttggctggcctgctgtgactggtttatttcacttagcataatgttcttaaggttcatctgaagga

SEQ ID NO: 412951 - DNA, 201 bp, Homo sapiens
caaattctttagagatccttgattacaggaaaacaggccacaggtcatgttaaaccattaatttttggagctagccatgaagcttaatcaaattgatgttraaacgattcttttaaggcattgactatccacgcattgattcttaggctctatttcatcatcataacttcctttacatttttatgataacaggaatagcaa

SEQ ID NO: 412952 - DNA, 201 bp, Homo sapiens
agtgtgtgtatgtattgggggagcctgaaaatattggggaaaacagatataaggcctataaagcattgtgctttgtgtctattttatgtagagttcaatartcctacatacctgagcattctttgagtatgtgacagcctcagattgactgatgttgtcacaatgatgaagtggagtcatccaaaaaccatttaagaaagc

SEQ ID NO: 412953 - DNA, 201 bp, Homo sapiens
taatgatctgctttctcctttcccataagccagtcttagtgtcttctagcaatgtcatttaaaatcccacttcctcattcaagccacagtccatagcactwagcctttcttcttcctttctcataactggaaataacagatctctcaggaaaccttcatttcccttactgagagatggtgctcaagtcaaaagcataggag

SEQ ID NO: 412954 - DNA, 201 bp, Homo sapiens
gtttgaaataaccgtttcaagggagggaaggagtacattgacctgagaacacagacttgctagaaggtgttaaatgcccaggggagattgttgattgtgartatatggtgacaccagtcttacctgttgtgtgacttttttagcagcatctagctgcccctgtgcaggacttgtcaatgctgggttcacctcatccagggg

SEQ ID NO: 412955 - DNA, 201 bp, Homo sapiens
taacctgtatacatataattttgaaaaatgttaatattattctttaatggtaatagaaacaaaatagtagtccagggctacagtgtatgaccactatatcrtaaatccccaagacctgtctcaggttcataaatttactagaaggaatcacggggtctcagcatatacttgtattagtggctgagggttattataatggca

SEQ ID NO: 412956 - DNA, 201 bp, Homo sapiens
gggaatttatattctatttgtaaagaaaggactaagaactgtgacttcaaaataagaatcatagtagaccagttataaaatgcactatctaaaaaggtatscttcacatttatgatcccggtatttgcattctgtgtcaaacattaaatatgagagaattattccaagagagatgaggaagaatcgatataattttagctg

SEQ ID NO: 412957 - DNA, 201 bp, Homo sapiens
attttgcagtttcacttgaaactgatttttgcctctctacttgatcttgcttgtctaataaaaactgtgctttgcaccctctagcatgctttttgtcaccyggctctactcccgatttctacactacttaacttggtcagcatagacttcacctttaatagacttaaaaaaaatctctgctactccgtttatgtgtgtgtg

SEQ ID NO: 412958 - DNA, 201 bp, Homo sapiens
taggctttctcttcatattcagcttgcacatttggtaatgtttttaagatgatcatctaattttattttgtgaagtgaaggatttgtgttttagttggcarttgttaagtccttggcttgccatttttcaaaaagtaaaaaggtcctcacaggtgtctccatacttcgccaaggttgtagcatgggcagtttcagtttcag

SEQ ID NO: 412959 - DNA, 201 bp, Homo sapiens
tagtgctaggattggcattaaggaaatgcttgctgacttgaaataattgtaaaagtggaagactatatagataaccaagatttatctaggaactccttcargacttctctatttatacatcttttatgaactgaatcataaaccacagatccagtgactgaagagcagatcagggggaggctatagaatatggtaataagg

SEQ ID NO: 412960 - DNA, 201 bp, Homo sapiens
ggattgtgctttgtctgtctctgggtccctggttcttagtgctaggattggcattaaggaaatgcttgctgacttgaaataattgtaaaagtggaagactrtatagataaccaagatttatctaggaactccttcaagacttctctatttatacatcttttatgaactgaatcataaaccacagatccagtgactgaagag

SEQ ID NO: 412961 - DNA, 201 bp, Homo sapiens
tttttggcagttcacacataatatgtattggttaaatgcttgtatgaattgaattgtttgtttagcctttatggttaagtctgattttttttctgataagrtgcatgtttttgtgccaattgctttttcttaagtgttttttttgttttgttttgtttttttgtttttttgcctcttggattagtccatttgggcctgttc

SEQ ID NO: 412962 - DNA, 201 bp, Homo sapiens
agatgcaaagtttaatgcataccctaccaaatcatgaccccagtgcacctcttaagtggtcatctctgtgctagtttttagagcttgtcacccttgctgtrtatacatggcatgctccagggtgcatttaaagcgttattttctacatatgtttagaagtcattccttaacccaataacctattaaaatccacttatgttt

SEQ ID NO: 412963 - DNA, 201 bp, Homo sapiens
tattgctcccaagaccactctcaaagagctagaaagcagtggttctgcccctgtagacttagatttgtattcagtgaacatggaatcagtgtgggacagcrtatttccagctcgtttagtcctttttctaactctgtgaatgatggatcgtatttccatttctgagataggaaatggaggcattgagtgtagtaagtggca

SEQ ID NO: 412964 - DNA, 201 bp, Homo sapiens
ctaactgtgttaagtatagttttctgggagaatagttgattatttttgagataattagaaaatctattatcggtgtatgtcaaaatggattttagtcttaytgcttaagatatatggttcagggaaatggaagactgaatggtatagtcttttctgcagacatggatggttgaaggcagttcttcctataaactggccgga

SEQ ID NO: 412965 - DNA, 201 bp, Homo sapiens
tgcaggttcagtttatatggaaatgcaaactgggctggaagatattcctgagttaggctttctcttcatattcagcttgcacatttggtaatgtttttaaratgatcatctaattttattttgtgaagtgaaggatttgtgttttagttggcaattgttaagtccttggcttgccatttttcaaaaagtaaaaaggtcctc

SEQ ID NO: 412966 - DNA, 201 bp, Homo sapiens
aataaaattctcccaaatgtaagtattaatgttaaaatctccaaacttttctaattgagataatacaaaataacatatacactgccagtcaattggcatawcattcctcttaaaatataggtctattctatgagcagctgatatggtttgtatctgtgtccctgcccaaatctcatgttgaatcgtaatctccaatgttgg

SEQ ID NO: 412967 - DNA, 201 bp, Homo sapiens
atttattacatatgcatagtagaagtattaatgtcaggaatttaattttttttttggagatggagtcttactctgttgcacaggctggagcgcagtggtgygatcttggctcactgcaacctccacctcccgggttcaagtgattctcctgcttcagcctcctgagtagctgggattacaggtgcccgccactatgcccag

SEQ ID NO: 412968 - DNA, 201 bp, Homo sapiens
aaaagtgctactccagtgaagacacaaatgataagaaagaacaacagccttatagttgacatggggaaagtttgagtggtctggatagaaggtcaaaccarccacaacattcccttaaaccaaagtttaataaagagcagtactctaactcttcaattctttgaagcttcagaatggtgaggaagcctcagaagaaaaatt

SEQ ID NO: 412969 - DNA, 201 bp, Homo sapiens
ttctttctctttcctttttttcctttctctttcctccccccttccggaatttctctacaactcttcctgttactttgtttccctcccttccttcttcttgygctttcagaagcttctgaaagtctttctcatataccagatactatgctagggactcatgtctcttgcagtcagtgacttctcattctactacttttactt

SEQ ID NO: 412970 - DNA, 201 bp, Homo sapiens
acaaggccaccaagataccacccccgcctccatggttcccaaagttactgttctgtaaattgcctattgttttcttgagtaaaagagattttgaaaaattrgtattctgtaagcctatgcttgttcagtgtgacaaactccagggcagagagggaccctagatcacaagactccattctctcagttgaattttctgcttta

SEQ ID NO: 412971 - DNA, 201 bp, Homo sapiens
tgcagtagcgtgatctcagctcattgcaacctcccacctcagccttcagagtagctggaaatacaggcacaccccaccatgcccagctaatttttgtgtgtttttttttttttttgtagagactgggttttgccatgttacccaggctggtctcaaactcctgggctcaagcaatcctcccgccttggcctcccaaagtgc

SEQ ID NO: 412972 - DNA, 201 bp, Homo sapiens
gcttgctaaatattggaacatcctgtacatgctgatttttatggctttttttttttttactaaatcacacatattaatatcttcccatgtcattacacattttatttatttatttatttatttatttatttatttatttatttatttttgagagggagtcttgctctgttgcccaggctggagtgcagtggcacaaacttg

SEQ ID NO: 412973 - DNA, 201 bp, Homo sapiens
atttgttagtggctgagggaaaggtagcagctggatgctgtaattctctcgagagacattcctactgctgagtgaggaggagagcacagctgtttgtggaraatgaacaaaatggtaattgcctcgtgtcagctggtacattctgagacttttgctcttgttgatgttttcttcagtggctgccttatgttaaacatgccc

SEQ ID NO: 412974 - DNA, 201 bp, Homo sapiens
tacatatagtattcaagaactttatgtacagcaaaaatatttttacacatatttacttgtccatctaatttcttattcaaaatactataaccaacaaattygtcactgtggtttaatcacaacacagaaacataccactgatactatatgccatggtttataataagcactttgtaaatttttgcttatttaaacctcaca

SEQ ID NO: 412975 - DNA, 201 bp, Homo sapiens
cgtttcattgccgccctggcttaacccttccggcgcctaaaaggacggccggccggccggctcccttgcaccaggaagaagtcttagcagccagcgggccytggtcaggaaactctaaggtacaaggaaaacagttgaggaaggagccagagcgctccggtttggtcctcgggcttcgctggggcggggcgcaggcgttgg

SEQ ID NO: 412976 - DNA, 201 bp, Homo sapiens
cctactttgtagggttgttttgagaattatataatttaatatacataaaatgcttaaccaccctgggcaacataggaagaccccgtctctacaaaaaattaaaaaaaaaattagttgggtgtggtggcatgtgcctgtagtcctagctagtcaggaggctgacatgggatgatcacttgaacccaggagttcaagaccatc

SEQ ID NO: 412977 - DNA, 201 bp, Homo sapiens
acgatcttggctcactgcaacctctgcctcctgcattcaagcaattttccagcctcagccttccgagtagctgggactataggcaactgccaacatgcctrgctaatttttgtagtttttcagtagagatggggtttcaccatactggtcaggctggtctcgaactcctgacctcaggtgatctacctgcctcagcctccc

SEQ ID NO: 412978 - DNA, 201 bp, Homo sapiens
gcgaggctacgtttcattgccgccctggcttaacccttccggcgcctaaaaggacggccggccggccggctcccttgcaccaggaagaagtcttagcagcyagcgggccctggtcaggaaactctaaggtacaaggaaaacagttgaggaaggagccagagcgctccggtttggtcctcgggcttcgctggggcggggcgc

SEQ ID NO: 412979 - DNA, 201 bp, Homo sapiens
ctagaagaaaacctaggcattaccattcaggacataggcatgggcaaggacttcatgtctaaaacaccaaaagcaatggcaacaaaagccaaaatttgacmaatgggatctaattaaactaaagagcttctgcacagcaaaagaaactaccatcagattgaacaggcaacctacaaaatgggagaaaattttcacaaccta

SEQ ID NO: 412980 - DNA, 201 bp, Homo sapiens
gcggagcttgcagtgagccgagattgcgcccctgcagtccgcagtctggcctgggcgacagagcgagactccgtctcaaaaaaaaaaaaaaagtttaaaattttttttttttttttttttattttttttattttttatttttattgatcattcttgggtgtttctcgcagagggggatttggcagggtcataggacaatag

SEQ ID NO: 412981 - DNA, 201 bp, Homo sapiens
atgtccaacatgtggtggtgggcaatctgtgtcttaatcatctggaatgtttgttaaatatcctgggatctgagaatcaaaatttctgaagaggtagtgtrttagtctgtttttacactgctgtaaagatactacccgagactgggtaatttgtaaagaaaaaggtttaattgactcacagatccacatggctagggtggc

SEQ ID NO: 412982 - DNA, 201 bp, Homo sapiens
actctgtatgtactctaatgttgtctacttctttcttctgttcctgcagtgttacttacgttttttatactatccagaggcttaggctgtttgcctttgakgacatggatatatattgctcagtcatacgctttcaaaaaataatctcttcatttagtttttttattattttattactattaatttataataaaatttggt

SEQ ID NO: 412983 - DNA, 201 bp, Homo sapiens
gcaactcatctatagatacaagatctattctttttgtgggggtttaaaaaacaggtttactgggataaaattcacataccataaaattcacctatttatartgtctcattcaatgttttgtggtatattcacagagttgtgcaaccatcaccacaatcaattttagagtattttcatcactccaaaaagaaaccttgtacc

SEQ ID NO: 412984 - DNA, 201 bp, Homo sapiens
agagacggggtttcaccgtgttgcccagggtggtctcaaactcctggactcaaaggacccgcctcagcctcccaaagtgttgggattataggcgtgagccrattaacccagccaaaaaggacatttatatactattataacattcttgtagaaatactggagaatatttttatgcataagcacagttcttcttgaattgta

SEQ ID NO: 412985 - DNA, 201 bp, Homo sapiens
tattctgatgttttttgtgcccttagagctttttgactagtgagagggccttcctaggcataagtatgatcaaaaggtggtggaatatggaatttacctaragcataatacaccctcattttaatttaatcaagaaaatttgttgaatgtctgctatgtgacagtctgggaaaatggtagtctcataaccctctacttttg

SEQ ID NO: 412986 - DNA, 201 bp, Homo sapiens
atgtctgcattccgtttttgttgcattgttattcacattagtcaatatatggaaataaccagtgtctgttgacaaatgaatggataaattgtggtatatayacacacacacacacacacacacacacacagaatggattttcattcagccttaaaaaagaaagagatgtgccatttgcgacaacatggatgaacatcataa

SEQ ID NO: 412987 - DNA, 201 bp, Homo sapiens
tcatgtctgcattccgtttttgttgcattgttattcacattagtcaatatatggaaataaccagtgtctgttgacaaatgaatggataaattgtggtatayacacacacacacacacacacacacacacacagaatggattttcattcagccttaaaaaagaaagagatgtgccatttgcgacaacatggatgaacatcat

SEQ ID NO: 412988 - DNA, 201 bp, Homo sapiens
ggcatgtgcctgtagtcctagctagtcaggaggctgacatgggatgatcacttgaacccaggagttcaagaccatcctggacaacagaggaagaccctgcmtctacatagaaagagaagaaaaagcggagacagttcctggcacctagcaagcactctgtaaatgttagctcttctcatctaagtaaaatagaggcatatt

SEQ ID NO: 412989 - DNA, 201 bp, Homo sapiens
ctagattatctagctttttgaccttggacacattatttaatgtagagcctgatctccatctataaaatgggaatcacagtagtacccacctcatatgaccrttgtgaggattagatgacattttatatggaaaatgtctgcagtaaaccgtccataaatggaaggagttttttaaaaaatgttgttggtataatcaccatt

SEQ ID NO: 412990 - DNA, 201 bp, Homo sapiens
atgagaaatccttgtaggaactgttttttgctaaaaagttaaaagtgctactccagtgaagacacaaatgataagaaagaacaacagccttatagttgacrtggggaaagtttgagtggtctggatagaaggtcaaaccagccacaacattcccttaaaccaaagtttaataaagagcagtactctaactcttcaattctt

SEQ ID NO: 412991 - DNA, 201 bp, Homo sapiens
tatatctgttatggtgatctgtgatcattgatctttgatgttactattgtaattgctttagggtgccacaaaccacgctatataagatggtaaacttaatmtgtaaatgttgtgctgtgctctgccaatcagtagttccttatctctgtgcctctccttgggcctccctgttccctgagaacagcaatattgcagttatgg

SEQ ID NO: 412992 - DNA, 201 bp, Homo sapiens
ctgtttacccagactggtcttgaactcctgggctcaagctatcctcccaccaccttggtctcccaaagctctgtgattacaggcatcagctaccacacccrgtcttttgcttcttttttttttttttttttttttaagatggagtcttgctctgttccccaggctggagatcagtgggctcactgcaacctctgcctcccg

SEQ ID NO: 412993 - DNA, 201 bp, Homo sapiens
aaaataaaagcatttgtttggccatgtcaccctgattgttttcattcgttgctttcttaggtcaggtctcttgataaatactctgtgaacaagttaaggastcttcgtcttccagatagcatcctaacccaggctgtcatctggttaacatgtaaaatgtccaggtggtacctgtatcatcatggatagggctctggagaa

SEQ ID NO: 412994 - DNA, 201 bp, Homo sapiens
ttttctgtatcctcaccagcatttggtattgtcactgttttttgttttagcctttctgatagctctgtggtaatatctcaatatctctttgtatttatatwtatttttttgagacggaggcttactctgtcgcccaggctggagtgcagtggcgtgatcacagctcactgcaacctctgcctcatgggttcaagcgattct

SEQ ID NO: 412995 - DNA, 201 bp, Homo sapiens
cttgctaaatattggaacatcctgtacatgctgatttttatggctttttttttttttactaaatcacacatattaatatcttcccatgtcattacacattttatttatttatttatttatttatttatttatttatttatttatttttgagagggagtcttgctctgttgcccaggctggagtgcagtggcacaaacttgg

SEQ ID NO: 412996 - DNA, 201 bp, Homo sapiens
ttgctaaatattggaacatcctgtacatgctgatttttatggctttttttttttttactaaatcacacatattaatatcttcccatgtcattacacattttatttatttatttatttatttatttatttatttatttatttatttttgagagggagtcttgctctgttgcccaggctggagtgcagtggcacaaacttggc

SEQ ID NO: 412997 - DNA, 201 bp, Homo sapiens
tgctaaatattggaacatcctgtacatgctgatttttatggctttttttttttttactaaatcacacatattaatatcttcccatgtcattacacattttatttatttatttatttatttatttatttatttatttatttatttttgagagggagtcttgctctgttgcccaggctggagtgcagtggcacaaacttggct

SEQ ID NO: 412998 - DNA, 201 bp, Homo sapiens
ggaggcgtcttgacagttaccttcctatttcttgcaggatctgggcacaaggccaccaagataccacccccgcctccatggttcccaaagttactgttctstaaattgcctattgttttcttgagtaaaagagattttgaaaaattagtattctgtaagcctatgcttgttcagtgtgacaaactccagggcagagaggga

SEQ ID NO: 412999 - DNA, 201 bp, Homo sapiens
aatgcagtcatgtttttgaaatatcaaagatttgcttcttctaaagttttgatctcttaaaaactacttagggtaatatactttgtttttcttttaaaagrgggaaaatgtaagatttttttgatgattaacttttgttttttgtttacttttctcaaatagatcctaaatgcccaggagatgttgattttcataatagtg

SEQ ID NO: 413000 - DNA, 201 bp, Homo sapiens; identical to SEQ ID NO: 102842

SEQ ID NO: 413001 - DNA, 201 bp, Homo sapiens
agtgagccgagattgcgcccctgcagtccgcagtctggcctgggcgacagagcgagactccgtctcaaaaaaaaaaaaaaagtttaaaatttttttttttwttttttttattttttttattttttatttttattgatcattcttgggtgtttctcgcagagggggatttggcagggtcataggacaatagtggagggaagg

SEQ ID NO: 413002 - DNA, 201 bp, Homo sapiens
caaacttgtacgggtgttaactgtactgaataatataggcagttataacccaatggtaagtatttgtttatctaaacatataaagcatacatataaaaatmctgtattataatcttataggactgtcattgtatatgcggttcattgtttactaaaacattgttttgtggtgcatgactgcacttcctatggcccatgcct

SEQ ID NO: 413003 - DNA, 201 bp, Homo sapiens
taattttaattgagcatttgtagggttccattttctctcagcatattaattatacttcttttaaatctttttattttattttacatatatacatatatatwttttttattttttatttttattttttttttcagatggagtcttgttctgtcacccaggctagagtgcagtggtacaatctcagctcactgcaacctctgc

SEQ ID NO: 413004 - DNA, 201 bp, Homo sapiens
taaacttatttgctgcctttttccttcctagagatcatctcaatattctattccacttaaaggcatttgacaccggttctgtatctgggctctgaggctartggtatgaaagcttccaagacaaactcccaaaactgtagattcctgaatcaagtgtcttgctggagtctgtagacttgaaacatttggcagctgtgctgc

SEQ ID NO: 413005 - DNA, 201 bp, Homo sapiens
gaactcatcattttttatagctgcatagtattccatggtgtatgtatgccacattttcttaatccagtctatcattgatggatatttgggttggttccaartctctgctattgtgaatagtgccacaataagcatatgtgtgcatgtgtctttatagcagcatgatttataatcctttggatatatacccagtaatgggat

SEQ ID NO: 413006 - DNA, 201 bp, Homo sapiens
agctgtgctgcttttcctatttaacacacagggacatttggcggctaggactgtatcttaattctccatctttggctttgctttcttcatcatcttcccayctcacccatttctgatttgtgcagtgttggcttgttcaaattctgatcttttaggacactgtcattctttctaggcaggctatcaaaatgttcagtcttt

SEQ ID NO: 413007 - DNA, 201 bp, Homo sapiens
tacctagtttgtttagagtttttagcatgaatggctgttgaattttgtcataggccttttctgcatctattgagataatcatgtggtttttgtctttggtyctgtttatatgctggattacatttattgatttgtgtatgttgaacgagccttgcagcccagggatgaagccaacttgatcgtggtggataagctttttga

SEQ ID NO: 413008 - DNA, 201 bp, Homo sapiens
ttgcttttttgttcttgcgatagtttactgagaatgatgatttccaatttcatccatgtccctacaaaggacatgaactcacattttttatggctgcatastattccatagtgtatatgtgccacattttcttaatccagtctatcattgttggacatttgggttggttccaagtctttgctattgtgaataatgccgcaa

SEQ ID NO: 413009 - DNA, 201 bp, Homo sapiens
gtttaattagatcccatttgtcaattttgtcttttgttgccattgcttttggtgttttagacatgaagtccttgcccatgcctatgtcctgaatggtaatrcctaggttttcttctagggtttttatggttttaggtctaacgtttaagtctttaatccatcttcaattgatttttgtataaggtgtaaggaagggatcca

SEQ ID NO: 413010 - DNA, 201 bp, Homo sapiens
tgccctgcccccagagatgaagcctacagaggcaggcaggcctccttgagctgtggtgggctccacccagttcgagcttcctggctgctttgtttacctaygcaagcctgggcaatggcgggcgcccctcccccagcctcgctgccgccttgcagtttgatctcagactgctgtgctagcaatcagcgagactgcgtgggc

SEQ ID NO: 413011 - DNA, 201 bp, Homo sapiens
tggttgttaacaataaaagtggcttaaaaatacctagcataggctggacacagtggctcacgcctgtaatcccagcactttgggaggctgaggtgggtggrtcacgaggtcaggagttcgagaccaccctgaccaacatggtgaaatcccgtctctactaaaaatacaaaaattagccgggcatggtgcgcacctgtaatc

SEQ ID NO: 413012 - DNA, 201 bp, Homo sapiens
ttatctttctgttttttacaccttgactgtgtgtttcctacagttctatctttgttcttggtttacttctttttttttaatatgtttttctattgattgatttttttttattctggttatggctcacatttttgtttcttaaaaaacatttcttgtaatctttattggttgctggatgttgtgacttactgaatgtcttga

SEQ ID NO: 413013 - DNA, 201 bp, Homo sapiens
tccctgactgataacattttctctgtgttgttacaacttgttgaaggaagaattaaatgtgtcttgggtgacaccaccgtgagagatcttttggaagcttktacctagcttcctctgcattttgccccaggcaccttttctctttgctcagtcggctgtgtacgctttcactgaaataaatcttagctgtgagtactacta

SEQ ID NO: 413014 - DNA, 201 bp, Homo sapiens
tgaaaccccatctctactaaaaatacaaaaaattagccgggtgtggtggcgggcacctgtagtcccagctaatcgggaggctgaggcaggagaatggcgtraacctgggaggcagagcttgcagtgagctgagatggcaccactgcactccagcctgggcgacagagcaagactccacctcaaacaagcaaacaaacaaac

SEQ ID NO: 413015 - DNA, 201 bp, Homo sapiens
ggaagcagttggtgaaggttagaatctccctgtgtgcagtaggtaggtggctatggaaggagggcggtcagggcaagggcagggctggatctgaagtttgrctctgaagagcaatgtgtaaatagcttccatcttagggttgacttcctatacagctaaaatagttattctgtctgctcacttttacttgtccttgtaggg

SEQ ID NO: 413016 - DNA, 201 bp, Homo sapiens
ttgtatctgtgtccctgcccaaatctcatgttgaatcgtaatctccaatgttggaggtggggcctagtaggagatgattagatcatgggggtgaatttctygtgaatggtttagcctcatccacttggtgctgttccagtgataatgagtcagttcttgtgacatctggctgttaaaagtgtgtagcacctccccactctc

SEQ ID NO: 413017 - DNA, 201 bp, Homo sapiens
taaaaacaggacattttaatattacgtgcaaagcacatagtgggcaatgtgttggtttgaagaaggatttttgaggaagtggaagctgaactgcagtttgyagaataagtaagagtttagtcaggcaaagcagatagacaaggtcattttgggtggagcgattaatataggcaaagtcatgcaatcatgaaatagcatgat

SEQ ID NO: 413018 - DNA, 201 bp, Homo sapiens
ctaaaatcattcttctggagctaaaatcaaggtgtcagcaaggctactttttttttttttttggagaagacagtctgttcccttaccttttcagcttctaraactttccttgtctcatggtccactttaacaacaccaggcagagtccctctcatgctgccatcactctggttctttctcttctgccttcctcttctgctt

SEQ ID NO: 413019 - DNA, 201 bp, Homo sapiens
aagtttttgttttttaaaaggttgggggtgttcagccactgagggacaaaacttagcatctaatttcaattatagtgtcatgcagagtatttctaaagtarttggttatcatgggaaagtattctcttttcaagaagttctttgattctgtaataactagaacaaataaagtagtaaaagaagaaatagttctgtgactag

SEQ ID NO: 413020 - DNA, 201 bp, Homo sapiens
ttaactgggagaaaagttaagtctgaatgtatcagtctggggagatataggtgtgtcagttgggtaatactatacagaggagacagcacaacaaaaacagrtgaaataatgtagacagtttattattcacaggttgatgggaaaacaggggtaccgacaggggctgttggaaatactgtagaggaaatgtgctcaaccagc

SEQ ID NO: 413021 - DNA, 201 bp, Homo sapiens
agctgagatggcaccactgcactccagcctgggcgacagagcaagactccacctcaaacaagcaaacaaacaaacaaacaaacaaaaaaccaatacgaatktatcctcttatagttctggaggtcagtagcctaaaatcattcttctggagctaaaatcaaggtgtcagcaaggctactttttttttttttttggagaaga

SEQ ID NO: 413022 - DNA, 201 bp, Homo sapiens
cgtgcaaagcacatagtgggcaatgtgttggtttgaagaaggatttttgaggaagtggaagctgaactgcagtttgtagaataagtaagagtttagtcagrcaaagcagatagacaaggtcattttgggtggagcgattaatataggcaaagtcatgcaatcatgaaatagcatgatatgtatgtgaaataagagtacttt

SEQ ID NO: 413023 - DNA, 201 bp, Homo sapiens
ctatataaatagtatatgctctcctgttttggcttctttcacttaacattaagtgaaattcattaagtgagattcatccatgccatggtggttatagtgtkgttatagttcactcattctcaatgctgtacaatattctgagtcattaatgtaccatatttgttcattttgtgttgatggatattagggttgtattttttt

SEQ ID NO: 413024 - DNA, 201 bp, Homo sapiens
gaatgtctttatttagactgttgcaatagggagaaccttcattattgaggaatatttcccaggagaaggagatttaaggctttttagaggcagattacaasagagtcatcatgaggcttacatgagtcatgaggtaggatggagatgtgtcctatatgcaaagacagggtagacttttgaagttacttgtttctgaggaca

SEQ ID NO: 413025 - DNA, 201 bp, Homo sapiens
actgcatcctcaacctgagcctcctgggtagctgggactataggcgtgtgccactacaccaggctgatttttaatttttttgtagtgatggggtctcactrtattgcctaggctggtcttgaacttctggccttcaatcatcctcttgcctttgcctcccaaagtgctgggattacaggcatgagccacaatgcctgacct

SEQ ID NO: 413026 - DNA, 201 bp, Homo sapiens
gactttgctcataactctcattttgaaagactaatgtgtgacatcccacatttaggggtaggaaggcatactgaaggattaatttagagttgagttgttayagtgcaggagcaaggaaagattggcctgcaagtggctgagtatgctgatgagcaagaagtattgggtaatgagccacgtgggccagtttgtatgtcatag

SEQ ID NO: 413027 - DNA, 201 bp, Homo sapiens
ctataacaaaacagcaagaaagtgagtcacttaagtttttggtctactagcattataaactgccagctgtccgattcatagtaaataccatcattaatgaygtgtactactaacgcaagtctgaatatggatgcctttgtgtgaaataaaattcagccatatattttttaaatgtgtctggtaattgaactaaggtagaca

SEQ ID NO: 413028 - DNA, 201 bp, Homo sapiens
gaaagtagaattgctgggttatatagtaattctgtttctagttttttaggaaccaccatactatgttgcatagtggctttaccatttcacattgccaccarcagtgcacaagggttccagtttttccacatcctcaccaacactttgaattttccttatttatttatttttgatatgtagccattctaatgggtgtgaggt

SEQ ID NO: 413029 - DNA, 201 bp, Homo sapiens
ttggcaaagcaattatgtttagcccacttggctatctttttaacatcctggagtttctaatcatttttaatgcctatctggggaaagatatttaatattaygttctctgttttcctatattgattgacaatagccatggatctttctgtttatcttcttttgtagatctaccacagccctataacaaaacagcaagaaagt

SEQ ID NO: 413030 - DNA, 201 bp, Homo sapiens
tcttaaaatataggtctattctatgagcagctgatatggtttgtatctgtgtccctgcccaaatctcatgttgaatcgtaatctccaatgttggaggtggrgcctagtaggagatgattagatcatgggggtgaatttctcgtgaatggtttagcctcatccacttggtgctgttccagtgataatgagtcagttcttgtg

SEQ ID NO: 413031 - DNA, 201 bp, Homo sapiens
ctttcttctactgcatatctaatcttttgttttatttcattaaatgctagttgcaacctgctcagagcacttacctttggttttcttttatctgctcttayagagatgaggaaatagatcaaagcatagcattgttgaacatttctcttgttacccttcctttgcagattattcttctgctgttcagaaattttcccagac

SEQ ID NO: 413032 - DNA, 201 bp, Homo sapiens
tgaactcaggatttagatgtaagtggaaagtgacactaagataaagatggaatagggttgccaaatttatttattatgtatttatttattgatggagtctygctctgttgcccaggctggagtgcagtggcgcaatcttagctcactgcaacctctgcctcccaggttcaagcaattctcctgcctcaacctcccaagtag

SEQ ID NO: 413033 - DNA, 201 bp, Homo sapiens
attaagcagttatcgtctgggagagtgctttgaatagtataaagtatattagaagaattggattattattatcattttggttaattttttctgctgcaatkctgtatacccagtctgatgttaaggggaatgacatgtccagaacgtaagatgcagactaaatggagagacaattcatatgtgtgcacatgaatagtgttt

SEQ ID NO: 413034 - DNA, 201 bp, Homo sapiens
cacagcctagagtcaggttatatttgttatgcctttatatttgaacaccttgtaaattgctgcttatcagtcaattttctgtttaggtgttgtagagtaamaaacaatttttcttcaactctcgtaagttcttagtcagaacatacccttgtaacaaaagacaagattagtaggagaaaacaagctaattaatacgtatat

SEQ ID NO: 413035 - DNA, 201 bp, Homo sapiens
atggtcctcaatcttggctgcacatagcatcacttgggaagcttttaaaaatacccatgctcaggatccatcctaatcaataaaactaggacgtatgaggktggggtccaggtactttacaattttaaagctccttacatatttctaatgtttcactagggttgaagaacagtggtagttgggactacataggtttcagaa

SEQ ID NO: 413036 - DNA, 201 bp, Homo sapiens
cccatgttatactggtaaggaaatgatccgctgaaggtcacacagaaagttagttttagtattaatcatagaatccaggtttcttgactaccagttacatkactctcccctttctgcctcaccagtttgatactgtggcttaactgtgactgagacacattagaggcaagagagaacaacatcggtgtcttcagccaagaa

SEQ ID NO: 413037 - DNA, 201 bp, Homo sapiens
tgtgttctgctagcttttcagtttgtttgctcttgcttctgtagttcttttaattgtgatgttagtgtttcgattttgtatctttcccgctttctcctgtrgacatttaatgctataaatttccctgcgaatactgctttagctgtgtcccagagattctggaattttgtgtctttgttctcattggtttcaaaggactta

SEQ ID NO: 413038 - DNA, 201 bp, Homo sapiens
ctgccttggcctcccaaagtgctgggattacaggcgtgagccaccacacctggccaagaatgtattattcctgtttttttttttgtttgtttgtttttttwaatttggaaatggaggctgctgtagataagtgacttgccaaagattcacagctaataactggcagagctgggatctaaatcttaccatgtctcacaggca

SEQ ID NO: 413039 - DNA, 201 bp, Homo sapiens
ttgctgttcattaaactcggtgaagagttttttaaaaagtatcaggactcacctgaatcagagattctggtttacctgatgtagggggaatgtgggtattstcatttttaaaagcttctcagatgtttctagaagctgtgtttgagaatcattgttctagacactctgaccaaatgataagtagtactagtgatagcagac

SEQ ID NO: 413040 - DNA, 201 bp, Homo sapiens
  misc_feature (1)...(201): n = A,T,C or G
tgtaggtttaattgttaatatcttattcattattgtacaagcttttgctgttgaattttaatattaaaataatgataggttagatttgtgctcacaacttnttattatgttccattttttcccactcaaccgtacattatgtaccctttcttcaagattactgtacagaatgattcttacatatttcagtgtgacattctt

SEQ ID NO: 413041 - DNA, 201 bp, Homo sapiens
aagaagtgttataataataatggacatagaattccaatttcagactcattttttaatcacaaaattctattactgacaaatatgtaggtactcttccgtasaaatttttctgagttacttaatttctcctggcctcacctctttgggaggtaatttagatgaaatggcttaaaaaagttatagtttcacaactattcctca

SEQ ID NO: 413042 - DNA, 201 bp, Homo sapiens
ggaaaaaggaaaaaggaacactggaatcggagttagaagatcaggattatgttcttggcttctccatcttgggatctaacacaaatcacttttttttttttgtttttttctgagacagagtcttgctttgtcacccaggctagagtgcagtggcatgatcgcagttcactgcagccatcgccccttgggttcaagtgatcc

SEQ ID NO: 413043 - DNA, 201 bp, Homo sapiens
taagctatagtagttaaagcagtgtggtactgatgcatgattctaaaaacaacagaacagaccagaaagtctagaaatagattgaactcagaaatttcatrtctgataaaggtggcatttcagagcagtggggaaatgacgtattatttaacaaagtcaggccgggcgcggtggctcacgcctgtaatcccagcactttgg

SEQ ID NO: 413044 - DNA, 201 bp, Homo sapiens
ttggatctgtggctttacatgaactgggaagggtagagaatgattttgtgggatatagttggtttgtgccacagtgacataactgctttgaaaatgtatamaaattttcaaaattaagtatgtatgcatgtatcaaaatgaaaaggttttaaaagttatcattaatcttccctcttggcaccaacttttcctagatgaaat

SEQ ID NO: 413045 - DNA, 201 bp, Homo sapiens
agcactttgggaggctgaggcatgcagatcacgaggtcaggagatcaagaccatcctggctaacatggtgaaaccccatctctactaaaaaaaatacaaaragttagccgggcgtggtggtgggtgcctgtagtcccagctacttgggaggctgaggcaggagaatggtgtgaactggggaggtggagcttgcagtgagct

SEQ ID NO: 413046 - DNA, 201 bp, Homo sapiens
ttgtggtggtgaaaatcatacgcggatcttgaattccctatttggattggatctgtggctttacatgaactgggaagggtagagaatgattttgtgggatrtagttggtttgtgccacagtgacataactgctttgaaaatgtatacaaattttcaaaattaagtatgtatgcatgtatcaaaatgaaaaggttttaaaag

SEQ ID NO: 413047 - DNA, 201 bp, Homo sapiens
ggaaaatttccggaaggaacaaataggcttcaccaaggtacattttctgtatatgcataagattttttaaaatagcaatcgaatagttgtatgggctactmttcttcactttacaaagatatgcaccaatctgctggtgctttgctcttggcctagtcagcctcctaaactgtgcaaaataaatgtttgttgtttatgtca

SEQ ID NO: 413048 - DNA, 201 bp, Homo sapiens
ctaccatgatgtaagcttcctgaggcctccccagaaaccgagcagatgttagcaccatgcttcctgtatagcctgcggaaccgtgagccaattaaacctcttttttttaattaaattatgcaatctcaggtatttctttataataatgcaagaataatacagcaactgaccagattatctagctgtgactgtatattctta

SEQ ID NO: 413049 - DNA, 201 bp, Homo sapiens
cattaaggaattgggaggagacagagaactggaaactgtcaaggataatatggagcctggctcggtgtgagaaagttaaacttatattcagaacggatacygagacagcataaaattgtaagaattcactatgagtgttgtttccacttggggttactgcaaatataactgctatgagcattcttgtacctgtctttaggt

SEQ ID NO: 413050 - DNA, 201 bp, Homo sapiens
ttctgagggctctgttctgttccattggtctatatctctgttttggtaccagtaccatgctgttttggttactgtagccttgtagtatagtttgaagtcaygtagcgtgatgcctccagctttgttcttttggcttaggattgacttggcaatgcgggctcttttttggttccatatgaactttaaagtagttttttccaa

SEQ ID NO: 413051 - DNA, 201 bp, Homo sapiens
cagtatgaaccaatggcattgtctcagagcacaatttagtaaaagctattcagtgtgcggatgggagggggtccagtacaatttctacaagtccagtacartttccacaagtagttgactctgaatgctctggtttgatccactgatgctgatgtgatcactcatgcgatcacagttaatttatgtaagctgtttgtacct

SEQ ID NO: 413052 - DNA, 201 bp, Homo sapiens
cgtgatgcctccagctttgttcttttggcttaggattgacttggcaatgcgggctcttttttggttccatatgaactttaaagtagttttttccaattctrtgaagaaagtcattggtagcttgatggggatggcattaaatctataaattaccttgggcagtatggccattttcacaatattgattcttcctacccatga

SEQ ID NO: 413053 - DNA, 201 bp, Homo sapiens
tccaattctgtgaagaaagtcattggtagcttgatggggatggcattaaatctataaattaccttgggcagtatggccattttcacaatattgattcttcytacccatgagcatggaatgttcttccatttctttgtatcctattttatttcattgagcagtggtttgtagttctccttgaagagttccttcacgtccctt

SEQ ID NO: 413054 - DNA, 201 bp, Homo sapiens
ctcattctgtccatgaagccttctgacaatcctaccccagttagctctcccttgattcacatattttggcacccaagattgaccctctaatgtggatgctrgtttatagtattcacacttgtttcccatgaatatgacttatatcccccaactcagttttgagctcctagagggcaggggtcatttgtgtgtctttgtgtg

SEQ ID NO: 413055 - DNA, 201 bp, Homo sapiens
ttgagtggttttgagtgagttttttaatcctgagttctagtttgattgcaccgtggtctgagagacagtttgttataatttctgatcttttacatttgctkaggagagctttatttccaactatgtgttcaattttggaataagggtggtgtggtgctgaaaaaaatgtatattctgttgatttggggtggagagttctgt

SEQ ID NO: 413056 - DNA, 201 bp, Homo sapiens
caggatcttggctattgtgaacagtgctgcaacaaacatggatgggcagatatctcttcagtatacagatttcctttcttttgggtgtatatatatatatmcacacacacatatacacatatgtgtatatatacatatatacatgtgtatgcatacatatgtatacatgcatatatgtatgcatatatatgcatgcatgcg

SEQ ID NO: 413057 - DNA, 201 bp, Homo sapiens
ggctgtagtgcagtggcccagtctcagctcactgcaacctctgcctcccagattcaagtgattttcctgcctcagcctcctgagtagctgggactacaggygtgtaccaccacgcccggctgatttttgtattttagtagagacggagtttcaccatgttggccaggctggtcttgaactcctgacctcaaatgatccacc

SEQ ID NO: 413058 - DNA, 201 bp, Homo sapiens
cttcagtatacagatttcctttcttttgggtgtatatatatatatacacacacacatatacacatatgtgtatatatacatatatacatgtgtatgcatayatatgtatacatgcatatatgtatgcatatatatgcatgcatgcgcgcatgtatacagatatgtatacatgtgtatatgtatacagatatacatatgtac

SEQ ID NO: 413059 - DNA, 201 bp, Homo sapiens
taagtgtataaaggacacgactgacacttttcaaaagaagacatatacggggccaacaagcctatgaaaaaatgctcagcatcgctgattattagagaaaygtaaaccaaaaccacagtgagataccatttcaccccagtcagaatggctattattaaaaagtcaaaaaataacagatgctggcaaggttgtggagaaaag

SEQ ID NO: 413060 - DNA, 201 bp, Homo sapiens
tctcagctcactgcaacctctgcctcccagattcaagtgattttcctgcctcagcctcctgagtagctgggactacaggtgtgtaccaccacgcccggctratttttgtattttagtagagacggagtttcaccatgttggccaggctggtcttgaactcctgacctcaaatgatccacctgccttggcctcccaaaatgc

SEQ ID NO: 413061 - DNA, 201 bp, Homo sapiens
catatatatgcatgcatgcgcgcatgtatacagatatgtatacatgtgtatatgtatacagatatacatatgtacatatatatacctgtacatacatatayacacatatacacacacacacacatatatatacacacatatatatccaacaatttgattgctggattatatggtaactcaattttgagattttttgtggaa

SEQ ID NO: 413062 - DNA, 201 bp, Homo sapiens
gcctcccaaaatgcttggattacaggtgtgagccattgcacctggcctggtggcattgcttttaacaaatcataacactgtcacattttgtttataggatrggaccaagcacagttttcactccttttcatttacatgaactataatttgagattttctgtcataaacaggtcactgagtcagtatttattaatcacttgt

SEQ ID NO: 413063 - DNA, 201 bp, Homo sapiens
tcagatcataataaacttgccctttttcctcattttcattatgggctcagccgtctcagcttgttcaattttatttgcattttcctcctcatattctgctwgttaccatttgagctctcagctgctggaaagcccttcccagagcaggtctttggggataacaggtttcactaaattggtttcagaaggtgaagtttagtg

SEQ ID NO: 413064 - DNA, 201 bp, Homo sapiens
tcatgtgaacaaaactagcagtgactgggatcataacaatcagactaaatgatgagggcatttttaaaaaaattggggaataaaggacttagcttgtttcmttatttcaaaattgagagattattatttgaccctcacaatttcgatttgtgaatttatatcatttctttgttaaaaatggatgatcccaattgaggtggc

SEQ ID NO: 413065 - DNA, 201 bp, Homo sapiens
aaggaacaatgttttcctaatggctcagcaagccaggagaatgcaaggagactttataccttgcataaagtatggttaatctcaaaattccagatgagtcmcaaagatctaaaaagaccataaagagcataacagcttgggatatctctgggtagttagtagtgtcttagtccatttgtgatgttatgacaaaatacctga

SEQ ID NO: 413066 - DNA, 201 bp, Homo sapiens
gatggataatttggagagatgctgtaggactattcccctgttacagggaaggctggagaacttggagtatgtagtgtgaccccttcctatctgaattgacyctagtgtaccaaggggagatgacaactctagctatacaagtgaaattaacctgattttttcctccactagggatcaagacagaagggttgtaccgcactg

SEQ ID NO: 413067 - DNA, 201 bp, Homo sapiens
tcagcaatacaacttctttccctacatctcaactggaactgtgtggccaggcttagtcggtatcttcttaccaaatccagtgaatacttttgagtttgtgycttacttgatctccttgttgaccactttctcttttttgaaactttctccttacatgacttcgtgacttccataacacatcagcactcttctgattcttct

SEQ ID NO: 413068 - DNA, 201 bp, Homo sapiens
gtcctattcagtttttgctatgagctatgatttgtttgtggaagcaaagtaaaggcagcctatttcttaccgcctccacttcggctgggtcataccagacrttgatgtagggatgctgtaaggcgtcgtccactgatattctttttgctgggtcaatcactagcatctttgacaacaagtccctggcttggctggctgaaa

SEQ ID NO: 413069 - DNA, 201 bp, Homo sapiens
tcctgtggaaattataaaaataatatcttagatttgcagagaagttgagaatctacagagcacattcacagtagtgtccccccacttcccctcccacacayacaccttctttctgtgtcctaaccgaaaatctcagactgccttgaccatttcgtgacccggccagacgcaggtttttcccagcaggcttgaacccaaact

SEQ ID NO: 413070 - DNA, 201 bp, Homo sapiens
agacgcaggtttttcccagcaggcttgaacccaaactggggctttgaacattcctaagtactaataaaggcatctaggtcgttgtccaaaacactaaaacwaactggctctagccctgagctgaattcctgaaaccctcatatgaactccctacccttacccgcttctgcagacaaacctacgtagaacgccccttttgtc

SEQ ID NO: 413071 - DNA, 201 bp, Homo sapiens
cagacgcaggtttttcccagcaggcttgaacccaaactggggctttgaacattcctaagtactaataaaggcatctaggtcgttgtccaaaacactaaaastaactggctctagccctgagctgaattcctgaaaccctcatatgaactccctacccttacccgcttctgcagacaaacctacgtagaacgccccttttgt

SEQ ID NO: 413072 - DNA, 201 bp, Homo sapiens
gggaaaagacataattgcccctcaaaagtaaaatgcataaataaactgtactatgctcactcaatggaatattctataacaataaaaaaggaagaaagtgytgctatacacactatcatgatttaatctcataaacatgttgttcaaaagtcaaacaaaaatgaaagtatatgctgaatgatgccacttatataaagttca

SEQ ID NO: 413073 - DNA, 201 bp, Homo sapiens
gtaggagaatcttttttatggcatttggttagggaattatttcttaagcacagcatgaaaagcacacagaacaaaagagggtttgggacacctagtgtggytgattgtacccctgtgaaaatatttgctgcccctccctcccaggctaacctgcgggagattatatgccctcagccaaggtcacttgcttcagcaacaaaa

SEQ ID NO: 413074 - DNA, 201 bp, Homo sapiens
tgatgtacagatgggttttcagtgtggatgtcctttctgtttgttagttttccttctaacagacaggaccctcagctgcaggtctgttggaataccctgcygtgtgaggtggcagtgtgcccctgctgggggatgcctcccagttagacttctcgggggtcaggggtcagggacccacttgaggaggcagtctgcccattc

SEQ ID NO: 413075 - DNA, 201 bp, Homo sapiens
ttataaataaatgataaatacctgatagggatactatagctttagacttttgtgactggacatgcctttttcagagaccacagaagccctgcctatggagktgttacaaaagatactggctcctgtgggacatgtggtttttaaaccaggggaattttcacagctgctctgagaatcattctttcatagcaaagagaaagc

SEQ ID NO: 413076 - DNA, 201 bp, Homo sapiens
tggatgtcctttctgtttgttagttttccttctaacagacaggaccctcagctgcaggtctgttggaataccctgccgtgtgaggtggcagtgtgcccctrctgggggatgcctcccagttagacttctcgggggtcaggggtcagggacccacttgaggaggcagtctgcccattctcagatctccagctgcgtgctggg

SEQ ID NO: 413077 - DNA, 201 bp, Homo sapiens
tactgctgtctttttgtttgtctgtgccctgcccccagaggtggggcctacagtggcaggcaggcctccttgagctgtggtgggctccacccagttcgagyttccaggctgctttgtttacctaagcaagcctgggcaatggcgggcgcccctcccccagccctcctggggccttgcagtttgatctcagactgctgtgct

SEQ ID NO: 413078 - DNA, 201 bp, Homo sapiens
atggaaagtactaattatagttctttgtgattaaatttgttgttaaaagaatttttttctaaaaacaagtataaggaaatacatatgtatatatatatatmcacacacacacacacacacacacaaacatatgatagagttctgaatctagattttcatggttatgtttctaattgttttgtttctttaaaaatgttttta

SEQ ID NO: 413079 - DNA, 201 bp, Homo sapiens
cattaatgttgatgtggtaaattatagacgtcatttaataaaatgtatatttagaagacaaaacagcactatagacagaaagactttttaaaatgtgtgtcaaacagaagattagaaaaaagtttttagtaagaataatcagaagtaaaaacagtgtaactatttttaactgaagtattttaagtcctttcttccaacaaa

SEQ ID NO: 413080 - DNA, 201 bp, Homo sapiens
attaatgttgatgtggtaaattatagacgtcatttaataaaatgtatatttagaagacaaaacagcactatagacagaaagactttttaaaatgtgtgtcaaacagaagattagaaaaaagtttttagtaagaataatcagaagtaaaaacagtgtaactatttttaactgaagtattttaagtcctttcttccaacaaaa

SEQ ID NO: 413081 - DNA, 201 bp, Homo sapiens
cctttgcatttccacacaaattttaagatggggcttgtcaatttctgcaaaaaagacagctatgattttgataagtattggcttaatctgtacatcaattyggggagtatctgtcatttcttgacaatattaaatattctaatccatgagcaatgaaatgtttttccagttattagatcctctttaatttctttcaacaat

SEQ ID NO: 413082 - DNA, 201 bp, Homo sapiens
ttaatgttgatgtggtaaattatagacgtcatttaataaaatgtatatttagaagacaaaacagcactatagacagaaagactttttaaaatgtgtgtcaaacagaagattagaaaaaagtttttagtaagaataatcagaagtaaaaacagtgtaactatttttaactgaagtattttaagtcctttcttccaacaaaaa

SEQ ID NO: 413083 - DNA, 201 bp, Homo sapiens
aaagttacatgatcttgtcttgaattttgtgtttggaatagtactaagaaatatgctgagggagaaattgagtggcaattttcaaattaatatatatttaytgagctactactatgtgcaaggcacagcacccaggcactacatgggacacaaagataaatgcatacagtcttctcaatgaaattacaatcaatacgggat

SEQ ID NO: 413084 - DNA, 201 bp, Homo sapiens
taatgttgatgtggtaaattatagacgtcatttaataaaatgtatatttagaagacaaaacagcactatagacagaaagactttttaaaatgtgtgtcaaacagaagattagaaaaaagtttttagtaagaataatcagaagtaaaaacagtgtaactatttttaactgaagtattttaagtcctttcttccaacaaaaat

SEQ ID NO: 413085 - DNA, 201 bp, Homo sapiens
atttactgagctactactatgtgcaaggcacagcacccaggcactacatgggacacaaagataaatgcatacagtcttctcaatgaaattacaatcaatamgggataataagacaagaggtcaaatatttaacatacagggactagtaggacctatagaaaggaaagatcctattctttgggaagatataaaaagtctttt

SEQ ID NO: 413086 - DNA, 201 bp, Homo sapiens
aattattctagatagtgttaatatgcaaatcagtttcttttttactcttgtatacatatttgaaaaaagaaaaaagaaaagctgagctgccagcaacctcaaaagagtttcttttataaaacacatttacccttatttataaatataaatacagttccagaagtgaaaagccagttcaagaatgaatgtttcagaatatgt

SEQ ID NO: 413087 - DNA, 201 bp, Homo sapiens
attattctagatagtgttaatatgcaaatcagtttcttttttactcttgtatacatatttgaaaaaagaaaaaagaaaagctgagctgccagcaacctcaaaagagtttcttttataaaacacatttacccttatttataaatataaatacagttccagaagtgaaaagccagttcaagaatgaatgtttcagaatatgtt

SEQ ID NO: 413088 - DNA, 201 bp, Homo sapiens
caaataagaactccaaattattaacttagattaacttgaaaaaattgtttatctgttatgcgggagtataaggttgaaaccctgagaagaaacctgcccayggtaatcactcagtaaaggctagctgagttgccagtagctttgagatcaacaaaagaaagatgaaccaaaggcattgtgcgatacaattaaaccagagca

SEQ ID NO: 413089 - DNA, 201 bp, Homo sapiens
gaagaaacctgcccatggtaatcactcagtaaaggctagctgagttgccagtagctttgagatcaacaaaagaaagatgaaccaaaggcattgtgcgatayaattaaaccagagcaccctggaaacaatccatttactttttttctttgtatattctttatacctaagcaatctgagtggtaacacacttgctttgtgaaa

SEQ ID NO: 413090 - DNA, 201 bp, Homo sapiens
atctatttggtgaaaaataataactccaaagtcagttataatagtgttatcacatagacctaataaatcagaaagacaaaataaaactaaattaaggaagrggagtggttaacataatccttgctcctggagtagacatttcttgcctgtgagaaaagtgtgatgaaaatgtatcagttatctagagaggacacaaacacc

SEQ ID NO: 413091 - DNA, 201 bp, Homo sapiens
ctatttggtgaaaaataataactccaaagtcagttataatagtgttatcacatagacctaataaatcagaaagacaaaataaaactaaattaaggaagggragtggttaacataatccttgctcctggagtagacatttcttgcctgtgagaaaagtgtgatgaaaatgtatcagttatctagagaggacacaaacaccta

SEQ ID NO: 413092 - DNA, 201 bp, Homo sapiens
gtggtgcatgtgtttctctgtgtgtacatgcatgccaagaaaacaagaaggaattttgtcacagtaaaataaaacatgtcgtcagaagtgacaagatatamgagctgtacttagagaagcagaagggtcagacaaagggtggatcaaggatgatccagggggccaggcgctgtggctcatgcctgtaatcccagaactctg

SEQ ID NO: 413093 - DNA, 201 bp, Homo sapiens
aagttgtatttgttgactataaatatatggacgtactctatgggaaatgtgaaaaaatataggaaataaagataatgatatgcaccgatcttcaaataaayggtaagaactgttaaacttttcatatatttcttcccggtcattctttttgcctggaagtttccctggtcgtgatcttttaatatgtatttttttgggatc

SEQ ID NO: 413094 - DNA, 201 bp, Homo sapiens
caacctaaaagaaaacagatggctgaatcctttcactccccttacgtacatgtggtccaacattgtctcaacaagactgtagccctacaaccaacaatcgmaagagtgacatcaacacataaaaggaaggaagtgcacattcagtggaaaccccaatgagaaatacgcttctgccaagactatcaggttggtatagtactt

SEQ ID NO: 413095 - DNA, 201 bp, Homo sapiens
attgcaatatgagaacatccttatctctgacacctttaaataccccttagggtctcatctacttagatctctgatcttagaccacatgtctctcctgactrcccagctggtcttgactgcttggcctacatatctgcatcagctgtctctctggaatgcccagatcaagctctggaacctgttctactttgaccacaggct

SEQ ID NO: 413096 - DNA, 201 bp, Homo sapiens
catgactaattttccctctcagaattatgacaacattcattcatatgctcttctctcttgatttttgtactttggtagtttgggaaacatgataagatagmtcgtagtataactaatagcttagcacacatagcatatctatactcttttgacttttcctctaaatatcaccttatcatagtttgttctttatcccctatc

SEQ ID NO: 413097 - DNA, 201 bp, Homo sapiens
tcatatcatttgcccattttttgatggggttgtttgttattttctcataaatttaagttctttatagattctggactttagccctttgtcagatggatacwttgcaaaaatgttcccccattctgtgggttgcctgttcactctggtaataatttcttttgctgtgcagaagctctttagtttaactagatcccatttgtc

SEQ ID NO: 413098 - DNA, 201 bp, Homo sapiens
aatctggtatgcattttacacataaaacacatttcaatttagactataatttcaagtgctgaataaccacatgtggctagtggctacctactagacagtgsagttctagaatatgtcatcactcttacattactagtggattttagagactatctcattaatatccagcagaatgaatacatacctacctaaatacaagct

SEQ ID NO: 413099 - DNA, 201 bp, Homo sapiens
gtggctacctactagacagtgcagttctagaatatgtcatcactcttacattactagtggattttagagactatctcattaatatccagcagaatgaatayatacctacctaaatacaagcttattatggtacccacttcttgttgagtcaggtttttttgtttttgttttttactattggactttttaaacacctcaata

SEQ ID NO: 413100 - DNA, 201 bp, Homo sapiens
gtgtgaatgtcctttttgttgatgttgatgctattcctttctgtttgttagttttccttctaacaggcccctctgctgcagctctgctggagtttgctggrggtccactccagatcctgtttgcctgagtaacaccagcagagactgcagaatagcaaagattgcatctgttccttcctctggaagcttttttcagagggg

SEQ ID NO: 413101 - DNA, 201 bp, Homo sapiens
aaatacctagaggaaaaagaaatggagcataaattttcaaatcactagtttttcattatataacaatatagattttggcataatttgagttatatgcaaaktaccatgcacaacatatctccaacataatccttatcttgacctgtactatacctttcacaaattgtatttaataatgaaataaggttaaaatgtcctatc

SEQ ID NO: 413102 - DNA, 201 bp, Homo sapiens
gtgtcttctcagtgccactggtagatggcgagcattaggacaagatccctggtttataaaaccgcactggtaatgtgttctgtgtaattttcatacataasaactttgtagagagttattatagctattatactatagaataattttacttgtaatgaagttatcttttgatttttaagaaaataaaattttatttataat

SEQ ID NO: 413103 - DNA, 201 bp, Homo sapiens
accccagttggaaatgcagaaatcactcatcttctgtgtcaatctcactgggagctgaagaccggagctgttcctattcggccaccttataagcgaccccrcataatttattttcaaataatcccttttgcttttgttttggttcaggtcccctaaaaacagtatttatgaatacaattgaatattttggtaatcatccta

SEQ ID NO: 413104 - DNA, 201 bp, Homo sapiens
gttatatgcaaagtaccatgcacaacatatctccaacataatccttatcttgacctgtactatacctttcacaaattgtatttaataatgaaataaggttraaatgtcctatcttttataatgatcaattccatcacactcataaagattagatataagaaagtggacatacctaataatttaaagggaaatacatcctgt

SEQ ID NO: 413105 - DNA, 201 bp, Homo sapiens
attgtgaacagtgctgcaataaacataagtgtgcatatgtctttatagaagaatgatttataatcctttggatatatacccagtaatgggattgctgggtyaaatggtatttctggttctagatccttgaggaattgccacactgtcttccacaatggttgcactaatttacactcccaccaacattgtaaaagcattcct

SEQ ID NO: 413106 - DNA, 201 bp, Homo sapiens
catatgtctttatagaagaatgatttataatcctttggatatatacccagtaatgggattgctgggtcaaatggtatttctggttctagatccttgaggamttgccacactgtcttccacaatggttgcactaatttacactcccaccaacattgtaaaagcattcctatttctccacatcctctccagcatctttgtttc

SEQ ID NO: 413107 - DNA, 201 bp, Homo sapiens
gttgcactaatttacactcccaccaacattgtaaaagcattcctatttctccacatcctctccagcatctttgtttcctgactttttaatgatggtcattstaactggcatgagatgttatcttattgcagttttgatttgcatttctctaatgactagtgatgagctttttttcatgtttgttggctgcataaatgactt

SEQ ID NO: 413108 - DNA, 201 bp, Homo sapiens
tcctatttctccacatcctctccagcatctttgtttcctgactttttaatgatggtcattctaactggcatgagatgttatcttattgcagttttgatttkcatttctctaatgactagtgatgagctttttttcatgtttgttggctgcataaatgacttcttttgagaagtgtctgttcatatccttcacccacttttt

SEQ ID NO: 413109 - DNA, 201 bp, Homo sapiens
aatatcaaaagaaagaatggcaatcagtcatgaaggcatataagggagttggagaggcaaactctggcacttcttggccaaataagaaagtacctttccakgtaggtctagagatcctgtcagccaaccagatggacacattcatattgtgattgtcagaaactacagccagttagcattctgatcagagtctccttgggc

SEQ ID NO: 413110 - DNA, 201 bp, Homo sapiens
taaatttaaggaagactgaaaggataagaatatataagacattcctgaagaagaacaagtggctgtttgcctagcgccggcaagggaagtattctgccagrgatcaagaactattataaaggtgtgataagtaaaaatatgttgcattgatgtcatgatagactatgaattaatagaatacagagcccagaacagacacag

SEQ ID NO: 413111 - DNA, 201 bp, Homo sapiens
taaacttttcatatatttcttcccggtcattctttttgcctggaagtttccctggtcgtgatcttttaatatgtatttttttgggatcttgatatttttakatacagaaaagcttatgaatttttcatgttctttaaactcctaaaaatacccatcctttctaatcttaaatgtctctagaaaaggtttttaaagtcctcc

SEQ ID NO: 413112 - DNA, 201 bp, Homo sapiens
tatacagaaaagcttatgaatttttcatgttctttaaactcctaaaaatacccatcctttctaatcttaaatgtctctagaaaaggtttttaaagtcctcytgttattgtctttctgtaaataattactctatcaggacaatgtataaagttataatattccataatattccaactttgaatggctttaatttattccaac

SEQ ID NO: 413113 - DNA, 201 bp, Homo sapiens
agaaaatcccattgtctcagccaaaaagcttattaagctgataagcaacttcagcaaagtctcatgataaaagatcaatgtgcaaaagttacaagcattcygagaggacagccaagatggcctaataggaacagctccagtctacagctcccagtctgagcgacacagaagacgggtgatttctgcatttccatctgaggt

SEQ ID NO: 413114 - DNA, 201 bp, Homo sapiens
gataagattttatctcctagcagacagcccttggttcctttacattgcccaaatgccctgctctgtttttcacccccgattctggattaaattataccaayatccttcatattctttcataagttgctaataatttagtgtcactatgatggactcctcagaattctcttccatttatccacactcttattaaaagacaga

SEQ ID NO: 413115 - DNA, 201 bp, Homo sapiens
ttgaagcacacatatttttaatttttatgaaatagcatttatctgttgtttcttttatcacttgtgttttagtgtcatatctaataaaccattttctaatycaagattataaaaacttactcctatgtttttgcctaagagttttataatgttagaccttatacttaagtctatgattcatttttagttcatttttgtata

SEQ ID NO: 413116 - DNA, 201 bp, Homo sapiens
cctactgcacttattttcaaaatcagcatattttcagcacacttctggaatattccgagtgttatgccataccagtcagccccttattatatgtagttttsttatggattacctcaagcatatatttcccctgcttctttttactgctttcattatacttcatttctcctgtcttccacaatgtctactgctgagtagtag

SEQ ID NO: 413117 - DNA, 201 bp, Homo sapiens
aatctatcaaagtctttatcagctgtatttctagggatccatagactattgcttctgattttatatggcacaaattcattaagagaagtcttcagtgcttyctttgtaaaagttcccatgacatctgcttgtttcatgggaatggttccttgctatccagtgtgatggtgggagagaaccgtgcactgtctatggtgtcct

SEQ ID NO: 413118 - DNA, 201 bp, Homo sapiens
atattagtgaccctaagacatattcccatggtggggaatgtggtcctcactggggagagaatggttgcatattaaaatcacccagaagctttatctttgayttagagattttgaaaaatctctgcccatcctgttgttcagcatccttatcttagtgagtcactgttagttttgggagctttacttctcaggtggaagagg

SEQ ID NO: 413119 - DNA, 201 bp, Homo sapiens
aggaagcaagcagctatgccatccttgaaaataaattactatgcaagtgaaatcagatagcagaagggaatacaattatttatttggaaatgtatctgaartttagatttatctcttattgacatacaacaatttcatcaataaatttcaaacctataaattattctgcaaatgcacatttaacttcctatttacatttta

SEQ ID NO: 413120 - DNA, 201 bp, Homo sapiens
caataaatttcaaacctataaattattctgcaaatgcacatttaacttcctatttacattttaaaagcatcgcataacatgggtttcgtattagaagtacktggcccctgagatactgcattaacttactcccttgctgcagaattcccagtattgccataactgaatactaacagagtgtgtgttataaaaataccacag

SEQ ID NO: 413121 - DNA, 201 bp, Homo sapiens
gtcatgagctggtagagtcagcgccagcacatggctgccctagagcctctccatcatgcacataaatatgtcatacagaaatgcatcccataatgtgtagyatacatatgatttctcacgaaagagaaagtcatactacatgacttataactaagtcatgaatatttttcctagatttaatccacaatcattttaactata

SEQ ID NO: 413122 - DNA, 201 bp, Homo sapiens
gtgagaccaccccatatcaataaaaataataaatacacgcatacatacatatatacgctgtagccatacagttctctggcttaccactttaataaactatytgtatgatttgtttttaacaaaccccctattcccagtgatcactacaccctgtcttaatggttcacagggtatcttttctaaccaatacaaggaccagtg

SEQ ID NO: 413123 - DNA, 201 bp, Homo sapiens
ccaggttcacagagatattctcctatatattctttgtgaagctttaaatcgtctttttcttcttctttttttagtgattgttctagagttaacaccctacwtttttaatttataataatccagcttcaaataatattctgcttcacatatagtttaagaaacttacaatagtatacttccattttcctctccaatcctttg

SEQ ID NO: 413124 - DNA, 201 bp, Homo sapiens
tatatagataatgttgagaaaatgtttactgaatgaaagaagaacccaattttaaaagtacaaatctacatttttaaattatctcctcatattgaaacctgtgaatttgcgatacatttgatactaacaaattaggagcaaggagtttgcagtagtagaaatatgaaggaaataatccaagcacaatgacttcagaaatgc

SEQ ID NO: 413125 - DNA, 201 bp, Homo sapiens
gtttgttttaaataaacatgaagattgtcaagacaaggtttggtccatatagtagtcttctcacataacctattaatatttctctaagtattttaaaccargattgaagttggcactttgagactacatattgggatttctttgcacaattacctaaaaagtatcacaccaatcaaatacgagtattgattttactcctaa

SEQ ID NO: 413126 - DNA, 201 bp, Homo sapiens
gttccacttgtatgtatctacactgagaaacttgacacaaaatgcaaggagagatcgtgttcattatatctcagtttttaatagcaaaaagtcaacaaaaytaacaacctaccatgagagaaatgtattcatgaaagaaaatacaagacttgaagtgaataaactgaatctaaaagtaacaatatggatacatttctaaag

SEQ ID NO: 413127 - DNA, 201 bp, Homo sapiens
agaccaaatctacgtctgattggtgtacctgaaagtgatggggagaatggaaccaaggtggaaaacactctgcaggatattatccaggagaacttccccartctagcaaggcaggccaacgttcacattcaggaaacacagagaatgccacaaagatactcctcgagaagagcaactccaaaacacataattgtcagattc

SEQ ID NO: 413128 - DNA, 201 bp, Homo sapiens
tgagaggaactgcataagctataaagcctaagatacttattagttggcctttatagaaaaagtttgccaacctctgatttagagcatgctaactgacaaaraaccagaagtataccattagcctcgatagaaaggccaaactaatttaatgtctccaaccataagtatataaatgcacaaaataatttctaaaataatatc

SEQ ID NO: 413129 - DNA, 201 bp, Homo sapiens
cccgtctctactaaaaatacaaaaaattagccgggcgttgtggtgctcacctgtagtcccagctactcaggaggctggggcaggagaatcgcttgaacccrggaggcggaggttgcagtgagccgagattgtgccactgcactccagcctgggcgacagattgagactccatctcaaaaagaaaaactattcaagtattca

SEQ ID NO: 413130 - DNA, 201 bp, Homo sapiens
gaggctggggcaggagaatcgcttgaacccgggaggcggaggttgcagtgagccgagattgtgccactgcactccagcctgggcgacagattgagactccrtctcaaaaagaaaaactattcaagtattcaagttaccatctcacatccattgggatggctattatttcaaaaaaaattaaaaaccaaacaatcaaaacta

SEQ ID NO: 413131 - DNA, 201 bp, Homo sapiens
tattcaagttaccatctcacatccattgggatggctattatttcaaaaaaaattaaaaaccaaacaatcaaaactacagaaaataacaagcgttgttgagratgtggagagatatgaacccttgtgccctattggtgaaaatgaaaattagtacagccaccctggaaaacagcacagcagtaccttaaaaaatgaaaaata

SEQ ID NO: 413132 - DNA, 201 bp, Homo sapiens
atttctcaatgcattttgtcattatacctattaactggcatacaactcagctccttggttactgcaagaaaccctatataccatcaccacagccatcatcygacacacagaatactcagcatgtaacgtccttgtattctccacatctttaatcattgctaggtttgtatatgtacacatgtgaattatacatggtctttt

SEQ ID NO: 413133 - DNA, 201 bp, Homo sapiens
ctattaactggcatacaactcagctccttggttactgcaagaaaccctatataccatcaccacagccatcatccgacacacagaatactcagcatgtaacrtccttgtattctccacatctttaatcattgctaggtttgtatatgtacacatgtgaattatacatggtctttttttctaaatagttactggaaagaaaag

SEQ ID NO: 413134 - DNA, 201 bp, Homo sapiens
ggtaagaagagaacaaccatctattgaaaaccgtctacagataagtgctttgtataataaattatttgctttaatattttcttttctagaaatgtgtatawgaattacaatatattacttaatcttacaacataaaactgcacacacttttgccaagcgtatgtttacacattttatccacatccaatttaagtaagttat

SEQ ID NO: 413135 - DNA, 201 bp, Homo sapiens
aaaacaacaccctaatcagtttttctcaaaactaggcatttgtagcccccatttttgctagcaggagttgaatgtagtttttaaagctgaaaataaaccawcacattttctaaaactctttatagtgagagcataggtcttaggaaaaaatatattagcattaataagtaaattgtctcaagtcatactaaagcacattac

SEQ ID NO: 413136 - DNA, 201 bp, Homo sapiens
aagtcatactaaagcacattactaggatcagtaaaaaatatatatgcacaattgtgtattagattctgtggctagcaaacgaaaaattttccaagctgacyttaaccggagcccatcttggtagatgtttcaactattgtcacatcaaccttgagaagagttcaaacactaagaatgaatgagggaagaggtagcggctga

SEQ ID NO: 413137 - DNA, 201 bp, Homo sapiens
atggctctgaattttgatgaggcacatttaccctttagcccatgttaacattttcttcaggattcattactattaaaattatttatgaaaaagtttttgtrctggatcattaccatcagaataatcagaatgaatgccacactgaatatcaaaagaaataaaactaaaatcattataaggacacaaccatgtgatatttgt

SEQ ID NO: 413138 - DNA, 201 bp, Homo sapiens
gtactaatacattctagctcaatctagcaacaatttttatggctttgaacatccatttttctttatacttatttcctatgaaatgcacacattctcatgastttaaattattaccaatccttacaacttccatctcttactgcatctttttttttttccagactcatatcttggacttgtaaatctaaacttgccaaaaac

SEQ ID NO: 413139 - DNA, 201 bp, Homo sapiens
aaacacattaaaaaatttagttcatttactctcagactggcatccatttttggctttctgaatgctagagttaaattggatagtttcagttctgtttactytgtccctttagctaaaaatcattccgccctactcattcttgctttgcaatggcttataatctgtataatcatcatcctttacatgtacttctttctccaa

SEQ ID NO: 413140 - DNA, 201 bp, Homo sapiens
aaaagtatacttttttaagtagtagacttacctttccattcttcaattgtgtgttctctttcatccaactgcttgtcatatatctgaggtggaggctgccraataaaaacaaaaaataatctttgtgtgataatgtaaacataactaaactcttacaatgcacgagaataccttgccctcatttatttcggtgatttcaac

SEQ ID NO: 413141 - DNA, 201 bp, Homo sapiens
tttcatccaactgcttgtcatatatctgaggtggaggctgccgaataaaaacaaaaaataatctttgtgtgataatgtaaacataactaaactcttacaaygcacgagaataccttgccctcatttatttcggtgatttcaaccgtatataagttatgaggaaattacagtagttcagaagttaaaattttcctgtaaact

SEQ ID NO: 413142 - DNA, 201 bp, Homo sapiens
gccgaataaaaacaaaaaataatctttgtgtgataatgtaaacataactaaactcttacaatgcacgagaataccttgccctcatttatttcggtgatttsaaccgtatataagttatgaggaaattacagtagttcagaagttaaaattttcctgtaaacttatggaggattcattcatattgcaatatttgctgctgac

SEQ ID NO: 413143 - DNA, 201 bp, Homo sapiens
acgagaataccttgccctcatttatttcggtgatttcaaccgtatataagttatgaggaaattacagtagttcagaagttaaaattttcctgtaaacttayggaggattcattcatattgcaatatttgctgctgacccaatattgctgcaatatttgcagcagaacgcaaatcccgagagctcactttccgacatcttct

SEQ ID NO: 413144 - DNA, 201 bp, Homo sapiens
cttgttgttcaagtgccaaaatcaagacttaataataatgaataatttttttagttataagcacttttgctcccaactcatttgtttctaaagttcttaakgctttacatacatgagtaacttgattctcactaaaaccatatgaagtaagtattactattgatatggtttggctgtgtccccgccaaatctcatcttgaa

SEQ ID NO: 413145 - DNA, 201 bp, Homo sapiens
tcccgagagctcactttccgacatcttctgatttagaacccacgcctaagcaattaatgactggtcttttaaaaaacagacaaaacacttgattacaatgrcccagaagctacttttccttcattcacttgccttataacagaaccatgctaaaattcttctaggctaataagattttgttctatttttagaccttcccta

SEQ ID NO: 413146 - DNA, 201 bp, Homo sapiens
tcagtgtctgtgaaaaaccttggactcaaatacttttacattacaatgcaaaaatacattagaattaaaaatattttcaattaataaaaagaatattttcmatttagcaaaatttgttcttagcagatacctaagccccttttgagaacatttttcaaataaaaatattgttatatatattaaatgtgtcaatatttcaaa

SEQ ID NO: 413147 - DNA, 201 bp, Homo sapiens
aagacatttaataaactaataatctgaaagagagtggaagggacagaggaaacgagagaaagaaaaaagagagagaatgtattatttttaaattgtatttyaactcaaagtcactcactagtgctatggcagaaatggagaagttggaaaaatgtcttgagctgtctcagaggacacagaaaagtatgctcagaaagaaca

SEQ ID NO: 413148 - DNA, 201 bp, Homo sapiens
gcatcaagaaataaactagcagtaaaatccaaggtcatattcagtgtgataggcactgcagatcttttctattaataaaaagcaacagaggctttttctayccatgaaatgtttttttaaaagagctttcttattattttagtgaaatgaagtttttccttcttaataaaaattttcaaatttctaccaaaaaaaatcctt

SEQ ID NO: 413149 - DNA, 201 bp, Homo sapiens
aagcccagctgatacaaaatatataatcccaattttgtaaatgcacatgaatacaccggcacacacacacacacacacacacacacacacacacacacacmggtggggaaaaagaaagaaataaaatattaatagtgatcctatctggataatcaagttataaaatattattttcttctatgtttccaagtttcctattct

SEQ ID NO: 413150 - DNA, 201 bp, Homo sapiens
ttttggtacgttctcccttttccctagcttaaattgtcacttaggctagtccactgagctagcccacagtctcccgaatagaaggcggctgggaagtgccmatcagtcagggacagacagacagccaaggagaggtttagaaattaaaattcagtgtgaagctagaaagacaaaatggagaagtgataacaggctaggacc

SEQ ID NO: 413151 - DNA, 201 bp, Homo sapiens
atattcttcatttatagaggatgatgctatacaacactcaaatcctctcttctaaactaaggcactcatttatccaaatgccaggagttttgcttactgayagcacacagctgagccgtttcctaaaaatggccctctgctaaaaggagcttctgggcccaaggttactcctcttccccagtgactgtgcaatgcaaggta

SEQ ID NO: 413152 - DNA, 201 bp, Homo sapiens
tcctctcttctaaactaaggcactcatttatccaaatgccaggagttttgcttactgacagcacacagctgagccgtttcctaaaaatggccctctgctawaaggagcttctgggcccaaggttactcctcttccccagtgactgtgcaatgcaaggtacaaagccttcacaccacctccacactttgccttaacttgggg

SEQ ID NO: 413153 - DNA, 201 bp, Homo sapiens
gttattcagaaattgtcttgaggacatgccctaaccttttgatatcactcatcaaaggaaaatgtgactcacaaagactttaatcccctttcctcccaacrggagatacagtctgtatagagagctgtttgcatttataactcatttaaatcatgtcttccagatacttcaggtttaactcacagtgctacactcaaacta

SEQ ID NO: 413154 - DNA, 201 bp, Homo sapiens
ccattttgttcttgactggtcctccaggcctccagaagatctatgcaccccctaatagacttttacacacaatgtttgaaggcaacttctaaacttcatcmaaccttctccaggagcagaggaatttcatcatgctgatgacatcttcctctaaggagagtcagttcacacacttattcagtacatgcaaacattcacaaa

SEQ ID NO: 413155 - DNA, 201 bp, Homo sapiens
aaagtgaaaagttctttcctagtgaaagaggtctttcctatggcagcagaagagtagatttacagcaacctaaaagaaaacagatggctgaatcctttcaytccccttacgtacatgtggtccaacattgtctcaacaagactgtagccctacaaccaacaatcgaaagagtgacatcaacacataaaaggaaggaagtgc

SEQ ID NO: 413156 - DNA, 201 bp, Homo sapiens
aagggacaagacatgggccttggctttaagttgttaaattactgccaagcagtttgcgaaaatctcttaaacagaattgaactgaattgaatatgatcatwgtgttcagttgtccagtcaatgtgagaaatatctcttctttctatattatttaagagaaaacagtagagatacacattttcaaaaatgttttgccatcaa

SEQ ID NO: 413157 - DNA, 201 bp, Homo sapiens
tctcacagtacaatatcactgagttacctctttgtttttctacttccaggaaacaaaaggtcaccagtgacctgcacacagattatagaccaaactggtgrtgggcacttgggaaatacttggactaattgtcaagtttaaaatatacaagaaatactaaaacatattatggaaataaaatcactaacatgctaaacatta

SEQ ID NO: 413158 - DNA, 201 bp, Homo sapiens
actcatgcaagaatccaaataggtcaatatattcgttttctgtgcagaaaagagttaacagcagcctgaagctgttatccctagaaatccgtgcttggaartttggccctgagctggagtatagaaacttggaggtggagagggtttctaccattgtcaggactgatgagagggccataactgtttgtattaacaatgtgg

SEQ ID NO: 413159 - DNA, 201 bp, Homo sapiens
acattaaaaaatttagttcatttactctcagactggcatccatttttggctttctgaatgctagagttaaattggatagtttcagttctgtttactctgtccctttagctaaaaatcattccgccctactcattcttgctttgcaatggcttataatctgtataatcatcatcctttacatgtacttctttctccaatttc

SEQ ID NO: 413160 - DNA, 201 bp, Homo sapiens
tcttctgatttagaacccacgcctaagcaattaatgactggtcttttaaaaaacagacaaaacacttgattacaatggcccagaagctacttttccttcaytcacttgccttataacagaaccatgctaaaattcttctaggctaataagattttgttctatttttagaccttccctaaagaaaagtttatatttctcaac

SEQ ID NO: 413161 - DNA, 201 bp, Homo sapiens
cttcagaaaaggagagataaagtctttccacaacaaaagttgagggagttcaccaccagacctgtctcacaagaagatgcttaagagagttcttcaggctaaaagaaaagcattctaattagtgacacaaaaacatgtgaaagtgtaaaactcacttacaaagataagtacacagtcaaactcacaacaccctaatactgt

SEQ ID NO: 413162 - DNA, 201 bp, Homo sapiens
ctaaagtgacccttctctaattcatgcagaatctgtggtagcttgaatcatgacagacacaaatattcatcctagccctggcatgctggggcctcacatcstgcaaagtatctggctatgaaaatagaagactttgcctggctgtggtgaagtaacttagcataatactgaagtattgagaaataactactcacggagcca

SEQ ID NO: 413163 - DNA, 201 bp, Homo sapiens
tctgacttagtgagtgaatgagtaaaatgaagttatttttgaaaaattgtgaaaccattacctaaggaagctaccacaaagccaaactctggttttgtaargacgctttgccaagtggtaaatttccggctttgcctcttcctgagcatgtataatgctgtggttaggccgctatccaagcgaccttgtccaggacccctg

SEQ ID NO: 413164 - DNA, 201 bp, Homo sapiens
acactaatcacaaacaaactacaagagagaatgcaaagtgctgagttcaagatttttcctttcaacaaaccaagagggctgctttaaaccacttgatttayagtatttgttcgacggcctctgcaaatttactacatattcagatttttgattgtttgttttttgaagaggaaatgcgaatgtcacctccagtgaaagggc

SEQ ID NO: 413165 - DNA, 201 bp, Homo sapiens
gtgatgcttattcagtgagcgaaagatgtgtgggaggttgtcaagataaaagaaggaggaaaaaagtgactccatgccaagagcacattataagccaagtyacagtatgtagaaaacagaataggggtggtggtggtggtggtggtagtggtagtggtggtgcatgtgtttctctgtgtgtacatgcatgccaagaaaaca

SEQ ID NO: 413166 - DNA, 201 bp, Homo sapiens
aggaataattaataaatgttaataaataaacttggtagaagttggtttttgattgaacatatgtgatgggagagaagaatatgagtccccaatttctaagytgagtacctgggaagatgatcgtgttggtgaagccatctaaagaaatagagaatggaaaaggggaaatgagattggtagaggtgagcctaagtgttatgt

SEQ ID NO: 413167 - DNA, 201 bp, Homo sapiens
gtgtatagatttgagactaacagcaagtgatgtttgttgaaactatgacagtggatgaggtcacccagggaagatatgtgggtatagagagtaaatggccraattaaaatttaaagattggacagaggaaggtaagttcactaaggcaaaagagaatagctaaagaaatacatgaaaaatgagaatattgcaatgttatag

SEQ ID NO: 413168 - DNA, 201 bp, Homo sapiens
tgagcttccacacctttcccagcactgatcaggggcttatagccttagactcaaggtctatacagcagacttggtctctgggccactctactgccaggtcyaccttagcagcccagcctctggaacttctccagcactgggctgtcccctataatcctggacatcagatccatcccagtaactgactatttcctgcagact

SEQ ID NO: 413169 - DNA, 201 bp, Homo sapiens
ctcaagatcgattaaagacttaaatgtaaaacccaaaaccataaaaaccctagaagaaaacctaggcaataccattcaggacataggcatgggcaaagacytcattactaaaacaccaaaagcaattgcaacaaaagaaaaattgacaattgggatctaattaaactaaagagcttctgcacagcaaaagaaactatcatc

SEQ ID NO: 413170 - DNA, 201 bp, Homo sapiens
ttaatttaaaatactgtctcttaaaaatcttgtgctgctcttacactaatatgtcagcactggtgcttctgtgcttgtgtttgttctttttcacctaccartggcagcacagataaagagccaagtgggcatgtttcttataggtaacatacaagggcaacagtggatttggaaacacaggaattaaacttactgtctaaa

SEQ ID NO: 413171 - DNA, 201 bp, Homo sapiens
ctttagtttaattagatcccatttgtccttttttgcttttgttgcaattgcttttgccattttcatcaggaaatttttgcccatgcctatgtcctgaataktattgcctagattttcttctaggatttttatagttttgggttttacatttacttctttaatccatcttgagttaatttttgtataaggtgtaaggaagag

SEQ ID NO: 413172 - DNA, 201 bp, Homo sapiens
cctcctgagtagctgagactacaggtgcctgccactccacctggctaattttttatttttagcagagatgaggtctaagtctgttgcataggctgatctcraattcctgaactcatgtgatcctcttgccttggcctcccaaagttctgggattacagacaggtatgagccaccacaccaggcttgaaactctttattgtt

SEQ ID NO: 413173 - DNA, 201 bp, Homo sapiens
aacgcacgagggggcatcaaacctagatgatgggttaatagctgcagcaaaccaccatggcacatgtgtacctatataacaaacctacatgttctgcacaygtatcccgggacttaaagtaaaataaaaataaaataaaaaagaggcttcctatagtattcacctagcttgcccttctaccttctatgtgaggactcagca

SEQ ID NO: 413174 - DNA, 201 bp, Homo sapiens
gagcagaaatttaaacctaactcatctttcatacctatgaagatgcaaataagtcaaccaattacatttgtgtgtaatatatttgccctcttgatgaataytgaaccagagttagagcatcttctatttgtttcatgaaaaagcattgacattatacacgatttgtgtgttctactttgaaatcacactttgttactctaa

SEQ ID NO: 413175 - DNA, 201 bp, Homo sapiens
ggagtatagaaacttggaggtggagagggtttctaccattgtcaggactgatgagagggccataactgtttgtattaacaatgtggtttatgctgaatacytgctttcctcctggaagtctcaaatttttgtacatcccagacacagggtgcctacatgactagccaccaataaatccttgggctgtagttttcagtgagc

SEQ ID NO: 413176 - DNA, 201 bp, Homo sapiens
tcaaatgctggtaccttgttcttggacctctccacctccagaactgtgaaaaaataaacttctgtgctttataaattatctggtctgtggtattctgttayagaagcacaaaatagactaagacaaacatcaatatttatttaaagtgtacgaaatgttgtaaactctattggtatggtaaccttctccacaaatgtgtta

SEQ ID NO: 413177 - DNA, 201 bp, Homo sapiens
caagtcctgtgtgactctaccgagagaagactcctgaaagcttgtgtgtggttccctttgaatttcacctcatgggccattttcttttgctaattcacttygcagcctttcactataataaatcctaactgcgaatgtaactctatattttgagttctctgagtcctcttagcaactcatcacactcagtggtggtctttg

SEQ ID NO: 413178 - DNA, 201 bp, Homo sapiens
aaataaacttctgtgctttataaattatctggtctgtggtattctgttatagaagcacaaaatagactaagacaaacatcaatatttatttaaagtgtacraaatgttgtaaactctattggtatggtaaccttctccacaaatgtgttaaatatatttaagcacatctcagtcagctgattaattggtttttaattcact

SEQ ID NO: 413179 - DNA, 201 bp, Homo sapiens
tttaaaatgtgtatgcctatgacccctggcattgttattaagaaaaccttgcacatgtgctcttataagcatatatttatagtaccatggtttataaaagaaaaaaaaaaacagtaaaatccgtatatattccaaagtctacttataggataatgggttagttatagatactcatagactgaaatactattcagcaatgaa

SEQ ID NO: 413180 - DNA, 201 bp, Homo sapiens
tcctgaaagcttgtgtgtggttccctttgaatttcacctcatgggccattttcttttgctaattcacttcgcagcctttcactataataaatcctaactgygaatgtaactctatattttgagttctctgagtcctcttagcaactcatcacactcagtggtggtctttgggacccgccccccaacacattttccatattt

SEQ ID NO: 413181 - DNA, 201 bp, Homo sapiens
ggtttttaattcactgatctcttggttctacccttttttatatttttattattatagagattaaaactacatttaatctagagacactaaattgtgcagtyatattacaattttatttaaggatgcagccatcattgtattgtaagaagtaagatatgtgcagcctttactgtctgcagctttttattatgggcaagggca

SEQ ID NO: 413182 - DNA, 201 bp, Homo sapiens
atttctcctcaagaattttgaagagagttccagaaaataagaaacgacagatgtgcctggaatttcatttctattccatgttaggacagcgtactatagcrttctatgttctatattacaagcaggtctgaaagccatttccatagtgagaatgaattcctgaagaatctgacatagctgtccctgagcatttgccaatat

SEQ ID NO: 413183 - DNA, 201 bp, Homo sapiens
cattgtattgtaagaagtaagatatgtgcagcctttactgtctgcagctttttattatgggcaagggcaaggtcttgagcttggtccaagccagcagcaaygagagatcccagtttggggcttatgacagtgtgacttttctctgcctgttcttatcaccttgttctccactgtgccatctgccatatgcttatgcagaga

SEQ ID NO: 413184 - DNA, 201 bp, Homo sapiens
taagtcttaattataaatatctgttacccaccatacaatgaacttcttcgggaaagaaatatctgatccatgtttgtatccccagcactttacatagtagkcattaaataaataaatatttgttgaatgaatgaagacagattcccgggtaagctatgatttctctcagtctagcttcatgtcttattttgagtccttcat

SEQ ID NO: 413185 - DNA, 201 bp, Homo sapiens
gagaattatgtgtttgaatctagcacctctgacatggaaaaacacatggtgaagcagaggaaagaaaactgaaagaaagtgaaaatatctttaagaatacyttggggaaacaaacagtatttcaaatgaaagattaagaacaaatccaaacaaatggattggaaggtattatgtaaaaaaatatgagatgctttagcacag

SEQ ID NO: 413186 - DNA, 201 bp, Homo sapiens
caacatggcaacagtagagcattaagccaaatgcccatgaagccagggctattcttagaaatttagaatcctagacattaggctatatataaatcaagtasccttatattacagaagaacatagatgggttcagtttaactggaattggtctataccagcggtcaccaaaccttgtctgtaaaaagtcacatagtcaatat

SEQ ID NO: 413187 - DNA, 201 bp, Homo sapiens
gtcttgctaggttggggaagttctcctggataatatcctgaagtgtgttttccagcttgtttccattctccccgtctccttcttgtactccaatcaattgyagctttggtctttttatgaagtcccatatttcttggaggctttgttcattcctttcattcttttctctctattcttgtctgcatgtcttatttcagtaag

SEQ ID NO: 413188 - DNA, 201 bp, Homo sapiens
taattctgaacataataccaaggaatcttttattgaggaactgtcctctgaataggaccattaaggagaagaattttcatgagaaaatgagtgagggataygctagaaaggcagttgtttctgaatctaatggtcaaaaatatgggttttgaaagtcagagggtcttggttcaaattgtatttttgtcacttacttgatga

SEQ ID NO: 413189 - DNA, 201 bp, Homo sapiens
agcctcctgagtagttgggactacagatgcacgccatcacaccttttgattaaaatttttaattaaaattaattttaaaatttttaatagagataagttcycactatattgcccaggctggtctcaaactcctgggctcaagccatcctcctgtcttggccccacaaagcggtgggattttaggtgtaagccactgtggca

SEQ ID NO: 413190 - DNA, 201 bp, Homo sapiens
ttaattgtgacatcaaaaattttaaatgtgggaggaatggtggagtaaaagtatagttttttaaaaatgcaagcaaaaagttgttatcagcttaaagtagyttgttataactataagatgtttttgtaattctcatggtaaccacaaagtaaaaatttatggtagagacaaaaaagatacaaagtagggaatcaaagcata

SEQ ID NO: 413191 - DNA, 201 bp, Homo sapiens
agtgtcctgggttttcctggatcttgtgtaaatgactccatcacagcattatcatgttttcttctcaacatcttcatcattctactaccattcgtagaaartggattttcatatattatctcatttagtctttgtgacaaacctcctattccaagtatgcaactgaggcacacaaagatttaaaaatctatgagttagtag

SEQ ID NO: 413192 - DNA, 201 bp, Homo sapiens
gatattactcatctttgaattccacctcccttaaattccaaatttaattatttacaattcatgtcaattattagcttctaaacatctcttgaatattctgyccatgtctacagtgatttagattactacagatctatcctcctgccttctagctcccttttctcaactccagtcccacactgcagacagtggccctttgaa

SEQ ID NO: 413193 - DNA, 201 bp, Homo sapiens
acactgcagacagtggccctttgaaacttcaaatctgctaatgctattgccccacttcctagtgaatggcttcccttcaccctaggatagcatgcatggtmcatgacaatgcttgggaactccttccttatctggtccctgcttaccagcccaaaataatttctcacccttctccattaagtcactcagaaagcttaaagc

SEQ ID NO: 413194 - DNA, 201 bp, Homo sapiens
taagagttgttgaggatagtcatcattttctagagtttttatgaggcttaaataagattggatatcagaaagggttttataaacactagagaagtgctcakcagagtacagctgagttcaattcaaagggcatttactgaccatacactatgcacctgccattactctcactgttttctctgcactcggtagataaaactg

SEQ ID NO: 413195 - DNA, 201 bp, Homo sapiens
gttgtggaagatagacataaaaatgaatcactgcagcataatgcacaatatgataatggcatatggaaggttctaaagaaaatgagttaacttaaaattcygagaagcagtagcttttgttgcaagcctttcttttcataggtaaaagatcacattagccccaaggatattctgtaggacaaatatgagctaaaaatgaac

SEQ ID NO: 413196 - DNA, 201 bp, Homo sapiens
gcttttgtgttaacatgataggaactgataacatttccatttttcttatgtcacatagactaaaactgttcagtttaaaatagttcaattacctccataarctttaagaaaaccttctttaataacatcctatgttttcaaagttaattgggtactttcacatttttttcctttaaaacattattagacaggacatttcat

SEQ ID NO: 413197 - DNA, 201 bp, Homo sapiens
atatatttttttctcccacagtttatggattacatcctatgcagatgacacgttggataatctctttttttccaggatgaaacatattaagaaaataaaayacactctcacaaatgcccactacctcaagataaataggtagatctcacaatatctcagatatcacctaggagagaagaaataaaatcaagtatttggaag

SEQ ID NO: 413198 - DNA, 201 bp, Homo sapiens
tgtaaagttttaggccttgatgttaaggtagattgcacaatagtctgagagagagagattattgtcctcattttactgaggagaaattgggactcagaggyctcaaggtctgatgctacctagaggacagcagaggagaagagaggagaggaggcccagatggggagagaatgaggcaagtttttccctcagctccacttg

SEQ ID NO: 413199 - DNA, 201 bp, Homo sapiens
tctgagaagattctccatgtctgggtatcagacatggagatacatcatactgatcaacctgaagtaatgtacttactgaaatacccacttctagttcatcwagttcatgcaaggtttcacaaagccaccaatcgttttaatcatcttataaaagctttctaattgaaatattcttaagtatcacattttactagtggcagg

SEQ ID NO: 413200 - DNA, 201 bp, Homo sapiens
ttgcagacatactcaatgattgagattctcttttttatctgtcattaatattcgatatatcagagccttgataatgataaacaccatctactctgaagaaycaactggaaacaactgatttaaacagatttcctcgccatgtgccagtgaataatagagatcttggaaattcccttaaatccaatactgcaagcagtattc

SEQ ID NO: 413201 - DNA, 201 bp, Homo sapiens
aacaataaatgagaaaaacaattagtaagattttgatttcagtaaggaaatttgtcagagaggaaatttaagaaaacaaagtatggaatagtatcttcctkccaaacatcaggtaaatcccttgatgtgatggaaaagaaaatgcattttacacctgtttctttgtgtctctaagcctaaggcttcattctgaggctctcc

SEQ ID NO: 413202 - DNA, 201 bp, Homo sapiens
tttaaaatccctcctgatttttaagaaatctgaaggaattcagtttttataaagccagctagtttcaaatagcattaatgttgatgtggtaaattatagaygtcatttaataaaatgtatatttagaagacaaaacagcactatagacagaaagactttttaaaatgtgtgtcaaacagaagattagaaaaaagtttttag

SEQ ID NO: 413203 - DNA, 201 bp, Homo sapiens
ctatgatttcacagaatgccttccctcagagtcagtcatgtatctttcatgatactattagaatataagatttccccaagtgtattctacttggggaacastggctttttgcaaaaactattccacagttcaaaagtttcagaaatgctgcatataatagctgccctttggaaagccatgttttattacacgtactacagt

SEQ ID NO: 413204 - DNA, 201 bp, Homo sapiens
aacaacaacatcaagttgttaaataaaacaaaaacttatataatgaacatttttgttgcttaaattgaatgtattccctgctgttgcccttttaacacaaygccaattttggttaaatcattaagaagggaaaactaacaaacacttccatggtgcttaccatgtgttcttagtagtttacatctaataactcacttaaac

SEQ ID NO: 413205 - DNA, 201 bp, Homo sapiens
cgctactcctcccacacacagccagtctggcataggaagttaattccctacaacttcaggagggtctcttgattagtagccaatcatatcatcccaaccamcctaccaagtactaaatggtattcctcaacatcccgtgatgctccagggtagtgtgcaacctaagttggaccaatcagactaaaggtaagaatctttact

SEQ ID NO: 413206 - DNA, 201 bp, Homo sapiens
gtttatctgacttcaaaacaagttctcttctttttgtaagctaaaccatgtactagtttacctagacaatcttgtgtggtgatagaaagctggatattcayggatgccaagaaatttaaagggcctgattctactcatttgttaaatatttattgagcacctactgtgtgttgggcactattaaatgtaacatgggtataa

SEQ ID NO: 413207 - DNA, 201 bp, Homo sapiens
catatccttgggattctattttccaaagaaaaataatgataaagatattctgatttaataaaagaaaaaaagaaaaaaaagaagagactaaattggagatrtggtaggatcgagggtatggtgggtagagagtaggaaaatggagaagccctcctagctgagttttgcctgggattttgctactcatccagtttatcaaca

SEQ ID NO: 413208 - DNA, 201 bp, Homo sapiens
atgataaagatattctgatttaataaaagaaaaaaagaaaaaaaagaagagactaaattggagatgtggtaggatcgagggtatggtgggtagagagtagkaaaatggagaagccctcctagctgagttttgcctgggattttgctactcatccagtttatcaacagcagttcacggtgggttctaaaataaactcacctg

SEQ ID NO: 413209 - DNA, 201 bp, Homo sapiens
tgcctgggattttgctactcatccagtttatcaacagcagttcacggtgggttctaaaataaactcacctgctcttttttattgtgctctatagagttttmagaaatgtatatccctgtgtcaatgaataaagagcatgaacggaatttgatatgaagtttttctgtgggtgacatctctctctctgactctcactcttct

SEQ ID NO: 413210 - DNA, 201 bp, Homo sapiens
tgggttctaaaataaactcacctgctcttttttattgtgctctatagagttttcagaaatgtatatccctgtgtcaatgaataaagagcatgaacggaatwtgatatgaagtttttctgtgggtgacatctctctctctgactctcactcttcttcatcaatgcaccatgacattttaagacaggacactgagtcagagga

SEQ ID NO: 413211 - DNA, 201 bp, Homo sapiens
aataggtagatctcacaatatctcagatatcacctaggagagaagaaataaaatcaagtatttggaagaacctgacagaataccttagccatacctcagcytttcagagagcaacaggcatgaaatgttttagaaaaataatttctgttcccttcccccttttcataaagtattctctctcagtgatccattcaaaagatt

SEQ ID NO: 413212 - DNA, 201 bp, Homo sapiens
tctgaatatcccaatgaattaaaattaagatgaacctttctcttcaggaatagaacttgctaaaattagagataaatgagttacatattttcagtgaaatwcatattcctattataagtcatatagggagtgaggctcctaaaagcaggtggctaactctatctacaacaaacattttgacaagctcccaccaacataata

SEQ ID NO: 413213 - DNA, 201 bp, Homo sapiens
caacccttgctcacctgaattggaatttgaatgacaggaaataaacttttgatctgatatatcactgagatttggagtctattattactgcagtatgttcwtcattctatatttattttggtcataaaatgtgccaagaactaccctagacactgagaatgcaaagctcctgacctcatggagcttaatattaaattttcc

SEQ ID NO: 413214 - DNA, 201 bp, Homo sapiens
ggactaattgtcaagtttaaaatatacaagaaatactaaaacatattatggaaataaaatcactaacatgctaaacattacagatacttgaaattattcayattgttaattattcttttcctcattctaggatacagtagtttgtcttacttgtgaaaatatttaggggaacttagataaaatttttgtttgatattccta

SEQ ID NO: 413215 - DNA, 201 bp, Homo sapiens
tcactcatcaaaggaaaatgtgactcacaaagactttaatcccctttcctcccaacgggagatacagtctgtatagagagctgtttgcatttataactcayttaaatcatgtcttccagatacttcaggtttaactcacagtgctacactcaaactaaccaatttaataaaaggattataaaatatttgaagcaaacttat

SEQ ID NO: 413216 - DNA, 201 bp, Homo sapiens
cacagatgctgtcctccccctttctttagttgctctttttctcagggggctggactctattaggccatatttcccagatttgtctgtcagttgccttaggkttggtctcagccaataggagggagatatcaccaggagacagaggggagaatctaggccatttctccccacccttttctctagaagcagctgtatcttacc

SEQ ID NO: 413217 - DNA, 201 bp, Homo sapiens
atttctgcaatttcctggccagctagtctttttcaccagacgcatatatctttttcaaatatcaaaagatagtaaagctatgcatgtaaaagtcataatartaatagtaattataagtattataagggtaagaataatttacatgattcttactgactcccaagcatttgctaagcactttaacttttcaaaatctcagaa

SEQ ID NO: 413218 - DNA, 201 bp, Homo sapiens
ctattagatgaaaactatttgcttctgtatgactccctctattgcgctataataaatgcctccttgcctgcagccacttctgctggatgatccattcaagwctattttcatgtaggcaataaacaggagttctaaaccataaacccaaacacaaacgtaagggacaagacatgggccttggctttaagttgttaaattact

SEQ ID NO: 413219 - DNA, 201 bp, Homo sapiens
tgttcatatgcaataacagagacatgaattctaaggatattgcagaaagcatagctgactactgattctagcaccttcaggatctttctcttcttagttgygaccactgtaatgcacttcatagagtaataaattgttcttgccctgggatcatgattcccatctcttcactacaacatgtctagatgtaagacatgttta

SEQ ID NO: 413220 - DNA, 201 bp, Homo sapiens
tagatgactctggatacatatcaatttttatttaatcaatttttcagattaaaacaacttggctaattctacaaatttgaaaattatataaaatacaaaawtcaggaaataatatctaaccccactagctagaggcaatgactgtgattattggcatattttttctagtgccgttcatgtatttttcacgtaatattaacc

SEQ ID NO: 413221 - DNA, 201 bp, Homo sapiens
aactttttaaagccccctcgtataactgaggtcatacagtatttgtctttccgtgtctggtttattttccttaacataaagtcctccaggtttatccatgytgtcacacataacagggttttcttctttttaaagtctgattattaccttattgtgtatatatgccatattttatttattcattcatcttctgatgaacac

SEQ ID NO: 413222 - DNA, 201 bp, Homo sapiens
ctcccttccttcatgagttttgttacttacacatcttggaactcctccagcgttttctggggtgtgaagacatttaataaactaataatctgaaagagagyggaagggacagaggaaacgagagaaagaaaaaagagagagaatgtattatttttaaattgtatttcaactcaaagtcactcactagtgctatggcagaaa

SEQ ID NO: 413223 - DNA, 201 bp, Homo sapiens
aacagtaaagctggaggtattacatcacctgatttcaaattatactataaccaaggctataataactgaaacagtgtggtactagtataaaaatggacacrcagatcaatgagacagaatagagaacccggaaataaagtcacacacctacaaccaacaggtcttcaacaaagttgacaaaaatatacactggggaaagga

SEQ ID NO: 413224 - DNA, 201 bp, Homo sapiens
ctattatttattgagcatttactatgtatcagacagttttatatacccttttacatgtaatgcaatactcactgaatcctcacaaaaactatatgaggaasatgctattattatctccattttacaaataaaaaaactaaggcttaaaagagttaagtaatttgcccaagaacacaaagctgtggtagaggaagaacttgc

SEQ ID NO: 413225 - DNA, 201 bp, Homo sapiens
tagctgtcagaaatacaatggtgaaaacagtctaccctcaaagaacttatgctccagagagaaacacaattataacaagtctggttctcaaatgtctgatrtagggtatgatccaggcagagagtgtcccagttctccacactgagaaccactacacaaccagaactttaaaaaaatcacagtactcctcttttttaaata

SEQ ID NO: 413226 - DNA, 201 bp, Homo sapiens
ctagtttggttgggacatagatttgttgggcaaataggggacattaatagggaatagtagagtggtggaatattgtcaaggtccttcatttccagggtgaraagtgtgtagttaattctaaggcaagagggaatcattaaagattttagtagtagtctcagagtcttgcatcagatggatttagagaaaacagaggtagga

SEQ ID NO: 413227 - DNA, 201 bp, Homo sapiens
gcactgtagagatccaagagcaactcagaattaagaacaaaagattccttagaactcttgcctacttgattaaggatactggtaaagaaaatgctatttcrgaatcttagatactgtctactctggtcacatgccaatcaggctttaagtaaagatatgagtgactggcataagaatattctacatgctaggaggatgaag

SEQ ID NO: 413228 - DNA, 201 bp, Homo sapiens
gtcaatgaataaagagcatgaacggaatttgatatgaagtttttctgtgggtgacatctctctctctgactctcactcttcttcatcaatgcaccatgacmttttaagacaggacactgagtcagaggaagacatctcgagaggaagagctgcattcctctctgaaggcatatatgctgtcctgatagtgtatctgctgtt

SEQ ID NO: 413229 - DNA, 201 bp, Homo sapiens
tcacctgtggatacccagaaaaaacctaatgtcaagcaacattaatcattcatccataaaaacaggtagaccgttatcatgacagtacagaaatctctgtratttatttcaacatacaagatatatcacatttttataataatgtttaccttatctttgtttaataatttactcatagtcatgcaaacaaaagcatataca

SEQ ID NO: 413230 - DNA, 201 bp, Homo sapiens
cctaaaatataattattcaattaaaaaatggaagaagggaaaaaaagaatagagaaaacaaatggaaaggaaggcgagcaggtgtcagacaggtacagtaytactgaatgaagcaattacaggcaccagacaagtttctacatttaggaacctcatttatagcaagcacaccagaatcgagatatttctccatcttctccc

SEQ ID NO: 413231 - DNA, 201 bp, Homo sapiens
tttccaggtttaaaaagggctcttaaaggttactgcaccccataaaacattagcaaattatcctgaaatttccaaagattgaaaaacactgtgccaaaaartaatagtaaatcaagtgatcagtaattttgctaaaggatagatattattatatatacacatatagtgcttttattatccagaggaataaaatatatttta

SEQ ID NO: 413232 - DNA, 201 bp, Homo sapiens
tcactgccttcatgctccatgaaattagtcctcacgtggttgaccagtttgataatcttgcctcacactctttgtcctcagttctatttattacccacctmcgcttgacttcaggcatccacattttagctttctattacctagaacaattccattttttaactcttaaactccaagttcaaatttgttgaaccacatcct

SEQ ID NO: 413233 - DNA, 201 bp, Homo sapiens
tttgataatcttgcctcacactctttgtcctcagttctatttattacccacctccgcttgacttcaggcatccacattttagctttctattacctagaacrattccattttttaactcttaaactccaagttcaaatttgttgaaccacatcctcttatatcagttcctcacacacattccatgcccttttccctttaatc

SEQ ID NO: 413234 - DNA, 201 bp, Homo sapiens
aatgctcaatcgtgaagatgaatgatatgaaaaattcatgaaaaaaggattccggcttcaagtaaactctgaaaattggtctgcagtcctggtcatctccwtattctttgtcccacagagtccacatgaaatcattgcaggatctctattgtcattacctaccttatcatttttagcaaatcaccttaactccttacttca

SEQ ID NO: 413235 - DNA, 201 bp, Homo sapiens
ctgcactcccagtctctcttacattgctttattatatttttattgtacttaacatcttctaacaaaatgtataatttacttatttatttctgtctcatttyggtagcatataagctaatttgctgttttcactgatttttatcattttatataaagtaataacaaaaaatgtttgtcagaagaatggatctcttggtttcc

SEQ ID NO: 413236 - DNA, 201 bp, Homo sapiens
tctgccattatccaataaatttaaccaagatgatcacagttcagagataaaccatacatttataattaaactatgttatctccaaatgtcagaggaagtgwtacatgggcaaaatctgcatcattctaaataaaagtcaaataaatattacatatacaatggagtttggtgaaaataatactaaagttgaaaaccgacaac

SEQ ID NO: 413237 - DNA, 201 bp, Homo sapiens
agtcaaataaatattacatatacaatggagtttggtgaaaataatactaaagttgaaaaccgacaacctggattcaaatttctcttttactactcattaaytgtttggcttcaagtaagttaataatagccattcactcttctaagagttttgcattttacaattctcacaataaccctatacaacaagcactatcatttt

SEQ ID NO: 413238 - DNA, 201 bp, Homo sapiens
ctgtttggcttcaagtaagttaataatagccattcactcttctaagagttttgcattttacaattctcacaataaccctatacaacaagcactatcatttyccccagtttccagatgaagacactgagtagcctaaaaataaagtattttacccaagatcactcagtctcattttggacccaggctgtttgattctagagc

SEQ ID NO: 413239 - DNA, 201 bp, Homo sapiens
actaagtatttactatgcaaggcattgcattatatgctgtggatgcaatgaagagataaacatcattattgtcctcagagggtttactgtccagtggggakaattttttactaaaaaagtacaatacaacataataagaaaagtttagtgtcctataagaggacaaaggagaagcaattaacctttgagatgtttgacaca

SEQ ID NO: 413240 - DNA, 201 bp, Homo sapiens
gagttatattgtaagaagttcaattttataagtagggcatgatgtccagataatgtacaaatgtgatattactaaggtattcaataaatagtattataatrgaataaaacaaagtaaatatgaatagtaaaaatgagtatctgaaatcctaagattgaaaatttttccaattaatattatcaattagctaataacttatat

SEQ ID NO: 413241 - DNA, 201 bp, Homo sapiens
ggaagatttgagacaatacttagtgatatttaggattaaattttgttctctcaagagcacatttcctcacactgttccttgaagagttactctcagcagasggttacatcctggaatcaatttcacttttacattagttagttggcctagagatggttattctatggaatcaatgaattatgaaaaatcaataaagcagca

SEQ ID NO: 413242 - DNA, 201 bp, Homo sapiens
cgggagaaaaaaataataatctcaaaataaaaggtcaaaatgtaagaagtagtggtaagccaaacaaatggcaatcataagggtgaatctaaacaaactayctttatgcaaaaaaatcataatattgtcaatttatgagcctaaaaagaaaactaaaatactgaacatcgatagcatatttaagtcaggacaacaactatc

SEQ ID NO: 413243 - DNA, 201 bp, Homo sapiens
atatttaagtcaggacaacaactatctaaatgaacatgtgccaagatccttttatgttgagaagaaagattaaaagaatcatcttaattaaaatagcattktatacaaaattgagctttaaatacgactccaaaataaataccaatagggatctttttttaaagttagtaagccaattctaaaatcttaatagaagagcaa

SEQ ID NO: 413244 - DNA, 201 bp, Homo sapiens
cattatcacaatgatctagactactaaactaatcacactgaattttacaccttttgatctacacattcacaatttgtctgcaataaagaaaaaagacataygaaatcagaaataataagtggtattacataatcaaagacaggacaaattttccagagtagtaataataaattttattttaaaaaaatccttctcagagtg

SEQ ID NO: 413245 - DNA, 201 bp, Homo sapiens
tggcagtgctaaggggtgcagtccatctagccatgctgtcaggcaaaatacctgtgtcagagtacttttgtcatccatcactcagccagagtctgcgggasagacttggcacatatacttaaaatacctactaaaaacaatgtgttaaacctttttaggcccaaaagataaaagatataatatctttttaacattttaagt

SEQ ID NO: 413246 - DNA, 201 bp, Homo sapiens
ccttcataaggaccaaaaatcagatgaccactcacagtatctggttttaattccacattgctgaaagaagcactgaagaggcaggagaaactgtctttaaytgccagcgccaccccttccccatcctccagcaacaattccgtgtgctggggagagggagagcatagcatttgtgaggaaatgaactcagtgctgcccttg

SEQ ID NO: 413247 - DNA, 201 bp, Homo sapiens
ctggttttaattccacattgctgaaagaagcactgaagaggcaggagaaactgtctttaattgccagcgccaccccttccccatcctccagcaacaattcygtgtgctggggagagggagagcatagcatttgtgaggaaatgaactcagtgctgcccttgttatagcagaaagtaaaaacaaaccaaattcagctgacac

SEQ ID NO: 413248 - DNA, 201 bp, Homo sapiens
tgaggaaatgaactcagtgctgcccttgttatagcagaaagtaaaaacaaaccaaattcagctgacacctgcccacggaaggagcatttaaaccagccctkgccagaggggaatcgccaatcccagcagtcagaacttgagatcccacaagccttaccactgcaggctaaactgctctgaggctgagaataaacttgaaag

SEQ ID NO: 413249 - DNA, 201 bp, Homo sapiens
aaaaactattcaaattgataaattcagtaaagttgcaggattcaaaatcaacatacaaaaatcagtagcatttctatatgacagcagtgaacaatctgaaraagaaatcaaaagtgtaatcccatttataatatctacaaataaaataaaatacctaagaagtaacttaagcaaacaagtgaaagatctctacaataaaaa

SEQ ID NO: 413250 - DNA, 201 bp, Homo sapiens
caagatgaattaaagacataaatataaggcttcaaattatcaatcttctttaagaaatcactggggaaattttctaggacagtggtcagggcaaaaatttmttgagtaatacctcccaaacacaagcaaccaaagtaaaaatggacaaatgggatcatatcaagctaaaaacttctgcacagcaaagaaaacaatcaacaa

SEQ ID NO: 413251 - DNA, 201 bp, Homo sapiens
agtgcagcagcacgatcactgctcactgcagctttgacactgggggctcaagctatcctcccagctagtttctttgttgctgagactacagggactttcaycgtgcccggctaaattttttatttttgttttttgtagagacaagggtcttgctctcttgcctaggctggtctcaaactcctgggctcaagtgatccttcc

SEQ ID NO: 413252 - DNA, 201 bp, Homo sapiens
ccaacaggtgaatataacaattaacagagaaaggcctgtcgaaaatgactcagattctgacactagtccattagggaaatgatgatatcattcgtactaawagggaagtacaaaaaaagagaattgatttgggagaaagaaaatggttattgaacacattaaatttcagaatagaggttaagtgagcatttgaaaatagag

SEQ ID NO: 413253 - DNA, 201 bp, Homo sapiens
acttttctttgctgaattgctgtcttgaagattagacagaggaaaaagaaaaggggaaaaaataaacttgtaagaggacatgataattgaatatctctatrcctctatttttagataaattcctgcaggccatccccacttttgcaagtgagaatgtgtttcatgacatgatttagttaaattataaatagtccatttaga

SEQ ID NO: 413254 - DNA, 201 bp, Homo sapiens
agaggaaaaagaaaaggggaaaaaataaacttgtaagaggacatgataattgaatatctctatgcctctatttttagataaattcctgcaggccatccccmcttttgcaagtgagaatgtgtttcatgacatgatttagttaaattataaatagtccatttagatgcatctatccaagaataatacccacaaactacttac

SEQ ID NO: 413255 - DNA, 201 bp, Homo sapiens
gaaacaatttcttctatttttggacagaactaatggttttaaatgctgctctttatattaaactaacatggacatcactagtaattctatttagtcatcayagtacatgctttcttggactctatataccatattctaatttttattacgtgtgactagttttcacatatgaaaatacccataatgtccttccaagtgctc

SEQ ID NO: 413256 - DNA, 201 bp, Homo sapiens
aaatggctattatagtaaggaaagctctggacaagattttcagagacagcttctggcttctgtgagagctttttggctcatgaacagcaccctcgggctamagtgacccttctctaattcatgcagaatctgtggtagcttgaatcatgacagacacaaatattcatcctagccctggcatgctggggcctcacatcctgc

SEQ ID NO: 413257 - DNA, 201 bp, Homo sapiens
tagcttgaatcatgacagacacaaatattcatcctagccctggcatgctggggcctcacatcctgcaaagtatctggctatgaaaatagaagactttgccyggctgtggtgaagtaacttagcataatactgaagtattgagaaataactactcacggagccagacattcttttagcacgtttgactgatactggggcaga

SEQ ID NO: 413258 - DNA, 201 bp, Homo sapiens
gagaaagtttcaaattttgaattagagaaagttcaaaattataaaaaattggctgattttaggctctcttgccccatgcgttttaaagtatagatttaaayacttcagtaatccatgggaagacctatgagaaagctaaataatataataaggagaaataatctgcccaaagtcacacagtggaaaaagaagaagagatga

SEQ ID NO: 413259 - DNA, 201 bp, Homo sapiens
aatccatgggaagacctatgagaaagctaaataatataataaggagaaataatctgcccaaagtcacacagtggaaaaagaagaagagatgacagaaaggycttgtcccccatttccttgcatcatttgaagggtttctctgatcttgtctgacagttactatgttatctattactgtgcctatggtagcacttacataaa

SEQ ID NO: 413260 - DNA, 201 bp, Homo sapiens
cctgtttttctcctaacggagtttaatttcacaaaacagttcttgttggtttaacagtatatattacagtggtggtcttaaagcaaaaagaatagtagtamcaacattatttctaatcataaaatgtatctctactagaagctacatgtatttgtttagccattttacaaagtttgaaaacatataaaagatatgacatgt

SEQ ID NO: 413261 - DNA, 201 bp, Homo sapiens
aacaaatctgtaaacttagtagtaatgcacaaagaatgcggtaagtgctgtagacaccagagagtgtgtaggagttggggagccacaacacatattatttytctgtgaatatatctcctggttaaaatcctgaataatctgttcagtacaacaaagttccaaaaagaacactttcatgagttttttaaattcatagagtga

SEQ ID NO: 413262 - DNA, 201 bp, Homo sapiens
taatcatgctgaaaaactgaagggaagctctctgcttaagtatgaataaggtaacatacaattttttgccaaaactagaacaattcttgagagtaaaagaragcactgtcaattatatatgacaacagggttaagttagaactgttttaaaaatacttgaagtttatgtaggtgccctagggagccttctccttaaagata

SEQ ID NO: 413263 - DNA, 201 bp, Homo sapiens
aatgataaatacctgatagggatactatagctttagacttttgtgactggacatgcctttttcagagaccacagaagccctgcctatggagttgttacaaragatactggctcctgtgggacatgtggtttttaaaccaggggaattttcacagctgctctgagaatcattctttcatagcaaagagaaagcaaagagtat

SEQ ID NO: 413264 - DNA, 201 bp, Homo sapiens
atgaattgctatgaatgtgtcctccaaagttcctgtgttggaaacttaattttcaatgcaacagtgttgagaagtgggacttttgagaggtgggacttttragaggtgattaggtcactatagcgggagtgggttagctatcacaggagtgggtttcctccccctcccctctctcatgcacatacaatcttttgccctttt

SEQ ID NO: 413265 - DNA, 201 bp, Homo sapiens
taacataaaatcatattttatcaacgtagaagacccaaaagacagcaaatatcagagaaaatttcaccagcctatgaaaaatgagtgtagtgttacatctkccccagcctaaagatcctaaagtcaaatatgattttattagtttggtgcaaacataattgtggtttttgctactacttttcatggccaaaaaaaacacac

SEQ ID NO: 413266 - DNA, 201 bp, Homo sapiens
tctgaaaactgtaaatatttccagcagaaattttgtgtcctatattgttagttttttgtttctattttgttgggtttatatttaattcatatttatattgkttcctttctccatgaatcagtgctcttctacttcctcaagattatcacacaatgtgtctatattttcctagtacctatctttactctcatggcccctgac

SEQ ID NO: 413267 - DNA, 201 bp, Homo sapiens
caaataataactgtgcagataagcaaacattatcacttaaaatatatttcaaaagtctcctatcagaaggataatagaattaaaatagtgtacttaaggarttagttgattacctaagaacataatatagaaaagaatggaatccaaaagttgatgcttctcttgcagagcatgattacaaattaaccatacactgaaaat

SEQ ID NO: 413268 - DNA, 201 bp, Homo sapiens
ttcctagtctcgggattgacagtaaacaaaggtagatgtctattattcatggagacttaattgacttttataataatacaactattgattggactgatgcaaaaaaaaaatggctcatagtttgggtttgtccttaagacaacccactgcaaatcaaacactggaatttcaatctgtaacttttaatggatgacttttaat

SEQ ID NO: 413269 - DNA, 201 bp, Homo sapiens
tcacggaactgaaccttaggaccttcaaattttctgttaaacttgagcagcataactaagggtattcattaactataataactacttaataaatttttagaaaaaaactgctcagcatataaaacagaagcatagcactaaattaacacttctgaaatttgctataactgtgttcacctgtggatacccagaaaaaaccta

SEQ ID NO: 413270 - DNA, 201 bp, Homo sapiens
gaagggaagctctctgcttaagtatgaataaggtaacatacaattttttgccaaaactagaacaattcttgagagtaaaagagagcactgtcaattatatmtgacaacagggttaagttagaactgttttaaaaatacttgaagtttatgtaggtgccctagggagccttctccttaaagatagggtttgcatgaatacaa

SEQ ID NO: 413271 - DNA, 201 bp, Homo sapiens
tattattgtaacagaaagtaaaccttcgcaataaaaatgagaagacaggaagttctagctagagcaatcaggcaagagggagaaataaaaggcatccaaastgaaaaagagacagtcgaatatctctgttcactgatgatataatcttatacatagagaaccctgaagactcctccaaaagactcctagatttaacaaatg

SEQ ID NO: 413272 - DNA, 201 bp, Homo sapiens
ggttgcaatctgagtgtacaaagaaaatactgattaatttgagttaacacatcagaattcttttttttttaattgcagataattttctagagaactgatgmaaattgtactgttactatttggggcaaatatcgcaattttatttcagtaatttgctctgcctttaactgttatagggtatttttaaagtctccaaacagt

SEQ ID NO: 413273 - DNA, 201 bp, Homo sapiens
cttaagaatattcatcacaagataggaaaacacagctgccatcgttttaggaaagaaatagtcatgagtaatgctttaacacacatttcaaagcatcaggmgttctaaaaatctcaagagagttgtgacttttattgtccctatatgttctaagcatcatgcaactttcattgttaaaatgcttacattaaaattactccc

SEQ ID NO: 413274 - DNA, 201 bp, Homo sapiens
gcctcaagtatttctttatagcatcacaagaactgcctaatacaccgaccctatgtcagatactattgtgagttctgcagtacagcagtgaacaggagacrattccaatggtgtgctggtaaatgttcaacaactggctggggaggagaaataatgggaaaggggcctatttgcagtatttgcacatttctgtaacataaa

SEQ ID NO: 413275 - DNA, 201 bp, Homo sapiens
ctctgcttaagtatgaataaggtaacatacaattttttgccaaaactagaacaattcttgagagtaaaagagagcactgtcaattatatatgacaacaggrttaagttagaactgttttaaaaatacttgaagtttatgtaggtgccctagggagccttctccttaaagatagggtttgcatgaatacaaagaagtcaact

SEQ ID NO: 413276 - DNA, 201 bp, Homo sapiens
tctcaaaacaactcactcactatcaagaggacagcaccaagaggatggtgctaatccattcaggagaaatccgcctctatctaaacacctcccaccaggcmccacctccaacactgaggactacatttcaacatgggattccgaggagacaaatatccaaactacaccgctctgcctgaggacttttctctgaccacaggg

SEQ ID NO: 413277 - DNA, 201 bp, Homo sapiens
ataactaatataaaatagaacaattaagtaaaataaaagttacttgaacacgagcactgtgataccacaacagtcaatctgataacagagatggttgttaygtaattcactggcaggtggcattatatggacgtgctgcacaacctaagtgggatggagcaagatggcacaagatttcttcacactactcagaacagcgtg

SEQ ID NO: 413278 - DNA, 201 bp, Homo sapiens
gaacacgagcactgtgataccacaacagtcaatctgataacagagatggttgttacgtaattcactggcaggtggcattatatggacgtgctgcacaacckaagtgggatggagcaagatggcacaagatttcttcacactactcagaacagcgtgcaatctaaaactcatgagttgttatttctggaattttcaatttaa

SEQ ID NO: 413279 - DNA, 201 bp, Homo sapiens
tctggaagggttagacggggactgcctggcctgccctcagaggttctgactggtaggtctggggtggggcctgaaaattagcatttctaacaaattcctckgtgaggctagtactgctggtcaggaccaccctctaagaaccactgacacttaaaatcagggatgtattttcaagaaactcacaccatctttcatattaat

SEQ ID NO: 413280 - DNA, 201 bp, Homo sapiens
aattttcaatttaatattttgaggaccacagttaacagtaggtgactgaaactgtggaaaccgaaaccacagataaggggggactactgtaaagaatgaarctatttttatggttaaagacccatttcaaggatttgaaaagaaatactaaaatctttaagtgtaaatataatcaaagaagaaatcactttataataaaac

SEQ ID NO: 413281 - DNA, 201 bp, Homo sapiens
aatattggttgcctatcttttattttgccattagtgtgtgatcagaattaattcagacagtcagtggatatttgctcctgaattcttggtgactggcccaratacaacttttaccatttcataaccgtcttctattatttttgttcttctttttccttgtactcaaattccaaaaacttaaagcagatcatgagaacagtg

SEQ ID NO: 413282 - DNA, 201 bp, Homo sapiens
aataaaacttgaaaaaattacctttattcccattctaacttaaatgaattagaaactaaacacctattcacttccatttcctaaactacttttttaaaaayttatactttaagttctgcgatacatgtgcagaacatgaaggtttgttacataggtatacatgtgccatggtggtttgctgcacccatcaatctgtcatct

SEQ ID NO: 413283 - DNA, 201 bp, Homo sapiens
gtatcatccagaacttaaaaccaggaagccagggcagagcgcacagagggaggggcaaaatggggaagggtgaagcaagaaagtgaaatctctctcttgarctacacttggttactcacttgttgtacttaaaaatcagaaagagagggcattcttgtggggggaaaaataaacagaagaattagggatgctgggggggag

SEQ ID NO: 413284 - DNA, 201 bp, Homo sapiens
tttaagttctgcgatacatgtgcagaacatgaaggtttgttacataggtatacatgtgccatggtggtttgctgcacccatcaatctgtcatctacattasgtgtttctcctaattctatccctctcgacatgccctggtgtgtgatgttcccctccctgtgcccatgtgttctcattgttcagctcccacatgtgagtga

SEQ ID NO: 413285 - DNA, 201 bp, Homo sapiens
ctaattctatccctctcgacatgccctggtgtgtgatgttcccctccctgtgcccatgtgttctcattgttcagctcccacatgtgagtgagaacatgggrtgtttggctttctgttcctgttagtttgctaagaatgatggtttccagcttcatccatgtccctgcaaaggacatgaactcatcctttttatggctgcgt

SEQ ID NO: 413286 - DNA, 201 bp, Homo sapiens
gatgtttggctttctgttcctgttagtttgctaagaatgatggtttccagcttcatccatgtccctgcaaaggacatgaactcatcctttttatggctgcrtagtattccatggtgtgtatgtggcatattttctttatctagtctattactgatgggcatttggtttggttgcaagtcttgctattgtgaacagtgccac

SEQ ID NO: 413287 - DNA, 201 bp, Homo sapiens
acttatttggagcttctatcaagtaattggggctacccacagactaccgaacagaggacagtcttatccaggaattccttccacttttatcaagtaacagygttggaagggacaaacatggaatcatcaagagagggagaatacaagcctaggacatcatatcaaacaaggtctttgctcaatgacatgccagggaggtct

SEQ ID NO: 413288 - DNA, 201 bp, Homo sapiens
gcactgtcacccaggctggagtgcagtggtgcgatctcagctcgctgcaagctctgcctcccaggttcacaccattctcctgcctcagcctcccaagtagmtgggactacaggcgcccgccaccgcgcctgctaattttttgtatttttagtagtgacggggtttcaccatgttagccaggatgatctcaatctcctgacc

SEQ ID NO: 413289 - DNA, 201 bp, Homo sapiens
tcccaaagtgctgggattacaggcatgagccaccacgcctggccaggaatgattttttaatcatattcactactgtattcccacagctagaacaggacctrgcacatagtagatactcaataaatatttgttgaatgaataaatacaataaaatctattcttggaatcagtatggtaactgacagtgcatttcagattacc

SEQ ID NO: 413290 - DNA, 201 bp, Homo sapiens
ctactgtattcccacagctagaacaggacctagcacatagtagatactcaataaatatttgttgaatgaataaatacaataaaatctattcttggaatcartatggtaactgacagtgcatttcagattacctttacctctacatggttcagtttaatgtagctagaagtcttgccatagattaaattttaaaatgatttt

SEQ ID NO: 413291 - DNA, 201 bp, Homo sapiens
tgtcagtcagccctgggctgtaagcagcccacggaaagcatggcctgggctcaaatgcaacattggatttcagagagcagcatctgggacccttggtaatytgcactccctatagttggaaattttgcaatcacattgtcatggctgacacctatagtgagatcctatggcacacaagatacaattaaggctaaggaagca

SEQ ID NO: 413292 - DNA, 201 bp, Homo sapiens
ctacctagcactcaaggctccattgatttgcccagatagatgtcaaatatccagtgctatcagactggtcattttttccttatcagatatgctcttacaayatacatttgtcatttttcagctaattgctcaaattccaatttcctccaatcctatccatctactttccttaagatataatggcaagacatcttcctctcg

SEQ ID NO: 413293 - DNA, 201 bp, Homo sapiens
tataaaagcaagttcaaaattttacaagtaatttttaacagtaaacacaataatattttaggtttcttctaatgacgtacagcctaatatatttgtatggygtttctaactagcattttagcatttggatcaaggcaaagggcaaaagtctcttgtttattttatctcatttatttctgtcccaaactctaggctctctat

SEQ ID NO: 413294 - DNA, 201 bp, Homo sapiens
tgttatatgaacctatcagttctaatggaatcagtcctagacagtcagaaatattaaggaagtgatatattaactgaaagcttaagaatgagtagaagtghactaggtaaaaaaggaagggaacagagttccaggtagagggactagcaaagacacagtggcagaggaagcatagagaatgtgagagactgaaaatcagag

SEQ ID NO: 413295 - DNA, 201 bp, Homo sapiens
atctctctgtccatttactcactcttccctggggaagagaagtggaagcttgagaaaagttagcaggaatgctcaggtgtaccatactccctcttgggagytgcctgcccacagcaggaagtatctcccttcacctctagagcctaaatccctgtggagaaaagatctgcctgccctagtccaggactgcagggaccacat

SEQ ID NO: 413296 - DNA, 201 bp, Homo sapiens
gagcttcctgcttcttttattttccccttgaagctgacattaatagttggtgctaatgtaacctctaaatttctttttataagaaaagaaacctgaagggsctgcctattattagaatacttgtgagatataaacttcttgatatgtgtctaaaatttgaaccaatttagtggtacaataaatagtgattagagtacaata

SEQ ID NO: 413297 - DNA, 201 bp, Homo sapiens
atgccgctgaagctttcttttgtggtatatgttgctaatacatacaaatataaattacacatttatcatgcagatatacaaatatatttttcacattttayggtcatatcacatataaagttcctgctaaactatcattattttgctactgcattagaacttttaatgatatgtcttagggttagacaagtttctgacaaa

SEQ ID NO: 413298 - DNA, 201 bp, Homo sapiens
ctgcaacctctgcctcctaggttcaagagattctcctgcctcagcctcctgagtagctgggtttgcaggtgtgcaccaccacacctggctattttttgtayttttagtagagacagggtttcaccatgttgtccaggctggtctcgaactcctgacctcaagtgatctgcccacctcggcctccaaaagtgttggaattac

SEQ ID NO: 413299 - DNA, 201 bp, Homo sapiens
ttccagataaaagctgaaagaattcactaccactagacctgctttgcaagaaatgctaaataaagtcattcgggttaaaatgaaaggacactcaaaactayatgaggaagtaaaaactcagtaaaggaaaatatatagataattataaaagttagtattattgcaataatcatttgtaattctactctttgctttctacat

SEQ ID NO: 413300 - DNA, 201 bp, Homo sapiens
gatcaaacaccaataacccaatatcaatgctattgatttaattcacaagcatatgtataccttccctttctttgctccccaaatttaagataacataatcwatgcacaagatttgataaatctgagtttgtgttttccctcaaaattagaaaataaggtcagagaatctcatcttctgaaatggaagtataaaaatattat

SEQ ID NO: 413301 - DNA, 201 bp, Homo sapiens
tagaattcaaaatttgagccccatattcatgcattaaaatgctcacttcttgttttaaaatacctacaatatcatttagatcaatttggagttttcaaagaaaaaaaaaagcccttccttagaatgatattattaagactgtcaagtcacatttgctttatagaatttcatgtaatacacaaatacccaacttaaaattcc

SEQ ID NO: 413302 - DNA, 201 bp, Homo sapiens
tgaaaggtaaagtttcttgcatttgagatgcctgcaatttttaaaatagattttaaaatatatcactgctcactaacacttacttgatcttatgtctctayttaatgatgcatcaaatgaaggtcgagttctagtgtttcagttcaaaacagttcttaataatagcatccttcagcatgaataagtgaactgccagctgag

SEQ ID NO: 413303 - DNA, 201 bp, Homo sapiens
tccatataatatacttagcaatgatctattatcctctttaatgaagggaagagtctaatagacttcttccaggaaatttgacgggcttaaataccagaaaytccttgccagggactcactgagtttcatttaattcatcaaatatttattgagcactcaatgtgtgccaggctctgtgctagctgtcagaaatacaatggt

SEQ ID NO: 413304 - DNA, 201 bp, Homo sapiens
aaatgaaggtcgagttctagtgtttcagttcaaaacagttcttaataatagcatccttcagcatgaataagtgaactgccagctgagaagccaccctaatraaaacaggctcctgtaggaattgtaaagtggcttatgatgcttccagtgaacatcagaaagggcccataaagtgtagcataaagtgtgtacgtgcatttt

SEQ ID NO: 413305 - DNA, 201 bp, Homo sapiens
tttttctctcattttaaatttctcagccatttcactggcatctcaggcagctgctttttctccatctcagaacaatcaatatatgaacatttttaaaagcaaaaaaaaaaatccagttgcaattttatttttctgctggcatacatgtgcacaatcttttgaatttacatgatggtgataaccagccgaagtcagcaagcc

SEQ ID NO: 413306 - DNA, 201 bp, Homo sapiens
taatattattaataaattactggcatagctagttagagaatgtaaccaattacatatagttttaaattcactacaggcaaaacgctcactagttttctacrtatgattcacagtcctgtcttcagtggtactgaaccacagcctttgtagactagtcattagtattcaggataagaaacaattgcttggaacaggaaacac

SEQ ID NO: 413307 - DNA, 201 bp, Homo sapiens
aagatctcacgtgccatgcaagagtatagactgtccaaaaacagtgggaagccactgaagaattttaaaccttgaagtgtcaagttaaaagatgttttttgtttcttcacccttaatgcttaatctattcaaatctgcattttctaccattgtggcttgttttggagtatttctttttttttttttttttttttttgagac

SEQ ID NO: 413308 - DNA, 201 bp, Homo sapiens
atatatgtcctgaaagaaagtcaccaaaagttctttacgctaacttagtcaaaaacaacacataccttaggtaagaaattttcagaaaaagtgcttgaggsttagctaatttatctctcactttttacagaggaacatcgaaggaattcagctttcaaaatgcacctaaagatagaaatcagattcttcttggaattagaa

SEQ ID NO: 413309 - DNA, 201 bp, Homo sapiens
tctttcctgtatatatgttatatttcaataaatttaataagatgctttcaaactttctgttctgtgataattgacatgtatcacattatagtagaaagtcrctcatcttttactgaacacctcctacttgccaagcattgtactgctaatgtaaagacaaatgaggttaaaatctaagccctcaagcatcacagacaagca

SEQ ID NO: 413310 - DNA, 201 bp, Homo sapiens
tcacaatttaaaataatacaactggcaaataaagaaatagataatttgtttgatattattgggacttcattttatatacactaatacaggaattaccaaaytttttacccagatgctcttaaaaataattgaggacccaaaagagcttctatttatgatcattatatctatcagatttactgtatcagaaattaagctaaa

SEQ ID NO: 413311 - DNA, 201 bp, Homo sapiens
ctagtgttgacaaaattccctacctgacacagtattaaaacgttttacattcaattctctcaaagactcaggtatgtgctacatacccattttgtagattaaaaaaaaaacccaagtcttaaaaatgctaactaatttgcccatataagcagattgagaatctgaatctgctctgtttgacttgaaagcagaagcccttag

SEQ ID NO: 413312 - DNA, 201 bp, Homo sapiens
ttttaaaaggtatcgacaaacactgacaatcagtaccattttaaaaggtatcaatggtaaatgcctttcattcttgagcaaatgtgacattgctttcggcmtgaaaagacagatgaagttttaggagctttaaaaatggtctaagagaatagcagtcagcaaatcattttttagtaaattgttttacaaggaaaagccttg

SEQ ID NO: 413313 - DNA, 201 bp, Homo sapiens
gtcatgtatatagatatactcaatggaatctaattcagccattaataaagagtaaaatcctgtaatttgcagcaacataggtggaactgcaggtcattatgctaagtgaaataagccaggcacagaaaaacaaatatagcacgttctcattcatatacgaaagcaaaaaaattggctctcatggaggtagagagtaaaatg

SEQ ID NO: 413314 - DNA, 201 bp, Homo sapiens
tattaatagattcagggtttgaaaaaggtcaggacacagtgagagcctcagtcattagcctaacagtctaattttcttttccaaatatattcaactatttyctttattgttgtagagcataatggataaatgcacagattttgtttcaccattctctcactgtaggaccttggaaatgttgcttaacttctctgtgcctca

SEQ ID NO: 413315 - DNA, 201 bp, Homo sapiens
agccaacaacctagacaccttttggaaatgtaaattgaggtttccctaactattaattgcttagggtgatgaaacagttaattgaaggattgatattctayacggacataaagagatatgtgtttatacaaattaaggtctcagatcaaataggtcaaaatcttgaacttagcgcaataatacaaggtatctctggcataa

SEQ ID NO: 413316 - DNA, 201 bp, Homo sapiens
tgttaactcccattgaatctttactgctgagttttttcctctccaggagattcattaattggacaaagatttattgagcacttactctgtctgaggcatcrttaggccatgatttagtcagataaatgagtcacagcccctactctcatagaattaaggtctagaagggagaaagacacataaatcaacaaattaccataa

SEQ ID NO: 413317 - DNA, 201 bp, Homo sapiens
gaaagacttagaaggctctgaaatactttttaaaagtataatttagcacaggaaaatatagaactaatctaaatcagcaaaccaaaataataaaggagaakaaatctaaataggcccaagtaaattcccttggccatatcaacctctggcttctgtcagttcccttgtgaggagaaactaacggctaaagccagaatttta

SEQ ID NO: 413318 - DNA, 201 bp, Homo sapiens
ataatagtgttatcacatagacctaataaatcagaaagacaaaataaaactaaattaaggaaggggagtggttaacataatccttgctcctggagtagacwtttcttgcctgtgagaaaagtgtgatgaaaatgtatcagttatctagagaggacacaaacacctaaactaagacagatcacctgtatcttccatgtattt

SEQ ID NO: 413319 - DNA, 201 bp, Homo sapiens
ctccggcatgcagatcttcttgacctctctgtgcacaagcattgcatcaatataataggtgaaggaggcatatgctcaggaactaaagaccaagggctacwttgccttcagccacctgcagcctacattcaacagtctgcacggtaattgcattaaggagatgcttccagcaatactgaagtaaccagaaaatcaacaact

SEQ ID NO: 413320 - DNA, 201 bp, Homo sapiens
aagcacaaaatgatatgcacttttattgttttatttggctaatggcacagtttagcatgtccaatttttctctaaagccttatattctctgtggcaccaasagcagttcattaccccaaaatggagctcagtatttgtttcacaaatagtcttaccaacaatcgccaaaataatgaaaatattattgcaatatgcacaatt

SEQ ID NO: 413321 - DNA, 201 bp, Homo sapiens
gcaaaataaactttctaaattaactgagacctatctctgattttctgggttcacaagacatatgttagtaacatcattctaagtgaatttgcaatgccctstattttggcttttatttgaaaatacagagaatatatttattgaatatgggtcatccatttttataccaagtaatatacgactgaatgacttgatgaagtg

SEQ ID NO: 413322 - DNA, 201 bp, Homo sapiens
ggaatagaaagaaaagactccaaggtatctcattatccagatgaaaacctggatagaaagtagtgccatgaattggaaggaggaagcatagatttggtgtrgagaggagatatggccagtttaatatttaatatgttgattttgcaatgccaatttcaattccagtgactgttagatttatacatctggaactcaggccag

SEQ ID NO: 413323 - DNA, 201 bp, Homo sapiens
tacacacacacacacacacacacacacacacacatacatgcaccccaacagagtcaaccatgtgggctgtgcatatttgtcctgaaaaacaaacatctaagctaatatgcaaacaaatgtaacacatattgcttgaatagtataaatgtattaatatcaacaaaaaatgactcaacattaataaggaagcttaaaagataa

SEQ ID NO: 413324 - DNA, 201 bp, Homo sapiens
taaaaagagaatcacactggtcccaggatccagaacacttgggactactgaagaattccactttcaggcaaaagacaggaagtgtgaagacactgtctggrtgttaaaatcactgtatttcataagaaacaaatagaaagatcaatccctcgatcagactctatctctcgttcttctacaccttctcttttattattttat

SEQ ID NO: 413325 - DNA, 201 bp, Homo sapiens
ctggtcccaggatccagaacacttgggactactgaagaattccactttcaggcaaaagacaggaagtgtgaagacactgtctgggtgttaaaatcactgtrtttcataagaaacaaatagaaagatcaatccctcgatcagactctatctctcgttcttctacaccttctcttttattattttataaaagaatcaaaatag

SEQ ID NO: 413326 - DNA, 201 bp, Homo sapiens
acctctttttcttcccagtcgtgggtatgtctttatcagcagcatgaaaatggaccaacccgataggtatatacatgtgcgaaaatttatcacactgtacrtttaagatacatgaccttactgcatataactcaatagaaatagaagttgttgttgttttctgattacaaagagaatacatgcaaggaaaatacttagata

SEQ ID NO: 413327 - DNA, 201 bp, Homo sapiens
cttatgttttagtgccaggttacacacgaatgtgtgttacatgacgggcaagggggcggccgaagagtactattttagaaaggatggtcataaaaggcttytttgagaaggtaacatttgagcagagatttgaatgaagtaaaggagggagcaatgtgaatatctggaggaagaatgtcccaggcagaaggaaatacaatg

SEQ ID NO: 413328 - DNA, 201 bp, Homo sapiens
ccaattttttctaccatagcacttagcagagaactcagtacatgagagatattcattcaatgaatatttggtgtgtccctattgtgtgccaaacagaaaawgtcagtccctgatggggattaaaccttagtagagaatacaggtaatagaagaataggcaattactatattatataaatgctgtgctggagcttccgccta

SEQ ID NO: 413329 - DNA, 201 bp, Homo sapiens
ggtatcttcattagaaatgcctctgtaacaaacactgttgctactccctaatgctgatgttacactgaaattttcattcctccagaatcgatgcaaatcawatcaaacactacaccatacaacaaagaaaaagagatagcaaatggaagtatattagcatagcaaatccttagcaatacatgacttactgcatgcaccaaa

SEQ ID NO: 413330 - DNA, 201 bp, Homo sapiens
tatatactcgggtgttgttgttgctgttgtttgagatagagtcttcctctgtcacctaggctggagtgctgtggtgcaatcttggttcactgcaaactccrcctcccaggtttaagccattctcccaccacagcctcccaagtagctagtgtaagccaccatgcctggctaatttttgtatctttagtagagacgggattt

SEQ ID NO: 413331 - DNA, 201 bp, Homo sapiens
catagagatattttaatatttctgcattgtcagggctctttgagcagataaagcaagaatctggttaaaggacaagtcttggaagttaaagagtatagaaraacctctagagaaaaaattgttttcatttcaaagtgggtgaatcccagagcatacatttacattccaaatgattgtaaaatagggactttctctttctcc

SEQ ID NO: 413332 - DNA, 201 bp, Homo sapiens
ataaaggagaaataatctgcccaaaatcacacagtagggcactggcacatccaaaagaggtttgtccttccaagaggcgtgcccaccactgccacccagtwtgctgcattctctgacaaagttgtattccaaaaccacgttttgtcacttgttctctggggcaccactatgaatctgggctattacgcttttccttttcta

SEQ ID NO: 413333 - DNA, 201 bp, Homo sapiens
ggacagaacaacactgtcaggattcctgtgtttctgtgaaacagaattgtcctattccctggaactatgcaggaactcagacttcagtggaagagagaagkgttcaagtcactgtactatgtgtctctttgttagaatatttcagagtatattgtaatatagatacccacaaccagattctatttactagaccaaaacttg

SEQ ID NO: 413334 - DNA, 201 bp, Homo sapiens
taaggtggcaagatggccgaataggaacagctctggtctgcagctcccagcgagatcaatacagcaggcaggtgatttctgcatttccaactgaggtacckggctcatctcactgggattggttacacagtgggtgcagcccacggagggcagaccaaagcagggtggggcatcgcctcacttggaagcacaaggggtcag

SEQ ID NO: 413335 - DNA, 201 bp, Homo sapiens
gaggttaagaaaaaaatgcgagtgaactcaatgataaggtggcaagatggccgaataggaacagctctggtctgcagctcccagcgagatcaatacagcakgcaggtgatttctgcatttccaactgaggtacctggctcatctcactgggattggttacacagtgggtgcagcccacggagggcagaccaaagcagggtg

SEQ ID NO: 413336 - DNA, 201 bp, Homo sapiens
tattcaactatttcctttattgttgtagagcataatggataaatgcacagattttgtttcaccattctctcactgtaggaccttggaaatgttgcttaacytctctgtgcctcaatttactcatctgtaaagtagggataacaatggcacctatctctttggagatattgtgaggaataaatgagatagtgtatataacat

SEQ ID NO: 413337 - DNA, 201 bp, Homo sapiens
atacttctggcaacctcagtcactttgagcaacactagaccctgaatataagtgtaaagggctctgagtaactcctgggtggccaaaatgaaactcacaawgtctgagcactaaaatccttttagttttattacaatcatttttagtcattttatgtttttattgattttccaatcgtagcacatttgaggcagaaaatta

SEQ ID NO: 413338 - DNA, 201 bp, Homo sapiens
taattctcatggtaaccacaaagtaaaaatttatggtagagacaaaaaagatacaaagtagggaatcaaagcataccaccagagaaaattattttatcagaaaaaaaagacaaaaaaagaggggaagaaatgaacaaagaacctacaaaacaaccagaaaacaatgagctaaatggcagtattaagtccttacctattaat

SEQ ID NO: 413339 - DNA, 201 bp, Homo sapiens
tgtgcctcaatttactcatctgtaaagtagggataacaatggcacctatctctttggagatattgtgaggaataaatgagatagtgtatataacatacttragatattgctgacccaaaataagttctccataagtatttgctattataattattatataagtcatgtgtcataaggattataaaaaatgatagctaatat

SEQ ID NO: 413340 - DNA, 201 bp, Homo sapiens
aaacacgaatcccattgtgttactccctgattaaaatctgttcccccaagcctgcagcttgggtaccctctgggaatgacttaaaaggtgtttcctgaccrggaccctgcttacatttccagctgcatttctcaccattcccttccctgctcacagtgaattaactcatagttccccaggtgtgtcctggttcatcttctc

SEQ ID NO: 413341 - DNA, 201 bp, Homo sapiens
caaagaccagataatttatgaagaaaagaggtttaattgactcacagttcatcaggctgcacagaagcatggctgggaggcctcaggaaacttccagtcayggcagaaggtgaaggggaagcaagttcaccttaccacggcaacgcaggagagagagggcaaggagggaagtgctacacttttaaaccatcagatctcatg

SEQ ID NO: 413342 - DNA, 201 bp, Homo sapiens
catccctgggatgcaagggtggttcaacatatgcaatcaataaatgtaatccatcacataaacagaaccaatgacaaaaaccacatgattatctcaatagmtgcagaaaaggcctttgataaaattcaacatcccttcatgttaaaaactctcaataaactaggtatggacataacatatctcaaaataataagagctgtt

SEQ ID NO: 413343 - DNA, 201 bp, Homo sapiens
gaaactggcttactgaaaaaaaccaagagtccccatataaattagagaagactcatagatgtgccccttgcttaccttgcaacgaggccagatacagacaytctaaattcccattctttgcctcataaatgattagctgaactgcttgccccgccggtcggccagaacaaaatgcttgctaaccagaaactttgctttagc

SEQ ID NO: 413344 - DNA, 201 bp, Homo sapiens
tccagcctgggtgacaaagcaagttttttgtctcaaaaaaacaaaacaaaacagaacaaaaagaattgtgatcaataaatggaagcttcagaaggcttcakcagaatctaatgaagaatatctaagttgtccaaaggtggaatgggctaccttgcaagtctggagttcctccccagtaccagtgcccagacattatctgta

SEQ ID NO: 413345 - DNA, 201 bp, Homo sapiens
ctgcctttgacttaatcaagactgagcatttccaggtattgcatgtgtgttagctatacgaaccctaccaaaaggttgctagtagaaaaagcatttattartgtctggttcatgtccacagatttgttaccttaattttgctttcactttcccctgtattccctcaactcttttgtgaatattataatttcaaataagaaa

SEQ ID NO: 413346 - DNA, 201 bp, Homo sapiens
acataaattaataatttatattaggctggcagtatgacacattggaaagatccctaagtaatcatcacagccctgccattactaattgtgggacctgaacrggttgcataatctctctccatagcacttcttcacttgaaaattaaagtgggacagcctagattatctctaaagtcccttccaactctaagtagaaaggcg

SEQ ID NO: 413347 - DNA, 201 bp, Homo sapiens
catcacagccctgccattactaattgtgggacctgaacaggttgcataatctctctccatagcacttcttcacttgaaaattaaagtgggacagcctagawtatctctaaagtcccttccaactctaagtagaaaggcggagttttctatgtttattgaatctatgtttattgaacctctgagttggagggtatctcagaa

SEQ ID NO: 413348 - DNA, 201 bp, Homo sapiens
ttgataaaggaagagacaagtaaggtggacctgggaggtgagaactagggaacacaagagaatatgggaagtaggcaggcaaattaactgagaagggtaargggagaagccgtgccggggccagaagtgaagaagaacagaacaggaattatagagagaaactgctgaaaattcatttcagagtccaaagactgaaaacat

SEQ ID NO: 413349 - DNA, 201 bp, Homo sapiens; identical to SEQ ID NO: 101553

SEQ ID NO: 413350 - DNA, 201 bp, Homo sapiens
caaggatggagacatacatttctccatttcagaaaattcatgcaaaataactagaataaatactcttgaataagggatggaactttctaagtcattccatkgtaaaaatttgaagcagtgcaatcacatgatattatgagaaagtcagcccctattggtgcccttagccacttcctttcactcatctctgatttttcagcc

SEQ ID NO: 413351 - DNA, 201 bp, Homo sapiens
taactacattttcaaaccatggttggttaaatctgcggatgtgaaactgcagacacaaagggctaactatattagtctgaaactcacaaaagatgaaatayggtcattccttggtatatccgggacctcaggtctctaaccaaatccacacatactcaagtccaacaatcagccttataggaaaagtcagccctccgtatc

SEQ ID NO: 413352 - DNA, 201 bp, Homo sapiens
aggcaggagaatctcttgaacctgggaggcgaaggttgcagtgagctgaggttgttccactgtgctccagcctgggtacctgggtggcagagggagcctcygtctcaaagataaataaaaattagcatttatcatcatacatgctggaaaggaagtgctggtaatgaaaggtaagcattttctttgctctcttccttacag

SEQ ID NO: 413353 - DNA, 201 bp, Homo sapiens
cattagaatgcagggttagactaataattctctggtactaaccaaatctaaatagtataataaaactgaaataactaaatctaaatagtataataaaactrtacagcttctctttgaggtagaaagttcccagcaaaggttttagagaagcaacatcaacatcagagtttaagagaagggcattttatacattataagagc

SEQ ID NO: 413354 - DNA, 201 bp, Homo sapiens
gttggtattattattccctctttatagttgaggaaatggagacaaaaagagattagtatgagatttgcccaatgacgtagaataaatcagagacacatttagtgtgagcttcaaaacggctcacagataaacatgttgttggcgtcttcatttctctttcctatcagtatcaatgtttcaacattctcaacagaaaatgtt

SEQ ID NO: 413355 - DNA, 201 bp, Homo sapiens
accatcttggaccacgtgaaaaccttggggatggaaatcacatgctatggatggcgaagaaaactaaaagcgcctgagtcactgataccactttagagctrccatataagcctctcttaagccttccttttatgaaagaaatataaaattccatcttgctgaattcctatctgtgttactagcaattgaacaactgatttg

SEQ ID NO: 413356 - DNA, 201 bp, Homo sapiens
gggaaaatattaatcgtatcattcattcagtcttatctctccttcctctcagaaattattttctgtcattttgctcacataataatcagataaattattaygttaaaaagaatatcttctatctctataaacctgagaaactcacattatccataaaatccatcgaataaattctatcataaagagcattattaataaact

SEQ ID NO: 413357 - DNA, 201 bp, Homo sapiens
cgaataaattctatcataaagagcattattaataaacttgtttccccccgatttcttagtcctctttccaggaattcttcattatgaattccttgcctctrcttacaatctaggtgcaatctaggtactttctaaaatactatctttatacacacacatagacacatatacacatagactataaaactcgctcttcatagc

SEQ ID NO: 413358 - DNA, 201 bp, Homo sapiens
ttttaaattttcatattctaatagttttgttgctgatgtgtagaaataaaatttacttttatatactgactttgtacccaacaacctagctaaatgtactyaattctaaaatttagttgtgggagctcttggatttcatatgtatccagtcatgtcacttgtgatataaagatataatattgactgttgtatagttaatat

SEQ ID NO: 413359 - DNA, 201 bp, Homo sapiens
tttttgttgggtgtgggaaactccaggaagaccttcacagaggcaatgacattgcaaaatgtatgtgccttacccagtcagaggctggagttaacaagtakagaacattccagtcaaaaggaaacacatgaaagaacatggcttgtttggggaacaagcagggtctcgggttcacaggggcagaagatgaggctggcaaga

SEQ ID NO: 413360 - DNA, 201 bp, Homo sapiens
ctatgacttgcttgggggagaaagtgaagtgagagacaggagggcaggagaaaatcagagagaccttgcttcagaggccttctaatctccttgagtttaargcaccaatcagcatactaaagcaccttactttggggtattgttttttgaaccccaacatggccacagatttttaactgaaagttgtgaaagtggaggaaa

SEQ ID NO: 413361 - DNA, 201 bp, Homo sapiens
tctaattgtaccctattgctttccctcagaccttatcacagtttgtgattatctattttatgtgtctgtttatgtttaatagctctctcacctgtggaccraaaagcatttgcggatatgggctgtgactgcttgttcacctagatgctagcccagtgcctggcataaagtcggagcgcaataaacacatggtgtgtaact

SEQ ID NO: 413362 - DNA, 201 bp, Homo sapiens
tgcattgaatacaaatggaaaaatggcatttaataagaattatttgacagtaaatcacctgatataattctaaattgactacataaaagtagagttatatkgtaagaagttcaattttataagtagggcatgatgtccagataatgtacaaatgtgatattactaaggtattcaataaatagtattataatagaataaaac

SEQ ID NO: 413363 - DNA, 201 bp, Homo sapiens
tgctatgagctttaccttcattaccttcacaataaccttatgggaaagcaccattattagtaccattttacagatgaggaaactgaagcgtaagaggttaygtgacctaaccaggatctcatgtaaaataatagaacttggatttacacccaggcagtttaactctggagtttacctacttgaccaacagactatacagcc

SEQ ID NO: 413364 - DNA, 201 bp, Homo sapiens
gagctttaccttcattaccttcacaataaccttatgggaaagcaccattattagtaccattttacagatgaggaaactgaagcgtaagaggttacgtgacytaaccaggatctcatgtaaaataatagaacttggatttacacccaggcagtttaactctggagtttacctacttgaccaacagactatacagccatgggt

SEQ ID NO: 413365 - DNA, 201 bp, Homo sapiens
gagagagagagaatatatataaaatatacacgtggcttacataaaactttccatgatattacatggcattatatattacttatcgtttgtcagtaaacatycatatattttatagttgtgactaaggatataaaaatgtttgagtagtaacttatttcatataactctaaaattaataactgaaaaatattaataaccaag

SEQ ID NO: 413366 - DNA, 201 bp, Homo sapiens
ggactacaggcacataccaccacacctggctaattaaaaaaaagattttttgtagagacaggagcttgccatgttgcccaagctggtctcaaactcctggyctcaagtgatcttccgatttctgcctcccaaaatgctgggtctacaggcatgagccactgtgacaggcctgtaagagctctttatataatctgggtacaa

SEQ ID NO: 413367 - DNA, 201 bp, Homo sapiens
ttcatctaggacatgaaattcctgcattgactctgagattacacagataaagctaataattcatatgcaacaagacagatatcacttgttagcatgaggaggggaggttggatcctgcagagaaatagtactaaaacaagtgacgtgaaccattgtcttttgattacccagcatgcattcacacttacttccttccaggac

SEQ ID NO: 413368 - DNA, 201 bp, Homo sapiens
aagacatacagtttaatcaattaacaaactaaacagcttatatactggcaatatattacagatgggtttatgtcagagtaatagatcacatgaaatggacyatgtggtaccccagtgcattatgtcttggtagagccctgaggacactgacagtagcatctctaagtaagtagtgctgtatgaatacagacacatgcggat

SEQ ID NO: 413369 - DNA, 201 bp, Homo sapiens
ggccaaggcaggcggatcgcctgaggtcaggagttcgacaccagcctggccaatgtggtgaaactccatctctactaaaaatacaaaaattagctggtcaygctggcgcacacctgtagtcccagctattcaggaggctgaagcaggagaatcgcttgagcccaggaggtggaggttgttgcagtgagccgaaatcacacc

SEQ ID NO: 413370 - DNA, 201 bp, Homo sapiens
cattattagtaccattttacagatgaggaaactgaagcgtaagaggttacgtgacctaaccaggatctcatgtaaaataatagaacttggatttacacccrggcagtttaactctggagtttacctacttgaccaacagactatacagccatgggttaaactgaagaaaacagccaaaattgacaagaacactgatgcagg

SEQ ID NO: 413371 - DNA, 201 bp, Homo sapiens
ggatttacacccaggcagtttaactctggagtttacctacttgaccaacagactatacagccatgggttaaactgaagaaaacagccaaaattgacaagawcactgatgcaggtaactagacacatcaaatgttgtcccatctccatttgcgtagggaaaagtcagaataatgatgtccctgatagcgatggaatacgtga

SEQ ID NO: 413372 - DNA, 201 bp, Homo sapiens
tcaaaaataaaaggccaaaattagtgcctttaagaaattcccattagattaaaatattgtacatatatataggcttattatttatttatttattttgagayggagtctcacgctgtcacctaggctggagtgcagtggcgccatctcagctcactgtaacctctgcctcctcagcctcccgagtggctgggactacaggcg

SEQ ID NO: 413373 - DNA, 201 bp, Homo sapiens
aattagaagtaacattgaccattgaagcctcatgccacagaactaggggcaaaaaatggaatttctgtactgtaagaaaatgatagattcacagaataagrttgaaaaaagtcttagagttcacctggtccatactttcatttaatactcattcctctctaaaatatgtccatgaaaagtttcaccagtctctgtttgccc

SEQ ID NO: 413374 - DNA, 201 bp, Homo sapiens
aacataaataactgcatttaaatacaaagacaaaaataaatgctattcacatgtgaagctttcacaccgagattgaaaatttacaatgctttgaaaaagcwatctaaatatttggtgctatttctctcatatgcagagtacatgagtttagagatcaaatgagaaagtgagagaggctctttttgccattatacctaatga

SEQ ID NO: 413375 - DNA, 201 bp, Homo sapiens
actctcattaacaataacaaagctcaaaataagaaatgcaatcagagagttttagaaacataaataactgcatttaaatacaaagacaaaaataaatgctrttcacatgtgaagctttcacaccgagattgaaaatttacaatgctttgaaaaagctatctaaatatttggtgctatttctctcatatgcagagtacatga

SEQ ID NO: 413376 - DNA, 201 bp, Homo sapiens
ttagatatattatttcattcatattctaaaagctactgcttatagttcccaagactgtatctccaattctaacctatcttcaagttccagaccagcttttwcaaatgctagttaatttggctatcacaagggcacttgaacctaatacattttttaaaaaagaagactggagtaattatactcctaaatattcccaacttt

SEQ ID NO: 413377 - DNA, 201 bp, Homo sapiens
ttggcaattaaatctaaattataaatctaaattaaatctaaattataaagaaatgtagcatggtgctttgtaggttttttttttctggcttttggctttgyttgtcttgtttctttcttgaagctctcaatttggagcaagataaccaaatatggtaaattttctaactagggaaatatttataaaattcatcacttccac

SEQ ID NO: 413378 - DNA, 201 bp, Homo sapiens
cctattctcaagtggtttgcaaatatgtactcacatacttgcccacccctgaaaaaaataagatgccaacacacagtgaattcactgaacaattagaggcyaccaccaggctacagctgaaataaaaaggagataacatgaataaaactcaaccgttggcaattaaatctaaattataaatctaaattaaatctaaattat

SEQ ID NO: 413379 - DNA, 201 bp, Homo sapiens
tggcttgatagaggcaaattctctcaggatttgtttgactgaaaaagactgtatctttccttcatttatgaagcttagtttagctggatacaaaattcctrgctaataattattttgtttaaggaggctaaagataggaccccaatctcttctagtttgcagggtttctgatgagaaatctgctgttaatctgacaggttt

SEQ ID NO: 413380 - DNA, 201 bp, Homo sapiens
gaggtcttggcctgtgattgaaggagcttagattctgaaatgaagaaagtcctttactggtctacccagctgagttccgatgagaaaaagctcttgatccyattctcaagtggtttgcaaatatgtactcacatacttgcccacccctgaaaaaaataagatgccaacacacagtgaattcactgaacaattagaggccac

SEQ ID NO: 413381 - DNA, 201 bp, Homo sapiens
tagcaatcggcatattttcttggcatttctcatacttactattgaaaaataactttttatacataagtcctctaaactttgggtgctttttttttgcaaawttacttggaaatgtttaatcatagtatttcacaaatggagcatcccagtattcagctcttgaaacttttaaggaatagctattattattaacaaaacttg

SEQ ID NO: 413382 - DNA, 201 bp, Homo sapiens
atccttgggttcacatcactgcttcttctactcttgacttgctgtgtgaccttgagtgagctgtctaacctctctttattttcctcatcagtagaataagrataatgaaactacatatctcataaaattagtacaaatagtaaattgagttaagaatttttaagcacttagaagatcctcattctgcatagtgtaagaact

SEQ ID NO: 413383 - DNA, 201 bp, Homo sapiens
agttgggttaaacccataatatccatctataacttatccagggtattctgtttcaaagagaagtaatagtcttaaaacagaaaacatgcatttgtatgcaygtgtgtgtgcatgcacacacacacacacacacacactactgtgcagtcaaagaacagactccatgtcagttttgaaagacataccaactgggttcaacat

SEQ ID NO: 413384 - DNA, 201 bp, Homo sapiens
gctaagtgaataacatgctggtaattctgatttttaatagatggaaatgtacacatcatgaaattaaggccaaagactaagtaaacactgtaaaacccatraaaagtttcctaaaatctggagactccaattcactatattaagacatcacaagaaagaaactgtgaattacagatggttcaaaatttttgtcaaaataac

SEQ ID NO: 413385 - DNA, 201 bp, Homo sapiens
tcccagctattcaggaggctgaagcaggagaatcgcttgagcccaggaggtggaggttgttgcagtgagccgaaatcacaccattgcactctagcctgggygacagagtgaaactgtctcaaaaaaaaaaaaaaaaagaggattcagagtagaaaaatagcggactctgagttctgaaccaagacacacctgttcagttac

SEQ ID NO: 413386 - DNA, 201 bp, Homo sapiens
ttgcactcaatctattcaaatttattctgatatccaatgataaggaaagatggaactagtttgtgatttcagttttccaaatgaatttcccagatcattaygtaagctctgaatctgctatggcaaaaaaaaaaaaaaaaaaaaaaaaaactggctttttctctgttccaatcaattgccatgtagaaaatatgattcttt

SEQ ID NO: 413387 - DNA, 201 bp, Homo sapiens
cacattgctgaaagaagcactgaagaggcaggagaaactgtctttaattgccagcgccaccccttccccatcctccagcaacaattccgtgtgctggggasagggagagcatagcatttgtgaggaaatgaactcagtgctgcccttgttatagcagaaagtaaaaacaaaccaaattcagctgacacctgcccacggaag

SEQ ID NO: 413388 - DNA, 201 bp, Homo sapiens
aggccaaaattagtgcctttaagaaattcccattagattaaaatattgtacatatatataggcttattatttatttatttattttgagacggagtctcackctgtcacctaggctggagtgcagtggcgccatctcagctcactgtaacctctgcctcctcagcctcccgagtggctgggactacaggcgcccgccaccac

SEQ ID NO: 413389 - DNA, 201 bp, Homo sapiens
tattttaatttataaaatggtaaataccagtggctacaacaaaaattctttaggtttctcattacctttcaagaatataaagggatcatgagactaaaacrtttgagaattactgcctgagggcagtgggctcatgtctctctgcagaacctcatttgagaatgcctgggtagaagctgagtttagagacagggtcttgct

SEQ ID NO: 413390 - DNA, 201 bp, Homo sapiens
gcactccatttatggctggttaaaattcataatgtatttgttcccaaggttctcaagagagaagtcacaaatctgtttgtttctggccataggttttgcawccaaatttaaggctactgactgataggtaatggtagtcaactaatcattgtatggctgcggagttttgtttgtttgtttttgtttatttttagagacagg

SEQ ID NO: 413391 - DNA, 201 bp, Homo sapiens
tttataaaatggtaaataccagtggctacaacaaaaattctttaggtttctcattacctttcaagaatataaagggatcatgagactaaaacatttgagarttactgcctgagggcagtgggctcatgtctctctgcagaacctcatttgagaatgcctgggtagaagctgagtttagagacagggtcttgctctgtcacc

SEQ ID NO: 413392 - DNA, 201 bp, Homo sapiens
ctggttaaaattcataatgtatttgttcccaaggttctcaagagagaagtcacaaatctgtttgtttctggccataggttttgcaaccaaatttaaggctrctgactgataggtaatggtagtcaactaatcattgtatggctgcggagttttgtttgtttgtttttgtttatttttagagacaggatcttcaggatcttg

SEQ ID NO: 413393 - DNA, 201 bp, Homo sapiens
aaattcataatgtatttgttcccaaggttctcaagagagaagtcacaaatctgtttgtttctggccataggttttgcaaccaaatttaaggctactgactrataggtaatggtagtcaactaatcattgtatggctgcggagttttgtttgtttgtttttgtttatttttagagacaggatcttcaggatcttgctatttt

SEQ ID NO: 413394 - DNA, 201 bp, Homo sapiens
ggcacaagggatccttttacttctgccttccaagtagctgagactacaggcgcatgccactgcacccagctgtagagatttttttaaaaaccaacaaattmaataacgtataatcaagtattactttataaatatgttaggccatacccgcttccttctagaaaacgatttctagaataagagaaatgggccagtcaatac

SEQ ID NO: 413395 - DNA, 201 bp, Homo sapiens
tcgaacaaacactctgctctagaccattcttgattccctctccatataaaaatcttgaacaaaacaccccgctctagacaattcttgattccctctccatrtaaaaacttttcctatatattcctgcagtgtcctgctattttaatgcaccatatttattcaaatgtggttttagtacctatgatccaaaatccattacga

SEQ ID NO: 413396 - DNA, 201 bp, Homo sapiens
agggatccttttacttctgccttccaagtagctgagactacaggcgcatgccactgcacccagctgtagagatttttttaaaaaccaacaaattcaataamgtataatcaagtattactttataaatatgttaggccatacccgcttccttctagaaaacgatttctagaataagagaaatgggccagtcaatactctcag

SEQ ID NO: 413397 - DNA, 201 bp, Homo sapiens
gggatccttttacttctgccttccaagtagctgagactacaggcgcatgccactgcacccagctgtagagatttttttaaaaaccaacaaattcaataacrtataatcaagtattactttataaatatgttaggccatacccgcttccttctagaaaacgatttctagaataagagaaatgggccagtcaatactctcaga

SEQ ID NO: 413398 - DNA, 201 bp, Homo sapiens
tctaacaaccccacaatatccccccttaccacaaaatcttccttcagcttaatctctcccactctaggttcccacgccacccctaatcctgctcgaagcakccctgagaaacatcgcccattatctctccataccacccccaaaaattttcgccaccccaacacttcaacactattatgttttatttttcttactaatata

SEQ ID NO: 413399 - DNA, 201 bp, Homo sapiens
aagacctatctttacctgtgaggttttttgatagacactgaaaatatgcattgatatttggcacacaatatgtgctgaaaaaatagtggtagactatattrttattgataacatcattgtaacccaaacacattccaactaaggaatcatttccaaaggtccattcagctaaatagagaggcattaaaattctctttagct

SEQ ID NO: 413400 - DNA, 201 bp, Homo sapiens
ttctttatccataacttcaacatctctggaagttgctcacatctcaccaatagagttgagaccatatcatctcttccctgtgtgaagagtgtcctcttacytgtctctgagcctcttctctctcctctccaaccagaaatatgttggatcctgctcataccagctctctagcaccaattgtgaccatcttttttttttttt

SEQ ID NO: 413401 - DNA, 201 bp, Homo sapiens
tttctttgttgactttctgtcttgattatttgtctagtgctttcagtggagtatcgaagtcctccactattattgtgttggcatctatcttatttcttacrtctagtagtaattgttttataaacttgaaagccccaatgttatgtgcatatatattaaggaatgtgatattttcctgttggactaatccttttatcatta

SEQ ID NO: 413402 - DNA, 201 bp, Homo sapiens
ctcacatcccccgactttcacttccatgttatgaaggaacaaaacaacacggtgtttgttgtttaaccccctcgggccccacgccctctgcctggaggatrctctcccagatctctattttacttgctccctcacctcctcaggggtatactcaaatgtccccttttcagtgaagccctccttgaccacccatttaaactt

SEQ ID NO: 413403 - DNA, 201 bp, Homo sapiens
caggtcagaacattagaacattacttttaagatgggctgttatataggtttcctgtaagagtccaagatcaaagtcagacccacagatacacaatattaasacacctgatcccaagcactatatgattacacagttttaagttacacacacacacacacacacacacacacacacatacatgcaccccaacagagtcaacc

SEQ ID NO: 413404 - DNA, 201 bp, Homo sapiens
aggagaagagccagaagggctgtataatctcaaatcttacttggagtggggagtacctccctcattagagtgtaagtttcatgagagcagggacctttctrtttatgtctatatccaccatacccagaagagttcatagtaaaaattcaatacatttttgttgaatcaaagaatactgaatgaatcggtgaatcactaaag

SEQ ID NO: 413405 - DNA, 201 bp, Homo sapiens
gagaccaacactgccctgaaacaaaagccagacaaagatattacaagaaaataaaaccacagaccaatatccctgtgaatattgatgggaaaatcctcaayaaaatattgacaaactcttagcaacaaaatactagcaacacattaaagggattatatactatgaccaagtgagatttattgctagaatgcaaggatggtt

SEQ ID NO: 413406 - DNA, 201 bp, Homo sapiens
gcaacacattaaagggattatatactatgaccaagtgagatttattgctagaatgcaaggatggttcaacatacaaaaatcaatctatgtagtatatctcrttaatggaatgaaggaaaacattatgtgattatttcaattgatacagaaaaaccatttgacaaaattcaacaccctttcatgattttaaaaaacactcaa

SEQ ID NO: 413407 - DNA, 201 bp, Homo sapiens
ccttgcttcaggatgtcccacctttccagatggaaccaaagtacttcttacatgtattgattcatgtctcatgtctccctaaaatgtataaaaccaagccrtgccccgaccaccttgggcacatgtcaggatttcctgaggctgtgtcacaggcccatcctaaatcttggcaaaataaactttctaaattaactgagacct

SEQ ID NO: 413408 - DNA, 201 bp, Homo sapiens
ttgcctgcttctggttacagacatttggttatgtcaaaggcaagccctctgtcacatgcctctctaaaaagagaatcacactggtcccaggatccagaacmcttgggactactgaagaattccactttcaggcaaaagacaggaagtgtgaagacactgtctgggtgttaaaatcactgtatttcataagaaacaaataga

SEQ ID NO: 413409 - DNA, 201 bp, Homo sapiens
gtattccatggtgcataggtaccacattttcattatccagtccaccgatgctgggcacctgggttgattctgtctttgctattgtggatactgctgcaacraacacacacatgcgtatgtctttttggtagaaaaatttcttttcttttggatacatatccagtaatgggattgctgggttaaatagtagttctgttttca

SEQ ID NO: 413410 - DNA, 201 bp, Homo sapiens
gactctatctctcgttcttctacaccttctcttttattattttataaaagaatcaaaatagccaatagaaggaaagcatctcaaaatggggcagactcataaaaaactattattttgtatacatccttatcctatctgaccatgatttcttctggaattaacaatgacaaaactaataaactcacaagtcagtactatgtg

SEQ ID NO: 413411 - DNA, 201 bp, Homo sapiens
tggctgaactaatttacattcccacctacagtgtataagcattccctttcctccacagcctcgccaacatctgttgattttgagtctttaataaaagctgttctgactggtgtgagatggtacttcattatggttttgattttcatttctctgatgactaatgatgttgagcttattttcatatgtttctcagccacttgt

SEQ ID NO: 413412 - DNA, 201 bp, Homo sapiens
actctatctctcgttcttctacaccttctcttttattattttataaaagaatcaaaatagccaatagaaggaaagcatctcaaaatggggcagactcataaaaaactattattttgtatacatccttatcctatctgaccatgatttcttctggaattaacaatgacaaaactaataaactcacaagtcagtactatgtgc

SEQ ID NO: 413413 - DNA, 201 bp, Homo sapiens
atagaggaggaaacagttagtaattctgcttagcaatattagaaaagaatgaaaacttgataatgactaaaaatacatttattttaagttttctataatasacatagaattatctacttcctatagaaaaattcccttacatgagatataaattggtatgggaaaccattaccttgaaaacatgatgccgctgaagctttc

SEQ ID NO: 413414 - DNA, 201 bp, Homo sapiens
agggacacagagcccaactgtatcaactacattattcatataatgtcagagatgtccccctgactggagatttgtcaaggaaatcaaactagaatcaaaakattttttaatataaaaagaaaattataatttgtattaaaatcaaatagtaaatggataaacaaggaaatgtcttgggaaaacaactagaacatgaaatta

SEQ ID NO: 413415 - DNA, 201 bp, Homo sapiens
ttcacagcaatttcctggcattagtgtaaggaacacaaagctatgtgtacttttggcgttgatattatttaagctggtattctaagcttatgagcataaattctttattgtttttcgcaagtatatacatatttgtatgcccttgtagatacatatgtaggcatatacatacatgtacataaatatgtaggcatatacata

SEQ ID NO: 413416 - DNA, 201 bp, Homo sapiens
ataggaaaagtcagccctccgtatctggaggtttcacatcccaggaatactgtatttttaacccaagtttgtttggaaaaaaaaaaaaaaaaaaacacatstaagtggacccacacagtttaaacacagctgtatagcttaaattgtttcctacccactttttcacgtagtttttgctaaatatattttattcaatctttt

SEQ ID NO: 413417 - DNA, 201 bp, Homo sapiens
tcacagcaatttcctggcattagtgtaaggaacacaaagctatgtgtacttttggcgttgatattatttaagctggtattctaagcttatgagcataaattctttattgtttttcgcaagtatatacatatttgtatgcccttgtagatacatatgtaggcatatacatacatgtacataaatatgtaggcatatacatac

SEQ ID NO: 413418 - DNA, 201 bp, Homo sapiens
cacagcaatttcctggcattagtgtaaggaacacaaagctatgtgtacttttggcgttgatattatttaagctggtattctaagcttatgagcataaattctttattgtttttcgcaagtatatacatatttgtatgcccttgtagatacatatgtaggcatatacatacatgtacataaatatgtaggcatatacataca

SEQ ID NO: 413419 - DNA, 201 bp, Homo sapiens
tttcaagaaaaaagacatatgatgaattagcacatgtataaaggagtcatctggaaggaaagtgaaaaaagtattaaaggtgttaaaaattgttatgtacrtatatttatttccaaattgtcaaacttgttaggaaaacatgctttgccttctcttaccaatctttacccctttccaacttgcttttcattatggacaaag

SEQ ID NO: 413420 - DNA, 201 bp, Homo sapiens
gaggcttatagtctggcagccttcctcatttatggtacctcatctaaatagcaaaacactattttctcgattttttcaagggtgttacataatagtgccaygctagatgcataaaagagacatttattcattacatacaacagataatttttaggagtggttctcaaagtatagtacacagacccctgagtgtccccaaga

SEQ ID NO: 413421 - DNA, 201 bp, Homo sapiens
aacaaccattctacccctcatccatgatatcctaacaaccattctacccctcatccatgatatcctaataaacattctacccctcatccatgatataacawccatgtggttctagaacagctggctttacccccagctccaggaatggagtacataacctcagctaagccaatcattgcatttcgccctttgagcactatt

SEQ ID NO: 413422 - DNA, 201 bp, Homo sapiens
aatagcaaaacactattttctcgattttttcaagggtgttacataatagtgccacgctagatgcataaaagagacatttattcattacatacaacagatamtttttaggagtggttctcaaagtatagtacacagacccctgagtgtccccaagaccttttcatgtggcccccaaattagtcaaaactaattccaaataat

SEQ ID NO: 413423 - DNA, 201 bp, Homo sapiens
acagcaatttcctggcattagtgtaaggaacacaaagctatgtgtacttttggcgttgatattatttaagctggtattctaagcttatgagcataaattctttattgtttttcgcaagtatatacatatttgtatgcccttgtagatacatatgtaggcatatacatacatgtacataaatatgtaggcatatacatacat

SEQ ID NO: 413424 - DNA, 201 bp, Homo sapiens
acttaaaagggaaggatgggaagggatgagggataaaagactacacattggctacagtgtacactgctcgggtgcaacaaaatctcagaaatcaccactaragaacttattcatgtaaccaaaaaccatctgtcctccaaaaactattgaaataaaataaatgttttttaaaaactctctttactggctttaaagaacagc

SEQ ID NO: 413425 - DNA, 201 bp, Homo sapiens
atttctcttcactttgattgttactgttactattccttggaattcttatccatatacttacctggaattcaaaccatatcaatattttaaggctctatttrggtccaatattcatctttaacactacaaagaagacagcacagtaataagcatatgctccagagtcagaatcatgcaccactagctgcatgaccggtggca

SEQ ID NO: 413426 - DNA, 201 bp, Homo sapiens
atgctccttctctggtcacttcttctttgttggtatttgtcaaggtttgttcctagaatctctctttgccccattatcctcctatttagtgatgaggactsaccataacctccagcccatgcctatttcttgaacaataaacatatgtatgcaactgcctgctggatatttcaaattcaacatgtccacagatgaattcaa

SEQ ID NO: 413427 - DNA, 201 bp, Homo sapiens
tccttggaattcttatccatatacttacctggaattcaaaccatatcaatattttaaggctctatttaggtccaatattcatctttaacactacaaagaakacagcacagtaataagcatatgctccagagtcagaatcatgcaccactagctgcatgaccggtggcacattactaaatcatctgtgccttgtcttcacct

SEQ ID NO: 413428 - DNA, 201 bp, Homo sapiens
ttctctggtcacttcttctttgttggtatttgtcaaggtttgttcctagaatctctctttgccccattatcctcctatttagtgatgaggactcaccatawcctccagcccatgcctatttcttgaacaataaacatatgtatgcaactgcctgctggatatttcaaattcaacatgtccacagatgaattcaacttcttc

SEQ ID NO: 413429 - DNA, 201 bp, Homo sapiens
ggtatttgtcaaggtttgttcctagaatctctctttgccccattatcctcctatttagtgatgaggactcaccataacctccagcccatgcctatttcttkaacaataaacatatgtatgcaactgcctgctggatatttcaaattcaacatgtccacagatgaattcaacttcttccttccaagcctgttcctcctcagt

SEQ ID NO: 413430 - DNA, 201 bp, Homo sapiens
gaccagcctggccaaccctgcgaaaccccatctctactaaaaatacaaaaaaaaaaaaaaaaaagctgggcatggtggtgggcacctgtaatcccagctamttgggaggcagaggcagaagaattgcttgaacccaggaggtggaggttgcagtgagccaagatcacaccactgcactccagctaggcgacagagtgagac

SEQ ID NO: 413431 - DNA, 201 bp, Homo sapiens
tggccaaccctgcgaaaccccatctctactaaaaatacaaaaaaaaaaaaaaaaaagctgggcatggtggtgggcacctgtaatcccagctaattgggagrcagaggcagaagaattgcttgaacccaggaggtggaggttgcagtgagccaagatcacaccactgcactccagctaggcgacagagtgagactcttgctc

SEQ ID NO: 413432 - DNA, 201 bp, Homo sapiens
ccaaagtgctgggattacaaaggcttgagccacccacctggccagaagtatggcatgtcttaaggaaaagggaagttattacatggatgacagagtatatygaaaattctttaagtagggcaattatacggtaacaactgcaaatcaaataacaagtctggtggcttcactggtagaataatggacaagaagatagtatgc

SEQ ID NO: 413433 - DNA, 201 bp, Homo sapiens
aagcctaggacatcatatcaaacaaggtctttgctcaatgacatgccagggaggtcttccctcatccctctatctgaaactgaaaccctccaccacactcyctattccatatttctgctcaacattctcctcgaccatacctaccatttaacataaaaaatatttcatttattcatccagtttgttttctgtctccttcca

SEQ ID NO: 413434 - DNA, 201 bp, Homo sapiens
ttctagatcttgacctgtttggtggatacataggttatatggtttggctttgtgtccccacccaaatctcatcttgaattatacacccataattcccacaygttgtgggaggaacccggtgggagataattgaactatggggacagtttcccccatactgttctcatggtagtgaataagtctcacgtgatctgatggttt

SEQ ID NO: 413435 - DNA, 201 bp, Homo sapiens
gccaggtggagctataagtccaattaaacctctttttcttcccagtcgtgggtatgtctttatcagcagcatgaaaatggaccaacccgataggtatatayatgtgcgaaaatttatcacactgtacatttaagatacatgaccttactgcatataactcaatagaaatagaagttgttgttgttttctgattacaaagag

SEQ ID NO: 413436 - DNA, 201 bp, Homo sapiens
gcatgaggaagctgagctgaatcccggcaacctacaacacacaagccatcctaacggcattagcggcagccagttgttgtcgtagtagaaatgcccacctyatgcttcagattttatcatttttcatgagagggattttttaatgctggattttaaaaagcttctaattaatactcaaaattttttaaccatgtgcgagcc

SEQ ID NO: 413437 - DNA, 201 bp, Homo sapiens
ctacatatggcaaatttacaagaaaaaaacaaacaaccccatcaaaaagtgggtgaaggacatgaacagacacttctcaaaagaagacaattatgcagccaaaaaacacatgaaaaaatgctcaccatcactggtcatcagagaaatgcaaatcaaaaccataatgagataccatctcacaccagttagaatggcaatcat

SEQ ID NO: 413438 - DNA, 201 bp, Homo sapiens
tgcaacacaccagcatggcacatgtatacatatgtaactaacctgcacattgtgcacatgtaccctaaaactcaaagtataattaaaaaaaaaagaatctrtatgagtggttctactaaatatcctaaataaattgtaaacctgttttgtaaccccaagacagatatgtactgctctcatttgtaacatacctccttttaa

SEQ ID NO: 413439 - DNA, 201 bp, Homo sapiens
caggcatggtagcatacatctgtagtcccagctactcagggggctgaggtgggaggatctcttgagcctggaaggtcaaggctgcagtgagtcgagatcaygccactgcattccagtctgggtgacaaagtgagaccctgtcaaaaaaagttaagggctaggtacagtggctcacgcctgtaatcccagcactttgggagg

SEQ ID NO: 413440 - DNA, 201 bp, Homo sapiens
aaaataacaagcgttgttgagaatgtggagagatatgaacccttgtgccctattggtgaaaatgaaaattagtacagccaccctggaaaacagcacagcartaccttaaaaaatgaaaaatagaattaccatgtgatccagcaatcccatgcctggttatatgcccaaaagaattgaaagcagggtctcaaaaagatattt

SEQ ID NO: 413441 - DNA, 201 bp, Homo sapiens
cactgcattccagtctgggtgacaaagtgagaccctgtcaaaaaaagttaagggctaggtacagtggctcacgcctgtaatcccagcactttgggaggccraggctggtggatcatttgaggtcaggagtatgagaccagcctggccaacaaggggaaaccccatctctactaaaaatacaaaaattagctgggcatggtg

SEQ ID NO: 413442 - DNA, 201 bp, Homo sapiens
ccacttcatctgactattcctatccaaacacgtttcctcaaggagacttcctctgacacccacagtatattcagtaccctatgctcattaaaaaaacaacaaaaaaaaaaactaactgcagtctcctgaaaatattgttttcttataatttattcaaatattgaaggttagcatgcaaataaataattggaaactgtgata

SEQ ID NO: 413443 - DNA, 201 bp, Homo sapiens
cttcatctgactattcctatccaaacacgtttcctcaaggagacttcctctgacacccacagtatattcagtaccctatgctcattaaaaaaacaacaaamaaaaaaactaactgcagtctcctgaaaatattgttttcttataatttattcaaatattgaaggttagcatgcaaataaataattggaaactgtgatacct

SEQ ID NO: 413444 - DNA, 201 bp, Homo sapiens
ctatttttttcttatctccagtagtatttttggaccttaaataccaccacaatattttggaatttgtgtaaaaacctttttccccctactggtccaaaagyatcttaggttcctttgcatttaatcatagtttttttgttctcagttaaatgtagtttaagtggtattataaagataaaatgaggtaaaatattaataaat

SEQ ID NO: 413445 - DNA, 201 bp, Homo sapiens
ctattcaaactaaaagactgcaaaggttgtagaagctaaaggcaaatgccattatatgaaacaagtataagacattggtatacaaacaatatgtgaaaaayaattttttaaatttaaaatctgtctgtaatgattctgccttagagtcccaggtaataaaagataaccagataagtttgctaaatagaaatggcggactaa

SEQ ID NO: 413446 - DNA, 201 bp, Homo sapiens
caactagaacatgaaattactctataaattaatgtcagataattgctaagggcagaatcaattttatggaggagggataacacaaaaatgttttaaattgytttaagttggtgatgtgggtattttgggtaagataaaccattataactaactccagaacttggtcttagctatttgagacctgatcttaagcagaattac

SEQ ID NO: 413447 - DNA, 201 bp, Homo sapiens
tgataaggaaatagctgtacatcatcattatctccaaatagactgaggatcctttttcatctttcaagatgcaaatttcatcatcctattgaatttattctctgcataaaacattagcatttaccaaggttcttgcggggtttttctgtttttgtttttagcataggaggacttctgaagaatcgctatatgtgaataata

SEQ ID NO: 413448 - DNA, 201 bp, Homo sapiens
tgtatcccagagcttaaaattaaattaaatttttttaaaaaggtgatgtgcctcctcaacacttctctttccacagtggtgttttagctcgtgcatcacargatgactaaactcctgagtcaccagatagaggacaacccttgctcacctgaattggaatttgaatgacaggaaataaacttttgatctgatatatcactg

SEQ ID NO: 413449 - DNA, 201 bp, Homo sapiens
ctgacagcgcaaagtttagacattggcaggagataccgatatttaaataaacgagtagttatataccatagagttgggtcaagagctatgaaggctattayaggattgcaagaaaggcatataatctaaggagtacaaaaattgtctctacaaaagcgccatttaagctaagacctaaagaacaaaaaattgtccagtcaa

SEQ ID NO: 413450 - DNA, 201 bp, Homo sapiens
tattataggattgcaagaaaggcatataatctaaggagtacaaaaattgtctctacaaaagcgccatttaagctaagacctaaagaacaaaaaattgtccagtcaaaattataggtgaatgaagaggtgtggcagtacatgtgaaggccctgagaggaaaggggactggcacattagaggaaaagggaaaaaacgtcacga

SEQ ID NO: 413451 - DNA, 201 bp, Homo sapiens
tgaaagaaaatgtctgtttccctcaccagactataatctcttgaggacaagaccttttctgaactcaatgcctagaataatagtctttcacatgtatgttwtatatatatttgtatgtaaatctgtagaagaagaggaatatgattaatgccaacaggaaaatacataatggaaaagaaggagaaagcatcattgcctatc

SEQ ID NO: 413452 - DNA, 201 bp, Homo sapiens
tcatatttacatagcagccttcaacataggagcaaaagaacctggcaaacattctcatttttattattgatggcttagattaataaagtgtcttcctgtcagagctcattaatccttacacagactcctgtgacacaaaaaggcaagcaatccatttctacattttacatatggagaaaccaaagctaaaggacctgtgca

SEQ ID NO: 413453 - DNA, 201 bp, Homo sapiens
tacgtgaccagaatagagtgataaaaataatgagatacaatgaaattcaaatactgttaaaatgacttctctactaagcaggaaaatagtttacaataagraagacttagaataaacaaaatggaatgaacttccatgcctggcttcatcttgcctttttggaattgactgagaacaagtttgctgtgtaggcgtttcgtg

SEQ ID NO: 413454 - DNA, 201 bp, Homo sapiens
ccagatttttaaaattcttagcttaaaattcaaaagaagatagaattcaagaagaattggatatttaacctttccagatattacagaaaagtaaaaaaaamcgggagccaaagaattcataattgcaaagatgtggaaccaacgtaagtgcccactgactgatgggtagataaagaaaatgtggtatatacaccatggaat

SEQ ID NO: 413455 - DNA, 201 bp, Homo sapiens
aattcaaaagaagatagaattcaagaagaattggatatttaacctttccagatattacagaaaagtaaaaaaaaacgggagccaaagaattcataattgcmaagatgtggaaccaacgtaagtgcccactgactgatgggtagataaagaaaatgtggtatatacaccatggaataccactcagccattaaaaggaatgaa

SEQ ID NO: 413456 - DNA, 201 bp, Homo sapiens
gggaaattgagagtttacatgcctgagtccatctgttttctcagggaagtaggaggtaagaccttctgtaaagaatgttgctggtgaagtggaattgggasctttcatgaaagttgtaaaaggattgtaacagccgccttgggaaatggctagggagctgacgagacatatatgcaaaatggttgctgagcaggaacaagg

SEQ ID NO: 413457 - DNA, 201 bp, Homo sapiens
cttatttgtgacttaggttttaaaaggccttgtaccatgttctaaagagttcacccacaccacaacatacaagtcaagctcagaatgattcattaccttamagaaaggatatagtttacaaaaacatgacactggtatcttacaaaaaatattaaaatgatagtcctatggtgaacatgagatagttaactgctgaacaag

SEQ ID NO: 413458 - DNA, 201 bp, Homo sapiens
atcacaccactgcactccagctaggcgacagagtgagactcttgctcaaaaatagtaataataataatataaaacaaaaactatttcttataaaatcttcstatggtttgaatgcattctccaaacttcaggtgttgccactgtgatagtattaaaaggtgggtccttgaagaagtgagtaggtcatgaggactctttcct

SEQ ID NO: 413459 - DNA, 201 bp, Homo sapiens
ataatataaaacaaaaactatttcttataaaatcttcctatggtttgaatgcattctccaaacttcaggtgttgccactgtgatagtattaaaaggtgggkccttgaagaagtgagtaggtcatgaggactctttcctcatgaaggagattaaagcccttataaaacaggcttcctttaacaaatttacaagaaagaaaca

SEQ ID NO: 413460 - DNA, 201 bp, Homo sapiens
agaaagaaacaaacaaccccatcaaaaagtggcaaaggatatgaacagacacttctcaaaaggagacatttatgcagccaacaaacatgaaaaaaagctcwacatcactgatcattagagaaatgcaaatcaaaactataatgaaaataccatctcatgccagtcagaatgcagattattaaaaagtcacgaaacaataga

SEQ ID NO: 413461 - DNA, 201 bp, Homo sapiens
tgcaaatcaaaactataatgaaaataccatctcatgccagtcagaatgcagattattaaaaagtcacgaaacaatagatgctgacaaggctgtggagaaayaggaacgcttttacactgttcgtgggaatgtaaattagttcaactattgtggaagacactgtggcgattcctcaaggatctagaacaagaaataccacgt

SEQ ID NO: 413462 - DNA, 201 bp, Homo sapiens
aaataccatctcatgccagtcagaatgcagattattaaaaagtcacgaaacaatagatgctgacaaggctgtggagaaacaggaacgcttttacactgttsgtgggaatgtaaattagttcaactattgtggaagacactgtggcgattcctcaaggatctagaacaagaaataccacgtgacccagcaatctgattactg

SEQ ID NO: 413463 - DNA, 201 bp, Homo sapiens
agtggcacgcaggcaaaacagaacataggaccagcttggttattttctttgaatacaggaaatttctcaaacatgatatatagccatgttcaagtatgagyataattacagagttccctctgtaccctttaatcagcctataaactcaacagcagagtcttgtcagaataggcccaaactggaaaaaccacatgtttctct

SEQ ID NO: 413464 - DNA, 201 bp, Homo sapiens
acattgctttgttaagcaaaaggatttgtaggctaaaatgcccatgaattgagttttataaaactgtgatttctcttctcttatttcagaagagctaaatkgtgtgtgtgtgtgtgtgtgttcctgaaagaaaaccataatttagctcagaaccaatttttctactaaaggagatgaatctgtaaaatatagtacaatgtt

SEQ ID NO: 413465 - DNA, 201 bp, Homo sapiens
cacagccaccttatgggatggatgcttttattgttttcaatatacaaaggagaaaactgagggaccagcattagataacttggccaagatcacatattgtattagttcgttttcactctgctataaagaactaccaaagaccagataatttatgaagaaaagaggtttaattgactcacagttcatcaggctgcacagaag

SEQ ID NO: 413466 - DNA, 201 bp, Homo sapiens
acagccaccttatgggatggatgcttttattgttttcaatatacaaaggagaaaactgagggaccagcattagataacttggccaagatcacatattgtattagttcgttttcactctgctataaagaactaccaaagaccagataatttatgaagaaaagaggtttaattgactcacagttcatcaggctgcacagaagc

SEQ ID NO: 413467 - DNA, 201 bp, Homo sapiens
cagccaccttatgggatggatgcttttattgttttcaatatacaaaggagaaaactgagggaccagcattagataacttggccaagatcacatattgtattagttcgttttcactctgctataaagaactaccaaagaccagataatttatgaagaaaagaggtttaattgactcacagttcatcaggctgcacagaagca

SEQ ID NO: 413468 - DNA, 201 bp, Homo sapiens
agccaccttatgggatggatgcttttattgttttcaatatacaaaggagaaaactgagggaccagcattagataacttggccaagatcacatattgtattagttcgttttcactctgctataaagaactaccaaagaccagataatttatgaagaaaagaggtttaattgactcacagttcatcaggctgcacagaagcat

SEQ ID NO: 413469 - DNA, 201 bp, Homo sapiens
ttaaagcagtcattaaccagattggcaaaagtgtaaaacaatgccactttgtcactaaattatttttatttcttaaaagtagttttcataaaaagataacwatttatgttaacatgtaatgggtttacaatcattgatttttaaataaattacataaatatttacaattttatattttaatttataaaatggtaaatacca

SEQ ID NO: 413470 - DNA, 201 bp, Homo sapiens
gtaaaacaatgccactttgtcactaaattatttttatttcttaaaagtagttttcataaaaagataactatttatgttaacatgtaatgggtttacaatcrttgatttttaaataaattacataaatatttacaattttatattttaatttataaaatggtaaataccagtggctacaacaaaaattctttaggtttctca

SEQ ID NO: 413471 - DNA, 201 bp, Homo sapiens
tactcaagtccaacaatcagccttataggaaaagtcagccctccgtatctggaggtttcacatcccaggaatactgtatttttaacccaagtttgtttggaaaaaaaaaaaaaaaaaaacacatctaagtggacccacacagtttaaacacagctgtatagcttaaattgtttcctacccactttttcacgtagtttttgc

SEQ ID NO: 413472 - DNA, 201 bp, Homo sapiens
actcaagtccaacaatcagccttataggaaaagtcagccctccgtatctggaggtttcacatcccaggaatactgtatttttaacccaagtttgtttggaaaaaaaaaaaaaaaaaaacacatctaagtggacccacacagtttaaacacagctgtatagcttaaattgtttcctacccactttttcacgtagtttttgct

SEQ ID NO: 413473 - DNA, 201 bp, Homo sapiens
aggggttttggttggttggatgtttggtgactcattattgcttatctctgaggtcttgaactctaaggagtagggtttttttaatgtttataagcctaacyactccctaccatgattgagagtaaacagcatgttttttaggagagtaaccacatcatgctgtatctctagtttatattacacaaattacaagtacatttt

SEQ ID NO: 413474 - DNA, 201 bp, Homo sapiens
ctcaagtccaacaatcagccttataggaaaagtcagccctccgtatctggaggtttcacatcccaggaatactgtatttttaacccaagtttgtttggaaaaaaaaaaaaaaaaaaacacatctaagtggacccacacagtttaaacacagctgtatagcttaaattgtttcctacccactttttcacgtagtttttgcta

SEQ ID NO: 413475 - DNA, 201 bp, Homo sapiens
gtcaggcactattctattacacacagtgtatcggcagggctgcagtacaacaagaggtcatcccaaatatcaccagggacattcagggtctaaagcaaatrtgtacaacttcctggggcctcaggcagagtcatgcagtgactaagggaggcatgcagtgactaagggaagaagaggctgaggctaaataagactggaaat

SEQ ID NO: 413476 - DNA, 201 bp, Homo sapiens
tgaaatgaatgacagtaaggcgctggagggcataatacaaagggcagaagggaagaattagaaatactcgattattgttacaaggtacttgtattatctgygaagcagtatagctcactttcaaatgtatttgaaagtggatttggattagctgtaaatggacattgcatactctagagtaactactaaataaagtaaaat

SEQ ID NO: 413477 - DNA, 201 bp, Homo sapiens
tcaagtccaacaatcagccttataggaaaagtcagccctccgtatctggaggtttcacatcccaggaatactgtatttttaacccaagtttgtttggaaaaaaaaaaaaaaaaaaacacatctaagtggacccacacagtttaaacacagctgtatagcttaaattgtttcctacccactttttcacgtagtttttgctaa

SEQ ID NO: 413478 - DNA, 201 bp, Homo sapiens
aagaggtcatcccaaatatcaccagggacattcagggtctaaagcaaatatgtacaacttcctggggcctcaggcagagtcatgcagtgactaagggaggmatgcagtgactaagggaagaagaggctgaggctaaataagactggaaatattcaagtaaaccatgctcccacctcatcctcaagataaaacgagcttttc

SEQ ID NO: 413479 - DNA, 201 bp, Homo sapiens
tgaggctaaataagactggaaatattcaagtaaaccatgctcccacctcatcctcaagataaaacgagcttttcttggggaaaaaggactgaaggcttcaytttcacacacaccactgaggtttcaggtgtttaagaggttgccttaccttcttttcttctttagtgctacctactaatcttcatttgaaccagatttatc

SEQ ID NO: 413480 - DNA, 201 bp, Homo sapiens
tgaaagtctgaatgtagttcacaaatgataacggggggagggaaagtctattgtaaaataatatcaaagaagattaagcctcctcaggtagcagcagcttaaaaaatctaattagtgtatgtgtcttttgaacaatgatgctaatagaaaacgcccttttcttagatcccagcagaagctggtgtgtgagataaagaaagt

SEQ ID NO: 413481 - DNA, 201 bp, Homo sapiens
ggagacttgatctgtgttttccccaactaaaaatatccctgaaccttccttttcactggttctcagatatgagtgtgcatctcaaccacctggggatgcamactggagaaacagggcttgataaaatacaagtcattggcataacattctggagatttggattcaagcatcagcaatcaaccaattaaaaatcatcattac

SEQ ID NO: 413482 - DNA, 201 bp, Homo sapiens
gcgatgtgctcacaactaaaactagagaagcaagagcaaacaaatccaaaaactagcagaaaacaagaaataaccaagatcagagcagaatagaaaaacakagagacacaaaaaaaaaccttcaaaaatcaatgaatccaggagatggtttttgaaaaactaaaatagattgactgctagctagactaataaagaagaaaa

SEQ ID NO: 413483 - DNA, 201 bp, Homo sapiens
ttggggaatggggttgctatggcaaccgaaaggagcacacatgacgtcaaagcccagagaggtctagggagggggatgagggggaaacagaaagaggaagmgtctatgtgcagctacagctactgtgttttccggtgaaatgaggaccaggcaaatgtaaaggaataaggttcgtcggcagccaacatcagcaactacgac

SEQ ID NO: 413484 - DNA, 201 bp, Homo sapiens
aacgcaggagagagagggcaaggagggaagtgctacacttttaaaccatcagatctcatgggaactcactcattatcataagaacaggatgcgggaaatcyacccccatgatctaatcatctcccaccatgtccctcccctgacacttggggattacaattcatcatgagatttgggtggggacacagagccaaaccatat

SEQ ID NO: 413485 - DNA, 201 bp, Homo sapiens
ctgataccaaaatctggcagagacatagcaaaaaaagaaaacttaaggccaatattcctgatgaacatcgattcaaagatactcaataaagtactgtcaawcctaatccagcaacatatcaaaaagcttatcctacacaatcgagtcggcttcatccctgggatgcaagggtggttcaacatatgcaatcaataaatgtaa

SEQ ID NO: 413486 - DNA, 201 bp, Homo sapiens
gaaagaaataaagggtattcaaataggaaaagaggaaggcaaattgtctctgtttgcagatgacatgatcctatatctagaaaatcccattgtctcagccmaaaagcttattaagctgataagcaacttcagcaaagtctcatgataaaagatcaatgtgcaaaagttacaagcattctgagaggacagccaagatggcct

SEQ ID NO: 413487 - DNA, 201 bp, Homo sapiens
cccatctgtacatcaccatcatcaaagaccaaaagtagataaaaccacaaagatggggaaaaaacagaacagaaaaaccggaaactctaaaaagcagagcractctcctcctccaaaggaacacagttcctcaccagcaacagaacaaagctggacagagaatgactttgacgagttgagagaagaaggctacagacgatc

SEQ ID NO: 413488 - DNA, 201 bp, Homo sapiens
ccatctgtacatcaccatcatcaaagaccaaaagtagataaaaccacaaagatggggaaaaaacagaacagaaaaaccggaaactctaaaaagcagagcgmctctcctcctccaaaggaacacagttcctcaccagcaacagaacaaagctggacagagaatgactttgacgagttgagagaagaaggctacagacgatca

SEQ ID NO: 413489 - DNA, 201 bp, Homo sapiens
acaggagggtatgtggaactcaactgggagtgctatcgaaatgagaacagcctgttaagataacgaaaagtggaaaatcgtagcaaacaggaattatattwggaagcaaaacacattaaggagagcacaagattttttttaatgaattttaattctttctccagtctttgttgttatttgctaatggactttatgatggtt

SEQ ID NO: 413490 - DNA, 201 bp, Homo sapiens
acagagaatgactttgacgagttgagagaagaaggctacagacgatcaaactactccgagctacaggaggaaattcaaaccaaaggcaaagaagttaaaamctttgaaaaaaatttagacgaatgtataactagaataaccaatacagagaagtgcttaaaggagtggatggagctgaaagccaaggctccagaactacgt

SEQ ID NO: 413491 - DNA, 201 bp, Homo sapiens
gagaagtgcttaaaggagtggatggagctgaaagccaaggctccagaactacgtgaagaatgcagaagcctcaggagccgatgcgatcaactggaagaaargatatcagcaatggaagatgaaatgaatgaaatgaagcaagaagggaagtttagagaaaaaagaataaaaagaaatgaacaaagcctccaagaaatatgg

SEQ ID NO: 413492 - DNA, 201 bp, Homo sapiens
tttacagaaagcaaatgctgagattttgtcaccaccaggcctgccctaaaagagctcctgaaggaagcgctaaacatggaaaggaacaaccggtaccagcygctgcaaaatcatgccaaaatgtaaagaccatcgagactaggaagaaactgcatcaactaacgagcaaaataaccagctaacatcataatgacaggatca

SEQ ID NO: 413493 - DNA, 201 bp, Homo sapiens
tcataatgacaggatcaaatacacacatcacaatattaactttaaatgtaaatggactaaatggtccaattaaaagacacagactggcaaattggataaasagtcaagacccatcagtgtgctgtattcaggaaacccatctcacgtgcagaaacacacataggctcaaaataaaaggatggaggaagatctaccaagcaa

SEQ ID NO: 413494 - DNA, 201 bp, Homo sapiens
ttagaatgccattgtcttctttttgcattagaaacaactctagttcaaataaaaaacatagcctcaagaggttatcagtatttatgtttactcagacttagctgtaacatgtttaccttgtgctagctgtgagtctcattaaacttgtaggcaccactgggtcccttggaattctgtgttcatggggtatctccaacacta

SEQ ID NO: 413495 - DNA, 201 bp, Homo sapiens
ctctcagaaaagatactaagcttaggatgtgagcagcgcaccatgagagcacaaggtgttccttctctctcaaagtcagtcccagaactgaaaagaaaaaygttctcagttggcatcactgccctgtttttcatccaacaaagaatattcgctatgaattttctcaagcaaaaagtcactgaattcttttaacaggggcag

SEQ ID NO: 413496 - DNA, 201 bp, Homo sapiens
gataattgacttctgaaggaggaggaaaaagaacagtttgattaaaagtacaattttcacctcccaccaaaagttggccaaaatgtgaattcaaaccagcrctatgctattacataaacagtgtttagtatgagaactcaaattaatgtttaaaaacccattactttgtgggtgccttacattgcctctcagcagtgccac

SEQ ID NO: 413497 - DNA, 201 bp, Homo sapiens
tcagacactggtagcaaagactgagagtctgtctctctctctctcttcatgacaacatcttgacattctgaggaagagagatcaaattgttaaagtattaaaaaaaaaaaaaaaaaacaacaagctaagcctaagtggggagagagggaacagttccaaaaaggagataaggaaggcatagggtgtgattctgaagggttt

SEQ ID NO: 413498 - DNA, 201 bp, Homo sapiens
cagacactggtagcaaagactgagagtctgtctctctctctctcttcatgacaacatcttgacattctgaggaagagagatcaaattgttaaagtattaaaaaaaaaaaaaaaaaacaacaagctaagcctaagtggggagagagggaacagttccaaaaaggagataaggaaggcatagggtgtgattctgaagggtttt

SEQ ID NO: 413499 - DNA, 201 bp, Homo sapiens
caagtccaacaatcagccttataggaaaagtcagccctccgtatctggaggtttcacatcccaggaatactgtatttttaacccaagtttgtttggaaaaaaaaaaaaaaaaaaacacatctaagtggacccacacagtttaaacacagctgtatagcttaaattgtttcctacccactttttcacgtagtttttgctaaa

SEQ ID NO: 413500 - DNA, 201 bp, Homo sapiens
tgcctcccaggttcaagcgattctcctgcctcagcctcctgagtagctaggattacaggtgcccaccaccatgtccagataattttttttttttttgagayggagtctcactctgtcgcccaggctggagtgcagtggcacgatcgcggctcactgcaacctctgcctcccaggttcaagtgattctcctgcctcagcctc

SEQ ID NO: 413501 - DNA, 201 bp, Homo sapiens
tttttaaatcttaaaagttcaacattttaaatttttgtaaggatggcctttcaaaatatgtttatcataacacatatgggcataataataagacttaagcaaaaaaaaaaaaaaaaaaacactttgggcaattaatttaaaaggcaaaataaaatcttaattcctctgaacaagtagtatcattgctttaattacacatcc

SEQ ID NO: 413502 - DNA, 201 bp, Homo sapiens
cccatcacatttttcagatatggaactaaggtcagcacttctaacaagcacagctgtttggtgttttttttttcctctctctctctctctctctctctctstgtgtgtgtgtgtgtgtgtgtgtgtgtgtgtgtgtgtgtgtttctctctctctcccttcccttctgtagccctgcattggtctaaaaacccctggtcaca

SEQ ID NO: 413503 - DNA, 201 bp, Homo sapiens
catcacatttttcagatatggaactaaggtcagcacttctaacaagcacagctgtttggtgttttttttttcctctctctctctctctctctctctctgtstgtgtgtgtgtgtgtgtgtgtgtgtgtgtgtgtgtgtgtttctctctctctcccttcccttctgtagccctgcattggtctaaaaacccctggtcacaat

SEQ ID NO: 413504 - DNA, 201 bp, Homo sapiens
attaaatgactggcctgtatggagccatcattaatcacttatgagagttactcatgctaaatgcgtcatccagagtaaaaacaaaacaaaacaaaaaaaamatgaggttgacaatatactaatttgacctctgcatattgtgaattgagtaatctgtaatgttggaaaacataagactagtgtaggaataatatggagatt

SEQ ID NO: 413505 - DNA, 201 bp, Homo sapiens
gggtgataggagacagtgacagatcatcaggcattagattcttataggtagcgtgcaaccaagatcccttgcatgcacagttcacaatagggttcctgctyctgagaatctaatgccgctgctgatctgacaggaagcagagctcaggcggtaatgcaagcaactgtaaatacagaggaggatcgctggctcgccaccccc

SEQ ID NO: 413506 - DNA, 201 bp, Homo sapiens
cagatcatcaggcattagattcttataggtagcgtgcaaccaagatcccttgcatgcacagttcacaatagggttcctgcttctgagaatctaatgccgctgctgatctgacaggaagcagagctcaggcggtaatgcaagcaactgtaaatacagaggaggatcgctggctcgccacccccaccgcaccacccccacctc

SEQ ID NO: 413507 - DNA, 201 bp, Homo sapiens
agtcagttctggctttttgagtcatttaacaaatactaccttatgataagtcaaagtcgctatcatttttatcattattatcacaaatgtcatcattaatatcatcattattttagctattatctgttgaaagcatcctctgtgccatcactggctgatgatttacagacatttgctctagtcacacagcatttcttgatg

SEQ ID NO: 413508 - DNA, 201 bp, Homo sapiens
tttatttttaaataattgaaatccttcaattatctctgcctctgcctcgtcagttacccctagggtatgaattttagtgcttttctttttttaggtcagasatgcaaccacagtaacctacccatagttataactataacaacatttccatggcaaacccagttttctagaatttcacataatacagctatttgaacactt

SEQ ID NO: 413509 - DNA, 201 bp, Homo sapiens
tgacaaggaaacaggaaaataaaaatctgatcttgaaaattgtccaaattcatgaaaatagtgcaatgataatagtagttaaattcaacatatgctttatrtgagtgcaagataattaaaacatttttgagataatgcataaatactttcaaagcttattagaaatatgtataggccagtctgtgtgacctgagcagatcg

SEQ ID NO: 413510 - DNA, 201 bp, Homo sapiens
gtcagttctggctttttgagtcatttaacaaatactaccttatgataagtcaaagtcgctatcatttttatcattattatcacaaatgtcatcattaatatcatcattattttagctattatctgttgaaagcatcctctgtgccatcactggctgatgatttacagacatttgctctagtcacacagcatttcttgatga

SEQ ID NO: 413511 - DNA, 201 bp, Homo sapiens
tcagttctggctttttgagtcatttaacaaatactaccttatgataagtcaaagtcgctatcatttttatcattattatcacaaatgtcatcattaatatcatcattattttagctattatctgttgaaagcatcctctgtgccatcactggctgatgatttacagacatttgctctagtcacacagcatttcttgatgat

SEQ ID NO: 413512 - DNA, 201 bp, Homo sapiens
gaacaatgagaatacatggacacagggaggagaatatcacacaccagggcctgttgggggtgggggactaggggagggatagcattgggagaaatacctamtgtagatgatgggttgatgggtacaacaaacctccatggcacatgtatacctatgtaacaaacctgcacgttctgcacatgtatcccagaacttaaagca

SEQ ID NO: 413513 - DNA, 201 bp, Homo sapiens
tatattatctgggagaattgactgtcaatacccatctccacacaccaaccctgcgcctctaatttcatctccatagcctgaacgaaatgaaaggtaatctrtcaaatagctgagataatccctgatacatgttttgaattggtcaagaaatattaacaatttgttgtacatgttacattgcagtagacatcaaactctatt

SEQ ID NO: 413514 - DNA, 201 bp, Homo sapiens
tcaacctttttacaatagctgcaaaacaaaataaaataattacgaatatacctaaccaaggaggtaaaagacctctacaaagaaaactacaaaacgttgcygaaagaaatcatagatgacacaaacaaatggaaacacatcccatgctcatggataggtagaatcaatattgtgaaaatgaccatactgccaaaagtaatc

SEQ ID NO: 413515 - DNA, 201 bp, Homo sapiens
gaaaaataattttttaaatttaaaatctgtctgtaatgattctgccttagagtcccaggtaataaaagataaccagataagtttgctaaatagaaatggcrgactaaaaatacggttttttaaatatttttgcttttcatcttcttgctcttcctctctcacccccttcttcttcttctcttactcctttctttctccctc

SEQ ID NO: 413516 - DNA, 201 bp, Homo sapiens
tcaggaaacccatctcacgtgcagaaacacacataggctcaaaataaaaggatggaggaagatctaccaagcaaatggaaaacaaaaaaaggcagaggttrcaatcctagtctctgataaaacagagacttgttggatttgttaaaccaacaaagatcaaaagagacgaagaaggccattacataatggtaaagggaccaa

SEQ ID NO: 413517 - DNA, 201 bp, Homo sapiens
ctcaaattacgtaatctaattcaattccttttttgcttacactcttttgaggtgggtttctgtttattgctaccaagtagtgctgagttgtaaatgattcyacattatgttttagaactagcatacttatatgaatatgaagcttcttccatatgttaccagaaagatacaacatgcaagagatgcaaactcagcagtact

SEQ ID NO: 413518 - DNA, 201 bp, Homo sapiens
tcctcatctctcaccttatacaaaaatcaactcaagatggatcaaggacttaaatccaagacctgaaactagaaattctagaagatggctttggaaaaacycttctagacattggctcaggcaaagatttcatgaccacgaacccagaagtaaatgcaataaaaacaaagataaatagctgggacttaaacaaaagagctt

SEQ ID NO: 413519 - DNA, 201 bp, Homo sapiens
taccccaatctcctgtggaattgtaatccccagtgttggaggtggggcctggtgggagatgactggatcatgggggtggtttctcatggtttaacaccatyccctttagtgctgccatctcaatagtgagttctcgtgagatctggttgtttaaaagtgtgtgacacctccctcctctctctcttcctcctgctcctgcca

SEQ ID NO: 413520 - DNA, 201 bp, Homo sapiens
gtgctcaaaaggcagtcactgaggtaggctaagaagcaaaatatgagccaaacattgtgtaattaaattaaaataaaagtttaataattttttataaacargtctgccatcactacttgctaaaaatttctaatattaaagagcttatttttaaacatttatatgagaagactttttcaatcatctaactaattggtgaat

SEQ ID NO: 413521 - DNA, 201 bp, Homo sapiens
ataaaatacggtgttctacagcactgtagggtgactatagtttatattataaatttcaaatagttagaaggaggatattgaatgttctcaaaacaaagaartgataaatgtttgagatgatggatatgttaatcaccctgatgtgattactatacattatatgtatcaaaacatcactatgtacctccataaacatgtatg

SEQ ID NO: 413522 - DNA, 201 bp, Homo sapiens
ttatcaaacaatagtacaagtaatagtaatacatgatgatcgtatacaaacacttaaaagagtaataatcagaattaataatatgaatttggtgtatttartcttacatttttaagccaaatacttatcagcataaatttatatgtgtagcttatgtctggtctaaaaatctgctggattttcaaatcattaacaaaaaat

SEQ ID NO: 413523 - DNA, 201 bp, Homo sapiens
gttctcaaaacaaagaagtgataaatgtttgagatgatggatatgttaatcaccctgatgtgattactatacattatatgtatcaaaacatcactatgtayctccataaacatgtatgattgttatgtgccaatttttttaagtaaattaaatttttaaatgggatggatattaaactaataaattagaaaaattaccaaa

SEQ ID NO: 413524 - DNA, 201 bp, Homo sapiens
gatgaaatatggtcattccttggtatatccgggacctcaggtctctaaccaaatccacacatactcaagtccaacaatcagccttataggaaaagtcagcsctccgtatctggaggtttcacatcccaggaatactgtatttttaacccaagtttgtttggaaaaaaaaaaaaaaaaaaacacatctaagtggacccacac

SEQ ID NO: 413525 - DNA, 201 bp, Homo sapiens
acaaaggacatgaactcatcattttttatggctgcatagtattccatggtgtatatgtgccacattttcttaatccagtctatcattgttggacatttggsttggttccaagtctttgctattgtgaatagtgccgcaataaacatacgtgtgcatgtgtctttatagtggcatgatttgtaatcctttgggtatataccc

SEQ ID NO: 413526 - DNA, 201 bp, Homo sapiens
cttaatccagtctatcattgttggacatttgggttggttccaagtctttgctattgtgaatagtgccgcaataaacatacgtgtgcatgtgtctttatagyggcatgatttgtaatcctttgggtatatacccagtaatgggatgactgggtcaaatggtatttctagttctagatccctgaggaatcgccacactgactt

SEQ ID NO: 413527 - DNA, 201 bp, Homo sapiens
ggaggtttcacatcccaggaatactgtatttttaacccaagtttgtttggaaaaaaaaaaaaaaaaaaacacatctaagtggacccacacagtttaaacayagctgtatagcttaaattgtttcctacccactttttcacgtagtttttgctaaatatattttattcaatctttttggcagggaatgagtacaatattata

SEQ ID NO: 413528 - DNA, 201 bp, Homo sapiens
acaatggctgaactagtttacaatcccatcaacagtgtaaaagtgttcctatttctccacatcctctccagcacctgttgtttcctgactttttaatgatygccattctaactggtgtgagacagtatctcattgtggttttgatttgcatttctctgatggccagagatgatgagcattttttcatgtgtcttttggctg

SEQ ID NO: 413529 - DNA, 201 bp, Homo sapiens
tggttttgatttgcatttctctgatggccagagatgatgagcattttttcatgtgtcttttggctgcataaatgtcttcttttgagaagtgtctgttcatrtcctttgcccactttttgatggggttgtttgtatttttcttgtaaatttgtttgagttcattgtagattctggatattagccctttgtcagatgagtaga

SEQ ID NO: 413530 - DNA, 201 bp, Homo sapiens
tcatgtcctttgcccactttttgatggggttgtttgtatttttcttgtaaatttgtttgagttcattgtagattctggatattagccctttgtcagatgastagattgcaaaaattttctcccattctgtaggttgcctgttcactctgatggtagtttcttttgctgtgcagaagctctttagtttaattagatctcatt

SEQ ID NO: 413531 - DNA, 201 bp, Homo sapiens
taattattatgttaggatgttgattttagatctttttcactttctcctgtgggcatttagtgctataaatttccctctaaccactgctttagctgtctccyagagattctggtatattgtgtctttgttctcctcaatttcaaataactgatttatttctgccttaattttgttatttacccagtagtcatttaggagcag

SEQ ID NO: 413532 - DNA, 201 bp, Homo sapiens
taggcttatttttaaatcttaaaagttcaacattttaaatttttgtaaggatggcctttcaaaatatgtttatcataacacatatgggcataataataagmcttaagcaaaaaaaaaaaaaaaaaaacactttgggcaattaatttaaaaggcaaaataaaatcttaattcctctgaacaagtagtatcattgctttaatt

SEQ ID NO: 413533 - DNA, 201 bp, Homo sapiens
atattttaggtttcttctaatgacgtacagcctaatatatttgtatggcgtttctaactagcattttagcatttggatcaaggcaaagggcaaaagtctcttgtttattttatctcatttatttctgtcccaaactctaggctctctataacctttaaatatgttcaggagattcagttatgtctcaattgtcgaacaaca

SEQ ID NO: 413534 - DNA, 201 bp, Homo sapiens
ggggcttttgaaagaatgttttgactaatgacagagaattattatttttattttctgtatcattttcctctccaatgaacatcttttggtacgttctcccttttccctagcttaaattgtcacttaggctagtccactgagctagcccacagtctcccgaatagaaggcggctgggaagtgcccatcagtcagggacagac

SEQ ID NO: 413535 - DNA, 201 bp, Homo sapiens
gaaattatgacaactctgtttgcaacattttagtagagcaagaaattaagtagtacacagctatattgaaagaatacaactaaagttttaacaactttcayctaaactagagagaaaaaggaaaaaacagatatagtacatctaaacagatatgatacatttaaatataatatatctaaacagatatgatgcatttagata

SEQ ID NO: 413536 - DNA, 201 bp, Homo sapiens
tcaaaatatgtttatcataacacatatgggcataataataagacttaagcaaaaaaaaaaaaaaaaaaacactttgggcaattaatttaaaaggcaaaatraaatcttaattcctctgaacaagtagtatcattgctttaattacacatcctcaaaataactaggccaataggggctattaattaggtgaaatgtcatctt

SEQ ID NO: 413537 - DNA, 201 bp, Homo sapiens
aactgtactgtaatcgggttagaaaatccacactgaatacttaaagaaccacaatctgtgatgtaagttgtaatttacttcaaaaggtttaggaaaaaaaygtgtgtgtgtgcatgtatgtgtctgtgtgagagagagagagaatatatataaaatatacacgtggcttacataaaactttccatgatattacatggcatt

SEQ ID NO: 413538 - DNA, 201 bp, Homo sapiens
tatccaatgataaggaaagatggaactagtttgtgatttcagttttccaaatgaatttcccagatcattacgtaagctctgaatctgctatggcaaaaaamaaaaaaaaaaaaaaaaaaactggctttttctctgttccaatcaattgccatgtagaaaatatgattcttttttaagaagtgggtacagagaactcgtaac

SEQ ID NO: 413539 - DNA, 201 bp, Homo sapiens
gggagagatgtccatccttcctctggagggtgacttagacataccctagtttttatgtaaacctttcttgagcttagttgccgttctttatgatccgaaawatcaaatgtaggaattggaaccctacctcagttctaatgatctgagtgcactgaacaaatgaaactgtttcaatgttttcatgtaaaaaatatttattta

SEQ ID NO: 413540 - DNA, 201 bp, Homo sapiens
tccaaactggggcatttccagctcaggccactccctcacccctatacaatatttgtcccccgccacagcgccacagccagtagtactgcagtagattgatrctgcacaaaagctatgagtcttctgcctagggaacccccacaaaaggtcccaacaggagtctgtggacccttgccagcggggatgataggattacttcta

SEQ ID NO: 413541 - DNA, 201 bp, Homo sapiens
ctgttttcatattagtcagttagcactcaagaaactccgtatgccattgggagtgcaacaggagtcatatttctgaaaatgaaatttctgtttttatatayactccttctgttggctcctaaattcaggtagtttagagaaacatactttcccacatttagtgccctgacttaggtagaagttaataatatctttattcta

SEQ ID NO: 413542 - DNA, 201 bp, Homo sapiens
cccaagactgtatctccaattctaacctatcttcaagttccagaccagctttttcaaatgctagttaatttggctatcacaagggcacttgaacctaatamattttttaaaaaagaagactggagtaattatactcctaaatattcccaactttcccatcaaggttaatggaatcaacatcctcaagtttcccaagtaaaa

SEQ ID NO: 413543 - DNA, 201 bp, Homo sapiens
caatgataaggaaagatggaactagtttgtgatttcagttttccaaatgaatttcccagatcattacgtaagctctgaatctgctatggcaaaaaaaaaamaaaaaaaaaaaaaaactggctttttctctgttccaatcaattgccatgtagaaaatatgattcttttttaagaagtgggtacagagaactcgtaacatgc

SEQ ID NO: 413544 - DNA, 201 bp, Homo sapiens
gataaggaaagatggaactagtttgtgatttcagttttccaaatgaatttcccagatcattacgtaagctctgaatctgctatggcaaaaaaaaaaaaaamaaaaaaaaaaactggctttttctctgttccaatcaattgccatgtagaaaatatgattcttttttaagaagtgggtacagagaactcgtaacatgcaata

SEQ ID NO: 413545 - DNA, 201 bp, Homo sapiens
gacagaactaatggaatatatatattatatagtccgagttccaaaattaaagaacttggagtccgatgttcgagggcaggaagcatccagcacaagagaargatacaggatgggaggctaggccagtctctcctttcacatttttctgcctgcttatattctagctgctctggcagctgattagattgtgcccacccagat

SEQ ID NO: 413546 - DNA, 201 bp, Homo sapiens
aaaaactttgttcttcaggtaatgaagaaacactaaaatttaattttgggtaaaaatgcccataattagtatttctaaagattctcaaaaacaaacaaacaaaaaaaaaaagaaaagaaaagaaaagaaaaaaggcccaaggatctggtagataattatcactaagtatttattttaggtcagatgctactttcagggttc

SEQ ID NO: 413547 - DNA, 201 bp, Homo sapiens
ttttctataatagacatagaattatctacttcctatagaaaaattcccttacatgagatataaattggtatgggaaaccattaccttgaaaacatgatgcygctgaagctttcttttgtggtatatgttgctaatacatacaaatataaattacacatttatcatgcagatatacaaatatatttttcacattttatggtc

SEQ ID NO: 413548 - DNA, 201 bp, Homo sapiens
ctaattcaatgacatcctaacggcaaaagttcaaaggcttaattatgagatctactgataaaatataattattcagtgaaatacaagtatgccattattcytttatttttaaaagaattttattaaatccaaaaatacaagaagatttttattgtgtgcttacataaacatggaaagtaaaaataaatgacaaaatcaaat

SEQ ID NO: 413549 - DNA, 201 bp, Homo sapiens
ttaacgtgtgcattattcacacttcagttcattcggaactcactgaactctggagaggactttttgacaagcctgtctaaaatagtaccccacatcacctytatcccttactcactggctgtttttctttacagcagttactcttttcgacatattaaatgttgatatgttcattttctgtctccccctctaaaatgtgtg

SEQ ID NO: 413550 - DNA, 201 bp, Homo sapiens
tgggtattgacagccaggcttctaaatctcttaaaactccccaactctggtgccaatttagacaatacccttttaagcactcctttttagttatccccacytgcccagttcccttatcaggccaagacactttaactaaattatctgcttccctgactattcctgggctacagccacacctcattgccaccttttctccca

SEQ ID NO: 413551 - DNA, 201 bp, Homo sapiens
ttcactttctcctgtgggcatttagtgctataaatttccctctaaccactgctttagctgtctcccagagattctggtatattgtgtctttgttctcctcratttcaaataactgatttatttctgccttaattttgttatttacccagtagtcatttaggagcaggttgttcagtatctatgtagttctgtggttttgag

SEQ ID NO: 413552 - DNA, 201 bp, Homo sapiens
aaaaacaggaaaacaatttgattcactgggaattggagctttgggggtttcctttttgttactgaacttcttttctgttgggaataggcccccaaaatctsgccataaactggccccaaaactagccataaacaaaatctctgcagcactgtgacatgtttgtgatggccatgacgcccacgctggaaggttgtgggttta

SEQ ID NO: 413553 - DNA, 201 bp, Homo sapiens
ttgcacccttcgtcccagcctctctttgctttcacttggactgaccctgacacccatcaggctcagcaaattacctgggctgtactgccgcaaggcttcayggacagcctccattacttcagtcaagcccaaatttcttcctcatctgttacctatctcggcataattatcataaaaacacacgtgctttccccaccgatt

SEQ ID NO: 413554 - DNA, 201 bp, Homo sapiens
aatatatttttctttttttcttcttcttcttattttttttttgagacagtgtctcgctctgtcagccaggctggagtgcagtagcatgatcatggctcacygcaacctccgcctcctgggtacaagggattctcccacctcagccgcaggagtcgctgacaccacaggcacatgccaccatgcctggctaatttttgtttt

SEQ ID NO: 413555 - DNA, 201 bp, Homo sapiens
ggatgagccagacattttcaatcctgacttatgggtgacagttgtggttctgtcattcccagaataaaatttgtttctgtactttttgttggaaagcattaaaaaaaaaaaaaaaacactggatctagttcatacatcctgcatttaaaaaagaaaaagagagactgagagaccgaagcagagctgggaactgtctaatag

SEQ ID NO: 413556 - DNA, 201 bp, Homo sapiens
taaatacaccaatcagcactctgtatctagctcaaggtttgtaaacacaccaatcagcaccctgtgtctagctcagggtttgtgaatgcaccaatcgacastctgtatttagctactctggtggggccttagagaacctttatgtctagctcagggattgtaaacgcaccaatcagcgccctgtcaaaacagaccactcgg

SEQ ID NO: 413557 - DNA, 201 bp, Homo sapiens
ataatagaacacctgagactgggtaattgaaaagaagtttatttagctcatggttctgcaggctgagaagttccagggcatggccctggcttgtggcaagrgcttttgtgctgtgtcacaacatggcagagaccatcaaagggaaagtgaacatgtgcaaagaggaggaaaactgaggggcatcctggctttaaaacgacc

SEQ ID NO: 413558 - DNA, 201 bp, Homo sapiens
aaacaaaaatattagagactgtgtatacagcacacattacatccacacaaacattcacatgaacactacttaaaaatggaaaaatgctaacccagatcacytagtgaacaaataatctagataatttaaaaaatatagaaaatagcattacaattttaaataaatcaagatttattgttttaaaaggtaatttatcaagat

SEQ ID NO: 413559 - DNA, 201 bp, Homo sapiens
ttcctggaattgaatatttattttctttttctagataacaattttaatctaattttcagttgataagaaatacagaaaacaggggaccaaactaacaccayaaagaagtattttctaaacagattttcttcactattattaaagatttaatgggattattttgctcttgctttgctttccacagtattaacacagttctac

SEQ ID NO: 413560 - DNA, 201 bp, Homo sapiens
gagagatgtccatccttcctctggagggtgacttagacataccctagtttttatgtaaacctttcttgagcttagttgccgttctttatgatccgaaatatcaaatgtaggaattggaaccctacctcagttctaatgatctgagtgcactgaacaaatgaaactgtttcaatgttttcatgtaaaaaatatttatttaat

SEQ ID NO: 413561 - DNA, 201 bp, Homo sapiens
tgaaggggaaacaaggactttcacatggcggcaagagagagaagtgtaagcaggggaaatgccagatgcttataaaacaatcagattttgtgagaattcaytcactatcatgagaacagcatgggggaaaccgcctccatgagccaatcacctccctcccttgacatgtggggattacaggtccttccctccagacgtgga

SEQ ID NO: 413562 - DNA, 201 bp, Homo sapiens
gcagagtttctcatatactgctgctgggaatgtaaattgatgcaactgattggggaaaatattttggaattatttagtaaaattaaaggcgcacatacccmaaaactcagcagttccttcccttgctatttatcctagaaaacggtaaatatcagaaactatgagaactaatatatataaacataaaaatgatattatatt

SEQ ID NO: 413563 - DNA, 201 bp, Homo sapiens
tcaatgttttcatgtaaaaaatatttatttaatgcatactatgggcctggaattctgctagacactaagaatacagaggagttgtcagtctaatgggaaasacagatattatcaatgccattttaagaaatgtaaattttcaactgtgacaaatgccggggaagaaaagtatgttaatatgttatatgaacctatcagttc

SEQ ID NO: 413564 - DNA, 201 bp, Homo sapiens
tttttaagaacaggagcccctcaaattaaagacactttgcaacagcagaggaatgacaggcaaatgaggaagcatgaagactctctaatatttaaggtcayaccacctttgtcatctgattttctagtcccattgtaggggagagaaaacccagtttgctccacataagaaaataagctaatccaatactttatgtcaatt

SEQ ID NO: 413565 - DNA, 201 bp, Homo sapiens
tacataaacatggaaagtaaaaataaatgacaaaatcaaatgtgggtcacgaggtcaattttctcagttaataaattgtaacttaaaaaattacaaattartggtcttagtatatctaactacatgcattataagtggaacttttattttccacttgcctctgttcctttaacaggattaaaaatatattgaaagcaatgt

SEQ ID NO: 413566 - DNA, 201 bp, Homo sapiens
ccacttgcctctgttcctttaacaggattaaaaatatattgaaagcaatgtactacaggaaaataactaaattttgagtcaaaacacaatttgatgggtayaaaatgctgaagtgtccaaggagtttatcactggactcctgtatatagaatatattctgttctacgttagaacagaaacacaagatgtgatatatttcta

SEQ ID NO: 413567 - DNA, 201 bp, Homo sapiens
atcttaaatacaattctctattgcaatgaaaattaaatcttatttattttgcagtaatctaaaatttatagacagcagatgtttagttggcccaaaggaamcttgaagttaactgttctcaattagtgtgtaaatttaactgctaaagtaagttaataccctaggggaaaaaataatgttaatactcatgcaagaatccaa

SEQ ID NO: 413568 - DNA, 201 bp, Homo sapiens
ggcataagccattctttttctgtggctaaattgcagtaccctgggaagttatctgtttaagggggtaaaagcagagactaggtctctagatttaaatgttkggggagggtgagaaaaatatatggatagatagttttcttgtaatatctatagcctgatttacttacagattttccagtaaattacatttattttgttgaa

SEQ ID NO: 413569 - DNA, 201 bp, Homo sapiens
aaagcaatgtactacaggaaaataactaaattttgagtcaaaacacaatttgatgggtacaaaatgctgaagtgtccaaggagtttatcactggactcctrtatatagaatatattctgttctacgttagaacagaaacacaagatgtgatatatttctatttcctttatgtatacaaatgatgtggtatacaagtaggca

SEQ ID NO: 413570 - DNA, 201 bp, Homo sapiens
ggaatctcatttgtatggctttttttaatgtggtgaagaatatcaattagttgtatatgtttcactgtaattttttaaaaatctggccataatttcaggcygggtgagcaaaatttattttctttttttattactattatactttaagttctagggtacatgtgcacaatgttcaggtttgttacataggtatatatgtgc

SEQ ID NO: 413571 - DNA, 201 bp, Homo sapiens
tacaaggtacagcccatttgagctcctgtatagacgctcctttttattaggccccagtctcattccagacactagaccaacttggactgcaccccccaccaaaaaaaaaaaaaaacttgtcgtccctactatcttctgtctagtcatactcctattcaccattctcaactactcataaatgccctgctcttatttacactg

SEQ ID NO: 413572 - DNA, 201 bp, Homo sapiens
ccatctatgagtgagaacatgcagtgtttgcttttctgtccttgtgatagtttgcttagaatggtggtttccagcttcatccatgtccctgcaaaggacakgaactcatcattttttatggctgcatagtattccacggggtatatgtgccacattttcttaatccagtctatcactgatggacatttgggttggttccaa

SEQ ID NO: 413573 - DNA, 201 bp, Homo sapiens
gatgggtcttgactctttatccagtttgccagtctgtgtcttttaattggagtatttagcccatttacatttaaggttaatattgttatatttgaatttgrtcctgtcattatgatgttagctggttattttgtccattaattgatgcagtttcttcatagcattgatggtctttgcaatttggcatgtttttgcagtggc

SEQ ID NO: 413574 - DNA, 201 bp, Homo sapiens
atgggttagaacatgctcctttagcttggagaagtttgttattaccgaccttctgaagtctacttctgtaaactcatcaaagttattctccgtcaagtttygttcccttgctggcaaggagctgcaatcctttggaggagaagaggcgctccggtttttggcattttcagcttttctgctctagtttttccctgtgtttgt

SEQ ID NO: 413575 - DNA, 201 bp, Homo sapiens
ctccgtcaagtttcgttcccttgctggcaaggagctgcaatcctttggaggagaagaggcgctccggtttttggcattttcagcttttctgctctagtttytccctgtgtttgtggttttatctacttttggtctttgatgttggtgacctacagatggggttttggtgtagatgtcctttttgttgatgttgatgctatt

SEQ ID NO: 413576 - DNA, 201 bp, Homo sapiens
tgctgccttttgttctgctatgccctgcccccagaggtggaatctagagagacagtagtccttgctgagctgtggtgggctctgcccagttcaagcttccyggctgctttgtttacactgtgagctattcaagcctcagcaatggcagacacccctccccctgtcaagctgcagcattgcaggttgacctcagactgctgc

SEQ ID NO: 413577 - DNA, 201 bp, Homo sapiens
agaatggtgtgagacttcacctattgtgtgttatgagtactaagtagcctggtttccctggaatgagggctgcatataagtaattagtgggatatatatayatatatatatatatatatatatatatgtttaggaggcttccattgccaggcaaatgatttttatctcatggataaaagagagtcaatgtaattttgaaca

SEQ ID NO: 413578 - DNA, 201 bp, Homo sapiens
tgtcttcagattcaaggtgcaatgctaaaatagcagttacccagaaggtaggtctcgagaaggaatgataagagttaggatcctgtaacaccagcagacarttcagtacaggaaaagcagggttttatgaagcatttaactcaggagctgtggacaattctttctgttctccttttcccttccctaagtaaatatctgatg

SEQ ID NO: 413579 - DNA, 201 bp, Homo sapiens
ttgttcttgcttctgctgctgttgttttagtttcctatccattagataattaaccctacattagcctatcactcaacaaatatttaaattaggttggtgcaaaaaaaaaaaaaagcccgcaatgacttttgcaccaacctaatatctggtacctgccatatatgaaacactcaggtttgtgttgtggagtatgcaaaaata

SEQ ID NO: 413580 - DNA, 201 bp, Homo sapiens
tctggtgcctcagccttcccagtagctgggactacaggtgcacaccaggacgcccagctaattttatttttgtatttttggtagagactgggtttcaccaygttggctacgttggtctcaaacaccagacctcaggtgatctgcctgcctcggcctcccaaagtcctgggattacaggcatgagctaccatgcccagccag

SEQ ID NO: 413581 - DNA, 201 bp, Homo sapiens
gatgagtgcttcacagtagaggtgacattttatttgggtcttgaaagatgactaggagatttataatagagaaaaggcattctagggactgggaaaaacawggtcagcagcatcgaactatggaagtgttgggaatgtaggttaatggcaaaaagttccaagtgataacatccttcaaaaaatttaaaagagacaattttc

SEQ ID NO: 413582 - DNA, 201 bp, Homo sapiens
tcataattatacaatgataccaaaacaaaccacatttctgactatggagtctgcatttgacagaaccatcctgagaatgggaaataaaaatgctaagtcaytgaactacaaaaagcctcatgtctaaaaaggggggaaatcatatgaagtaaggatggacacaagtgcccaaaaatagagtatctagaaataatatctgat

SEQ ID NO: 413583 - DNA, 201 bp, Homo sapiens
atcatatgaagtaaggatggacacaagtgcccaaaaatagagtatctagaaataatatctgatgactatgtctcatactttgcctttgtctaaaagaggaygatggactaaaaaacattttaaggtcttgtcatagtgaatagtccagctagactcataggaatgccgatctttacaaacttttcaggaagtttatgacat

SEQ ID NO: 413584 - DNA, 201 bp, Homo sapiens
tggtgactgggtttcaataaatgaatttgggggaaatacaaacattcagatcatagcatctaccaagagaaaatgcatctttttcctgtggtcatcttcayataaacagaaatgtcttttttgaacttgggtgtaaatgagacaagaagactacttagagaggctgactggccacttcagtaggacttctcagggctgcct

SEQ ID NO: 413585 - DNA, 201 bp, Homo sapiens
ctagcttaaattgtcacttaggctagtccactgagctagcccacagtctcccgaatagaaggcggctgggaagtgcccatcagtcagggacagacagacasccaaggagaggtttagaaattaaaattcagtgtgaagctagaaagacaaaatggagaagtgataacaggctaggaccaaactaaacagaagtgaggaggt

SEQ ID NO: 413586 - DNA, 201 bp, Homo sapiens
gaatggtgtgagacttcacctattgtgtgttatgagtactaagtagcctggtttccctggaatgagggctgcatataagtaattagtgggatatatatacwtatatatatatatatatatatatatgtttaggaggcttccattgccaggcaaatgatttttatctcatggataaaagagagtcaatgtaattttgaacag

SEQ ID NO: 413587 - DNA, 201 bp, Homo sapiens
attcttgcttaacttttttcctccctcctatgtgtggtccaggatcaaaatattatcacagtctgggccttcttcttttttttttttttttttttttttgkcttatagagatggagtctcaccatgttgcccaggctggtctcaaactcctgggctcaagtgatcctcccacctcagcctcccaagctgctgggaatacag

SEQ ID NO: 413588 - DNA, 201 bp, Homo sapiens
ctgcttttgcatcttcctcattttctcttattgctgccatgtaagaagtgcctttcacctcccaccatgattctgagccctccccagccaggtggagctayaagtccaattaaacctctttttcttcccagtcgtgggtatgtctttatcagcagcatgaaaatggaccaacccgataggtatatacatgtgcgaaaattt

SEQ ID NO: 413589 - DNA, 201 bp, Homo sapiens
gaggcaggagaattgcttgaacccaggaggtggaggttgcagtgagctgagatcgtgtctttgcactgcagcctgggtgacaagagcaaaactccatctcaaaaaaaaaaaaaaaaacatgcaaggattttttgggaaatgcctgtgtgaaagaaattgagggggccagtaagactgagggaaccatcagactaccatgca

SEQ ID NO: 413590 - DNA, 201 bp, Homo sapiens
ggaatcgcctttaacccttggtgtttcctcattgccctccctccaacaagaccttgctttactttccctggtccaaactaactgtccctcccttatagccactgccacttatatactggcatgacaaatagggattaatttttgttttggagacataagcaggatatagttgaaagaacaaagcctttaagtctggcttga

SEQ ID NO: 413591 - DNA, 201 bp, Homo sapiens
aacaagcattttcctaaacataaggtattttccaagtcattcaaaagcactgtacttttcaaagcaatttcaagcaaggtcacagcaacctgacatgccaygaagactctagtgatttaaaaaacatggactaggctgtcaatcagagcagaaaccccatccacactagggacagaggagaaacttgatggacaagcatct

SEQ ID NO: 413592 - DNA, 201 bp, Homo sapiens
aactcccgtcccctctagttttccatgtggagaaaagaaaatacccaactccagctccctctagctatcctgtcccacctaagatgggtgcaaggagaacygagaagcacttgtgaagttcacagaccaagggcacagcctcgctgaaagacgagacctaatcacaggactattgagccctttcccaccacacacacacac

SEQ ID NO: 413593 - DNA, 201 bp, Homo sapiens
tctctctatttttttgtcagaattttctagtctattgttccttgatgatgtttccatatgaatcttagagtcaactagtctaattaaaaagaattctgggtttttttttttatcttaaatttatggattaactagagaaatgtcagttttgtaatagtaagacttcctatccaagaacataatatgtcttaccatttgtca

SEQ ID NO: 413594 - DNA, 201 bp, Homo sapiens
tgacagatcatcaggcattagattcttataggtagcgtgcaaccaagatcccttgcatgcacagttcacaatagggttcctgcttctgagaatctaatgccgctgctgatctgacaggaagcagagctcaggcggtaatgcaagcaactgtaaatacagaggaggatcgctggctcgccacccccaccgcaccacccccac

SEQ ID NO: 413595 - DNA, 201 bp, Homo sapiens
gacagatcatcaggcattagattcttataggtagcgtgcaaccaagatcccttgcatgcacagttcacaatagggttcctgcttctgagaatctaatgccgctgctgatctgacaggaagcagagctcaggcggtaatgcaagcaactgtaaatacagaggaggatcgctggctcgccacccccaccgcaccacccccacc

SEQ ID NO: 413596 - DNA, 201 bp, Homo sapiens
catcaggcattagattcttataggtagcgtgcaaccaagatcccttgcatgcacagttcacaatagggttcctgcttctgagaatctaatgccgctgctgatctgacaggaagcagagctcaggcggtaatgcaagcaactgtaaatacagaggaggatcgctggctcgccacccccaccgcaccacccccacctcacgac

SEQ ID NO: 413597 - DNA, 201 bp, Homo sapiens
atcaggcattagattcttataggtagcgtgcaaccaagatcccttgcatgcacagttcacaatagggttcctgcttctgagaatctaatgccgctgctgatctgacaggaagcagagctcaggcggtaatgcaagcaactgtaaatacagaggaggatcgctggctcgccacccccaccgcaccacccccacctcacgacc

SEQ ID NO: 413598 - DNA, 201 bp, Homo sapiens
tcctgactttttaatgatggtcattctaactggcatgagatgttatcttattgcagttttgatttgcatttctctaatgactagtgatgagctttttttcwtgtttgttggctgcataaatgacttcttttgagaagtgtctgttcatatccttcacccactttttgatggggttgtaagcttttttcttgtaaatttgtt

SEQ ID NO: 413599 - DNA, 201 bp, Homo sapiens
ggccggattgcagtggcgcaatctcggctcactgcaagctccacctcccaggttcacgccattctcctgcctcagcctcccgagtagctgggactacaggygcccgccaccacgcccggctaattttttgtatttttagtagagacggggtttcaccgtgttagccaagatggtctcgatctcctgaccttgtgatccgcc

SEQ ID NO: 413600 - DNA, 201 bp, Homo sapiens
agtggcgcaatctcggctcactgcaagctccacctcccaggttcacgccattctcctgcctcagcctcccgagtagctgggactacaggcgcccgccaccrcgcccggctaattttttgtatttttagtagagacggggtttcaccgtgttagccaagatggtctcgatctcctgaccttgtgatccgcccgcctcggcct

SEQ ID NO: 413601 - DNA, 201 bp, Homo sapiens
gccacaataaacccattaaacgttagcaaaattaatgtatgattttaaaaaactatatgttttaaaatgtgtgagaagagtggcagtgttttatatttttrcaaatctatttaatatcttccttaatagaggatagctagattctcattcaatctattgtgatatcacatatcatgtggcctctactgtacattccagaaa

SEQ ID NO: 413602 - DNA, 201 bp, Homo sapiens
atgattaaacaggaatggtgcaagaggcatgagcaggcctacctcagaaaaagaagtggtaacagattgctgtactatgaaaacagcattctggcatataygtcctgaaagaaagtcaccaaaagttctttacgctaacttagtcaaaaacaacacataccttaggtaagaaattttcagaaaaagtgcttgagggttagc

SEQ ID NO: 413603 - DNA, 201 bp, Homo sapiens
tttaaacaacacactattgtgagaacagcaccaagtcatgagggatccactctcatgacctaaacacctcctactaagcccaccgtcaacacgggaataayatttcaacatgagatgtgagcaaactataacacttactagtaatttttatattgatttcatattaaaattattacagtttgagttaagtgtacacactac

SEQ ID NO: 413604 - DNA, 201 bp, Homo sapiens
taggtagcgtgcaaccaagatcccttgcatgcacagttcacaatagggttcctgcttctgagaatctaatgccgctgctgatctgacaggaagcagagctcaggcggtaatgcaagcaactgtaaatacagaggaggatcgctggctcgccacccccaccgcaccacccccacctcacgaccctgctcacctcctgctgtg

SEQ ID NO: 413605 - DNA, 201 bp, Homo sapiens
aggtagcgtgcaaccaagatcccttgcatgcacagttcacaatagggttcctgcttctgagaatctaatgccgctgctgatctgacaggaagcagagctcaggcggtaatgcaagcaactgtaaatacagaggaggatcgctggctcgccacccccaccgcaccacccccacctcacgaccctgctcacctcctgctgtgc

SEQ ID NO: 413606 - DNA, 201 bp, Homo sapiens
ggtagcgtgcaaccaagatcccttgcatgcacagttcacaatagggttcctgcttctgagaatctaatgccgctgctgatctgacaggaagcagagctcaggcggtaatgcaagcaactgtaaatacagaggaggatcgctggctcgccacccccaccgcaccacccccacctcacgaccctgctcacctcctgctgtgca

SEQ ID NO: 413607 - DNA, 201 bp, Homo sapiens
gtagcgtgcaaccaagatcccttgcatgcacagttcacaatagggttcctgcttctgagaatctaatgccgctgctgatctgacaggaagcagagctcaggcggtaatgcaagcaactgtaaatacagaggaggatcgctggctcgccacccccaccgcaccacccccacctcacgaccctgctcacctcctgctgtgcag

SEQ ID NO: 413608 - DNA, 201 bp, Homo sapiens
gcctgctgctaatcattctaatttatactttattttaatattttttatgtaactcccactcatttattttctttttaagactcttcttatttttgaatggyactcttccaaatgaatttttaaatcattttatcaaattcctaaaagtatcctgttggacatttgattagaattatactggataggctgggtgtggtgggt

SEQ ID NO: 413609 - DNA, 201 bp, Homo sapiens
agtccttttcaccagtctgccacctccactggaggaagtactggtatccacagctaagagacccacagatggttcacatcacaggactctgtgcagacaacccccagtaccagcccagagcctgttagacttgctgggtggctagattcagaagagagataacaatcactacagctcggctttcaggaagccacatcccta

SEQ ID NO: 413610 - DNA, 201 bp, Homo sapiens
ttttttaaaaaattagctgggcatggtggtgtgcacctgtagtcctagctacttgggaggctgaggcaggaggatagcttgagcataggaggttgaggctkcagtgagctgtgaccacactactacactccagcctgggtaacagagcaagaccgtgtctcaaaaaaaaacaacaataaaaaacccaaaaaattatactgg

SEQ ID NO: 413611 - DNA, 201 bp, Homo sapiens
ttaatcaagaaaaatttctctggccttgctagagaactagacatccaaatacaagaagctcaaagaacacctgggaaattcattgcaaaaaggttatcacstaggcacattgtcatcaggttatctgaagtcaagacaaagaaaaaaaatcttaagagatgtaaggcaaaaataccaggtaacctataaaggaaaacctat

SEQ ID NO: 413612 - DNA, 201 bp, Homo sapiens
agggcctgtttcccttgcctccataactgtcgtgggtattgacagccaggcttctaaatctcttaaaactccccaactctggtgccaatttagacaatacycttttaagcactcctttttagttatccccacctgcccagttcccttatcaggccaagacactttaactaaattatctgcttccctgactattcctgggct

SEQ ID NO: 413613 - DNA, 201 bp, Homo sapiens
cattgttcctggcctggacttcaatccggcctcccacattattcctgataccacacctgagccccatgactatatctctctgatccacctgacattcaccscatttccccatacttccttctttcctgttcctcacccagatcacacttggtttattgatggcagttccaccaggcctaatcgcaacacaccagcaaaggc

SEQ ID NO: 413614 - DNA, 201 bp, Homo sapiens
caacttggactgcaccccccaccaaaaaaaaaaaaaaacttgtcgtccctactatcttctgtctagtcatactcctattcaccattctcaactactcatamatgccctgctcttatttacactgccgatttacactgtttctccaagccaccacagctgatgtctcctggtgctatccccaaaccgccactcttaactccc

SEQ ID NO: 413615 - DNA, 201 bp, Homo sapiens
acactgccgatttacactgtttctccaagccaccacagctgatgtctcctggtgctatccccaaaccgccactcttaactccctcttaaagtaaataaatmatctttgccggcagggctatgctgaacttccttaggcactctctagttagatgtcctaggtcctcccaattcttactcctttaatacctgtttttctcct

SEQ ID NO: 413616 - DNA, 201 bp, Homo sapiens
ctccagccagggcaacacagcaagactcaatctctaaaacatacatacatacatacacacatgcataaccacactggggagtagagaaggataactaccayacagaagaaaaagaaaaagagaagcaatgcaagtaacttttgatcacatgattttgacaatatacccacaatctagggaacaaaagaactgcaaacaaat

SEQ ID NO: 413617 - DNA, 201 bp, Homo sapiens
gtaccctatgctcattaaaaaaacaacaaaaaaaaaaactaactgcagtctcctgaaaatattgttttcttataatttattcaaatattgaaggttagcaygcaaataaataattggaaactgtgatacctactatgaaagaaaatgtctgtttccctcaccagactataatctcttgaggacaagaccttttctgaactc

SEQ ID NO: 413618 - DNA, 201 bp, Homo sapiens
ctggaccttcacatatgctgtttcctcagcctggaacttttttccacctcacaaacctccccacttcatctgactattcctatccaaacacgtttcctcarggagacttcctctgacacccacagtatattcagtaccctatgctcattaaaaaaacaacaaaaaaaaaaactaactgcagtctcctgaaaatattgtttt

SEQ ID NO: 413619 - DNA, 201 bp, Homo sapiens
cagtgcactcccatgctttccagtagaatatacagaaaaagcccacaatctctgaagctaggatgcctggttttaaatcagctctaccatatactggttgktgacagtctctaagttacttaacctttctggggctcacatatttttcatctgtaaaatcagggatcacagtagcaccaacctctcaagaagattaaattg

SEQ ID NO: 413620 - DNA, 201 bp, Homo sapiens
aattcaataacgtataatcaagtattactttataaatatgttaggccatacccgcttccttctagaaaacgatttctagaataagagaaatgggccagtcmatactctcagataatataacaggagagttctgataggcatcaaaccaatttcattcctctcataaagaacccctctctgctctgccccgaaatcaaatcc

SEQ ID NO: 413621 - DNA, 201 bp, Homo sapiens
tagagctaccatataagcctctcttaagccttccttttatgaaagaaatataaaattccatcttgctgaattcctatctgtgttactagcaattgaacaaytgatttgccagccatctgaattacccagattgtctgataattggtcaatacccacttcattttaggatatagaaataaagcttcaaaactggccataata

SEQ ID NO: 413622 - DNA, 201 bp, Homo sapiens
ctagatgtctagcatttcaaagccatgtcatccaaagttaagggtatcatctttcccaaacaaactcattctgttcctgatgttctgaattctgttaatgsaaccacaatttttctcatcatgcaatttcaaaattttaacttagactcttttgtctctggctctatattccttcagttgcctagttcttccagttcagac

SEQ ID NO: 413623 - DNA, 201 bp, Homo sapiens
tttaattgtgatgttagggtgttgatctgagatctttctagctttctgatgtgggcatttagtgctatagatttccttaacactgctttagctgtgccccrgagactctggtatgttgtctctttgttctcattggtttcaaagaacttcttgatttctgccttaattttattatttatccaggagtcattccggagcagg

SEQ ID NO: 413624 - DNA, 201 bp, Homo sapiens
ttgttgattctttctcatcctcgtgagtttgtctagttttggtccttgaagctgctacccttggatggggtttttgtgggggtcttttttgttgttgttgktggtggtggtggtgttgttattgtcgctttctgcttgtttgtttttccttcaataatcaggtccctcttctatagggctcctgcagtttgctgggggttc

SEQ ID NO: 413625 - DNA, 201 bp, Homo sapiens
ctactcgggaggctgagggaggagaatggtgtgaacccatgaggcggagcttgcagtgagccaagattgcgccactgcactccagcctgggcagcagagcragactccatctcaacaacaacagcaacaacaacaacaacatcaagttgttaaataaaacaaaaacttatataatgaacatttttgttgcttaaattgaat

SEQ ID NO: 413626 - DNA, 201 bp, Homo sapiens
aagtaaattcccttggccatatcaacctctggcttctgtcagttcccttgtgaggagaaactaacggctaaagccagaattttattatacatacatgcatacacacacacacacacaccatatgctttcagatgcatataatgaaacctaacagtggctaaaataaataggagcttatttttattgcttcaaaagacatct

SEQ ID NO: 413627 - DNA, 201 bp, Homo sapiens
agtaaattcccttggccatatcaacctctggcttctgtcagttcccttgtgaggagaaactaacggctaaagccagaattttattatacatacatgcatacacacacacacacacaccatatgctttcagatgcatataatgaaacctaacagtggctaaaataaataggagcttatttttattgcttcaaaagacatctg

SEQ ID NO: 413628 - DNA, 201 bp, Homo sapiens
gatatttgttcccacattagaagcctaaaactgatgctgattcttaaaatcactgaggcaggattgcaatctccattctcaatgttaaatagaacatcgtttttattttattttattttattttattttattttatttatttttttaattatactttaaattttagggtacatgtgcacattgtgcaggttagttacatat

SEQ ID NO: 413629 - DNA, 201 bp, Homo sapiens
tatggaaaaaacaaatctaacttggaaattcacccaatattttctgccagtgagaatgtatctttaattcaacaggatatacggcaaagataggaagaaakatacaaagtttatgttactactacagcagtacattggatcagcagattatcccactccttagcctcagagaaaacagaagccatctacaagaaactttcc

SEQ ID NO: 413630 - DNA, 201 bp, Homo sapiens
atatttgttcccacattagaagcctaaaactgatgctgattcttaaaatcactgaggcaggattgcaatctccattctcaatgttaaatagaacatcgtttttattttattttattttattttattttattttatttatttttttaattatactttaaattttagggtacatgtgcacattgtgcaggttagttacatatg

SEQ ID NO: 413631 - DNA, 201 bp, Homo sapiens
aggaggattgcttgagcctgggaggttgagactgcagtgagctgtgatcatgacactgcactctagtctgggtgacagagaaagaccttgtctcaaaaaawttttttttaattaaaaagaaagatgtatgccattaaatcaaaagagcaaactagaaggaaaaggacataagactcagaaataaagaatcaaacacacaat

SEQ ID NO: 413632 - DNA, 201 bp, Homo sapiens
tatttgttcccacattagaagcctaaaactgatgctgattcttaaaatcactgaggcaggattgcaatctccattctcaatgttaaatagaacatcgtttttattttattttattttattttattttattttatttatttttttaattatactttaaattttagggtacatgtgcacattgtgcaggttagttacatatgt

SEQ ID NO: 413633 - DNA, 201 bp, Homo sapiens
gaggctgaggcaggagaatggcatgaacccgggaggcggagcttgcagtgagccgagatcgcgccactgtagtccagcctaggggacagtgcgagactccktcccaaaaaaaaaaacaaaaaacctataattggttaattattgtgaaatgtctgaacactagacgaaggttttaggataaagatcccaaaccttccactg

SEQ ID NO: 413634 - DNA, 201 bp, Homo sapiens
tgacatcaacacataaaaggaaggaagtgcacattcagtggaaaccccaatgagaaatacgcttctgccaagactatcaggttggtatagtacttgcgatktcttggcaagaaatcatgaaatacttgaagaaattaaataattattagggggatgcttacttcactttactaggggaggtccttgagtacctcttctaac

SEQ ID NO: 413635 - DNA, 201 bp, Homo sapiens
aatttctttatatggtggagataggttttagcttcagttttctgcatatggatgttccagcaccttttactaacaatgttttacctcatgaaattactctstcatctttgttgggatcatttaattgaatatatgtgggcatctttctgtactatctttatctatatagctatccttactcccaatactacactgtcttga

SEQ ID NO: 413636 - DNA, 201 bp, Homo sapiens
taaactgagttccccccaaaatcccaaaaatctcctactgataatcaagatttgtggaatctataatgtgtctttattttggtttaaactaatgacactakattttcttctacctggcaaagaagaggtaggtatacattaaacaaaagaaaatgaaaaaaatggacctaaaatcatgtgggaaatagatcattgtcatca

SEQ ID NO: 413637 - DNA, 201 bp, Homo sapiens
aaatttaaatatatatatatatattactggatagatacatgtatatatatatttactggatatatatatacgtgtgtgtgtgtgtgtgtgtgtgtgtgtgkatctccagtaaaagatagtgaatagaacacctatatgagcttatcaattctcctttccaaacatcacaaaaatgatggcaggaaataaacttttaaaaat

SEQ ID NO: 413638 - DNA, 201 bp, Homo sapiens
aaagacatacaagcggccaataaacatatgaaaatatgctcaacatcaccaatcatcaaagaaatgcaaattgaaaccacaatgaggtatcaccttatacyagtcagaatgactattattaaaaagtcaaaaaacaacaggtgttgacgaggatgcagagaaaagggaacacttatacactgttggtgggaatgtaaatta

SEQ ID NO: 413639 - DNA, 201 bp, Homo sapiens
aacacaaaataattggcattctggcttttgaggtattatatactaagtttggacatcaaaagtcagttccccaatcccatggaaattaaatcagtttgtcraagagatgtctgcattcccatatttattgcagcactattctaatagccatggaaacaacttaagtgtccatcaacagatgaatgtatatatattatgcat

SEQ ID NO: 413640 - DNA, 201 bp, Homo sapiens
tcagaactcaattccatttacaataactacaaataaaccaaatacccagaaatatattttaccaatgaggtgaaaaatctctacaagaaaaactacaaaayactgctgaaagaaatcatagataacaccaacaaatggaaaaatatcaaatggtcatggattagaggaatcaaatcattaatactgcccaaagcaatctac

SEQ ID NO: 413641 - DNA, 201 bp, Homo sapiens
gatcagttaacatttatggttaattataattatctgcagtttacaattcttttttacagttatcaaaactttttatttcaaatattattatggagtgttaygttgtgatatatacaatattaaagcaggtaacctctgttacaatatcacatatttgaactttgtatttaggtctaaaaacactttaactgcttcaaactc

SEQ ID NO: 413642 - DNA, 201 bp, Homo sapiens
gcctccagaactgtgagaaatacatttctgttgtataagctccccgactctggtattttgctatggcagcctgagcagactgacacaagaaccctcatgargtgttgtcaaaactgaatgcattaatgcgtctagggcctgggatgaggtaaatcctcaatgattgtgttcctgttattgttattagttcataaacacaga

SEQ ID NO: 413643 - DNA, 201 bp, Homo sapiens
atttgttcccacattagaagcctaaaactgatgctgattcttaaaatcactgaggcaggattgcaatctccattctcaatgttaaatagaacatcgtttttattttattttattttattttattttattttatttatttttttaattatactttaaattttagggtacatgtgcacattgtgcaggttagttacatatgta

SEQ ID NO: 413644 - DNA, 201 bp, Homo sapiens
ctattcaggaggctgagacaggagaattgcttgaacccaggaggcggaggttgcagtgaaccgagatcgcgccaatgcactccagcctgggtggcagagcragactctgtctcaaaaacaaaaacaaaaacaagaagaagaaaataaataaataaaaagctgatttttaaaagatcagttcataccttctccagtcatctt

SEQ ID NO: 413645 - DNA, 201 bp, Homo sapiens
tttgttcccacattagaagcctaaaactgatgctgattcttaaaatcactgaggcaggattgcaatctccattctcaatgttaaatagaacatcgtttttattttattttattttattttattttattttatttatttttttaattatactttaaattttagggtacatgtgcacattgtgcaggttagttacatatgtat

SEQ ID NO: 413646 - DNA, 201 bp, Homo sapiens
gcctggacaacatagtgagacctctgtctctaaatttttttaattacatatatatattattttttatatatattatttttatatatatacatatatatatwcatacatatatatataattttaaaagctccagggcaaagaagctcccatcaaaatccttaatctaattaccattcaattcaaataatatttaatgaggaa

SEQ ID NO: 413647 - DNA, 201 bp, Homo sapiens
atcttagatatctgtttgtcttaattttcaccccaatagaatgtaggttccttaagaatggagaatatgttttacctatttattcacagcatcaaattgtycctggtgtgtgcttagtacctaaaatataattattcaattaaaaaatggaagaagggaaaaaaagaatagagaaaacaaatggaaaggaaggcgagcagg

SEQ ID NO: 413648 - DNA, 201 bp, Homo sapiens
ataattaaggaggttatttattcattataaaacacttttctatgtcaagcaatgtacagtgtattggggagacaagaagcagacagaggacttgctcccakaaaacagacaatctagttggaagaaatataaactgtttcttcttttgcaattcttgttggatcattcatttttccctattctaatttttatcatcttaat

SEQ ID NO: 413649 - DNA, 201 bp, Homo sapiens
tgaggagcccttcagcccgccctgcactgtgggatcccctttctgggctggccaaggccggagccggctccctcagcttgccaggaggtgtggagggagargcgctggggggaaccaggactgcgcgagttccgggtgggcgtgggctctgcggacccgcactcccagcagtcggccggccccaccgcccggggcagtgag

SEQ ID NO: 413650 - DNA, 201 bp, Homo sapiens
aatatttcttgagtaataccccacaagaataggcaaccaaagcaaaaatagacaaataggataacaagttaaaaactcctccacagcaaaggaaacagtcyatgaagtgaagagataacccaaagaatgggagaaaatatttgcaaactatctatgtgacaaagtattaataacagaatatataaggagctcaaacgactc

SEQ ID NO: 413651 - DNA, 201 bp, Homo sapiens
agaaatgcaaatcaaaactacaatgagataccatctcacaccagtcagcatgccaattattaaaaagtaaaaaaacaacagatgctggtgaggctgtggaraaaagggaatgcttatacactgttggtgggaatgcaaattagttcagccactatggaaagcagtttggagatttctcaaagcacttaaaacagaactact

SEQ ID NO: 413652 - DNA, 201 bp, Homo sapiens
cattttagtatatttcttgggaggtaattttcgtttactctttacctaaaacaggaaacagtgaagaaatatgagcaatgaatgaaaaaaaatgtgtgctattttttttaatttccttcccaagtacaaaacaaagagaaaaaatgaataagtactatatctaaatgtggagaacactgttgtaaattttacagtctcaat

SEQ ID NO: 413653 - DNA, 201 bp, Homo sapiens
ctcgggaggctgaggcaggagaaccgtgtgaacccggaaggtggagcttgcagccgagattgcgccactgcactccagcctgggcgacagagcgagactcygtctaaaaacaaacaaaaaaaaagtgctaaagggaaaggctgattattggagtcagaagactagttatcctctgcttttctatgagtgatagtgagaggt

SEQ ID NO: 413654 - DNA, 201 bp, Homo sapiens
gactctattagaaaaaaattgaaaaatctggttaaataataatttaatgttcaataataattatatacatttaaaggaaactaaaagtatttataattgcwttatttgtaacacaaaggataaatgcttgaggtgatggataccctatttaccctgatgtgatttgtatgcattgcatgcctatatcaaatatctcatgta

SEQ ID NO: 413655 - DNA, 201 bp, Homo sapiens
agatggcaaaactactagataaagactttaaaacaattctttcaaagatgctcaaagaactgaaggaagacatgcaaaaagtcaagaaaataacatattamcaataaaaatattaataaagaaaaatcctaaaaaggaaaaaaaagaaattctagagctgaaaagtacaagaagtgaagtgaaaaaaaattcatgagacaa

SEQ ID NO: 413656 - DNA, 201 bp, Homo sapiens
tgaggcaggagaatcgcttgaacccgggaggcggaggttccagtgagctgagattgtgccactgcactccagcctgagtgacagagtaagacttggtctcaaaaaaaaaaaaaaaaagaaaaagaaagatttgggtgcaatgcaaacttttttttgttttgttttttcttgttcctaaagactggttaagactggatttgt

SEQ ID NO: 413657 - DNA, 201 bp, Homo sapiens
gaggcaggagaatcgcttgaacccgggaggcggaggttccagtgagctgagattgtgccactgcactccagcctgagtgacagagtaagacttggtctcaaaaaaaaaaaaaaaaagaaaaagaaagatttgggtgcaatgcaaacttttttttgttttgttttttcttgttcctaaagactggttaagactggatttgtg

SEQ ID NO: 413658 - DNA, 201 bp, Homo sapiens
accaacataaatcttgcttgtagaatgaaatgctgtgttaagtcagtgccccaaataccacactcctcttttccttttcatcttgctctttttctagttaygtgccatgatttgaaggatggtggggggatgcagagggaggaagaaagggacatagaaacagagacaaagacagagagctcctgccgttgtgaaaaatat

SEQ ID NO: 413659 - DNA, 201 bp, Homo sapiens
ttcagacactggtagcaaagactgagagtctgtctctctctctctcttcatgacaacatcttgacattctgaggaagagagatcaaattgttaaagtattaaaaaaaaaaaaaaaaaacaacaagctaagcctaagtggggagagagggaacagttccaaaaaggagataaggaaggcatagggtgtgattctgaagggtt

SEQ ID NO: 413660 - DNA, 201 bp, Homo sapiens
atcagttaacatttatggttaattataattatctgcagtttacaattcttttttacagttatcaaaactttttatttcaaatattattatggagtgttatrttgtgatatatacaatattaaagcaggtaacctctgttacaatatcacatatttgaactttgtatttaggtctaaaaacactttaactgcttcaaactct

SEQ ID NO: 413661 - DNA, 201 bp, Homo sapiens
acttgaattttgaatcttatcagttctatcaatcataagagtttttgaaggaagagtcttaaataagtcaatgtaagttcttattttcaaaagcatggaamtgtatttagtatcttttatatgcaaatctatttatttaatggcatgtgtgtagtctgagataggactaaagatgtttaggaatatctcttgctctccaat

SEQ ID NO: 413662 - DNA, 201 bp, Homo sapiens
aaattgaagcatatcataatcatattcctcaccattaaaactgttcatcctgccagaatgtgttgttgcatgaggcccaagagaatcaggcacagaattckagcactctaggttatggctaatgaaaaatgaaagtaagaaaattaagataaatcactgccacctaacagagatttgagtatattccattctggctcacct

SEQ ID NO: 413663 - DNA, 201 bp, Homo sapiens
gtttttataacagtaccatgctattttggtgactataaacttgtagcatagtttgaagtcgggtaatgtgatgtctccagatttgttctttttatttagtcttgctttggatatgtgggctcttttttggttccatatgaattttaggattatttttttctggttctttaaagaatgatgatggtatttgatggcaattgc

SEQ ID NO: 413664 - DNA, 201 bp, Homo sapiens
cagctctgtgcctggaaccaaaggccttggtgatgtgggcccatgaggggatcttctgatccacaggatgcacagatccatggaaaaagcatggtttcccrggcggggcagcgcagtcactcaccacctctcttggctgggtgtgggagttccccttatcccatgcagctcccggatcattgctccaccctgcttttcctc

SEQ ID NO: 413665 - DNA, 201 bp, Homo sapiens
ttactctgctgaatatttcttttgttgtgcagaagctttttagtttaattaagacacatctatttatctttgggttttgttttttgttgttgtttttttttgttttgtttttgtttttgttttgcatttgcttttgggttcttggtcatgaactctttgcctaagccaatgtctagaagaatttttccaatgttgtcttct

SEQ ID NO: 413666 - DNA, 201 bp, Homo sapiens
ttaaaaaaaacaaagccagcttatctacagatggaatgcacaggtctcttagagcagtaaatgagaatgcttcccagaatctgagggacagccattgccayctgttatttagcataatttaattcaactgatcaaactgcctcctttctgtgaggaattttggcttttccaagatgcactggatggtgctagattaacttg

SEQ ID NO: 413667 - DNA, 201 bp, Homo sapiens
taactattggctaataaggagatgtctgtagctattgctaatactacatgctgtacctgggtatattcctctgggaaagttgagatccataaacacaaaakgagaaaacaggccacatggttacaagtcttacttaatttcccacagtaggatttcccacaatcctactacttgatttattcaagtagtagcctttaagcc

SEQ ID NO: 413668 - DNA, 201 bp, Homo sapiens
catagaaatgtgggtattacatatatgtataattgttttttctgtaaatatactgccatcaaacttctacacattgcttttcaaaacaccacattttcttsgtaaaggaaaaaaaatgacatttaccagtcttattgatcaattgagaaatatggtaaatatgtgtggcctgtactgtgcaaagaggcctaggagaacagc

SEQ ID NO: 413669 - DNA, 201 bp, Homo sapiens
tcataagatattagatgacaaaattgctcaatattaactattggctaataaggagatgtctgtagctattgctaatactacatgctgtacctgggtatatycctctgggaaagttgagatccataaacacaaaaggagaaaacaggccacatggttacaagtcttacttaatttcccacagtaggatttcccacaatccta

SEQ ID NO: 413670 - DNA, 201 bp, Homo sapiens
caggcattttcctaggttacatgtgctgacctttacaattttccattgttaagaaaaagtatcataagccttcctttcttgaatctactaaaagtcacgayaatttcagatttataaagcaattttatgtatctagcttgttttgtactctcctgagtcctatgagaaaatccattttacagatgagtaaacctagattct

SEQ ID NO: 413671 - DNA, 201 bp, Homo sapiens
atgagaaaatccattttacagatgagtaaacctagattctgaaagactgaaagttaaaagctatcactgataaaccacaatgggaaaaaaaatattttttsggcataagtttatttgtaactataattactaaagatgataatataaggtatcttaaagtactgacaattgaatctataatatttaaatatgcaaatttta

SEQ ID NO: 413672 - DNA, 201 bp, Homo sapiens
tgttccggagttggtaacagaaaaaacactaatgagaccctcttctgatgattggaaaaatgttctgaatgagttgctcttctggatcctgaccactgttgctaaaaactcatcttgcagattattctacaattccccacctacgaggctgtagagaacttctcagctcacacagtgaagcagaataattctcattgtttc

SEQ ID NO: 413673 - DNA, 201 bp, Homo sapiens
agttggtaacagaaaaaacactaatgagaccctcttctgatgattggaaaaatgttctgaatgagttgctcttctggatcctgaccactgttgctaaaaaytcatcttgcagattattctacaattccccacctacgaggctgtagagaacttctcagctcacacagtgaagcagaataattctcattgtttctgcttcaa

SEQ ID NO: 413674 - DNA, 201 bp, Homo sapiens
gggaatcactgagagacaatccctacaacatcaagattaattctgtcacagagggtataagcagcagcagacgtgtcaggaaactctacagtaagtgacaytcaggtattaaacttttaggaggtctaagtggaaaaacaaaggaagtttacagagcatatattaatatgtcttgaaaaatcctggaaatattgggagtgg

SEQ ID NO: 413675 - DNA, 201 bp, Homo sapiens
tttctgcaaatttgttctcagcatgttgggaataaaaagccaatagggccgggcgatgtggctcacgcctgtaatcccagcactttgggaggccgaggcgkatcacgaggtcaggagtttgagatcagcctggccaacatggtgaaacaccgtctctactaaaaatacaaaaattagccaggcgtggtagcacgcacctgt

SEQ ID NO: 413676 - DNA, 201 bp, Homo sapiens
ctctagattatctagattatcagtataatacatatagagttaattctttcttttttacacctacctagaattccacaagcatgggggaatgtgtagcctartgagagaatatgtcagctctggagcatgattaaatgaatttcagtcccagctcctctatttattagaagcaagttagttgtgctctctatgtctcagttt

SEQ ID NO: 413677 - DNA, 201 bp, Homo sapiens
agtcacccttcttgctgattttgttcaggttttaagcacccacattttctgtgggttcctccccaatcccagtgactgaaaattaaacaatctatgccagwgattctcattaaaggtggttttgacccatttggggcatttaggagatttgtgggcaggttttaaaatgccacaataaggggagaggtacagtttagattg

SEQ ID NO: 413678 - DNA, 201 bp, Homo sapiens
cacacactagcctcaccaaaccaagaaaatatatctccccttcccttacttattcccttcactttggaagtgtggctttctcaactgtattgcatgtataractaatcattggcaatgaactttgtgttccagactcctgacttaatgttgtattgtggcacggccctgtgcctttggacttcactgtggcttttccagct

SEQ ID NO: 413679 - DNA, 201 bp, Homo sapiens
ccttccttttatgaaagaaatataaaattccatcttgctgaattcctatctgtgttactagcaattgaacaactgatttgccagccatctgaattacccarattgtctgataattggtcaatacccacttcattttaggatatagaaataaagcttcaaaactggccataatagctatggtgatttgatcctcaaaactaa

SEQ ID NO: 413680 - DNA, 201 bp, Homo sapiens
acttatgggagaagcagatcagcttatttgaaatcgggttgtgctagaatacccagatcatatgattctattttcagttattaagttcaagcacgttgcastaatcctgacctgattttccacttcatcaggaaaaagataagtttgcgtactgtgtggtacacactcttctaactagaaacttcagtttaatacacaatc

SEQ ID NO: 413681 - DNA, 201 bp, Homo sapiens
ttttgaaagcaaaggaataaaaaaagcaaaatccaagagatgagataattatcctggggagatgaggagtgccactgggaaggggcgtgcagggagcttcraagacattagctatgtctacttcttgaagctgggcagtggggttcacacatgtttgttacattatttaaaccctatgaaacatatcaaacattatttaag

SEQ ID NO: 413682 - DNA, 201 bp, Homo sapiens
ataccaaaatccaaggatgttcaaacccgttatataaaatggtagtatctgcatataatttacacacatcctcccatatactttgtcaactctgcattacytatggtacctaatacaaggtaaatgctatgtaaatagttattatactgtattgtttataacaagagaaaaatgtctgtgtgtgttcagtacagacataac

SEQ ID NO: 413683 - DNA, 201 bp, Homo sapiens
tatggtacctaatacaaggtaaatgctatgtaaatagttattatactgtattgtttataacaagagaaaaatgtctgtgtgtgttcagtacagacataacmatcataggcctaactacattttcaaaccatggttggttaaatctgcggatgtgaaactgcagacacaaagggctaactatattagtctgaaactcacaaa

SEQ ID NO: 413684 - DNA, 201 bp, Homo sapiens
gaaaccagactcgttccttacaccttatacaaaaattaactcaagatcgattaaagacttaaatgtaaaacccaaaaccataaaaaccctagaagaaaacytaggcaataccattcaggacataggcatgggcaaagacctcattactaaaacaccaaaagcaattgcaacaaaagaaaaattgacaattgggatctaatt

SEQ ID NO: 413685 - DNA, 201 bp, Homo sapiens
aacgtagaaggaatattggtagtagtcttttcaaacactgatgtacgctctgattgaagacgtcatctatagaaatgaaatacaatgatattatgaatgcmtgtgtacatgcacaaacaagcacacgtgttcatccagttaacaaatattcattgaattcatctactctacatgatcaagacaaaaacgtgttcggatatt

SEQ ID NO: 413686 - DNA, 201 bp, Homo sapiens
ccactttcatatagcagaatgtttttaaggcttatccatgctgtggcatgtatctgtatttcatatctttgtatggctgcataatattccattgtatggayacatcacattttgtttatttattagttgataggcatttgatggatatttaggttgtttcaactttttggctattacaaataatgctgttatgaacattca

SEQ ID NO: 413687 - DNA, 201 bp, Homo sapiens
tgcataatattccattgtatggatacatcacattttgtttatttattagttgataggcatttgatggatatttaggttgtttcaactttttggctattacraataatgctgttatgaacattcatgcacgagttttgtatggacatgtgttcatttctcttgggtatacacctagaagtggaattgctggggcatagagta

SEQ ID NO: 413688 - DNA, 201 bp, Homo sapiens
tattacaaataatgctgttatgaacattcatgcacgagttttgtatggacatgtgttcatttctcttgggtatacacctagaagtggaattgctggggcayagagtaattctagctttaacacttgaggaactgacaaactgtgtccggaattggtgggttcttggtctcactgacttcaagattgaagccgcggaccctc

SEQ ID NO: 413689 - DNA, 201 bp, Homo sapiens
ttctaaagtaaaattgaccaaacaacttaaaaccaactttttcttaaggaaagaagagagagagaattgacatataaacataaatctgaattggtcatatractaataatatctatgtacaaattatcctttccagggatatctcacagtaaattcaacaaaatacaacttcaatgtatgtctctgactccctgtcacata

SEQ ID NO: 413690 - DNA, 201 bp, Homo sapiens
cctcctttcagtcttagtccacaccacacactaccctccagtctctcctactctttactgtcacagaaaagactctcagcttttattcacacctgccttcwgaaggccaaaccattttgtgcctgaaaactgttacccactcgccccacactttacataagtatcacatatgttctttctacaaattggtatacaggtgcc

SEQ ID NO: 413691 - DNA, 201 bp, Homo sapiens
tatcaagtgaaatgttatttccattgactcaatcaacatagccattttgcagtagcactgatgaggtcccccttgcctacagagctctaaataaggcaaaygattactgctacaaataagttaactattagtttttggaaagtgttttaatcccagaaaagaattgtattatcattttcacaatttacactaatcttggga

SEQ ID NO: 413692 - DNA, 201 bp, Homo sapiens
aagtacagacacattttctttttccaatcttacaaactcccactgccagaagtttaaaaataacaaaactcacgtttttatggttcacacacttcatgagraccagctcccggtacgctctcttggcatgtgtttggttctgaaagggtctgctgagcttcttaatggccacatttctgtcaaggacagcatcatacgcgg

SEQ ID NO: 413693 - DNA, 201 bp, Homo sapiens
tgtggtagattcctttctgctttcacactcatgctcagctgagctgcaacccaaatagcaatttttctcaatatctaggcacgtgtgctaatcagcatccrcttgactgtttaatcagactccatttacaattctttttcactattaacatttagtgctcttctagcaaaactgacttctcaataacatccttcacatttt

SEQ ID NO: 413694 - DNA, 201 bp, Homo sapiens
aaattatccagccttgggcagttctttataggaccgtgagaaccgattaatacaagagaccactgctgttttcattactataggttaatttgacatagtcrtaatggggaattcgtgttttaaatttatttttaaattcttaagttaattaaaatatgttcaacatacttgttggcgttctttctggatacaaaaagattg

SEQ ID NO: 413695 - DNA, 201 bp, Homo sapiens
gctgaggccaactgaatatcacccagaattccctacctagcactcaaggctccattgatttgcccagatagatgtcaaatatccagtgctatcagactggycattttttccttatcagatatgctcttacaatatacatttgtcatttttcagctaattgctcaaattccaatttcctccaatcctatccatctactttcc

SEQ ID NO: 413696 - DNA, 201 bp, Homo sapiens
cttgactaaactaatctcagatttcctgtggaaattataaaaataatatcttagatttgcagagaagttgagaatctacagagcacattcacagtagtgtscccccacttcccctcccacacacacaccttctttctgtgtcctaaccgaaaatctcagactgccttgaccatttcgtgacccggccagacgcaggttttt

SEQ ID NO: 413697 - DNA, 201 bp, Homo sapiens
ctaatctcagatttcctgtggaaattataaaaataatatcttagatttgcagagaagttgagaatctacagagcacattcacagtagtgtccccccacttyccctcccacacacacaccttctttctgtgtcctaaccgaaaatctcagactgccttgaccatttcgtgacccggccagacgcaggtttttcccagcaggc

SEQ ID NO: 413698 - DNA, 201 bp, Homo sapiens
acatctttaataattagaagtgacttcctatagctaaaatatcttatttattgattcagagtaaataagaatgggcagaattaagctgaagacaacaaaayggggaaagttaaagcaaaattgtgcattagcaagtccctctctaatagccttctgagccccctcttcccctcgtagctgctttgcatcctcatggagtcc

SEQ ID NO: 413699 - DNA, 201 bp, Homo sapiens
aaggttggtattattaatacctatattaataaggtagtaatttctaaggttggtattactaattccaagtttgctgatgagcgagcaaaaacacagaaaawttagttaatttccccaagatcagtggttttcaactgggggtgatgttgctcccaaccccaggggacatttggcaatacctagagacatttttagttgtta

SEQ ID NO: 413700 - DNA, 201 bp, Homo sapiens
tcttacaatgcacgagaataccttgccctcatttatttcggtgatttcaaccgtatataagttatgaggaaattacagtagttcagaagttaaaattttcytgtaaacttatggaggattcattcatattgcaatatttgctgctgacccaatattgctgcaatatttgcagcagaacgcaaatcccgagagctcactttc

SEQ ID NO: 413701 - DNA, 201 bp, Homo sapiens
attgttactaagcagcccagaatctttccattttggaaacatgaggcaaacatttttaaaatactactttttctaaatcggtaactcagtttcaaacactraatttgaaaagttacagaaacatttgaaatagcttttattccactctagcatataaggagttttatttgctgttatcttaagacatgtcccctcatttct

SEQ ID NO: 413702 - DNA, 201 bp, Homo sapiens
tgacttcctatagctaaaatatcttatttattgattcagagtaaataagaatgggcagaattaagctgaagacaacaaaacggggaaagttaaagcaaaaytgtgcattagcaagtccctctctaatagccttctgagccccctcttcccctcgtagctgctttgcatcctcatggagtccttcactagccaaggcttccc

SEQ ID NO: 413703 - DNA, 201 bp, Homo sapiens
ctttgcatcctcatggagtccttcactagccaaggcttccctcaccaaggtaccccacttggatgagaccgcttaggtatcatctcattctttaattcaawctgtgtgcaacttaatccacataatttttacaattaaagaaatttagacaccatctattacaattctctcatatacagttgaagctcagctttgtcttat

SEQ ID NO: 413704 - DNA, 201 bp, Homo sapiens
gagaattaaaaaccaaccacaacaatcaaggtcagaactgctcccagactgaggagcagaaattcctcttctccagcagaggagaaagctgtcagggaaaracacacagatacagttaaggcagctgtgctaagtggtaagcctcaaggggatttgggtaaggctctgcccacactaatacaatatacataaaaatatgag

SEQ ID NO: 413705 - DNA, 201 bp, Homo sapiens
aatattttccctttctcccttagaatctgatctttaattcactttctagatctattcccttgacaacctgataaaggaagtatgtcaaatatgctaatagkcaggattgcttggggtaaaaataaactgattggctaattgtatgtggagtgagaaaaattataaataaatgataaatacctgatagggatactatagctt

SEQ ID NO: 413706 - DNA, 201 bp, Homo sapiens
caggacaaaaccactctataattatctctaagttcccacttcagatttaccttgaatagattttaggcataataggcatacacaatatcaaagtttacatrtttgtgtcacaagaagattaaaaataaagtatatttcccacatgattggtcatcccttccatgcatcctctttggtaatatccagtaagatataatggca

SEQ ID NO: 413707 - DNA, 201 bp, Homo sapiens
gtttaccaaatcaccttccagccaaattggttgaattagttacaccttttctcttagtctagtggaggatgtcgtgtgtccttagattcccaaacaaaacwtgcccgctctctctctgtggtctacattatagctggagtacaatttccaggcctcatttccagcattctcttctggaactttcatttggctgccacacag

SEQ ID NO: 413708 - DNA, 201 bp, Homo sapiens
aacattaatgaaaaaaagctgaatataatgaacaatgcaaaaaagctgacttttcaaacttttttttagaattgctttttctttccagcatagtttattayacacacaaaaacgcatacacacagtggtgcgccaataaaaatttaacaattggctctgcagggggcaacaaaaacgccctgatttgtagggtctgccaat

SEQ ID NO: 413709 - DNA, 201 bp, Homo sapiens
tcctctctcccaacctcccctgggagatgggaacagcgatgggtggttgggccaattccctaactaggggcatctcagaaagccctgcagaaggatggctsattccaatttctgatgactctataaatttagaatatggaacacattgtattttttgtcctcagtttgggtcttagcagtagttacatggcataaggaaaa

SEQ ID NO: 413710 - DNA, 201 bp, Homo sapiens
actacgacatcaaggcagccagcctgcacaacctgaagaaaagatccattcgatgcagttctggccctttgcacagcagcacggaggagcaaataccagcrgagcaaaacaccactggaaatgcaacctctgcttttcaactatctcttgtagtatctctaaacgtcaaacaagtaagagatggtaataacctcagaggag

SEQ ID NO: 413711 - DNA, 201 bp, Homo sapiens
actggaaatgcaacctctgcttttcaactatctcttgtagtatctctaaacgtcaaacaagtaagagatggtaataacctcagaggagaagcaggcatttragtgtcgcctgaaccccgaggtcatctgcacagcactattcctcttctctgtttccttgtttttgtaaaaatcctgaataaatatccactaaaccaaatt

SEQ ID NO: 413712 - DNA, 201 bp, Homo sapiens
cacattaaggagtcagggaaactcctgaggaataacaatgtctctggagatgttttcaaatgctaacctgagactcacactgtggtttgggggtttcattmttattattattattttatttcagaagaggaaagtaatattatttctcaaaataaaactttggcagagtatgaatcagggaagcagcccacacatggaaaa

SEQ ID NO: 413713 - DNA, 201 bp, Homo sapiens
aaacgcttgctctgatcacacttatttttcaacagaagataagctaacatccaaatgcagttcctttatgaagatgtaacataaaagtgacatcaccaagktaactaatctgctgaatcagagtaacatatccttgggattctattttccaaagaaaaataatgataaagatattctgatttaataaaagaaaaaaagaaa

SEQ ID NO: 413714 - DNA, 201 bp, Homo sapiens
actcggtagataaaactgaatttctgctcccaaggaactttacagcagtagagttgtggaagatagacataaaaatgaatcactgcagcataatgcacaayatgataatggcatatggaaggttctaaagaaaatgagttaacttaaaattctgagaagcagtagcttttgttgcaagcctttcttttcataggtaaaaga

SEQ ID NO: 413715 - DNA, 201 bp, Homo sapiens
tcagggaaactcctgaggaataacaatgtctctggagatgttttcaaatgctaacctgagactcacactgtggtttgggggtttcattattattattattwttttatttcagaagaggaaagtaatattatttctcaaaataaaactttggcagagtatgaatcagggaagcagcccacacatggaaaacacaatccacaa

SEQ ID NO: 413716 - DNA, 201 bp, Homo sapiens
ctctcctactctttactgtcacagaaaagactctcagcttttattcacacctgccttcagaaggccaaaccattttgtgcctgaaaactgttacccactcsccccacactttacataagtatcacatatgttctttctacaaattggtatacaggtgccatttaatccattcaaatttggaagctacatcttcaagggtct

SEQ ID NO: 413717 - DNA, 201 bp, Homo sapiens
tagctttaacacttgaggaactgacaaactgtgtccggaattggtgggttcttggtctcactgacttcaagattgaagccgcggaccctcgcggtgagtgytacagctcttaaggtggcgcgtctggagtctgtcccttctgatgttcagatgtgttcggagtttcttccttctggtgggttcgtggtctcgctggctcag

SEQ ID NO: 413718 - DNA, 201 bp, Homo sapiens
ttctgttttgccttactactcaatcattttccacctctactagcaggcattttcaatagtcatttttaatgtcctatacaatttgaatagaatataattcwctattagcaaatatggatcaatttttcacatgaagcaagaccattgatttcatttggttcatgacccaaggaagttatggacaacacagggagagatggt

SEQ ID NO: 413719 - DNA, 201 bp, Homo sapiens
cttgagctagatacacagtgccgattggtatatttacaatccctgagctagacataaaggttttccaaggccccaccagagcagctagatacagagtgtcsattggtgcactcacaaaccctgagctagacacagagtgctgattggtatgtttacaatccctgagctagacataaaggttctccaaggccccaccagagc

SEQ ID NO: 413720 - DNA, 201 bp, Homo sapiens
tgagctagacataaaggttttccaaggccccaccagagcagctagatacagagtgtcgattggtgcactcacaaaccctgagctagacacagagtgctgaytggtatgtttacaatccctgagctagacataaaggttctccaaggccccaccagagcagctaaatacagagtgtcgattggtgcactcacaaaccttgag

SEQ ID NO: 413721 - DNA, 201 bp, Homo sapiens
ggtgctgactggtgtatttacaatccctgagctagacataaagactctccacgtcctcaccagactcaggagcccagctggcttcacctagtggatcccgyaccagggctgcaggtggagctgcctgccagtcctgcgctgtgcgctcgcattcctcagcccttgggtggtcgctgggactgggcgccatggagcaggggg

SEQ ID NO: 413722 - DNA, 201 bp, Homo sapiens
gccagtcctgcgctgtgcgctcgcattcctcagcccttgggtggtcgctgggactgggcgccatggagcagggggtggtgctcgtcggggaggctcgggcygcacaggagcccatggagtgggtgggaggctcaggcatggcgggctgcaggtcctgagccttgccccgcaggaaggcagctacagcccggcgagaaatcg

SEQ ID NO: 413723 - DNA, 201 bp, Homo sapiens
gtcggggaggctcgggccgcacaggagcccatggagtgggtgggaggctcaggcatggcgggctgcaggtcctgagccttgccccgcaggaaggcagctamagcccggcgagaaatcgagcacagcgccggtgggccggcactgctgggggacccagtacaccttccgcagccactggcccgggtgctaagtccctcactg

SEQ ID NO: 413724 - DNA, 201 bp, Homo sapiens
tcggggaggctcgggccgcacaggagcccatggagtgggtgggaggctcaggcatggcgggctgcaggtcctgagccttgccccgcaggaaggcagctacrgcccggcgagaaatcgagcacagcgccggtgggccggcactgctgggggacccagtacaccttccgcagccactggcccgggtgctaagtccctcactgc

SEQ ID NO: 413725 - DNA, 201 bp, Homo sapiens
ctggatctcacagggagattcaacgcccttaaagtatgacaatgaaccgttgtatatttttggtgtgctagatccacagggctaatttggcattcagtttrcaacaattaaaaagctgcagcagcattatattaatcagaagggctaagcagagcttcagttaaaaaaaaaaaaaaaaaaaaaaaaaaactccaggccagg

SEQ ID NO: 413726 - DNA, 201 bp, Homo sapiens
actgcccggggccagcagggctggctggctgtcccgagtgcgggggcccgccaagcccacgcctacctgcaactccagctggcccgcaagcgccgcacgcrgcccgggttcccgctcgtgcctctccctccacacctccctgcaagctgagggagtgggctccagccttggccagcccagaaaggggctcccacagtgcag

SEQ ID NO: 413727 - DNA, 201 bp, Homo sapiens
aaggaacacacacctgacaaaaggcaattttcacatccaatgttggttcactgcagtagtataagaaatggaggctcataaatacctagaggaaaaagaartggagcataaattttcaaatcactagtttttcattatataacaatatagattttggcataatttgagttatatgcaaagtaccatgcacaacatatctcc

SEQ ID NO: 413728 - DNA, 201 bp, Homo sapiens
atatctctgtgctagattgatataacaatctgtaaccacaaatttttgttcattttactttgatccttcctaatgttcatattcaaactttaaaaagatayagcattcagttaatttgagggtgtttttcttatttcttcaaatatacttttggaaaaccatttacctattccttaataacttggctccttggcaaggtta

SEQ ID NO: 413729 - DNA, 201 bp, Homo sapiens
atgatttgtttttaacaaaccccctattcccagtgatcactacaccctgtcttaatggttcacagggtatcttttctaaccaatacaaggaccagtgttgmgttcaggaggtgtctcttataagctatcccttcctctaaagaaataagaacttttggctgtcttgaattgtgtggatactgtggtttggtttactgaact

SEQ ID NO: 413730 - DNA, 201 bp, Homo sapiens
aaaaacacgcacaaacaagacctagtgggtgtttttgcctgttttgtttttattatctagctaacaggcatacagacagtttaagtgtttaagaggagtasagaaaataataaacatgaagaattattactgcagaatgtgggattgaacttgaggatttaataaaacccaaactgtatttcgagattaatctatcagttc

SEQ ID NO: 413731 - DNA, 201 bp, Homo sapiens
gctcctttagcttggagaagtttgttattaccgaccttctgaagtctacttctgtaaactcatcaaagttattctccgtcaagtttcgttcccttgctggmaaggagctgcaatcctttggaggagaagaggcgctccggtttttggcattttcagcttttctgctctagtttttccctgtgtttgtggttttatctactt

SEQ ID NO: 413732 - DNA, 201 bp, Homo sapiens
ccacacctccctgcaagctgagggagtgggctccagccttggccagcccagaaaggggctcccacagtgcagtggggggctgaaaggctcctcaaatgccrccaaagtaggagcccaggcaggggaggtgccgagagcaagcgagggctctgaggactgccagcacgctctcacctctcaaaactgttttctaaagtgggt

SEQ ID NO: 413733 - DNA, 201 bp, Homo sapiens
tactgaggacttatttgaataagaagtttcagtgtcagtggattggatgttaaaaacagatcaaatgaatatatatatatatatatatatatatatatatatataaaatgaatgttgtaattaactagaaagccagtggaaccaggcgattatgatagcatgctttatttatgagaaaataaccagttttaaaaataactg

SEQ ID NO: 413734 - DNA, 201 bp, Homo sapiens
actgaggacttatttgaataagaagtttcagtgtcagtggattggatgttaaaaacagatcaaatgaatatatatatatatatatatatatatatatatatataaaatgaatgttgtaattaactagaaagccagtggaaccaggcgattatgatagcatgctttatttatgagaaaataaccagttttaaaaataactgg

SEQ ID NO: 413735 - DNA, 201 bp, Homo sapiens
aggacttatttgaataagaagtttcagtgtcagtggattggatgttaaaaacagatcaaatgaatatatatatatatatatatatatatatatatatatawaatgaatgttgtaattaactagaaagccagtggaaccaggcgattatgatagcatgctttatttatgagaaaataaccagttttaaaaataactggtttt

SEQ ID NO: 413736 - DNA, 201 bp, Homo sapiens
gtgtgctagatccacagggctaatttggcattcagtttgcaacaattaaaaagctgcagcagcattatattaatcagaagggctaagcagagcttcagttwaaaaaaaaaaaaaaaaaaaaaaaaaactccaggccaggcacagtggcttacgcctgtaatcccagcactttgtggggctgaggaaggcagatcacttgag

SEQ ID NO: 413737 - DNA, 201 bp, Homo sapiens
cattaccccaaaatggagctcagtatttgtttcacaaatagtcttaccaacaatcgccaaaataatgaaaatattattgcaatatgcacaattatcaaaakaattgattagatataattaattcctatgatttctcagtaatgtgaccttactatgcattaagcaatgacctggtttccaattaccaaaaacttcattgcc

SEQ ID NO: 413738 - DNA, 201 bp, Homo sapiens
acgcttttacactgttgctgggagtgtaaattagttcagcaattgtggaagacaatgtagtgattcctcaaagatctagaaccagaaataccatttgaccyggcaatcccattactgggtatatatccgaaggattctaaattattctgttctaaagacacatgcacacatatgtttattgcagcactatatacaatagca

SEQ ID NO: 413739 - DNA, 201 bp, Homo sapiens
ttggttcactgcaaactccgcctcccaggtttaagccattctcccaccacagcctcccaagtagctagtgtaagccaccatgcctggctaatttttgtatytttagtagagacgggatttcgctatgctgcccaggctggtctcaaactcctgagttcaagtgatccacccgccttggcctcccaaagtgctaggattaca

SEQ ID NO: 413740 - DNA, 201 bp, Homo sapiens
tctgcatcagctgtctctctggaatgcccagatcaagctctggaacctgttctactttgaccacaggcttctgattcccttctctctttcttctgatcccrtctagctctattccattcacttcatcatggttgctggtcctatagctgctcaaagttgaaaagttgctactctgaatgctgatgtttgctgaactgcagg

SEQ ID NO: 413741 - DNA, 201 bp, Homo sapiens
tgaacattgtattttcttccaacagggcacaaggaagatattaaactgagttccccccaaaatcccaaaaatctcctactgataatcaagatttgtggaayctataatgtgtctttattttggtttaaactaatgacactagattttcttctacctggcaaagaagaggtaggtatacattaaacaaaagaaaatgaaaaa

SEQ ID NO: 413742 - DNA, 201 bp, Homo sapiens
ttatatactggcaatatattacagatgggtttatgtcagagtaatagatcacatgaaatggaccatgtggtaccccagtgcattatgtcttggtagagccytgaggacactgacagtagcatctctaagtaagtagtgctgtatgaatacagacacatgcggatctgtatctacatccatctgactaggccaaggagcagg

SEQ ID NO: 413743 - DNA, 201 bp, Homo sapiens
gatcatctgaagccttcttctctcagctcgtcaaagtcattctccatccagctttgttctgttgctggtgaggaactgtgttcctttggaggaggagagaygctctgcgttttagagtttccagtttttctgttctgttttttccccatctttgtggttttatctacttttggtctttgatgatagtgatgtacagatggg

SEQ ID NO: 413744 - DNA, 201 bp, Homo sapiens
tacactttatggaaaaggcttctctaattgtgtctgatttgctttctgtagtaagcatcattggaagaagaccaaagcaagagcaactagaagttaaatayacatttgagcttagctgcaatacagaaccctggggaagaagcaggctgaaagatttatttaattttaggcttggattctctcccttgctgttttcttgat

SEQ ID NO: 413745 - DNA, 201 bp, Homo sapiens
gtagaagctgagtttagagacagggtcttgctctgtcacccaggctggagtgcttatcacagtcactgcagcctcaacctccagggctccaggaattctaycccctcagcttcccgagtagctgggactataggcacatgtcaccacactctgctaattttttcgtagagtcagtgtcttgctatattgcccaggctggcc

SEQ ID NO: 413746 - DNA, 201 bp, Homo sapiens
agaatgcagagtttctcatatactgctgctgggaatgtaaattgatgcaactgattggggaaaatattttggaattatttagtaaaattaaaggcgcacayaccccaaaactcagcagttccttcccttgctatttatcctagaaaacggtaaatatcagaaactatgagaactaatatatataaacataaaaatgatatt

SEQ ID NO: 413747 - DNA, 201 bp, Homo sapiens
gagctatcagcaaaagaagaggaaagctggaaagtggccctgtggtagcagagtgatctactgtgacaagagctgctaagaaggacaagtaatttgagaaytgagatctgactactggattcagcatgttcttccttcttccaggaatgctgttccagatgtccacatagatggcaacctctctttcttcaggtctttact

SEQ ID NO: 413748 - DNA, 201 bp, Homo sapiens
tacaatttttaaatgcagaagttcatgttttgaggaagatatgctatattgacctgttaaagacttgatttagtgtcgagtaatttaaatcaacaaagccrtagacagaagcttagaatgtcagcaaggagagcaattattatgcctaaatattgtagaagcacaaaatagttttagaaaggagatggaaaatgacttgca

SEQ ID NO: 413749 - DNA, 201 bp, Homo sapiens
tcaaagacagaattctaaaagaccactgatatacataaataaactaagaatgtacatattttgcacatgtgaatctaagtaagaaaaataagcaacaattsgcagaacttaatgctaaatattgtaatgccaggaaatcagaaaaagactttctccttgaatctacctattaaacttgcttttatttctttacaacctcag

SEQ ID NO: 413750 - DNA, 201 bp, Homo sapiens
gaacatttcttttaaaattagttaactaagtcataaatttagttgtttaacaaaaggaccttgtactaaacttcagttcaaagacagaattctaaaagacyactgatatacataaataaactaagaatgtacatattttgcacatgtgaatctaagtaagaaaaataagcaacaattcgcagaacttaatgctaaatattg

SEQ ID NO: 413751 - DNA, 201 bp, Homo sapiens
cacctcggcctcccaaagtgctgggattacaggcatgagacaccatgcctggcccagttgttgatttaataactggtattaataactggtatatctcacarttctctttttggtgtgggggatctgggagatactccaatgtaaaagaagaatatttatttaaaatatatatcttcatgggcagaactcaaaatagattta

SEQ ID NO: 413752 - DNA, 201 bp, Homo sapiens
taggacagtggtcagggcaaaaatttattgagtaatacctcccaaacacaagcaaccaaagtaaaaatggacaaatgggatcatatcaagctaaaaacttmtgcacagcaaagaaaacaatcaacaaagtgaagagacaacctacagaatgagagaaaatatttgcaaactactcatctgacaaggaattaataaccagaa

SEQ ID NO: 413753 - DNA, 201 bp, Homo sapiens
tacacaacagcaggacccctggccacaatctagaggttcctgagtgaccagaggcagcaaagaagcacttactgtggccaaggccatggtggaaggacccrggggcagggcctgtgacgatggcatccttggagacccctgctttggcagaggagtcagcgctgaaggagagcacatggacaggaatagggacaggggtta

SEQ ID NO: 413754 - DNA, 201 bp, Homo sapiens
aattttttcacaatcattcagagatagtcactgcttagcatacttccagtcttttttcctgtgcatgtgtatcctagatccttgaccttaaagaacccatrctgacagagccttagacctccaaattgtaaagactactaaaatattaattattttccatttaatttgtctaacacttattttttctggctgagaataatc

SEQ ID NO: 413755 - DNA, 201 bp, Homo sapiens
cacgtggcactaggaacaggagtgccagcgagcggaacagccagggacgccaagcaacacccaaggcagagcaggcccgaggccaccaggctgtctctcaytcttcaggattctcagagacagtcaggcaacaccttctctctctcctcatctcatacctgccaagaaatcctcttctaacaggccatgattatcacatgt

SEQ ID NO: 413756 - DNA, 201 bp, Homo sapiens
ggtccctctgccctcctcagaagaagctttaggccatcctgggcttcctgtcaccagaaaagtgaatacctgagaacagggagcccagtctcccttcctaygtctgagcccactgttcctacctgacctgtggttttagatctcactctccacccggggcaaggcaagcaacctcatccccaaggcccctgtgagtggggc

SEQ ID NO: 413757 - DNA, 201 bp, Homo sapiens
catcctgggagacctgcacgttctgattccacccagacccaagtggcaagccttgcctctgaagcggtcacaatttccgtggtacagcaggccctttcccrtgaagctgagaagcacctggaaaagagtaagaaaaattagaacgcaagtttttcatgctctctgatttccttaaggcagtagtaaccaaacttcaaggga

SEQ ID NO: 413758 - DNA, 201 bp, Homo sapiens
ttgtgagagctgctgctggaggctgacaggcctcctgaggtggctggtgcagagggatggaagccctggcctttggccgctgtcttcactaactgcaggarggaacgatgacactgtgtgggagaagcctttgggccttggagcttattggcaaatggagatgggggcgtgaagtttttctgctgctgagtgccggcatga

SEQ ID NO: 413759 - DNA, 201 bp, Homo sapiens
aactggaaatccaagttgcaaaaaatatatataacaaagggataaggaatccacttagcccaatgtgaaacacagattggttcttatgtaaaaaaaggagwcagagcagaggccgggccaaagggcggacagaggtcttgctccttgggaaaccgggaaggccagcaaacctctgaatgaaggatgagttactgggcgctg

SEQ ID NO: 413760 - DNA, 201 bp, Homo sapiens
ggcagtggggcagcagacgcatcattgcttaagactcagtcacccctccgccaggaccccaaagccaaagggcttcactctagagtcacccacctgttcayagaggtgaagtttccgagcacgcttgagcagggcatccttgctgcagggcaggaatgacgcaagataggcatacaccccagagcggacctgactgctcag

SEQ ID NO: 413761 - DNA, 201 bp, Homo sapiens
ctactacctaagactactctgtaaacaaactggaaatccaagttgcaaaaaatatatataacaaagggataaggaatccacttagcccaatgtgaaacacrgattggttcttatgtaaaaaaaggagtcagagcagaggccgggccaaagggcggacagaggtcttgctccttgggaaaccgggaaggccagcaaacctct

SEQ ID NO: 413762 - DNA, 201 bp, Homo sapiens
tttatgggcagagaagcctggagagtccctgctcagcctccactgccggcctctgcttggctttgagctcagcaatacaaatctcttctttggctcttttrctactacctaagactactctgtaaacaaactggaaatccaagttgcaaaaaatatatataacaaagggataaggaatccacttagcccaatgtgaaacac

SEQ ID NO: 413763 - DNA, 201 bp, Homo sapiens
tggaccctgtggggctccgacatggctaccaacaagtcttagcgggtgtcactgcatggcttctgttaacattgaaaagaagggccaggtcaaacgaagaygataaaatagtttacctgcctaattaaagagatttaagtttaagagaatttcattgtcaagaaaactccattgttatattttgtcatttattgttttttt

SEQ ID NO: 413764 - DNA, 201 bp, Homo sapiens
ttcctgggttcaagcaatcctcctgcctctcaatgccaccacatccagcctctgagagccttaaacagttttaaaaactgactcataataatgacacataytttatggggtacatagtgatgtttcaacatctaaaatgtgtagtgtcacgttagagttattagcatatccatcatctcaaacgtttttcatctccttttg

SEQ ID NO: 413765 - DNA, 201 bp, Homo sapiens
tggctcactcacaccaaacctggcaacacaaaggatcctccttgtgtgtccacaaaggaggacatacacatccatgtcagatggccctgggaggcaccctycgaccctgcagccccaaagacaggatccaggacagtctttatgaaccaacatggaatggattccagggaacataatttttttaaaagcaggatattaaat

SEQ ID NO: 413766 - DNA, 201 bp, Homo sapiens
cagaattccaggaggcgtacccaagaatcgcagactcgggatagggtgaggcagacgcactcaatgcaaaggtaccaacccggggcacctgagcccagttmtcaggtgctaccagagcagcctcaagcctgaggcttttagaagttccctatttcagaagatgctaaggggagcaccgaccacatgcctgctgtgctccca

SEQ ID NO: 413767 - DNA, 201 bp, Homo sapiens
ccctttgcgcacagaggtaagagaagcaaatcttgtgcttgccttgagtgagtgacaggatcttggggcagccaaaacctcagttaagtcttgcttccccrctacggaagccccacatgcatgcactgacccctgtgcgttaaacctgcagcgcctctgggaacaaaggggtgtaccttatctccaggctgaaggcctttt

SEQ ID NO: 413768 - DNA, 201 bp, Homo sapiens
tcatgaggcagatgtaacttgggagacgtgcagcacagagggtccttacttccacctggcaccagttcgccagggttacctcggctggcttccatacgagyggctctccccttatccaagtagcaccctggtcatgtctgaagcgggtctacagtaggaacaatgctaggtcaaagctgagacaccatgagacttcccatg

SEQ ID NO: 413769 - DNA, 201 bp, Homo sapiens
ccaggcgtggtggcgcacgcctgtaatcccagctactcgggaggctgaggcaggagattcgctcaaaccggggaggcggaggttgcagtgagccgagatcrtgccattgcactccagtctgggcaacagagtgagactttgtccccgcccccccaccatgcccacccaccccccacacacacaaaaaaaaaggtcaatgga

SEQ ID NO: 413770 - DNA, 201 bp, Homo sapiens
gaatgtcatttcgtctctcatcagtgctgctactgcctcatgctgggaagagggcacgactgctctgaccccacccccagcttcctggtcagtatcaggasgagctacaggtacagtgggtctgacacggcattttcagtaactacttaccgcctcagagttatcgatgaaggagtcggattcatcataaccataccccat

SEQ ID NO: 413771 - DNA, 201 bp, Homo sapiens
aggttgcagtaaggcaagatcgtgccactgcactccagcctgggtgacagagcaagaccctgtcttaaaaaataataataaaataaaatatagaactgagkcttattcatcagtatatttcccatggctgcctgtcacataatatttactaaatgttgactgagtgaatgaatcaacaaatgaagatactactgtaaaacg

SEQ ID NO: 413772 - DNA, 201 bp, Homo sapiens
gctggaagtcatgtgatacacatagcctctaaggctagctctcaagggccctgcagcttccacctttcccctcttgagatgttgccctgagaccaccaagccctgaagaaggcaggatgaaaggccaggaaagaaaagccctgccagcacctggccaacttgccagctgaatgcagccatgagcgttggcccagagtcagg

SEQ ID NO: 413773 - DNA, 201 bp, Homo sapiens
caggcaagtgccctcaaatccttgtgaaacagccactggttgagtggtgacttaggagctctgcagtaactgtcctagtctctctgatccactctccaagmtcttctgcacatcacccttcagtcgacacataaccccactgcctggagagccccaggacttcaaggcctatttctacccggcagacacttcacagaggcc

SEQ ID NO: 413774 - DNA, 201 bp, Homo sapiens
taagccacctttttaatgcaaccataaaaagtcatgagggctttataatattacgtaaaaaggcagaaaacagttattcacaactataattacagctgcayaaaaacatatacacagaggctagaaaagaatatccaactagaaattgtttttatattggccggatggataatttccatacaccttccaccccatttttca

SEQ ID NO: 413775 - DNA, 201 bp, Homo sapiens
tgattacacacaagcgagatgcattaattattggactctgtccttcaaaaaccaacagaatcactcttagaaggtcctgctattcctggtccatgaacacstccacatgactcaactgatagaagacagcatttccagccccctttagagagatggagaggcaaggggtcacggaaggcaagggctgttgctcattctgtg

SEQ ID NO: 413776 - DNA, 201 bp, Homo sapiens
agtgtggggcccacttaccttttcctcagagcctagcacagtgcaaaggcagacacaggtgcttaaaaatgcttttcacgggccaggcacggtggctcacrcctgtaatcccagcactttgggaggcagagacgggcggatcacgaggtcaggagatcgagaccatcctggctaacacggtggaaccctgtctctactaaa

SEQ ID NO: 413777 - DNA, 201 bp, Homo sapiens
acaggatcttggggcagccaaaacctcagttaagtcttgcttccccgctacggaagccccacatgcatgcactgacccctgtgcgttaaacctgcagcgcytctgggaacaaaggggtgtaccttatctccaggctgaaggccttttaccttccctcggatattcttcaccagctctgggtagaagaactctgggcagcgt

SEQ ID NO: 413778 - DNA, 201 bp, Homo sapiens
atgaggtcagggaaagcctcacccctccagtttctccatctagataagcaaaaaaatatttctcttcaatgccttgagctgtccacatttggcacgctcargcaggttccttgttgacacaatcctatcgtccgcaccaatgctcaggtgctctctgcagctcacacttcctgacccaaggggccaatccaggtcccggcc

SEQ ID NO: 413779 - DNA, 201 bp, Homo sapiens
gcctcagcctcctgagtagctgggattacaggcacccacccccatgttcggctaattttttgtatttttagtagagatggggtttcaccatgttggccagkctggtctcaaacatctgaccccaagtgatccgcccgcctcagccacccaaaatgctgggattacaggctgagccaccatgcccagcatcttattttattg

SEQ ID NO: 413780 - DNA, 201 bp, Homo sapiens
tgaagggctctgggctctgcagtccacctccacgaactctggaaaaacaaaatgggagccctggctatactgggacttggaatttgggggcccagacaacmttctagtcaggacggcacagataatgatgtgcaagtgtaaaaaactcaaaactggctttctcttcaatacagacatatctttaaaaaggtcttcgtctca

SEQ ID NO: 413781 - DNA, 201 bp, Homo sapiens
cacagcactttccttattgcctagtccctccattccaggaataaaatgtggagtgacccagcatgtctttgtccagagaaactcaacaaaaacgttcttcrtatgagtccagcctacgtagagaggacagcaatttcaaaggttccaagatctatccgcacaacagatgattcgagtccaatcaagaaaatcactccagct

SEQ ID NO: 413782 - DNA, 201 bp, Homo sapiens
gcaaacctctgaatgaaggatgagttactgggcgctgtaccctgggagtcaggagccaagagcggtccgttttcccacaggtgtatgtgctgaggacaccrtatactctcaacgtgcctgatcacttagctggagcagtcagttcagactcaccttgtggcacagacctcacaagacaggcaagtgccctcaaatccttgt

SEQ ID NO: 413783 - DNA, 201 bp, Homo sapiens
acttgggacccctggtatccttgaccctcagagagatgaagggctctgggctctgcagtccacctccacgaactctggaaaaacaaaatgggagccctggmtatactgggacttggaatttgggggcccagacaaccttctagtcaggacggcacagataatgatgtgcaagtgtaaaaaactcaaaactggctttctctt

SEQ ID NO: 413784 - DNA, 201 bp, Homo sapiens
atatataacaaagggataaggaatccacttagcccaatgtgaaacacagattggttcttatgtaaaaaaaggagtcagagcagaggccgggccaaagggcrgacagaggtcttgctccttgggaaaccgggaaggccagcaaacctctgaatgaaggatgagttactgggcgctgtaccctgggagtcaggagccaagagc

SEQ ID NO: 413785 - DNA, 201 bp, Homo sapiens
gtcctgtattcggtcttttctacgtttctttccaccctaaaatgtgaaagcaatagattacatgctttttgaataaacacacagaattaactgtggccttsaacttcatcagctatgactcaaagaggtaatgcactaactaaaacagtcactctctcacatacacacaaaccccaaaacctcctttcctgaaaacctttt

SEQ ID NO: 413786 - DNA, 201 bp, Homo sapiens
tctcaaactccccatcaaagaaacgtttccctgaggcaagaggcatcactagattcctaaaaatgagggtattctgctccagctgcacgcgcaatggtacrtggggaggagggagcaccaaagggaaaggaaggagggcctgggacccgggtgtttatgggcagagaagcctggagagtccctgctcagcctccactgccg

SEQ ID NO: 413787 - DNA, 201 bp, Homo sapiens
ctgagaccaccaagccctgaagaaggcaggatgaaaggccaggaaagaaaagccctgccagcacctggccaacttgccagctgaatgcagccatgagcgtkggcccagagtcaggagaaacgaactgctatgacaaggcaaattttggggggtgttttgcagacagtgatagaaactgatttgtgtgtcacctagggccaa

SEQ ID NO: 413788 - DNA, 201 bp, Homo sapiens
taatagagggaaaagggggggaaaattaggggtataaaaaataaagtgagaaacacgtaacactgctaatgtcccagttacatacatcaggtttactttawattttaaaaatgcgatgtccatttcaagatctaggatggaccccttattaaggatccaaatatcaaatatccacatgtggcttttggaatcataagcaat

SEQ ID NO: 413789 - DNA, 201 bp, Homo sapiens
cttggtacagactcacaggcctccattctggcaatcaggcaatcagatctcaatcaaggaaacactttttcttttttggtttggtgttttttggtaggggragatggagtcgccatcacccaggctggagtacagtggcatgatctcagctcactgcaatctctgcctcctgggttcaagcaattatcctgcctcagccta

SEQ ID NO: 413790 - DNA, 201 bp, Homo sapiens
ggttgcactgagacaagatggtgccactgcactccagcctgggcgacagagtaagactctgcctcaaaaacaaaaaaaccccacaaatctaagcagatctragctgttagaaatcagggcagtggttgcccataagtattgaggtagtcttctggcagggcagaaggagggtttctggggtcctgataaatatattttgtg

SEQ ID NO: 413791 - DNA, 201 bp, Homo sapiens
aggtggctggtgcagagggatggaagccctggcctttggccgctgtcttcactaactgcaggagggaacgatgacactgtgtgggagaagcctttgggccytggagcttattggcaaatggagatgggggcgtgaagtttttctgctgctgagtgccggcatgaaagactttgacctgggggccaggcacaggaactgcca

SEQ ID NO: 413792 - DNA, 201 bp, Homo sapiens
  misc_feature (1)...(201): n = A,T,C or G
caggcttataccaccctgcccggccaagattcatgtttttatttaagttattaaaatctcattcaattcctcacaaattcagaatttttaaacaggaactnatgttaaatttttatcaaattattccctggaatcttaaatacgctttaaagatcactttgtcttaaaaatacacacgcagtaaatgacagtccgtgcagc

SEQ ID NO: 413793 - DNA, 201 bp, Homo sapiens
atattaattattttccatttaatttgtctaacacttattttttctggctgagaataatctttaagacccctttattttcatcaccagcagtttcctatcaytgggagccaatcttcacaatgacaaagcttttatcagctgaacaaaagatattgcctaccccaggatagtaaagaaccagtgactcaggagggtgtggct

SEQ ID NO: 413794 - DNA, 201 bp, Homo sapiens
ggtttacacatcgctcttacgctcaggacgcatgatggggtgatcacaaggaggcagtggggcagcagacgcatcattgcttaagactcagtcacccctcmgccaggaccccaaagccaaagggcttcactctagagtcacccacctgttcatagaggtgaagtttccgagcacgcttgagcagggcatccttgctgcagg

SEQ ID NO: 413795 - DNA, 201 bp, Homo sapiens
tgtttagaaaggtctgaatttgcacttctctcggtgctaccaaagttaaactcaggcttccaaggcttatttccattttataagcttattcttttctcatyaagcaaattttccacagataagccttaagctttgtgagcaaggaatccaaaaaaaaaaatttttttttttttttttgagataagagtctcactctgtcac

SEQ ID NO: 413796 - DNA, 201 bp, Homo sapiens
tgttttccagaaaagggcaaggtagaaaacatgctaccatctcatcaatgtttatcttaattaagaaagtaaaatttcccttaatgtaggttaataaaacktgattgaatgcctacaatcatccaccacagcatgaggggctgcaggactcaaagacagcaaagggcctttagaaggagatgcccagtcgctacacaacca

SEQ ID NO: 413797 - DNA, 201 bp, Homo sapiens
ggacccctggtatccttgaccctcagagagatgaagggctctgggctctgcagtccacctccacgaactctggaaaaacaaaatgggagccctggctatamtgggacttggaatttgggggcccagacaaccttctagtcaggacggcacagataatgatgtgcaagtgtaaaaaactcaaaactggctttctcttcaata

SEQ ID NO: 413798 - DNA, 201 bp, Homo sapiens
ttctgcacatcacccttcagtcgacacataaccccactgcctggagagccccaggacttcaaggcctatttctacccggcagacacttcacagaggcctgmttctgccgcactgcctaagaatgattcctaagaatacaaactggaatgtctatctgtgacttgggacccctggtatccttgaccctcagagagatgaagg

SEQ ID NO: 413799 - DNA, 201 bp, Homo sapiens
tccctcttcccgaacctgctgtgattacacacaagcgagatgcattaattattggactctgtccttcaaaaaccaacagaatcactcttagaaggtcctgytattcctggtccatgaacacctccacatgactcaactgatagaagacagcatttccagccccctttagagagatggagaggcaaggggtcacggaaggca

SEQ ID NO: 413800 - DNA, 201 bp, Homo sapiens
agaaccaaggctagaggggggttaagtggcttgggtctctgtcctgttatgacttcaagaatgtcatcctgagcagctgtccccagacgagcaaagatcartgagcttccacagtcacttgactgtttccagagcatagttgtagggagatgggcatagctgacatgtgacccgagcaaactgactcaccttcaccttgat

SEQ ID NO: 413801 - DNA, 201 bp, Homo sapiens
cactccctcttcccgaacctgctgtgattacacacaagcgagatgcattaattattggactctgtccttcaaaaaccaacagaatcactcttagaaggtcmtgctattcctggtccatgaacacctccacatgactcaactgatagaagacagcatttccagccccctttagagagatggagaggcaaggggtcacggaag

SEQ ID NO: 413802 - DNA, 201 bp, Homo sapiens
atacaaactggaatgtctatctgtgacttgggacccctggtatccttgaccctcagagagatgaagggctctgggctctgcagtccacctccacgaactckggaaaaacaaaatgggagccctggctatactgggacttggaatttgggggcccagacaaccttctagtcaggacggcacagataatgatgtgcaagtgta

SEQ ID NO: 413803 - DNA, 201 bp, Homo sapiens
tctgtcctgatgggacagaaacctttttatcaggcttcgtagacgattcctaaaggaaaacagaaatgttgatgtttagaaaggtccaaagatgccaacaytggcctgttgtgaggatacaaacatgtgaactcgagtcaaaaaaactgggccttcctgtataattacaagacaagtggtgggacagagcaggagctgtgc

SEQ ID NO: 413804 - DNA, 201 bp, Homo sapiens
tttatggggtacatagtgatgtttcaacatctaaaatgtgtagtgtcacgttagagttattagcatatccatcatctcaaacgtttttcatctccttttgytggcgacgttcaatatcctcctcctaactgaaactacatactactgttaactacagtcaccctacagtggtatagaacactagcacttattcttcctatt

SEQ ID NO: 413805 - DNA, 201 bp, Homo sapiens
acagataatgatgtgcaagtgtaaaaaactcaaaactggctttctcttcaatacagacatatctttaaaaaggtcttcgtctcagatccattcagagggcwgaatggacatgtgttgtcgaattctgctccaccataaaggcactggaattatgtcttcctataatatgatgtgtgaagaacagtccccttctatccaatg

SEQ ID NO: 413806 - DNA, 201 bp, Homo sapiens
ttgggggcccagacaaccttctagtcaggacggcacagataatgatgtgcaagtgtaaaaaactcaaaactggctttctcttcaatacagacatatctttwaaaaggtcttcgtctcagatccattcagagggctgaatggacatgtgttgtcgaattctgctccaccataaaggcactggaattatgtcttcctataata

SEQ ID NO: 413807 - DNA, 201 bp, Homo sapiens
caaaggacaaaccaaaacaacaacagcgtcaaggcaaagacaccaagacccttggcagcggcaaagcacctaggggtggagagggcaaaggcacacggtgmgcgtggcacactgaccgtcgggtgattacctggcagactctgcgggatatgggtgggcaccgcagcgtgtgggagaggcgctgcatggggcgggctggag

SEQ ID NO: 413808 - DNA, 201 bp, Homo sapiens
gacacgcacctttgtccccagcgccgacgcgggccgcagacgtccccccgcggcggtcctcatgccggtccccgggcggcggcgcagctagcggtcggctsctaagccgtggctcccagcgggcgggcggcccgcgcctcggcccatggccgggtccccgagcccaggggagcctggtgtgccgcgccgcgcgccggccca

SEQ ID NO: 413809 - DNA, 201 bp, Homo sapiens
gttcttagtatttcgcagggacagtgcaggtctcccagctgtggctctggcctgagttttgtccgctttgagcacacagcctggggatggggcggcactgkgaccatccagggagcttactgcagccagaaggagcccctgagcagtggggtgctctgaggtactctgaccaaatgccaggggatcaggcagattcaccca

SEQ ID NO: 413810 - DNA, 201 bp, Homo sapiens
gaagagcgggacacaattcaaggcaggtttacacatcgctcttacgctcaggacgcatgatggggtgatcacaaggaggcagtggggcagcagacgcatcrttgcttaagactcagtcacccctccgccaggaccccaaagccaaagggcttcactctagagtcacccacctgttcatagaggtgaagtttccgagcacgc

SEQ ID NO: 413811 - DNA, 201 bp, Homo sapiens
ggtacagcaggccctttcccgtgaagctgagaagcacctggaaaagagtaagaaaaattagaacgcaagtttttcatgctctctgatttccttaaggcagkagtaaccaaacttcaagggagacacctaaatagcaaaagtccccaaatgctgagtgttctagagctcaaacaagccatgagacaccagccagcagttatt

SEQ ID NO: 413812 - DNA, 201 bp, Homo sapiens
cagagaaggagaaaaggccaaagaagagccaagaggctccttgggaaacggcagtacacaccgagaaacgggaggggaagaggcaagacgggagggttgcrcctgcaagcgccaggacaaacttacttggcaacctttgcctgcgtgtgtgcctggcattcgtcctggtacttggccatctgctctggcatcgccctgcca

SEQ ID NO: 413813 - DNA, 201 bp, Homo sapiens
tctagggaagaaacacagcaagcggtaagaactccagtcctgttcgtggctcactcacaccaaacctggcaacacaaaggatcctccttgtgtgtccacaraggaggacatacacatccatgtcagatggccctgggaggcaccctccgaccctgcagccccaaagacaggatccaggacagtctttatgaaccaacatgg

SEQ ID NO: 413814 - DNA, 201 bp, Homo sapiens
ctctgtcctgttatgacttcaagaatgtcatcctgagcagctgtccccagacgagcaaagatcaatgagcttccacagtcacttgactgtttccagagcayagttgtagggagatgggcatagctgacatgtgacccgagcaaactgactcaccttcaccttgattttagaaggggccataactttcttcttggccctgtt

SEQ ID NO: 413815 - DNA, 201 bp, Homo sapiens
catggcttctgttaacattgaaaagaagggccaggtcaaacgaagatgataaaatagtttacctgcctaattaaagagatttaagtttaagagaatttcaytgtcaagaaaactccattgttatattttgtcatttattgtttttttctgcttattcatcctaaaattttttcacaatcattcagagatagtcactgctta

SEQ ID NO: 413816 - DNA, 201 bp, Homo sapiens
cctaaaatgatgcctgacgggcaaggcttacactgttttctccctcaggatgagaatagggtttggaaaaagctgacaccttaactgccaactcactaagrgtttctctgggcaagcttcacgcagtgcagaaccaacagcaatctgcccaaactgcttccaggaaagcccagccgcactgtgccaccatacctgagccag

SEQ ID NO: 413817 - DNA, 201 bp, Homo sapiens
taagagaagcaaatcttgtgcttgccttgagtgagtgacaggatcttggggcagccaaaacctcagttaagtcttgcttccccgctacggaagccccacawgcatgcactgacccctgtgcgttaaacctgcagcgcctctgggaacaaaggggtgtaccttatctccaggctgaaggccttttaccttccctcggatatt

SEQ ID NO: 413818 - DNA, 201 bp, Homo sapiens
ttagggacggcgaggtcagcaactttgccactccctgggtcccaccactggaatctccgtttggaccgcctggaggggctaccagagtcaacttctgggamacaggcatttttttccctgctgaacttgggacgggtcggctggtggcctgtcccacggagggaggctgtatgccagggaccaggctcccagaaacagaac

SEQ ID NO: 413819 - DNA, 201 bp, Homo sapiens
ccagaagaaagcaaattttccagaaatgaagaaaccaagaaaggcctaaaatgatgcctgacgggcaaggcttacactgttttctccctcaggatgagaakagggtttggaaaaagctgacaccttaactgccaactcactaagagtttctctgggcaagcttcacgcagtgcagaaccaacagcaatctgcccaaactgc

SEQ ID NO: 413820 - DNA, 201 bp, Homo sapiens
gcagctgtccccagacgagcaaagatcaatgagcttccacagtcacttgactgtttccagagcatagttgtagggagatgggcatagctgacatgtgaccygagcaaactgactcaccttcaccttgattttagaaggggccataactttcttcttggccctgttcaaaggaatgagcacagaaaagtttagagaatatcc

SEQ ID NO: 413821 - DNA, 201 bp, Homo sapiens
aagcaaatcttgtgcttgccttgagtgagtgacaggatcttggggcagccaaaacctcagttaagtcttgcttccccgctacggaagccccacatgcatgsactgacccctgtgcgttaaacctgcagcgcctctgggaacaaaggggtgtaccttatctccaggctgaaggccttttaccttccctcggatattcttcac

SEQ ID NO: 413822 - DNA, 201 bp, Homo sapiens
tggtatccttgaccctcagagagatgaagggctctgggctctgcagtccacctccacgaactctggaaaaacaaaatgggagccctggctatactgggacwtggaatttgggggcccagacaaccttctagtcaggacggcacagataatgatgtgcaagtgtaaaaaactcaaaactggctttctcttcaatacagacat

SEQ ID NO: 413823 - DNA, 201 bp, Homo sapiens
gacccctggtatccttgaccctcagagagatgaagggctctgggctctgcagtccacctccacgaactctggaaaaacaaaatgggagccctggctatacwgggacttggaatttgggggcccagacaaccttctagtcaggacggcacagataatgatgtgcaagtgtaaaaaactcaaaactggctttctcttcaatac

SEQ ID NO: 413824 - DNA, 201 bp, Homo sapiens
tgtgacttgggacccctggtatccttgaccctcagagagatgaagggctctgggctctgcagtccacctccacgaactctggaaaaacaaaatgggagccmtggctatactgggacttggaatttgggggcccagacaaccttctagtcaggacggcacagataatgatgtgcaagtgtaaaaaactcaaaactggctttc

SEQ ID NO: 413825 - DNA, 201 bp, Homo sapiens
gttcccgagttaatgtaaaatcctccatacttcgtagtcaaagaagcaggaacaagctcatcatactgaagatgggaaacaaactgtcagctccaagttcygcttctgcagtccgaaggtgcaaagtgggtctcgagagagatgtgactgtgctcctctgccacttccaagagcatgctaaaacatcctctggtcaaacat

SEQ ID NO: 413826 - DNA, 201 bp, Homo sapiens
aagagggcacgactgctctgaccccacccccagcttcctggtcagtatcaggaggagctacaggtacagtgggtctgacacggcattttcagtaactactyaccgcctcagagttatcgatgaaggagtcggattcatcataaccataccccatatcgatcaagtcctgtattcggtcttttctacgtttctttccaccct

SEQ ID NO: 413827 - DNA, 201 bp, Homo sapiens
ggcaacaccttctctctctcctcatctcatacctgccaagaaatcctcttctaacaggccatgattatcacatgttattaatgcctgctgcctaagatcarggaggtctatcgcttctggagacaagtacttggtgtccctgttgtgttttgatttttaaaagaaaaataacaatgaaaccatgttaatccaattcttctt

SEQ ID NO: 413828 - DNA, 201 bp, Homo sapiens
tagtcaaagaagcaggaacaagctcatcatactgaagatgggaaacaaactgtcagctccaagttctgcttctgcagtccgaaggtgcaaagtgggtctcragagagatgtgactgtgctcctctgccacttccaagagcatgctaaaacatcctctggtcaaacatgaatgtctgagctacaaggtgttttggacagatc

SEQ ID NO: 413829 - DNA, 201 bp, Homo sapiens
cgtagtcaaagaagcaggaacaagctcatcatactgaagatgggaaacaaactgtcagctccaagttctgcttctgcagtccgaaggtgcaaagtgggtcycgagagagatgtgactgtgctcctctgccacttccaagagcatgctaaaacatcctctggtcaaacatgaatgtctgagctacaaggtgttttggacaga

SEQ ID NO: 413830 - DNA, 201 bp, Homo sapiens
tccagcagccaaaagcccccgataacctgccaggccagtctgggcaccacacccaaaggggcagtgggggcttggcacagttcccggagatgttccccacrgtcacacaccagactcaaacacaggaaccagagtacacaacagcaggacccctggccacaatctagaggttcctgagtgaccagaggcagcaaagaagca

SEQ ID NO: 413831 - DNA, 201 bp, Homo sapiens; identical to SEQ ID NO: 103015

SEQ ID NO: 413832 - DNA, 201 bp, Homo sapiens
acgtgtcctcattagggcacacgtgtaagaggcgagccatcaacctggcacggctctgcctttccaccatcctcctgagccggccaagcgccacgtattcyggcaagtcacctactgatctgatagggtcacgtcaaaaagcatttctgaaatccaaaagcaagcacattctaacctttggagattttttcttcttttctt

SEQ ID NO: 413833 - DNA, 201 bp, Homo sapiens
tgtgtatatatatttatatacatacatacacacacatacatatatacctttatttatatttattaatcttttgtttaaaaagaggaaaataaaccagaaaytaaagagcttagttaccttacagaggtggtgggtgcaggaaaggaggtgagacctccaacagacctttctatggttttgtctttgcaaccacttcattta

SEQ ID NO: 413834 - DNA, 201 bp, Homo sapiens
taaatgttgactgagtgaatgaatcaacaaatgaagatactactgtaaaacggcacgccacaggaagaaaagcttaacaccaaacaaccaaaactaagtcrgaagaaaatgcgcaaaactcaagcttctacagatcccttggctaggtgaaagcccagaggggtgaaatccacagacgaataatggaaaaaaagggcatga

SEQ ID NO: 413835 - DNA, 201 bp, Homo sapiens
atatccataaatgttcatggatatttatatgtgtatatatatttatatacatacatacacacacatacatatatacctttatttatatttattaatctttygtttaaaaagaggaaaataaaccagaaactaaagagcttagttaccttacagaggtggtgggtgcaggaaaggaggtgagacctccaacagacctttcta

SEQ ID NO: 413836 - DNA, 201 bp, Homo sapiens
ggctcactcacaccaaacctggcaacacaaaggatcctccttgtgtgtccacaaaggaggacatacacatccatgtcagatggccctgggaggcaccctcmgaccctgcagccccaaagacaggatccaggacagtctttatgaaccaacatggaatggattccagggaacataatttttttaaaagcaggatattaaata

SEQ ID NO: 413837 - DNA, 201 bp, Homo sapiens
aacgtttataaccttggcagagaaaaatgtattgtttttaaaatttatgttaattagtcataattcaaattggcctctccctttgcgcacagaggtaagasaagcaaatcttgtgcttgccttgagtgagtgacaggatcttggggcagccaaaacctcagttaagtcttgcttccccgctacggaagccccacatgcatg

SEQ ID NO: 413838 - DNA, 201 bp, Homo sapiens
gaccctcaggtcctgtaaagacaaattcaaaggcactagcattctcagtccacagaagaaagaaaggaaagcaacgcagacacaagtcacgcagctgaaatgcgcaaatagcttcttactcgcatctcgtgtcatcctataagctgaagtccatctaaggaagtgagagaagctcacttggataaccctgttttggtatag

SEQ ID NO: 413839 - DNA, 201 bp, Homo sapiens
agcacctgtacctgccaacaaccaagacaaaagacaccatcaatgcatattaacagagggcagggtaaggccatcaaatcactggattccctggggcctayacaaatgtacaatacaaatcagtaacaaaaaacaggctgatgtgagaatgtagtgaacgtggcagaggcatcaccaaggttccctctcagaggacctctt

SEQ ID NO: 413840 - DNA, 201 bp, Homo sapiens
tttttcctcgaacttttaaactgattaaaaaaaatttttttagagatgaggtctcactatgttgcccaggctggagtacagcagctattcacaagcatgaycacagcacactataccctctgattcctgggttcaagcaatcctcctgcctctcaatgccaccacatccagcctctgagagccttaaacagttttaaaaac

SEQ ID NO: 413841 - DNA, 201 bp, Homo sapiens
tcacacctgcaatcccagcactttgggaggccgaggcgggcagatcacgaggtcaggagatcgagactatcctggctaacatggtgaaactccatctctaytaaaaacacaaaaaattagctgggcgtggtggcggacgcctgtagtcccagctactcaagaagctgaggcaggagaatggcgtgaacccgggaggtggag

SEQ ID NO: 413842 - DNA, 201 bp, Homo sapiens
acacaaaaaattagctgggcgtggtggcggacgcctgtagtcccagctactcaagaagctgaggcaggagaatggcgtgaacccgggaggtggagcttgcrctgagccgagatagcgccactgcactccagcctaggtgaaagagcaagacttcgtctcaaaaaaaaaaaaaagaaaaaaagaaaagaaaatgctcactcc

SEQ ID NO: 413843 - DNA, 201 bp, Homo sapiens
gcatccctggtgcttaatacagtgtgtctgggacattgtgggagctcaacagatacttaggagtaaatgatttgcacatctcattctcacggtctgcttarggatggctaagggcaccacactaagaactgggaaaaatgttgataaacagcaatttttactacattgagaggtttctgcaacatctaaggtaattttcac

SEQ ID NO: 413844 - DNA, 201 bp, Homo sapiens
cctacgttattctctttggatccatctctccctgcacttcttgtgatgaggggttctaattctatagagggcagagcagaatgggtgacatggggtctctytgattcctgctcttagtattgtctctatgttatgcttgactaaagagaaccaaaatagatctgggttatttgtccagcccaaggctgagtagctgtcaaa

SEQ ID NO: 413845 - DNA, 201 bp, Homo sapiens
gtggctcacgcctgtaatcccagcacttttggaggccaaggcaggtggatcacctgaggtcaggagttcgagaccagcctggccaacatggtgaaaccccktctctactaaaaatactaaaattagccaggcgtggtggcgcacgcctgtaatcccagctactcgggaggctgaggcaggagattcgctcaaaccggggag

SEQ ID NO: 413846 - DNA, 201 bp, Homo sapiens
tttttttctttaaatgtagagatagggtcttgccatgttgcccaggctggtcttgaactcctggactcaggcaatcctcctgccttggcctcccaaagtgytgggattacaggtgatagccaccgcgtccggcctcaattactttgcttttctgagagtaacattcctgagagtaagcaaaggcagggcagcctgactttg

SEQ ID NO: 413847 - DNA, 201 bp, Homo sapiens
ctgagagaaaacaggaggggagaaaagaacaaaacacacacattgaagacaggaacaggaaagcagctccagcagccaaaagcccccgataacctgccagrccagtctgggcaccacacccaaaggggcagtgggggcttggcacagttcccggagatgttccccacagtcacacaccagactcaaacacaggaaccagag

SEQ ID NO: 413848 - DNA, 201 bp, Homo sapiens
ctgcctaagaatgattcctaagaatacaaactggaatgtctatctgtgacttgggacccctggtatccttgaccctcagagagatgaagggctctgggctmtgcagtccacctccacgaactctggaaaaacaaaatgggagccctggctatactgggacttggaatttgggggcccagacaaccttctagtcaggacggc

SEQ ID NO: 413849 - DNA, 201 bp, Homo sapiens
taaaagggctgagataatagcagactcattttgggaaatcttcatctatttctgaaaactttgaattttttaatctaggaactctggatgattatagtctrttgttagtggaataaggcaaatgttagggaggaaagaaaaaaatcagggtgaggaagagataggaggatattaaaaactacagagcaactctccctctaa

SEQ ID NO: 413850 - DNA, 201 bp, Homo sapiens
gggtaaccataatagacatgaattatctacctaaaaaaaggttttttgtttgtttgtttgtttttgagacagagtcttgctctgtcgcccaggctggagtrtagtggtgcgatcttggctcattgcaacctctgtctcctgggttcaagtgattctcctgcctcagtcaccccagtagcttggactataagcatgtgccac

SEQ ID NO: 413851 - DNA, 201 bp, Homo sapiens
ctcatcattgtaagtaatgatttgttatacatgaatcattgtttccttaggataaaatcctaagtgtggaatattaggtgaatgaaaaatcttgggagtattttttttttttttttttttttgagacggagttttgctcttgttgcccaggctggagtgcaatggcatgatcttggttacccaaaaccccaccttctggat

SEQ ID NO: 413852 - DNA, 201 bp, Homo sapiens
acttttaaaatggggtgcagaaagaagcccctttttctggacatttattttttgatcaaattctgctatctggtttagactaagaaaaagtctttagttartgcagaaaaaatgtattactttaatttgaattttggaatcattttgatattaatgatgtaagcataaccatgttaaaccaattcttttatagaagctgta

SEQ ID NO: 413853 - DNA, 201 bp, Homo sapiens
tgggaggctgaggtggaaggatagcttgagctcaggagtttgagaccagcctgggcaatgtagttagaccctgtctctaaataaataaataaacaaataawaaataaataaataaataaataaatagcaggcatggtggtatgcccctctagtcccattgctcaggagtttgagaccagcctgggcaatatagtaagaccc

SEQ ID NO: 413854 - DNA, 201 bp, Homo sapiens
gggaggctgaggtggaaggatagcttgagctcaggagtttgagaccagcctgggcaatgtagttagaccctgtctctaaataaataaataaacaaataatwaataaataaataaataaataaatagcaggcatggtggtatgcccctctagtcccattgctcaggagtttgagaccagcctgggcaatatagtaagaccct

SEQ ID NO: 413855 - DNA, 201 bp, Homo sapiens
taccacctcacccagtgatgacctcacatcataaggatctgagtttctgccagcccgaatcatcaaatgccagagaagtattttactaacatagcagtaayagctccaaaatttgtactcccacttacatagtagggggtgtcactggaaagtgtctgttctgctaagaactacattttttagctgtccccttgtatctta

SEQ ID NO: 413856 - DNA, 201 bp, Homo sapiens
ccaaaatgtttgtgaagtgctatgccttctccattccctctcttcctgttttgtcagctgaaccagaatgttttaaggccctggggaagggcctatggaaraggtctacttccctgaatctctgtttggagaaaagtcctcttccactgactagggatatccacattggaatgtggtgtgactgataaatcaaattatgtg

SEQ ID NO: 413857 - DNA, 201 bp, Homo sapiens
aaaaggtatcttttctgaaatttacgacgttaagtttgttgtcattcacaagcacctatttttttctaaggaaaaatggttttcttctttaatctaccagwtgttttgaagaaataaggaattaatgcttaagccactgtttatgttctactttgtttttcttttctttttttttttgtttttttgagacagagtctcact

SEQ ID NO: 413858 - DNA, 201 bp, Homo sapiens
gacctcaggtgatccgcccacctcagcctcccaaagtgttgggattacaggcatgagccaccgtgccctgctgggagtattttttaaatgtacttttaacrttcatgattaatgagaacagtgcaggagttggtcctaatcatgtcactgaatgtaataatttaaaaatataaagcatacatttgtaaattagaaatgtaa

SEQ ID NO: 413859 - DNA, 201 bp, Homo sapiens
accacttaaccattatcctgtcttgtaacagtgtagattagttttgtcaaggctgtgtatcttttttttaaaaacctgggtttgcctgaataaattataartgtatatataagtgaggcagctatacctttaaaaaaatcttaattttcttttaggtatattggatccttttatattagtgtttcttggtttctctttggc

SEQ ID NO: 413860 - DNA, 201 bp, Homo sapiens
actttttagaaactttgaaggtgattatttattttaaacaattttcctctttttcgaaaagacagctctgagtttgtgggctttttttttccttttatggyaaatttgaaaactttatgtaaatgtcagatttaaaacacttttaaaatggggtgcagaaagaagcccctttttctggacatttattttttgatcaaattc

SEQ ID NO: 413861 - DNA, 201 bp, Homo sapiens
tgaagaaatgattgctactttacagcatttcatggatgatattaattacataaatgttggggagattgcatcttttatttctagtactgattacctcagtrctttgctactagataggatagcctcagtggctgttcagcagattgaaaaggtgaaatttaaatggtagacattaattttatagagttgtcaacttctgca

SEQ ID NO: 413862 - DNA, 201 bp, Homo sapiens
tccagccttcaaaagaactgggttccctgaatgaaggcttcagcagttgtacaagggggaaaaaacaaaaaagttacacctaatctgtttattagtctcaytgatgaaaaagagcagttttctcacatgatgacccaaccttcaggggttatttaaatggctgtaaatatcagcattacgtaagttagagacgtgtaagtt

SEQ ID NO: 413863 - DNA, 201 bp, Homo sapiens
tgtaacagtgtagattagttttgtcaaggctgtgtatcttttttttaaaaacctgggtttgcctgaataaattataagtgtatatataagtgaggcagctrtacctttaaaaaaatcttaattttcttttaggtatattggatccttttatattagtgtttcttggtttctctttggccacacttgaatattttccagaag

SEQ ID NO: 413864 - DNA, 201 bp, Homo sapiens
ctttgaggatactcatgttaggacagtggagtatgaatgatttttggttttactttttcttatttctgtaatcgtgtggtattatttttaccatttaaaarcaattatattcaaaagtgtgagataagcttgaaaactgagaaaattataaggtatccattggcaactatattcttaaactgtcattgcatcttcttgcag

SEQ ID NO: 413865 - DNA, 201 bp, Homo sapiens
accaactgaggtgtctgttctggtccgtgctatttccctgctcccttctcctcacttggacgaagtggggatatcccgaattgaagccgttttaccacagkgtgacctaaataacctgagtagttttgccacatctgttttaagatggattcagcatgatcacatgtatttggataatatgactgcgaaacaactgaaact

SEQ ID NO: 413866 - DNA, 201 bp, Homo sapiens
aacagtgtagattagttttgtcaaggctgtgtatcttttttttaaaaacctgggtttgcctgaataaattataagtgtatatataagtgaggcagctatayctttaaaaaaatcttaattttcttttaggtatattggatccttttatattagtgtttcttggtttctctttggccacacttgaatattttccagaagatc

SEQ ID NO: 413867 - DNA, 201 bp, Homo sapiens
tgctgggagtattttttaaatgtacttttaacgttcatgattaatgagaacagtgcaggagttggtcctaatcatgtcactgaatgtaataatttaaaaayataaagcatacatttgtaaattagaaatgtaaacagttctaaatactgttagaataaaagcatctactaatagtggggataaatgaatgtgaaaaaaatg

SEQ ID NO: 413868 - DNA, 201 bp, Homo sapiens
ttcatctgaaaaactaagttggtctatcagcctggataaagatttccaaagatactgtgcttgatgctaacctgattaatcttgtttctcaactggtctarttgtagaatgcattctgattgaattgtggatcacataaagctggtggactagcttacgttgatggcaatataaaattttcaaagatattgccacattcaa

SEQ ID NO: 413869 - DNA, 201 bp, Homo sapiens
atgtttttaagaaatatttcagtagcttttggggtacaagtggttttttgttacatggatgaattgtatagtggtgaattctgagattttaagtgcacctrtcacctgagtaatgtacttagtacctaatgtgttgtttttttgtccctagcttgcctaccaacctcccttttctgagtctctaacgtccattatatatca

SEQ ID NO: 413870 - DNA, 201 bp, Homo sapiens
aggagtgggttgtcagcatcggccagcgttcacctgcttgcgtcaccacgccctcctaggacttctaggattttggtgccttttaaattcctagtttatakgtggcctaatgctttgtggatgcgttgactgggaacgcttgtaaccgttaaaatgccatatcctttgtgaagtaaagtgcctcatttaataaacatttat

SEQ ID NO: 413871 - DNA, 201 bp, Homo sapiens
gttgttctgttataaagacatacacatatgtatgttcattgccacactattcacaatagcgaagacatggagtcaacctaaatgtccatcaatggtagacktgataaagaaaatgtggtacatatactccatggaatactatgcagccatgaaaaagaatgatctcatgcccttcgcaggaacatggatggagctggagac

SEQ ID NO: 413872 - DNA, 201 bp, Homo sapiens
tggccattattgcagtggtcgggcttcacctggtgttggtaatttatgtcttcatagtgtggaaggagggcttgcctcagtggtgggaaaacaaaactgartagagcagcttttcctttggagtggcaaacgtggggggtaggcaggtacctaaagggtttttctttttgtctcttgttcacattaaatgtgatttacctc

SEQ ID NO: 413873 - DNA, 201 bp, Homo sapiens
tttggctctgttacccagggtggagtacagtggtacaaccagggctcactgcagcctcagacttccaggctcaagccatcgtcctatctcagcctcccaaktttctgggaccacaggtggatgccaccacgcccagctaatttttatatttttagtagagatgggatttcgccatgttgccaggttggtcttgaactcctg

SEQ ID NO: 413874 - DNA, 201 bp, Homo sapiens
tctcagtatacttcagtatattttaaataatatcatttcatctttaaatacctcagtatgtttctctaaggactttttaaaaatatagaaccagctgggcrtggtggcacacgcttgtagtttcagctactcagaaggctgaggtggcacagcaaaggatacaatcaacaaagtgaagcgagagtacacagaagggtagaa

SEQ ID NO: 413875 - DNA, 201 bp, Homo sapiens
tagctcacggcagccaatcataacttgctgtagcctcgaagtcctgggctgaagtgatcctcccgcctcagcctcccaagtagtagtgctaccaaacttgrctaattttttttttttttgtagagatgggggtctcactttgttgcccaagctggagtgcagtggcatgatcatagcttaccacatcttcaaactcacggg

SEQ ID NO: 413876 - DNA, 201 bp, Homo sapiens
tcattcattgccgtttctccagcacagaacggagtgtctggtgtgaaagcaccatagtaaatgtgtaataaatgaatgaactggttataatatatgctctrtcctttttagagttacttcagttctgcataaacatttggatggctataaaccattagagttgttgaagataactcaagaattaacttttctgcatttcca

SEQ ID NO: 413877 - DNA, 201 bp, Homo sapiens
atatttgttttgtttaactatgtacagtggtgctagaagttatggaggcaaaattgtgaagcttattagtaaaaatgttaagacactatctccctccgtgkccattctgccagtgcccatgctgggtatattttgaaacggaaatgaggccagcagggtgatgagttccctaggggaggaatggcaataaactgatgaata

SEQ ID NO: 413878 - DNA, 201 bp, Homo sapiens
attatcaacaacagttaggcatgtggtggtgcttctaaggggcgtgaccagttttacacagcagtaaaacagaggacatttctgcctctccacccccaccycttttaagtcattgccctttattgcaggagagcagcagcatattcatctttagatagttcagagattaaacggatttacacttcgctgtgtgtggagggg

SEQ ID NO: 413879 - DNA, 201 bp, Homo sapiens
ggaatgccctgagtttcagattccatggtttcatgaccgcttctgtcaacaatataataaaggtttgagttttcttttagtcagatagcaaagtttgattytaaagtaaattattaggtagtacattgttaatcttgttatacttaaacatgacacgagccttcccaagagtgccatgacctgtttaatattttatatgag

SEQ ID NO: 413880 - DNA, 201 bp, Homo sapiens
cttggaatgccctgagtttcagattccatggtttcatgaccgcttctgtcaacaatataataaaggtttgagttttcttttagtcagatagcaaagtttgwttctaaagtaaattattaggtagtacattgttaatcttgttatacttaaacatgacacgagccttcccaagagtgccatgacctgtttaatattttatat

SEQ ID NO: 413881 - DNA, 201 bp, Homo sapiens
ggctgggaagggtaacgggcgattgtgggggaggtggggatggttaatgggtaaaaaaaaataaaatgaataagacctactatttgacagcacaacagggwgactatagtcaataataacttaattatacattttaaagtaacttagaacgtaattggattgtttgtaactcaaaggataaatgcctgagggaatggatac

SEQ ID NO: 413882 - DNA, 201 bp, Homo sapiens
ctccatttttcatgatgtgtttattttgcgttgcatgcttgtatcaaaatatctcatgtaccccataaatatatgtacctactatgtacccacaaaaaaawttttttttttaattttaataaaaatgctgaggttggaggatcacttgagcctagatgttcaagttcagcctgggcaacacagtgagacactgtgtcttaa

SEQ ID NO: 413883 - DNA, 201 bp, Homo sapiens
ttttcatgttctcttctagtcctctcacccaaaaaggatcttgacctctaacaccataaattgtttctatagaaatggaatcctatagtatgtacccttawagtttagtttgctcagtatgttttaaggatttatccattatgttgtatgattccataattttattctattgtatgagtatgtgcagtttatccattgtac

SEQ ID NO: 413884 - DNA, 201 bp, Homo sapiens
gatgctcggatggactacctgagagaatgtatatttggagaagtcaagtcatgtttgtagtttttatttaaaatgaatgttatcgtgtgttacatttggayctattttaataaagtggcctgtctcaattaaaaaataggtacaaatgtcctaaggtgggaacatgcctggcatgtttgagaataacaaaggatccagtgt

SEQ ID NO: 413885 - DNA, 201 bp, Homo sapiens
aaccacacaggacttaaggtaaatttatttagggaatcttgtgttgtggtggaaagatcctgggctttggatgtggatgcagtcagatttgctactcttastttatgtgacttaaggttacttaagctcttggaagttcgttatcctcatctgcaaaagagggatagtaatagctactttgcaatattgctgtggggatta

SEQ ID NO: 413886 - DNA, 201 bp, Homo sapiens
ttatttataaaagggctgagataatagcagactcattttgggaaatcttcatctatttctgaaaactttgaattttttaatctaggaactctggatgattrtagtctattgttagtggaataaggcaaatgttagggaggaaagaaaaaaatcagggtgaggaagagataggaggatattaaaaactacagagcaactctc

SEQ ID NO: 413887 - DNA, 201 bp, Homo sapiens
ccttagcaaactaatgcagaaacagaaaaccaagtaccacatgttctcacttataagtgggagctaaatgatgagaacacatgaagacatagaggggcacratacacactggggcctatcagagtgtagacagtgggaggagggagaggatcaggaaaaataactaatgggtcctagacttaatacctaggtgatgaaata

SEQ ID NO: 413888 - DNA, 201 bp, Homo sapiens
ggtacataaagtgtaatacaatattgttgaggtctgtggaggatctgagtttttacctatttgcaagctaagtttgcctgccacattttcctacgtgtgcygtaggaaggcctgagactccgaggtcagagagaggactttgttttttatagcaatagcagtagcagagtaccagaattttcttgtgttgattccctgagc

SEQ ID NO: 413889 - DNA, 201 bp, Homo sapiens
tcacgcctgtaatcccagcactttgggaggccaagtcaggcggatcacaaggtcagaagatcaagaccatcctggctaacacggtgaaaccctgtctctaytaaaaatacaaaaaattagccaggtgtggtggcaggcgcctgtagtcccagctacttgggaggctgaggcaggagaatggtgtgaacctgggaggcggag

SEQ ID NO: 413890 - DNA, 201 bp, Homo sapiens
accatctgttaagtgccaagtgctttttgttaatgacatatttttgactaaggatcatgtttgactgatgtaatttttttttttttttgagacagagtctyactctgttgcccaggctgaagtgcagtggtgcaatctcggctcactgcaacctccgcctcccaggttcaagcgattcttctgccttagcctcctgagtag

SEQ ID NO: 413891 - DNA, 201 bp, Homo sapiens
atgaattctgaaacagaatttatttacttattttaaatttaaataaagacagggtctcactatgttgccctgactaatctcgaactcctggcctcaagcartcctcccacctcagccatccaaagtgttgggatgacaggcatgagccaccactcccagccagaacagaattttacacctaacaaaataaatttgtaaatt

SEQ ID NO: 413892 - DNA, 201 bp, Homo sapiens
atgcaaaaattggaagctaagatgaaagtaacactaattagtaggagtagaatttatttcatattaaaatgtattgtggtgtaatttttttgttgtcgttsttgagacagagtcttgctctgtcgcccaggctggagtgcaatggtgccatctcggctcactgcaacctccgcctcccgggttcaattgattcttctgctt

SEQ ID NO: 413893 - DNA, 201 bp, Homo sapiens
ttagtagagatggggtttcactgtgttagccaggatggtctcgatcttctgaccccgtggtctgcccgcctcagcctcccaaagtgccgggattacaggcrtgagccactgcgcccggcctgattttttactgtgatttctgaaagaccaagcatatagttgaaaatgatttttattataataaagtgatatgccattatg

SEQ ID NO: 413894 - DNA, 201 bp, Homo sapiens
acattatcattggtcagtagcatgggtattgaaataagcagataaaagggtgagagggcatgggataaagtatagatgtttattaggctgtaccaaaaaawcagaatattgaaataagagtggaccagaaataaggactgcctgtataagaggaaaataacttgagtttcacttttgcattatcattcgtattgcatatgt

SEQ ID NO: 413895 - DNA, 201 bp, Homo sapiens
ggaaagaacagggaactgatgcctgtcaagcttcactgaaaaaaatgtatttaaactcagtttagttttaaagtttttgattgtgtaatgtgttgttgttkttttttttttttttgagatggagtctcactctgtcgcccaggctggagtgcagtggcgtggtctcagctcactgcaacctctgcctcctgggttcaagca

SEQ ID NO: 413896 - DNA, 201 bp, Homo sapiens
ttacatttttaaatttcattttcctaagtatatttttgtgtatattataaaagtagtagacttccaaggactaggagaacaaccttagatagtagagaatmacctaaacgacctatatcttcttcaacagcttaagctgtgtactgcgctagagcctccctcaatgaggaactacaatgcccagaattcccccaaaatgcg

SEQ ID NO: 413897 - DNA, 201 bp, Homo sapiens
ccagcacgttttcgggctggggacatagggttcagttgagatacggaggcttccttcgggatattgggttctctgaagtgcggatggactagggcagggcygagaccccattcattcactcatttgtttagctctcctttatgcccggcgcagaagataccccttagggtcccaaggcccttcctgtagttaagttccttc

SEQ ID NO: 413898 - DNA, 201 bp, Homo sapiens
atattgggttctctgaagtgcggatggactagggcagggctgagaccccattcattcactcatttgtttagctctcctttatgcccggcgcagaagatacyccttagggtcccaaggcccttcctgtagttaagttccttccttaaggtcattcagctggggcaaagctggggactcgacacctttctatgctaaccattg

SEQ ID NO: 413899 - DNA, 201 bp, Homo sapiens
ttatagaagctgtacattggaatgcgtttacagtcattgtaatggaagcaaaatacatgaaggaaaaactgttatttgtatccctgcttattgcacctgaygactagttgcagatggttttgtttacctaagaaaacttgtgatataaatgaaaaaaacacctgttttcctagagtcattggttacaaatatgcttcgtct

SEQ ID NO: 413900 - DNA, 201 bp, Homo sapiens
aaaataaattaataaataattaatttacaataaattaataaataattaatttacaataaattaataaataattattttacaataaattaataaataattawtttacaataaattaataaataattaatttacaataaattaataaataattaatttacaataaattaatgaataattaatttacaataaattaatgaataa

SEQ ID NO: 413901 - DNA, 201 bp, Homo sapiens
atagtggtgaattctgagattttaagtgcacctgtcacctgagtaatgtacttagtacctaatgtgttgtttttttgtccctagcttgcctaccaacctcycttttctgagtctctaacgtccattatatatcactctgtatgcctttgcgtactcatagcttagctcccacttgtaagtgaaagtatacaattttttatt

SEQ ID NO: 413902 - DNA, 201 bp, Homo sapiens
aattaatttacaataaattaataaataattattttacaataaattaataaataattaatttacaataaattaataaataattaatttacaataaattaatraataattaatttacaataaattaatgaataattaatttacaataaattaatgaataattaatttacaataaattaataattaatttataataattaattt

SEQ ID NO: 413903 - DNA, 201 bp, Homo sapiens
ttgttttgtttttttttttttgagacggagggcatcaggaagtcttaggctttcctgaataatcctttatggacctgtcatctttgaatttatcaaactcytttttttttttttttttttttttttttttttgagatggagtcttcctctgtcgcccaggctggagtgcagtggcacgatcttggctcactgcaacctcca

SEQ ID NO: 413904 - DNA, 201 bp, Homo sapiens
aattaatttacaataaattaataaataattaatttacaataaattaatgaataattaatttacaataaattaatgaataattaatttacaataaattaatwattaatttataataattaatttataataaattaacaaataattgatttacaataaataaataatttataataaataatttacaataaattaataaataat

SEQ ID NO: 413905 - DNA, 201 bp, Homo sapiens
ttaatttacaataaattaataaataattaatttacaataaattaatgaataattaatttacaataaattaatgaataattaatttacaataaattaataattaatttataataattaatttataataaattaacaaataattgatttacaataaataaataatttataataaataatttacaataaattaataaataatta

SEQ ID NO: 413906 - DNA, 201 bp, Homo sapiens
ttggataaaagaaaaaaacctcttccgtatggaagccataatatagcattgggacaactaccagaaatgccctgggaatcaaatatcgaaatagttggatsaaggctgccaccaggggctgaaaggtaatttatttcttagttttagattgtattaatatctaaatgttaaatttggtgtactatactgaagtcagtgatc

SEQ ID NO: 413907 - DNA, 201 bp, Homo sapiens
aaccactattagaaagatgtaataacgtatttttaagtaatgtggaccaccttgatttggattccatcagtaaaatacttagtgtatacaaatttctacartttaatagttttgaatttattataatggctaaaaagaagctaactgaaatgattcctctgtgtaatcatcctgctagctttgtaaaattgtttgtagcat

SEQ ID NO: 413908 - DNA, 201 bp, Homo sapiens
cttggtgcattgcagagatgctacaaatcaccaagcaagccatgggattggctgtacctttaattgagaaaaaaaacttgagaagaagagcaataaaactsacgaggacatcattggtatcagatctcaaaaccacggctctttggttgagggaaacaattttttaatgagtaaatgttcatctccaaaccaaaaagtgaa

SEQ ID NO: 413909 - DNA, 201 bp, Homo sapiens
attcccccaaaatgcgtgagcgacgtccatttcacccacctcgccgcgacccaccctgggatatgtagtgcgtgacttccgcagtgcacgctgcgcctgcsgggcattttttcctggtttgggggcaaggtctcatgggaaaggtcatgtctctcgaagaaaggttataaaccctgagatatgagggttgggcgagacatc

SEQ ID NO: 413910 - DNA, 201 bp, Homo sapiens
gcgcctgccgggcattttttcctggtttgggggcaaggtctcatgggaaaggtcatgtctctcgaagaaaggttataaaccctgagatatgagggttgggygagacatccgagcctgtttcgttccgtgttgggaccaggaataaccctgacttctgagctttcataaccccaggatcctccagaaaatttgcggcgcgct

SEQ ID NO: 413911 - DNA, 201 bp, Homo sapiens
atcaaagcatttattatgcactgggcatatgttcccatgtcaggtttgagcaaattttgtgtggcgcctctcatttaggaatttccagttttgctagataytgatgtaggtagtaatatttgaaatataatgatgagcaaatattaaattaacatacaaatacggttaatagataagagtttctcttcctaggccatgtga

SEQ ID NO: 413912 - DNA, 201 bp, Homo sapiens
tcagattccatggtttcatgaccgcttctgtcaacaatataataaaggtttgagttttcttttagtcagatagcaaagtttgattctaaagtaaattattmggtagtacattgttaatcttgttatacttaaacatgacacgagccttcccaagagtgccatgacctgtttaatattttatatgagatattgtaggtgaaa

SEQ ID NO: 413913 - DNA, 201 bp, Homo sapiens
gcgcccggccctataaaaactttgtatccattttaattatgaaaaatgtcaaacttgtataaagaattaaacaaagaacacatatatactcaccgtgtagwttcaataatgttaacattttacagtgtttgccttatccgtttgtttctctgactctcttatttttttctgagccatttcaaagttgtagtcattgtgacc

SEQ ID NO: 413914 - DNA, 201 bp, Homo sapiens
gttttttgtcaccaagtactgttaaaatctcagtgctaaagcaataaaacagttgggtttaactgagtctgtcttcaaggaatttatattgcaattgagargatagatataattgaaatatgtaaatactgtaacaacatagtttatgaagaaacaataaaattagtgatatggatagtgctgtgagcagacagaagtgag

SEQ ID NO: 413915 - DNA, 201 bp, Homo sapiens
tatccatatcttatgatttctatatcttacaaaggagagaggcactgtagagatggatagagttatcagaggaaacaactaggtatgaatatagaagactrtgtaggaaaaaatgtccatcattggtattgtaggaaaaggaggatgaaaggagcagaaaaaagtattctaggcaatgtcagaaggacccacttggcttcc

SEQ ID NO: 413916 - DNA, 201 bp, Homo sapiens
aagaatacttcagaaaggaaagattcttgattaattggctatcaataaaaacctagaagtgcaggagccaggaaaggagaaaaaaagagaccctagtttaktagagaggaaggccatttaacactgtttaggagcatctgtagctacttgtctgttactccatttttaaggagaggcaatgaccagagcttataggtgact

SEQ ID NO: 413917 - DNA, 201 bp, Homo sapiens
taggtcacaacattttatttctcttcaaagcaaggatacgttatgtgtattatgcagcttgaacaaatcacttgtaaaataggtggtcttttgtgttttayaattactgtattaattaaattacatgtatgattgtattttatagtgaatcaagcatttcttttaaatttttctttatttcaaaataactcagaagtacaa

SEQ ID NO: 413918 - DNA, 201 bp, Homo sapiens
taatttacaataaattaataaataattaatttacaataaattaatgaataattaatttacaataaattaatgaataattaatttacaataaattaataattaatttataataattaatttataataaattaacaaataattgatttacaataaataaataatttataataaataatttacaataaattaataaataattat

SEQ ID NO: 413919 - DNA, 201 bp, Homo sapiens
tatttaaactatattgttaataataacaaaaaagttggtaatcccattgtattctattttttagacaccttaatatatatatatatattttttgcatgttrtcctttttaagagacagtgacaattagggtctagaaacaaaggaggacagatagtgaaggatcttgtctaatcatgtcgtagacagaactagagaggact

SEQ ID NO: 413920 - DNA, 201 bp, Homo sapiens
tttacaataaattaataaataattaatttacaataaattaatgaataattaatttacaataaattaatgaataattaatttacaataaattaataattaatttataataattaatttataataaattaacaaataattgatttacaataaataaataatttataataaataatttacaataaattaataaataattatttt

SEQ ID NO: 413921 - DNA, 201 bp, Homo sapiens
ttacaataaattaataaataattaatttacaataaattaatgaataattaatttacaataaattaatgaataattaatttacaataaattaataattaatttataataattaatttataataaattaacaaataattgatttacaataaataaataatttataataaataatttacaataaattaataaataattatttta

SEQ ID NO: 413922 - DNA, 201 bp, Homo sapiens
acaataaattaataaataattaatttacaataaattaatgaataattaatttacaataaattaatgaataattaatttacaataaattaataattaatttataataattaatttataataaattaacaaataattgatttacaataaataaataatttataataaataatttacaataaattaataaataattattttaca

SEQ ID NO: 413923 - DNA, 201 bp, Homo sapiens
taaattaataaataattaatttacaataaattaatgaataattaatttacaataaattaatgaataattaatttacaataaattaataattaatttataawaattaatttataataaattaacaaataattgatttacaataaataaataatttataataaataatttacaataaattaataaataattattttacaataa

SEQ ID NO: 413924 - DNA, 201 bp, Homo sapiens
taagtatctagaacatagaagtttctcagtaatggatagtaggtattattattatatcatgaagtaaacccaagaagtatttaaattaagtatgaattcaytggccaggcatggtggatcacacctgtaatcccagcactttgggaggccgaagtgggtggatcacttgatgtcaggagttcgagaccagcctggccaaca

SEQ ID NO: 413925 - DNA, 201 bp, Homo sapiens
atcacgacattttcaacaacaactggtgaacaaaacagaacttctttttgacaccatagattcttctgaggtcaacgttgcaaaaagcatagcaaagtttyttcgaaatgttagatatcgttatcaaccactattagaaagatgtaataacgtatttttaagtaatgtggaccaccttgatttggattccatcagtaaaat

SEQ ID NO: 413926 - DNA, 201 bp, Homo sapiens
caacaacaactggtgaacaaaacagaacttctttttgacaccatagattcttctgaggtcaacgttgcaaaaagcatagcaaagtttcttcgaaatgttaratatcgttatcaaccactattagaaagatgtaataacgtatttttaagtaatgtggaccaccttgatttggattccatcagtaaaatacttagtgtatac

SEQ ID NO: 413927 - DNA, 201 bp, Homo sapiens
tgcaggacctgaagaaaagaaacagtaagttcagtttaaaatgcattactttttttgttgtgaatacgtggagccttcaagcttaggtctccttgcagctytggaaggtacaaatatcaccctattaggttgtggaagggaaaataatctcttatgctctgctccttgattctttttctgattattctaatttacatctca

SEQ ID NO: 413928 - DNA, 201 bp, Homo sapiens
agcctcctgagtagctggttttacaggcttgaaccagcatgcccatctagtttgatttcttaccgttatttatttattttttttgagatggagtctcgctstgtcgcccaggctggagtgcagtggcacgatctcagctcactgcaagctctgccacccgggttcacgccattctcctgcctcagcctcctgagcagctgg

SEQ ID NO: 413929 - DNA, 201 bp, Homo sapiens
cttttatttctagtactgattacctcagtactttgctactagataggatagcctcagtggctgttcagcagattgaaaaggtgaaatttaaatggtagacrttaattttatagagttgtcaacttctgcaagcataatttttatcataggcactttgagaacttggattggaatttgaggtttaaaaattaaataaattct

SEQ ID NO: 413930 - DNA, 201 bp, Homo sapiens
aaaatagtttcataccaactgaggtgtctgttctggtccgtgctatttccctgctcccttctcctcacttggacgaagtggggatatcccgaattgaagcygttttaccacagtgtgacctaaataacctgagtagttttgccacatctgttttaagatggattcagcatgatcacatgtatttggataatatgactgcga

SEQ ID NO: 413931 - DNA, 201 bp, Homo sapiens
tacctaatgtgttgtttttttgtccctagcttgcctaccaacctcccttttctgagtctctaacgtccattatatatcactctgtatgcctttgcgtactyatagcttagctcccacttgtaagtgaaagtatacaattttttattttcccctcctgtgttacttcacttagtataatggccttcagctccacccaagttg

SEQ ID NO: 413932 - DNA, 201 bp, Homo sapiens
gacgactagttgcagatggttttgtttacctaagaaaacttgtgatataaatgaaaaaaacacctgttttcctagagtcattggttacaaatatgcttcgkctaagagctatttgtccattctcctggagagtgtttcaatttcgacccatcagttgtgaaccactaattattcagatgaataagtgtacagatgaggagc

SEQ ID NO: 413933 - DNA, 201 bp, Homo sapiens
cctagtgtgtgtatgtatacatatactatatatgtgtatatatacatatatatacacacacatatatgtacgtgtgtgtgtatatatgtgtatatatatawaaataagtgttgtttaagccactaagttttgggatgattttgtcacacagcaagggataactgacacagagaagaaagaatagactgattatcacggaac

SEQ ID NO: 413934 - DNA, 201 bp, Homo sapiens
ttatttctcctattaaaaaaattcatagcactgttgtagtagcagccattatatttgttaatatgcaaccttgagtcaaaattgttctgtcatctaaaaamattaagtaaatcattcaaataatttttagtgattttccccctttcaaaacctttctacagtatctgactttttaactgttgccatgttacttttataata

SEQ ID NO: 413935 - DNA, 201 bp, Homo sapiens
actgaagaattttaatgttaataacttttttctgtttctaatagtattcatgcttattgtagaaatttggaaaacacaggaataaaatagaaaataaaaawttacccatcttactaacaagtaaaactaccacttttaatgttttggagtatttcttttttgtctttctccttctcctatgtgaatgattatatatctgtg

SEQ ID NO: 413936 - DNA, 201 bp, Homo sapiens
aactggttataatatatgctctatcctttttagagttacttcagttctgcataaacatttggatggctataaaccattagagttgttgaagataactcaasaattaacttttctgcatttccaaaggaaggagttttttgcgaaacttagagaattactgcttaggtaagattaaaatagaaattttgtttagtgtttcat

SEQ ID NO: 413937 - DNA, 201 bp, Homo sapiens
gttataatatatgctctatcctttttagagttacttcagttctgcataaacatttggatggctataaaccattagagttgttgaagataactcaagaattracttttctgcatttccaaaggaaggagttttttgcgaaacttagagaattactgcttaggtaagattaaaatagaaattttgtttagtgtttcattttct

SEQ ID NO: 413938 - DNA, 201 bp, Homo sapiens
tgtgggagaggttagtcttagagaccaagttcccaacctgtgggatctgacactgtccccaggtagattgtgtcagaactgaattggacacccagttggtrtccgctgcttggaagaactcccacacatttggtcacagaagtcttctgtggttgatgattgttgtggtttgagattagaggagaaacatagtttgaaaga

SEQ ID NO: 413939 - DNA, 201 bp, Homo sapiens
agtggggatatcccgaattgaagccgttttaccacagtgtgacctaaataacctgagtagttttgccacatctgttttaagatggattcagcatgatcacrtgtatttggataatatgactgcgaaacaactgaaactacttcaaaaattagatcactatggtcgtcagagactacaacacagcaacagtttggatctgtt

SEQ ID NO: 413940 - DNA, 201 bp, Homo sapiens
ttcacttgtctaattctacatagcttcattttttttctttttttctagagacagggtctcattatgttgctcaggatggacttgaactcctggagtcaagmgattctcccaccttagtctccagagtagctgggactacaggtatgtaccacctcacccagtgatgacctcacatcataaggatctgagtttctgccagcc

SEQ ID NO: 413941 - DNA, 201 bp, Homo sapiens
gcctgtaattccagcggttgggaggctgaggtgggaggattggttgagcccaggaattaaggctcagtgagctatgattgcaccactgcactccagcctgkgtgacagagtgagaccctgtctcttaagaaaaacaaagaaaactctggtttctatttcagcgatttgttgttcctctccttaaagtcactttctcattcc

SEQ ID NO: 413942 - DNA, 201 bp, Homo sapiens
gttatgaaaatgttctaaatgtgagtgatagcttctcaactctgtgaatatactaaaaagccattgaattgtacactttaaatgggtgaattttatgggaygtaaatgaaatctcagtaaagctgtttaaaaaaaaaaaagtgtgggctgccaactgtcaggaagtgagcatccagaagctagacgtgtcccagctgccca

SEQ ID NO: 413943 - DNA, 201 bp, Homo sapiens
tttattgtttcagcatgacttgaaacattacttaatttcttagtatttcttgattggtgctttaattgtgtcgttcattggttaaaacctatccaaggccrgtaatgattaaattatatgacttcttttatttatttattttctaaagaaaggaattatttgagctctttaagggcacaagaaaaaggggcaagaaattat

SEQ ID NO: 413944 - DNA, 201 bp, Homo sapiens
ccagctactttttgtatttttagtagagatggggttttgccatgttgcccaggctggtcccaaactcctgtgctcaagtaatctgcctgccttggcctccygaagtgctggggttacaggcatgagccactgcgcctggtcagtgtgatttcttttgtgtcaggcttcttttgctcaatactaagtttatgagatttgttt

SEQ ID NO: 413945 - DNA, 201 bp, Homo sapiens
agccattgaattgtacactttaaatgggtgaattttatgggacgtaaatgaaatctcagtaaagctgtttaaaaaaaaaaaagtgtgggctgccaactgtsaggaagtgagcatccagaagctagacgtgtcccagctgcccaattgcgtttgctgcattggcatcatttgctacaggcatgaggttgggtgcaggcagtt

SEQ ID NO: 413946 - DNA, 201 bp, Homo sapiens
tcccaaagtgctgggattacaggagtgagctaccgcgcccagcctcaattttgttttaatttagattgtattattccttccactacttctatacctaaagtttttttttttttttttttttttttgaggcggagtcttgctctgtcacccaggctggagtgcagtggcgtgatctcggctcactgcaacctccgcctcccg

SEQ ID NO: 413947 - DNA, 201 bp, Homo sapiens
acataatatcctgttacatggatataataaaatttgtcacagattgtttccaattcctcatcattgtaagtaatgatttgttatacatgaatcattgtttmcttaggataaaatcctaagtgtggaatattaggtgaatgaaaaatcttgggagtattttttttttttttttttttttgagacggagttttgctcttgttg

SEQ ID NO: 413948 - DNA, 201 bp, Homo sapiens
ccttttagtggccattattgcagtggtcgggcttcacctggtgttggtaatttatgtcttcatagtgtggaaggagggcttgcctcagtggtgggaaaacraaactgaatagagcagcttttcctttggagtggcaaacgtggggggtaggcaggtacctaaagggtttttctttttgtctcttgttcacattaaatgtga

SEQ ID NO: 413949 - DNA, 201 bp, Homo sapiens
gctagtctcgaacttctgagctcaagctatcccccgccttggcctctcaaaatgctggaattaaaggtgtgagccaccatgcccggccccagtttttcaatttttttttttttttttaacaattattgtcctggtggtgggactcttgccatggggatttcggaatgaagtagagaatgaggtcaactatgtcctgtttct

SEQ ID NO: 413950 - DNA, 201 bp, Homo sapiens
tagagccaccttgagacatttcttcaagaatagagaatctcatctcattcattgccgtttctccagcacagaacggagtgtctggtgtgaaagcaccatartaaatgtgtaataaatgaatgaactggttataatatatgctctatcctttttagagttacttcagttctgcataaacatttggatggctataaaccatta

SEQ ID NO: 413951 - DNA, 201 bp, Homo sapiens
catgcttattgtagaaatttggaaaacacaggaataaaatagaaaataaaaaattacccatcttactaacaagtaaaactaccacttttaatgttttggartatttcttttttgtctttctccttctcctatgtgaatgattatatatctgtgtttttttgttttgttttgagacagggtctcactctgttgcccaggctg

SEQ ID NO: 413952 - DNA, 201 bp, Homo sapiens
tcaagctatcccccgccttggcctctcaaaatgctggaattaaaggtgtgagccaccatgcccggccccagtttttcaatttttttttttttttttaacarttattgtcctggtggtgggactcttgccatggggatttcggaatgaagtagagaatgaggtcaactatgtcctgtttcttttgttgttgtttgtttattc

SEQ ID NO: 413953 - DNA, 201 bp, Homo sapiens
tttgaatttatcaaactcttttttttttttttttttttttttttttttttgagatggagtcttcctctgtcgcccaggctggagtgcagtggcacgatctyggctcactgcaacctccacctccctggttcaagagattcccctgcctcaacctcctgagtagctgggattacaggtgcacatcaccatgcctggctaagc

SEQ ID NO: 413954 - DNA, 201 bp, Homo sapiens
atttcatggatgatattaattacataaatgttggggagattgcatcttttatttctagtactgattacctcagtactttgctactagataggatagcctcrgtggctgttcagcagattgaaaaggtgaaatttaaatggtagacattaattttatagagttgtcaacttctgcaagcataatttttatcataggcacttt

SEQ ID NO: 413955 - DNA, 201 bp, Homo sapiens
tctcctgcctcagcctcccgagtagctgggattacaggtgcctgccaccacacccagctaatttttgtatttttagtagagatggggtttcactgtgttgrccaggctggtctggaactcttgacctcaggtgatctgcctgcctcagcctcccaaagtgctgggattacaggtgtgagccactgcgcccggccatttttt

SEQ ID NO: 413956 - DNA, 201 bp, Homo sapiens
actcggtgaatgaatagatgaatgaatgagtgtattaacatagatagccgtgtggaggaaagaagtgaagaagcgggaaggcttgtttagctggatggaargttttgtcggtgaactgagggaatgtgtgtgacggtgcaagggtagacttacattataactcatgcccttgagatcttatccactaaggaagatacttag

SEQ ID NO: 413957 - DNA, 201 bp, Homo sapiens
gcctcagttgtgctaggaggagtgggccccagccataggggaaggcctttctcatttattccattctcgaatccctgctctttttgagctgggggcctcayctttgcaggctgagaagataaaaaagaagagaaacacactctttggcaccttccacgtggcccacagctcttccctggatgatgtagatcataaaattct

SEQ ID NO: 413958 - DNA, 201 bp, Homo sapiens
tcccagcactttgagaggctgaggcgggcggatcacgaggtcaggagattgagaccatcctggctaacacggtgaaactccgtctctactaaaaatacaaraaattagcctggtgcggtggtgggcgcctgtgatcccagctacttgggaggctgaggcaggagaatggcatgatcctggcactgcactccagcctgggtg

SEQ ID NO: 413959 - DNA, 201 bp, Homo sapiens
gggccctcgtggttcactgaattgctaccaggtgttctctgaaaatagctctgcccctcaatttctggtaggtataatgtctcatccatatgaatgtattsatgctatcctgttctagagtctctggatttcacagtagcctagaaatgttctccatagattgagacttctggacctttccctgatctgtgccaagaatgg

SEQ ID NO: 413960 - DNA, 201 bp, Homo sapiens
caggggactctcctgagtcctttggcataaatttaatttgttttgtgcttctgggaacagaagctcaggagtccaagaggactcctagctcaatagttcctcctcatcttccctaatccacccctctgctaccaccccagtcatttctcagccattaggttttccctggatctttttgtcaagcttgcagggtattctaca

SEQ ID NO: 413961 - DNA, 201 bp, Homo sapiens
agacatactcttgcctcagggcctttgcattggttcttccttcttactctaactttctgcatggctcatgccttatttccttcagatcttttggtcaaatktcaactcagtgaggccttatccaatcattctatttaaaaatagcaatccctcccccaccacacactgcaacccctttctctatttttcattacagcattt

SEQ ID NO: 413962 - DNA, 201 bp, Homo sapiens
ggctggggccctcgtggttcactgaattgctaccaggtgttctctgaaaatagctctgcccctcaatttctggtaggtataatgtctcatccatatgaatktattcatgctatcctgttctagagtctctggatttcacagtagcctagaaatgttctccatagattgagacttctggacctttccctgatctgtgccaag

SEQ ID NO: 413963 - DNA, 201 bp, Homo sapiens
tcccagctacttgggaggctgaggcaggagaattgcctgaaccccggaggtggaggttgcagtgagtggagattgtgccattgcactccagcctgggtgamaagagtgaatctctgtctcaaaaaaaacaaaaaaagaaagaaagaaaaaaagaaaattataaaaatagtcactatgattttcaaagaacagtggataata

SEQ ID NO: 413964 - DNA, 201 bp, Homo sapiens
ggcaacttgctgtgcacagagggtcattagccctggcataactcccttttttccctctttctctgactcccacatccagggctcctctgagcccacagcamaacctagacagaggatgcaggagtagctgtctccttcttatagtgcccctttcaagtcttttgtgctgtggcacagagcccagatctggtataccaggaa

SEQ ID NO: 413965 - DNA, 201 bp, Homo sapiens
ggcaggaggattgcttgagcttgggaggtggaggttgcagtgagccaagatagtgccactgcactccagcctgggtgacagagtgagactccatctcaaaraaaaaaaaaaaaaaaaaaaaaaaaaaaattgatgctttttgctttttgtttcttgttcaagaaatccttccctatccccaagatatttccctaaattttc

SEQ ID NO: 413966 - DNA, 201 bp, Homo sapiens
tagagaatttaagtaattggtccaaattgtgatacagagaagcacagggactataagagcacagaagagggactcctaatcaaaccccgggggtcagtatrgagaaggctcctagagaaattagaaaaagcctgagtagaatcttgaaacctgagtatgaattagtcaggtgcagaatggggcaaggatattgcgggcaga

SEQ ID NO: 413967 - DNA, 201 bp, Homo sapiens
acaccccgccatgcctggctaatatattttttgtagagatgggttctcactctgttgcctaagctggtcttgaactcctggactcaagcagtcttcccacsttggcttcccaaagtgttgggattacaggcatgagccactgtggctggcccaatgcattgttttaagatataatgagtgtagtggctaggcacggtggct

SEQ ID NO: 413968 - DNA, 201 bp, Homo sapiens
ctctactaaaaatacaagaattagccaggtgtggtggcaggcacctgtaatcacagctattcgggaggctcaggcaggagaatcgcttgaacctgggaggsagaagttgcagtgagccgagatcacatcactgcactccagcctgggtgacagagcaagactccatctcaaaaaaaaaataaaataaaaataactatatca

SEQ ID NO: 413969 - DNA, 201 bp, Homo sapiens
acaagtaaatacctgtatagcaataaatagtaatcatgttattttgaaagaataaatactggctttcctattggtcggataacccttcagcttgtgtaggrgtagcgataagcttagatcacaactgctgtctcatttgagactcaacagaataagatatccaaagcttagtaatttttgatgaaaaaaaattatagaaaa

SEQ ID NO: 413970 - DNA, 201 bp, Homo sapiens
cctcgccctgcttcggctcgtgcacggtgcgccgcacccactgtcctgcacccactgtctggcactccccagtgagatgaacccggtacctcacatggaartgcagaaatcaccatcttctgcagcgctcatgctgggagctgtaggccagagctgttcctattcggccatcttggctcccgacctgtttgtttgtttttt

SEQ ID NO: 413971 - DNA, 201 bp, Homo sapiens
ctgcactgggcctactttcaagatatattataacatgtcacatgtagtataagaagcttccagtagcacatataccctaaaacttaaagtataataataawaaaaaaaagaagcttccagtagtgtattttcatttccctctctcaagcttagattttaatccttgcactgtggcttggaaattcaaggccataagctggg

SEQ ID NO: 413972 - DNA, 201 bp, Homo sapiens
ctgggagggaaagagggaaggacaaatgacccctttcttttctctttttcatgtttctcccttttcttcccagtttcccccttctttctcccccttccccyccctattccagacttcctcatcctcttcagcctctctttcgtaccttgaaagctaccagcatagaagccctacctcctgaactctccatcactatggaat

SEQ ID NO: 413973 - DNA, 201 bp, Homo sapiens
aggcttcctcccaggttcttatcttgctttggcagtcccaacttttagctgatgagagaggcatagaaggacaggaatcaggctgggtgcagtggctcacrcctgtaatcctagcactttgggaggccgagagcggaggactgcttaagcccaggagtttgagaccagcctgggaaacaaagtgagaccctgtctctacaa

SEQ ID NO: 413974 - DNA, 201 bp, Homo sapiens
ccttgaggaaagcagagaaggagctagaatctcacagctcatggtatgctccagaggcccttcagaagtggctgcagctgacacatgaggtggaggtgcartattacaacatcaagaagcaaaatgctgagaagcagctgctggtggccaaggagggggtgagaacagcccttctattgtcctcttttctcctttttgccc

SEQ ID NO: 413975 - DNA, 201 bp, Homo sapiens
gcatggtggcgggcacctgtaatcacggctactcgggaggctgaggcagataattgcttgaacccaggaggcagaggttgcagtgagctgagatcatgccrctgcactccagcctgggcaacagagtaagactccatctcaaaaaaaaaaaaaaaaaaacgaaagaaagaaaatgtcagtgatttttttttcatgtttatc

SEQ ID NO: 413976 - DNA, 201 bp, Homo sapiens
ggcataaaccaccacacctggctaattttttttttttaattttttgcacaggcggagtctccctatgctgcccaggctggtctcaaaatcctgatctcaastgatcctcccactttcgcttcccaaagtgccgtgattacaggcatgaaccactgtgctcagtcttgtttgtcttcttttgagaaatgtctagttagatct

SEQ ID NO: 413977 - DNA, 201 bp, Homo sapiens
tcaggacacatctccatttccagcacatcagagtgtttgccagccaggaaactcaactgaactttggtgttcagtgtttttcttagggtttcattacataggcaagtttgattgaattcttaggcacatgattgaacttaatatccagctccctttttctccataaaggttggattggtatcaccaggctcagagccccaa

SEQ ID NO: 413978 - DNA, 201 bp, Homo sapiens
gtaatcccagcgctttgggtggcgggtggattgcctgaagccaggagttcgagaccagccagggcaatgtggcagaacttggtctctacaaaaaaaaaaayacaaaaattagctaggcatggtgatgtgtgcctataattccagctactcagaaggctgagacatgagaatggcttgaacccagtaggcagaggttgtagt

SEQ ID NO: 413979 - DNA, 201 bp, Homo sapiens
ttggttctttttttaaaacaataatttgtctctttattgacattctttatttgatgcatcattgacatcatgcattcctttacctctttaaaaatcatgatttttttttttttaatctttggacatatttataatggctaatttgtagtctttttctgttaaatctgacatctggtccctcttactgagagtttctgttgc

SEQ ID NO: 413980 - DNA, 201 bp, Homo sapiens
tggttctttttttaaaacaataatttgtctctttattgacattctttatttgatgcatcattgacatcatgcattcctttacctctttaaaaatcatgatttttttttttttaatctttggacatatttataatggctaatttgtagtctttttctgttaaatctgacatctggtccctcttactgagagtttctgttgcc

SEQ ID NO: 413981 - DNA, 201 bp, Homo sapiens
atggcccactgcagcctcaacctcctggactccagtgatcctcctacctcagcctcctgagtaattgggaccacaggtgtgtgctactacacctggcttcttttttttttttttttttaagttctgggatatatgtgcaggatgtgcaggtggcctggctaatttttaaattttttgtgaagatggggtctccctatgttg

SEQ ID NO: 413982 - DNA, 201 bp, Homo sapiens
tggcccactgcagcctcaacctcctggactccagtgatcctcctacctcagcctcctgagtaattgggaccacaggtgtgtgctactacacctggcttcttttttttttttttttttaagttctgggatatatgtgcaggatgtgcaggtggcctggctaatttttaaattttttgtgaagatggggtctccctatgttgc

SEQ ID NO: 413983 - DNA, 201 bp, Homo sapiens
ccctgtctctacaaaaaaaaaatcaaaaatttagttgggcatggtggcacatgcctgtggtcccagctacataggaggatcacttgagcctgggaggtcarggctgcagtgagccgagatcgcgccattgcactccagcctgggcaacagagcaagaccctgtcaataaataaataaataaaaagatggataggaatcaag

SEQ ID NO: 413984 - DNA, 201 bp, Homo sapiens
atgagtggcttacttttgcttgtttaattaatctaaactctgctctgtcattcaatgctcccaccatttggctttagctcatgctgctagttcatgttatwctgtatttccttactctatgctatagccaccccagacatgctcttcatatcttatcactgtgcccctgttccagataaatccttatcctggcatttctct

SEQ ID NO: 413985 - DNA, 201 bp, Homo sapiens; identical to SEQ ID NO: 109080

SEQ ID NO: 413986 - DNA, 201 bp, Homo sapiens
ttcatgcctataatctcagctacttggttgagacaggaggatcgcttgaggccaggagttctagaccaggctgggcaacataacaagaccccatctctttaaaaaaaaaaaaaaaaacccacacatttcagtgcaatgcctggaacaaaacaacaacaacaacaacaacaaaaaaaaacaaatagaaacaaaaggaaaaag

SEQ ID NO: 413987 - DNA, 201 bp, Homo sapiens
caggagattatatcctgcacctggctcggagggtcctacgcccatggagtcttgctgattgctagcacagcagtctgagatcaaactgcaaggcggcagcmaggctgggggaggggcgcccgccattgcccaggctcgcttaggtaaacaaagcagccgggaagcttgaactgggtggagcccaccacggctcaaggaggc

SEQ ID NO: 413988 - DNA, 201 bp, Homo sapiens
agtggctgggactacaggcatccgccaccacgcctggctaattgttttgtatttttagtagagacagggtttcaccttgttagccaggatggtcttgatcycctgacttcgtgatctgcctgcctcggcctcccaaagtgtgggattacaggcgtgagccaccgcgcctggcctctattttttaccgtaatttagaagtaa

SEQ ID NO: 413989 - DNA, 201 bp, Homo sapiens
catgccttttagtattctgtgtgatgaaatataagtatgcataaagcatttctgctgcatgtagaagtttgatggttatctcaaggaaagcacttgtgcawttgagttgtaagttgacatacctcttttttttcaggcagcactatcattagttgaaagaatacttgatagataactatggttattcagtatttggcagaa

SEQ ID NO: 413990 - DNA, 201 bp, Homo sapiens
ctgtcgtccctttctttgactaggaaagggaactccctgaccccttgcacttcccgagtgaggcaatgcctcgccctgcttcggctcgtgcacggtgcgcygcacccactgtcctgcacccactgtctggcactccccagtgagatgaacccggtacctcacatggaaatgcagaaatcaccatcttctgcagcgctcatg

SEQ ID NO: 413991 - DNA, 201 bp, Homo sapiens
aggtgcgggatacaatctcctggtgcgctgttttttaagcccgtgggaaaagcgcagtattggggtgggagtgacccgattttccaggtgccgtctgtcgyccctttctttgactaggaaagggaactccctgaccccttgcacttcccgagtgaggcaatgcctcgccctgcttcggctcgtgcacggtgcgccgcaccc

SEQ ID NO: 413992 - DNA, 201 bp, Homo sapiens
aggattccctctttttctattgattggaatagtttcagaaggaatggtaccagttcctccttgtacctctgcctaagcaagcctgggcaatggcagacgaycctcccccagcctcactgctgccttgcagtttgatctcagactgctgtgctagcaatcagcaagactccctgggcgtatgaccctccgagccaggtgcgg

SEQ ID NO: 413993 - DNA, 201 bp, Homo sapiens
tcagtatgatattggctgtgggtttgtcatagatagctcttattattttgagatacatcccatcaatacctaatttattgagagtttttagcatgaagcgytgttgaattttgtcaaaggccttttctgcatctattgagataatcatgtggtttttgtctttggctctgtttatatgctggattacatttattgatttgt

SEQ ID NO: 413994 - DNA, 201 bp, Homo sapiens
ggaggctgaggcagataattgcttgaacccaggaggcagaggttgcagtgagctgagatcatgccactgcactccagcctgggcaacagagtaagactccrtctcaaaaaaaaaaaaaaaaaaacgaaagaaagaaaatgtcagtgatttttttttcatgtttatctgtgagatgttagtcagatgtattgaaattaaatg

SEQ ID NO: 413995 - DNA, 201 bp, Homo sapiens
attcagtatgatattggctgtgggtttgtcatagatagctcttattattttgagatacatcccatcaatacctaatttattgagagtttttagcatgaagsgttgttgaattttgtcaaaggccttttctgcatctattgagataatcatgtggtttttgtctttggctctgtttatatgctggattacatttattgattt

SEQ ID NO: 413996 - DNA, 201 bp, Homo sapiens
tttattatattgtactttttgatggtgtctcactctgttgcccaggctggagtacagtggcgtgatcttggctcactgcaacctctgcctcccaggttcargtgattctcctgcctcagcctcccaagtagctgggtttgcaggtgcccacgatgacgcccagctaattttttgtatttttagtagagatggggtttcatc

SEQ ID NO: 413997 - DNA, 201 bp, Homo sapiens
cattcagtatgatattggctgtgggtttgtcatagatagctcttattattttgagatacatcccatcaatacctaatttattgagagtttttagcatgaarcgttgttgaattttgtcaaaggccttttctgcatctattgagataatcatgtggtttttgtctttggctctgtttatatgctggattacatttattgatt

SEQ ID NO: 413998 - DNA, 201 bp, Homo sapiens
gtagaataagaaaccaaatgaaataactaggctcaatctgcatacccaccttaagtatttgaggtactggaagtgctcgttgcatggagtcttgtttgaayaaggatacctttgacttttggtaagaatataaaggggatattgaagttgagaaaccctaggaaaccaagattaaaagtcattaacaaacaggggagacaa

SEQ ID NO: 413999 - DNA, 201 bp, Homo sapiens
tttccttctcctgcctaattgccctggccagaacttccaacactatgttgaataggagtggtgagagagggcatccctgtcttgtgccagttttcaaaggsaatgcttccagtttttgtccattcagtatgatattggctgtgggtttgtcatagatagctcttattattttgagatacatcccatcaatacctaatttat

SEQ ID NO: 414000 - DNA, 201 bp, Homo sapiens
tgcctcccaggttcaagtgattctcctgcctcagcctcccaagtagctgggtttgcaggtgcccacgatgacgcccagctaattttttgtatttttagtaragatggggtttcatcatgttggccaggctggtcttgaactcctgacctcatgtgatctgcctgcctcggccttccaaagtgctgggattacaggtgtaag

SEQ ID NO: 414001 - DNA, 201 bp, Homo sapiens
catgggaaccagaatgctggggacatggtactgggtccaggatatcagaaccaacaagaggggccctggtggagcaggttggactgataccaggacagggrtattcttctcttaggcttattgcatgtagcccatgtgctgcatgtgatctaacttaaggaaggccagagatcagcaggaaaactatcttcctgagatagg

SEQ ID NO: 414002 - DNA, 201 bp, Homo sapiens
ctgggtttgcaggtgcccacgatgacgcccagctaattttttgtatttttagtagagatggggtttcatcatgttggccaggctggtcttgaactcctgasctcatgtgatctgcctgcctcggccttccaaagtgctgggattacaggtgtaagccaccgtgctcagccctgatggtattttatatcttgagagtttatt

SEQ ID NO: 414003 - DNA, 201 bp, Homo sapiens
ttttcctaatcgaataccctttatttccttctcctgcctaattgccctggccagaacttccaacactatgttgaataggagtggtgagagagggcatccctgtcttgtgccagttttcaaagggaatgcttccagtttttgtccattcagtatgatattggctgtgggtttgtcatagatagctcttattattttgagata

SEQ ID NO: 414004 - DNA, 201 bp, Homo sapiens
actgatatgacaggaggcggagctcaggcagtaatgctcgcttgcctgccgctcacctcctgctgtgtggcctggttcctaacaaggcacggactggtacrgtctgcagcctgagggttggggacccttggcatagggaatagaatgctcaggagaaggtggtatcctgtactgctcttaggcatgacaccacctgtgaga

SEQ ID NO: 414005 - DNA, 201 bp, Homo sapiens
ggagattttgggctgagacaatggggttttctagatatacaatcatgtcatctgcaaacagggacaatttgacttcctcttttcctaatcgaatacccttwatttccttctcctgcctaattgccctggccagaacttccaacactatgttgaataggagtggtgagagagggcatccctgtcttgtgccagttttcaaag

SEQ ID NO: 414006 - DNA, 201 bp, Homo sapiens
ctcaagcagtcttcccaccttggcttcccaaagtgttgggattacaggcatgagccactgtggctggcccaatgcattgttttaagatataatgagtgtastggctaggcacggtggctcacacctgtaatcccagcactttgggaggctgaggcagtcggatcacttgaggtcaggagttcaagactagcctggccaaca

SEQ ID NO: 414007 - DNA, 201 bp, Homo sapiens
tgttattggtgtataagaatgcttgtgatttttgtacattgattttgtatcctgagagtttgctgaagttgcttatcagcttaaggagattttgggctgasacaatggggttttctagatatacaatcatgtcatctgcaaacagggacaatttgacttcctcttttcctaatcgaataccctttatttccttctcctgcc

SEQ ID NO: 414008 - DNA, 201 bp, Homo sapiens
ccactgcatccagcctgcatacttgttctatcaattgttagagaggagtatttaagtttccagttataactgtggatttgcctatttttccttgtagtttytggttcacgtattttgaagctctgttactaggtgcataaagatttaggatgattatttcttagtgattaactgaccccttcaacattatgaaatgaactg

SEQ ID NO: 414009 - DNA, 201 bp, Homo sapiens
gcaggatgtgcaggtttgttatataggtaaatgtgtgccatggtggttttctgcacagataacccgtcacctaggtgtttagccctgcagccattagctgytcttcctgatgctttcgctcctcccactcccctgacaatgtatgttgttccccctgatgtgtctgtgtgttctcatcgttgagctctcacttgcaagtga

SEQ ID NO: 414010 - DNA, 201 bp, Homo sapiens
agcttgctttcttctatataaaatacggaaaataatccttaccttttctccttcctgggagagttgtaaagcagataagaagtctgagttctgaagcatcwtacagagatgttggagagtcttagtagcagtaaatgaactcacatccttttggctgcctaggttcgggaggccttgaggaaagcagagaaggagctagaa

SEQ ID NO: 414011 - DNA, 201 bp, Homo sapiens
agttgcttcattgttggctagctacctcacatgagcacccataggtaggaagattgcagtcatgtgtgatctagtagtggttctattttttttttttttttgagatggagtcttgctctgttgcccaggctggagtgcagtggcccgatctcagctcactgcaagctccacctcccaggttcatgccattctcctgcctca

SEQ ID NO: 414012 - DNA, 201 bp, Homo sapiens
gccttccaaagtgctgggattacaggtgtaagccaccgtgctcagccctgatggtattttatatcttgagagtttatttatattttaatgctgtagttctstgttattccttatctacctctgtggtattggccctagaaggtagtgtttttctcctataatttatgtaaacatttctgtgttaaaaatttactgagtacc

SEQ ID NO: 414013 - DNA, 201 bp, Homo sapiens
aattctgcagcctgtcactgatagccacagctctctgtacttgctgttgccttcttcctcactctggcccagggattcttcctatcttctctttggaatgagaaaacagaacaagacttttaacttttaggtgcttgaaccttggggacagggagccctgatatatcagctggtctgttgaatgagatcttcatgctggaa

SEQ ID NO: 414014 - DNA, 201 bp, Homo sapiens
ggggtgagaagaatcagcttgcttggcaagagctggacagagaacacccatggtaatggaaggcttaggcttctccctttagcgcagctgtgcaggtaacytggtagcccttcttccatctgggctgggagggaaagagggaaggacaaatgacccctttcttttctctttttcatgtttctcccttttcttcccagtttc

SEQ ID NO: 414015 - DNA, 201 bp, Homo sapiens
cagatgctattttaagtaagtagaatagcccttatggtaaagctattgtcctaggcccatattctgccagttcagcgggagggcagaaggccggggctggrttaggggcttactttcagattctttaatcaggctggattcccactcgagacagaatttatttgtaattttatcaataatactttgcccctggccaagcct

SEQ ID NO: 414016 - DNA, 201 bp, Homo sapiens
ttgagtagagcagagccaaaaggaacaacactggaattcttcagtgaatgaagggagttttcccttactggcccacaattgaatttttctttggatcagawgctattttaagtaagtagaatagcccttatggtaaagctattgtcctaggcccatattctgccagttcagcgggagggcagaaggccggggctgggttag

SEQ ID NO: 414017 - DNA, 201 bp, Homo sapiens
ttcttcctacccatgagcatggaatgttcttccatttgtttgtatcctcttttatttcactgagcagtggtttgtagttctccttgaagaggtccttcacrtcccttgtaagttggattcctaggtattttactctctttgaagcaattgtgaatgggagttcactcatgatttggctctctgtttgtctgttattggtgt

SEQ ID NO: 414018 - DNA, 201 bp, Homo sapiens
ctataaattaccttgggcagcatggccattttcacgatattgattcttcctacccatgagcatggaatgttcttccatttgtttgtatcctcttttatttcactgagcagtggtttgtagttctccttgaagaggtccttcacatcccttgtaagttggattcctaggtattttactctctttgaagcaattgtgaatggg

SEQ ID NO: 414019 - DNA, 201 bp, Homo sapiens
tccaattctgtgaagaaagtcattggtagtttgatggggatggcattgaatctataaattaccttgggcagcatggccattttcacgatattgattcttcctacccatgagcatggaatgttcttccatttgtttgtatcctcttttatttcactgagcagtggtttgtagttctccttgaagaggtccttcacatccctt

SEQ ID NO: 414020 - DNA, 201 bp, Homo sapiens
aaatggtatttctagttctagatccttgaggaatcgccacactgacttccacaatggttgaactagtttatagtcccaccaacagtgtaagagtgttcctrtttctccacatcctctccagcacctgttgtttcctgactttttaatgattgccattctaactggtgtgagatggtatctcattgtggttttgatttgcat

SEQ ID NO: 414021 - DNA, 201 bp, Homo sapiens
taggaacggccagcctgtaatcctttttctaattctaagttaaccaagggggagcaaaaagtagtgagatttcttggaaaactattttcaaccaaacaggmtcttagggcccacttcctgccctttgggaatggctggcctcgatttagggtgccagcagaagaatgctattgaaccaggaaacagtccagagaagcagct

SEQ ID NO: 414022 - DNA, 201 bp, Homo sapiens
gtttactgagaatgatgatttccaatttcatccatgtccctacaaaggacacgaactcatcattttttatggctgcatagtattccatggtgtatatgtgycacattttcttagtccagtctatcattgttggacatttgggttggttccaagtctttgctgttgtgaataatgccgcaataaacatacgtgtgcatgtgt

SEQ ID NO: 414023 - DNA, 201 bp, Homo sapiens
ttttttttccttttctatatttcatttcaatagcacattagcaggtttatatataatgacagtgagtttagattaggataattcataagtcccagaatcastgggtcatatgacatgacagtttgacctgggctgcacaggaaatgcatttataaatggtaggaggtggggaaaatatgtagaggataaaccctggaagga

SEQ ID NO: 414024 - DNA, 201 bp, Homo sapiens
gtggaatagcagtacctttatatatttgtacagtgctttttgtttgtttgtttgtttttatttttttattttattattattatactttaagttttagggtwcatgtgtacaatgtgcaggttagttacatatgtatacctgtgccatgctggtgtgctgcacccattaactcgtcatttagcattaggtatatctcctaaa

SEQ ID NO: 414025 - DNA, 201 bp, Homo sapiens
actgcagcacaagtgtttcaaagaggaaccccaagaactcccaggcttgtaggaagcatctgattttacataagtttgcacagtaggaaactgaggtcctyggggaggaacaaagcaacttatgatcagacaaatgagtcactagtagagctgaaatgagaagccagatctcctaaccactcccacaccccatcacagtgc

SEQ ID NO: 414026 - DNA, 201 bp, Homo sapiens
taaaggctcttctttcctctgctgcctcttcattggattgactgaaagctggcctcttggaatactggtctatttctcttctcttcctccaagcttattgygatggagaagatgatgtaattttagtagtccaggtattctctactacttttgggtcctgtctattctgggtaactgtggaatagcagtacctttatatat

SEQ ID NO: 414027 - DNA, 201 bp, Homo sapiens
cacataaaccctggaataattctgtgaaagcaggaacccttataaccaaatcctttctctccagtgctcagagcacgaaagttttctgctgtctttggaamcttgtctgcaaatagcttgaaggagacatggcccaagggctcgctgttgacagcaatgtcgaagaacacggtggggttaaccacggctgatagtacgggg

SEQ ID NO: 414028 - DNA, 201 bp, Homo sapiens
agtcttggcagtgcagatgaaaaactgggaactgtttgtgttgggtccagcatttgccatggacaagatgccaggacctgtatgctttaggatgaagttckcatcatcaaatttctccccgtagatggacttgctgctagtgccattatggtgtgtgaagtcaccaccctgacacataaaccctggaataattctgtgaaa

SEQ ID NO: 414029 - DNA, 201 bp, Homo sapiens
gtcataatgtattatcctttcactgtattgttggattagatttgctaaaattttgttttaaatttttatgtctttgttcatgaaggatactggtttgtagytttcttaaaatgtctttgtttttggtatcaggataatgtttgtctcataggatgaattatgaagtattcctcaagtttttttgaagagttcatgtagaat

SEQ ID NO: 414030 - DNA, 201 bp, Homo sapiens
gtcagcagtggtgatcttcttgctggtcttgccattcctggacccaaagtgctctatggcctccacaatattcatgccttctttcgccttgccaaagaccrcatgcttgccatccaaccactcagtcttggcagtgcagatgaaaaactgggaactgtttgtgttgggtccagcatttgccatggacaagatgccaggacc

SEQ ID NO: 414031 - DNA, 201 bp, Homo sapiens
tatatatatatataatgttggctgtgggttttttgtagtgcctctctactcctagtttgctgagagcctttatcaggcatagatactggattttatcaaakgagttttctgtgtctattgagatgattgcatggtttttctgtttgtttgttaatttgataaattacagtgactgagttttgagtgtaaagctaaccctgc

SEQ ID NO: 414032 - DNA, 201 bp, Homo sapiens
ctgtgctttggtttggttattttctattgatctatcttttaagttctttaattctgcattctactgtaagcattctggtgtttaacccatccagtgggttyctactctcagacaatgtatttttcaattctagaatatccactttactcttttataggttctagttccctgtccagaatttctatcttttatctattgtat

SEQ ID NO: 414033 - DNA, 201 bp, Homo sapiens
cacatgtctcttatgctcagttctgttcttttttctctctgtgctttggtttggttattttctattgatctatcttttaagttctttaattctgcattctrctgtaagcattctggtgtttaacccatccagtgggttcctactctcagacaatgtatttttcaattctagaatatccactttactcttttataggttcta

SEQ ID NO: 414034 - DNA, 201 bp, Homo sapiens
cgtggtggctcatgcttgtaatcccagcactttgggaggccaaagtgggcggatcacgaggtcaggagattgagaccatcctggccaacatggtgaaaccytgtctctactaaaaatacaaaaattagctgggcgtggtggcacgtgcctgtaatcccagctactcgggaggctgaggcaggagaatcgcttgaacctggg

SEQ ID NO: 414035 - DNA, 201 bp, Homo sapiens
agtataaccacctccctagcttcacctgcagtcttgaaatggctgagcaaatgggcctggtccccactgtattggttacttattggtgtataacaaattakgccaaaacagagagggctaaaataataagtatttattatctcatagattctgtgcatcgggagtctggatatagcttgactgggtacctctggctcagag

SEQ ID NO: 414036 - DNA, 201 bp, Homo sapiens
tttgacaactttgcctgtgttgatacaacttgctagagcaggcaagacttgaagagggatggctgtggtcctgtcatgtttatcagagtggagcagatttsttttgtgtgagaagtcatgcaagaaaaatccggaaatgagccaacagcacttaaacttttgttttctgctggggagcatggaatagagaaggtgcaggtt

SEQ ID NO: 414037 - DNA, 201 bp, Homo sapiens
tatttccttgtctcttaagggcaagagccatgtctggtttgttggctgtagtacatatcctcagtacctatgagagtgctggtcagagagtatgtgcccartagatatttgttgaccaaatgaataacaatgaattgatctttggattgagtaggtggggagggagaataccaagtacttgacatcagttcctgtaaaact

SEQ ID NO: 414038 - DNA, 201 bp, Homo sapiens
gtagggattatttttctgcctgacctagtacttcatccctatttactaagcacctactgaagctgtgctcagtgacagttatcagtcataatgagggatgrtttggctattgactttggttggcagtttttgtttgccacagcaatgactaccctgagcaggtggctgcagtaggagtggagaactgtgcttgaagaggac

SEQ ID NO: 414039 - DNA, 201 bp, Homo sapiens
tcagtttatattttccaaaactatcaccctggttcaactgttctgaatttaagccttggggtaggggctgtgtctttgtagttagtgttctttatctcttyagtcaacatttagcatgtttattatgtgttataagacaatccctgcccagtagaaggactcaatatagcaggagaattaagatgtatggtcacattttat

SEQ ID NO: 414040 - DNA, 201 bp, Homo sapiens
cacgccccaaccctgctcacttcatcatgactgacgacgtggatgacatggatgaggagattgtgtctcccttgtccatgcagtgtaggtgacctctttgsggggatgaaggaaggagcctttgatgtacaggttgagaagtctgtggcctctgttgtgcttaaacagcagatggggcagatacccaggaagatagttcaa

SEQ ID NO: 414041 - DNA, 201 bp, Homo sapiens
cctcagaatttgagggcatacagggcctccaacaccaattccatttcctcattggtggagggacagctctggtctcctgcctcagcctttatttatctccygccttgctcttaagtttgagtttattgtgtgttttattcacacatattctcaaaacttgttcctctgagaagaggcttcattcctattggggctcacacc

SEQ ID NO: 414042 - DNA, 201 bp, Homo sapiens
ctgcctttctctttttcctctttctcttccctttccttgtacagcctcagttgtgctaggaggagtgggccccagccataggggaaggcctttctcatttmttccattctcgaatccctgctctttttgagctgggggcctcatctttgcaggctgagaagataaaaaagaagagaaacacactctttggcaccttccacg

SEQ ID NO: 414043 - DNA, 201 bp, Homo sapiens; identical to SEQ ID NO: 109128

SEQ ID NO: 414044 - DNA, 201 bp, Homo sapiens
ctcagccatagtcacagtgagaaggcgacaggaaccagctcgggggccaactctgaggagtccactgcagcaggtaaggccttgctgcgggctggactggrctggaggctttggctcaggactgagtggcccgaagtgggcaagttgaaatctaggtttgtacatgtgaggttcatggaggattcacacatggcactgcct

SEQ ID NO: 414045 - DNA, 201 bp, Homo sapiens
tgcttagtcagtgttagctcctttctcatttctttcattgcttacaagtagatagcattccagttcataggtttctttgagaaatagactgtagaaaagaygacaatgtttattctcattagtcagacgaactgcagcacaagtgtttcaaagaggaaccccaagaactcccaggcttgtaggaagcatctgattttacat

SEQ ID NO: 414046 - DNA, 201 bp, Homo sapiens
tgggaggccaaagtgggcggatcacgaggtcaggagattgagaccatcctggccaacatggtgaaaccctgtctctactaaaaatacaaaaattagctggscgtggtggcacgtgcctgtaatcccagctactcgggaggctgaggcaggagaatcgcttgaacctgggaggcggaggttgcagtgagctgagattgtacc

SEQ ID NO: 414047 - DNA, 201 bp, Homo sapiens
tgactagctattgtaagctaagctctctgctacatgttataggacaaactcgagagacactccttcagttatttaataaccacacactctgctctgtgccrggccctcggcttggagatggatttatggagctaaattaattattcatttatgtattccagaaaatttacaagatgctggtgaagaataaatgataaataa

SEQ ID NO: 414048 - DNA, 201 bp, Homo sapiens
aggagagcttattttgtgccaggcactattctaaggtatttagttgaatttactcatttatgcttccctcaacatgagggttgttaggttttgtgctactrtcttcattttacaaatgatgcaagttatacactgaaactaagtggtggaacgaggattcaaacccaggcagccaggtctagaatcaaactctaaagtatc

SEQ ID NO: 414049 - DNA, 201 bp, Homo sapiens
gttttaaattgcacaccattttgagtagcatgatgaaatctcatgctgtcctgctctgtcctgcccaggatgttaatcaacccctttgtccagcgtattcrtgtaccataggctacctgtgctttagtcacttagtagccatcttagggatcagatcgactgtcttggtgtcacagtgcttgcgttcaagtaatccttatt

SEQ ID NO: 414050 - DNA, 201 bp, Homo sapiens
gtatctttaatccttcttaaaacatattacacacacacacagacaggagagcttattttgtgccaggcactattctaaggtatttagttgaatttactcawttatgcttccctcaacatgagggttgttaggttttgtgctactatcttcattttacaaatgatgcaagttatacactgaaactaagtggtggaacgagga

SEQ ID NO: 414051 - DNA, 201 bp, Homo sapiens
gactccaaaaatagatatttcataattataagtggatgaattcaatttaatatataacagcccttaatttggatacatctaatgatgtagtctaaaatatrtaaagcaaatattgactgaactaaaatgatactagacaaattttataatcaaagttagagattttaatatgcttctctcaataagccaccaacagcatcc

SEQ ID NO: 414052 - DNA, 201 bp, Homo sapiens
tgttgagacttggtttgtataaaaaaacaactaagcaattcagttaaaaggcaaagattgtcagattggattaatgccaaaactcaattatatgctgttcrtaagagacacattttaaatataagaacacaaaaaaaggttaaaggaaaaggatatgagaaaagatatatgttacaaaataaagcagcaaaattaagcagg

SEQ ID NO: 414053 - DNA, 201 bp, Homo sapiens
agtgttttcttttctctgcagccttgccaacatctgtttttttggttttttttttttttttttttttagtttttaataataactttgcgtcctggtatggkggctcatgcctgtaatcccagcgctttgggtggcgggtggattgcctgaagccaggagttcgagaccagccagggcaatgtggcagaacttggtctctac

SEQ ID NO: 414054 - DNA, 201 bp, Homo sapiens
ctgggcaacaagagtgaaactccatctcaaaaaaaaaaaaaaaaaaaaaagaaaaaaaaaaaaatctccaaactgctttccacagtggctggactaatttrcattcccatcaactgtgtataagtgttttcttttctctgcagccttgccaacatctgtttttttggttttttttttttttttttttttagtttttaataa

SEQ ID NO: 414055 - DNA, 201 bp, Homo sapiens
tggtaactgtgtttacctgttttaggaactgccagagtattttccatataaaaatggttcaagtggctaaaccatttttacattcctgccagcagtgtatragggatctgttctctccacatgctcatcaacacttgttattgtctgactttttgattacagtcatcctagttggtataaagcaatatctcattatgattt

SEQ ID NO: 414056 - DNA, 201 bp, Homo sapiens
ctatatgtgcctttgtgtttgtgttttttttgtatgtgtgtatacatcattttgtgcttgtgtgggtatgtgtctttctgcatttagatgtgtctgtgtawgacaagaagtggagggagaagaggaacactgagccaaggaagtaggggctgaaagaaagcccataaatgaggttgaggatcaaggagcaggttagggaca

SEQ ID NO: 414057 - DNA, 201 bp, Homo sapiens
tccctttccttgtacagcctcagttgtgctaggaggagtgggccccagccataggggaaggcctttctcatttattccattctcgaatccctgctcttttygagctgggggcctcatctttgcaggctgagaagataaaaaagaagagaaacacactctttggcaccttccacgtggcccacagctcttccctggatgatg

SEQ ID NO: 414058 - DNA, 201 bp, Homo sapiens
tatagcaggagaattaagatgtatggtcacattttatattataataagagcttctatttattgagtacctattcttttctctctctttttttttttgaccragtctcactctgtcgcccaggctggagtgcagtggcgccatcttggctcattgcaagccctgcctcccgggttcatgccattctcctgcctcagcctccc

SEQ ID NO: 414059 - DNA, 201 bp, Homo sapiens
ctattcttttctctctctttttttttttgaccaagtctcactctgtcgcccaggctggagtgcagtggcgccatcttggctcattgcaagccctgcctccygggttcatgccattctcctgcctcagcctcccgagtagcggggactacaggcgccagccaccatgctcggttaatttttttgtatttttagtagagatgg

SEQ ID NO: 414060 - DNA, 201 bp, Homo sapiens
ctctactccctgagagaatcatagacgcagtctctgggctagagaagactttggagagcattcaggacaatgcccttctgaagtaccaatcatttttcagktctctctgacatgagctcttcacataactcccatgacagggaactcattctctcctgagatcaccccttcactgatagtttggatttgcatgggagaaag

SEQ ID NO: 414061 - DNA, 201 bp, Homo sapiens
tactttctgtcctgtgacagcttcttctattgcctaggaagttaagatctatcttctttgagggtcatctgaagagtattttgccaaggaagtagttgtcragatccaggtcaaaaggaaagaggaattttagcatctaggaattggaagaaatactagaaacttcagtcaaaatacctttttcaaatagtgaccttgagg

SEQ ID NO: 414062 - DNA, 201 bp, Homo sapiens
tccaactcctggtttccagtaatcggcctgccttggcctcccaaagtgttgggattacaagtgtaagccaccatgccctgcctctatctccatttcccctrcctccaactttgatagagatgcagtggtgctttgaagtctgaagtaccatggttgctggaagcagatccgtggttagctaactgacagcgaggttgcctc

SEQ ID NO: 414063 - DNA, 201 bp, Homo sapiens
tgtattttttgtagagacggggtttcgccatgttacccaggctggtctcaaaactcctgggctcaagcaatctctgcccacctcagcctcccaaaatcctsggatcgtaaacatgagccaacgcacccagcctggaaaattttcttaaactctgtgaactttcatttccttaccgtcaaattagtcagtaattcctacctt

SEQ ID NO: 414064 - DNA, 201 bp, Homo sapiens
tgagcacctttgtaggtgttttacatctgcaaaacaactcttaagggtggatatagctctcattttactgatgaagaaattgtaactgagaacttaaggtyattttcccaaggtggcggagccaggatttgaaattagctttatctgatcccaagaccaaaattgtttctatttttgtttaataacttggtgtggggtggg

SEQ ID NO: 414065 - DNA, 201 bp, Homo sapiens
tgaaatatgatccaaagactatgttctagagtcactggactcttaccaacaataagagttcaagttgtaaaaaatagtcactatgggccaggcacagtggytcatgcctgtaattctagcactttgggaggccaaggcaggtggatcacctgaggttaggagatcaagatcagcctggccaacatggtgaaagcccatctc

SEQ ID NO: 414066 - DNA, 201 bp, Homo sapiens
gccacgtatttagggcttagcacagggcttggcacttagtaggcacttgaaagaactcggtgaatgaatagatgaatgaatgagtgtattaacatagatarccgtgtggaggaaagaagtgaagaagcgggaaggcttgtttagctggatggaaggttttgtcggtgaactgagggaatgtgtgtgacggtgcaagggtag

SEQ ID NO: 414067 - DNA, 201 bp, Homo sapiens
  misc_feature (1)...(201): n = A,T,C or G
caatactaactcccatagtacatagtctctatcgctcgatttagcacttaattagaaattgccttgctttgtgccctaatgattttgattgtattgttttntctataactttgtgttcctgcactaatactggcattattaaagcacaactcatcagattacttctaccatgtgccaagccaagctgattacatataaagt

SEQ ID NO: 414068 - DNA, 201 bp, Homo sapiens
aacccctcacctcagcctcccaagttgccggggattacaggtgagagccactgcaccttggctacctttgttaattctctggacatacctcctaccgcttyggtctggctccaatcttctttgtcttataaacattttatgtttatttccagtcccctttctttgctcaggtagttctccttacctggaattaacctcttg

SEQ ID NO: 414069 - DNA, 201 bp, Homo sapiens
aggctaactatttttgtagagacagggtcttgctatgttgccaagtctggtattgaactcctggtctcaagcaacccctcacctcagcctcccaagttgcyggggattacaggtgagagccactgcaccttggctacctttgttaattctctggacatacctcctaccgcttcggtctggctccaatcttctttgtcttat

SEQ ID NO: 414070 - DNA, 201 bp, Homo sapiens
ccatgttggccaggatggtcttgaactcttgaggtcagatgatccacctgccttcgcctcccaaagtgctgggattacagtcatgaaccactgcctggccrtaaattatctttttttatctgttttgcaacagtctcactccgtcactcaggctagagtgcagtggcgtgatcatggctctctgcaggctcaatctcccag

SEQ ID NO: 414071 - DNA, 201 bp, Homo sapiens
tttgtgtaggggttgtgcgatgcagctggccatgctctttttgtctccaggagctggcatttgccctctatatgcactttgtattgtagctccctttccayctaaaacctccctgcattctccccttttctcccttttctgcctttgctaaatacctgttctggtcagaccctgtgctaagagtatggggctacagagata

SEQ ID NO: 414072 - DNA, 201 bp, Homo sapiens; identical to SEQ ID NO: 109182

SEQ ID NO: 414073 - DNA, 201 bp, Homo sapiens
ggatgtggaagaaagtgatgaggtgagctctcccatcctgctatgtctctcttttcttcctgtgtgaattagtctttgaaagctacttagacagcctcttmcctggggagagatgttctctgctggcttgttctttaggaactcatccctatcagggaagatggctcccagaagagcagccctctaggagtcagcctgtca

SEQ ID NO: 414074 - DNA, 201 bp, Homo sapiens
atgctcagggatagaagtaaccccctatgggctgaaagctttttacctgttacctacttctatatttcatttcaatagcatatcagcaggtttatatatawataatgacagtgggttattgtagacatgtagagtgcatgaactgattaatgaacatctttgtattattgaatgaccaaggaggactaagtgggttttcac

SEQ ID NO: 414075 - DNA, 201 bp, Homo sapiens
atagagctttattctatggaggtggcagaataggacattctaggcagagtaaacaacctgagcaagagtacaaaagctaaaatatgaaaagtatgctcagrgatagaagtaaccccctatgggctgaaagctttttacctgttacctacttctatatttcatttcaatagcatatcagcaggtttatatatatataatgac

SEQ ID NO: 414076 - DNA, 201 bp, Homo sapiens
ccacactaggctaactatttttgtagagacagggtcttgctatgttgccaagtctggtattgaactcctggtctcaagcaacccctcacctcagcctcccragttgccggggattacaggtgagagccactgcaccttggctacctttgttaattctctggacatacctcctaccgcttcggtctggctccaatcttcttt

SEQ ID NO: 414077 - DNA, 201 bp, Homo sapiens; identical to SEQ ID NO: 109188

SEQ ID NO: 414078 - DNA, 201 bp, Homo sapiens
gcctactctgtgccaggctctgctgggcataggggttcactggtgataagatacaatcccagccatcaagaactacaatcttgtctgagagagatacatamataattatggaaaaatttattaagtgctatgggggtgttgaggaaggagtgactaacagtgtgtacctgggtggaatgcttcaccaaagagatgaatttg

SEQ ID NO: 414079 - DNA, 201 bp, Homo sapiens
agagtaggaagcccagtgctgtggttaatatgggccaaattagatgaagattaagtagctgggttatttgcagatgttattaccataattaataataattrtattcccttttgtgctctgggcctcactttcttatattcagatagctgtagacaacccttaagtgttctgcctctagtttctcccggaaagcccatgttg

SEQ ID NO: 414080 - DNA, 201 bp, Homo sapiens
cctgcctcagcctttatttatctcctgccttgctcttaagtttgagtttattgtgtgttttattcacacatattctcaaaacttgttcctctgagaagagrcttcattcctattggggctcacaccaagtccatgcctgcagttctctttcctctgtcttcaggcaagcactgagcgaggtgacagcagcattgcgggagc

SEQ ID NO: 414081 - DNA, 201 bp, Homo sapiens
ttggactttataggtagtagtatatagggagagagtaggaagcccagtgctgtggttaatatgggccaaattagatgaagattaagtagctgggttatttkcagatgttattaccataattaataataattatattcccttttgtgctctgggcctcactttcttatattcagatagctgtagacaacccttaagtgttct

SEQ ID NO: 414082 - DNA, 201 bp, Homo sapiens
ctggaccagactttttgagagcagtgctattttcttttctggagcctacatggcaaatcagggcatttattcagtcattaaacaaattcttatttaatacrtattaaagccaggcactattcgaaggctagggattccacagtgtacaaaacagataagatccctgcttttagggagcttgcgttctagtgatctgtatgt

SEQ ID NO: 414083 - DNA, 201 bp, Homo sapiens
gcttgaggccaggagttcaagaccagcctagtcaacatagtgagaccttgtctctataaaaaaataaacaagtatgaaaaaaaaaaaaaaagggccgggcwcggtggctcacgcctgtaatcccagcactttggaaggccgaggcgggtggatcacgaggtcaggagattgagaccatcctggctaacacggtgaaacccc

SEQ ID NO: 414084 - DNA, 201 bp, Homo sapiens
aaaaagtaaaatttggatagaatggaaagggttgggcttactgagtagtggagaatcagtgtgagcaaagctgtagaggtagtaagaaatatagtgggttkgtttggttagacagggactgtggtagaaaaccacagaacaaaaagttggaaaggaaagtggggcccaggctgagatatgtatacttgttgaaccaggcaa

SEQ ID NO: 414085 - DNA, 201 bp, Homo sapiens
ggaagagaaaaaatagacttcctgtataaaaagtaaaatttggatagaatggaaagggttgggcttactgagtagtggagaatcagtgtgagcaaagctgyagaggtagtaagaaatatagtgggttggtttggttagacagggactgtggtagaaaaccacagaacaaaaagttggaaaggaaagtggggcccaggctga

SEQ ID NO: 414086 - DNA, 201 bp, Homo sapiens
tctagatagtaagagttaaaggagtctctaaatggaaaaaagctctattgttgtttcatcttttggcattattgtacctgtggctcagcagatcccagagwataaggtcattatgtgtgaaaagatttaaaagtttgttcatttaaagctcaacatataccagtagtttggtgaagctaccaagttatgccaaatcttcaa

SEQ ID NO: 414087 - DNA, 201 bp, Homo sapiens
gtggcttgtcctatcagtcttttaacagtgtcttttgaagagcagaaagttgtaattttgacgaagtccagtttatcaatttgttttttaacagatcatgsttttggtattgtatctaataaatctttgcctaacccaggatcacacaaagatttctttctgtttctttctagaagttttgtagttttatgttttacattt

SEQ ID NO: 414088 - DNA, 201 bp, Homo sapiens
cattcacttatattttgtctacggatgcttttgtgctacaatggcagagttaagttgtgcaacagagactatatggctgacaaatcctaagttgtttactrtctggccatttacagaaaaatttgctgatacttaattatgatcctttctatcatggcacttagcacatagtgttttaattgcttgtctctcccacttttg

SEQ ID NO: 414089 - DNA, 201 bp, Homo sapiens
taggtctataattcattttgtattaatttttatatgtggtgtgaaatatggaacttacttctttattgtgcttacacgtggtcccaattgttctagaaccrtttttagaaatgctgttcttttcttcattgcattgccacacctctcatcttttgtcaaaaatcagttgtttaagctgagtgcagtagcatacactgtagt

SEQ ID NO: 414090 - DNA, 201 bp, Homo sapiens
tatgtggtgtgaaatatggaacttacttctttattgtgcttacacgtggtcccaattgttctagaaccgtttttagaaatgctgttcttttcttcattgcrttgccacacctctcatcttttgtcaaaaatcagttgtttaagctgagtgcagtagcatacactgtagtcccagctattcaggtggctgaggtggggtggg

SEQ ID NO: 414091 - DNA, 201 bp, Homo sapiens
aaagcctggtgggattttgaataggattgcattgaatctatagatgagtttgagagaactgacatcttcaaaatactgatgttctttcaacccataaacaragtacatctctccatttatttaagagatacactttctctgggtactattttttggtctttcacatttagaactttcacatcttttgtcagatttatcact

SEQ ID NO: 414092 - DNA, 201 bp, Homo sapiens
agtaaagggcaaattattgaagttattctacatatagtcactaaaaaagactgaatatagtcactctgctgggcatgggggaaggttctccagagttggcrtttttcttcattaggatactttttgaattctatcctattcctacccctttcgtcacccacctaaccctggcataggaatcttccaggttctgctgcttta

SEQ ID NO: 414093 - DNA, 201 bp, Homo sapiens
cctccgcctcccgggttcaagcaattctcctgcctcagcctcccgagtagctgggactacaggtgcacaccgccacacccagctaatttttgtatttttartagagacggggtttcaccatgttggccaggctggtctcgaactcctgacctcaggtgatccacatgcctcagcctcccaaagtgctgggattacaggaat

SEQ ID NO: 414094 - DNA, 201 bp, Homo sapiens
gtaaaatctagctctgccctccccatagctcatgttagctgcagtgggttcctattgctagctgcgtcctgccccagctgctcggctgcctatcttccccygacagtttggccttatcgtgcctacccattgtggcctccttgacatcccaacacacagcatctcctctagtactgttgctttcctcttcttcatacctct

SEQ ID NO: 414095 - DNA, 201 bp, Homo sapiens
gaatatagtcactctgctgggcatgggggaaggttctccagagttggcgtttttcttcattaggatactttttgaattctatcctattcctacccctttcstcacccacctaaccctggcataggaatcttccaggttctgctgctttatctccagagatagggagcttgctggtctcttgaggcagcccctttcttctct

SEQ ID NO: 414096 - DNA, 201 bp, Homo sapiens
atgactgtggtttctatgggccttgagctagctcagagccagacacacagcagagcagggagaatatatgctgagagttggagctgtcattttcctctttratgccatgactcatggcatgttggctggcacccccttgcctggcctcctccagctccctgcattgcccccccaggctgcacaaggcccaggaggagcacc

SEQ ID NO: 414097 - DNA, 201 bp, Homo sapiens
ttacaggcgcccgccaccacgcccggctaatttttttgtatttttagtagatatgggctttcaccatgttggccaggctggtctcaaactcctgaccttgygatccacctgcctcagcctcccaaagtgctgagattactagggtgagccactgcgcctggcctattattattattaatgttgagacaggttcttgctttg

SEQ ID NO: 414098 - DNA, 201 bp, Homo sapiens
gcattattaaagcacaactcatcagattacttctaccatgtgccaagccaagctgattacatataaagttttgtttaatccttaaccactctgtgaactargtgttattaactccattttagagatgataaaactataaatgagtggcttacttttgcttgtttaattaatctaaactctgctctgtcattcaatgctccc

SEQ ID NO: 414099 - DNA, 201 bp, Homo sapiens
gataagattactctcacttcagacatcagccataatttcaagctgttcccaggtcacctgcacttctgaccagctgactacaattcatgcattaccatggscttctcaggtttgataattaactaggactactcagagaattcaagaaagccctatacttatgattacaattttattataaaagttacaaatcaggaccag

SEQ ID NO: 414100 - DNA, 201 bp, Homo sapiens
atcagattagttctgctacttagttttaggcgttgttctcggcatcaatccctggtttttcacttctccttgtaagtctgagttactcttttgataagttstttttctcctcaaactagccaaaatcagctgggttgctaaatttgcaatctaagttgttcttgcaactaagaaccctgtggatatagcagctacaatagc

SEQ ID NO: 414101 - DNA, 201 bp, Homo sapiens
cagcagcatgagtcagaatttgcaggttaagaaagaagtaagagccttccataccgaaagaattctgagtggttcttgacctgggctgcagtctagcgtcmccacgtaaaagggagtatatggagcacctggacatatcatgcatgactggtgggagtataaagtgatatgcctactttagaaaacagtttggcagttact

SEQ ID NO: 414102 - DNA, 201 bp, Homo sapiens
tttgggaggccgaagtgggcggattacaagatcaggagttcgagaccagcctgaccaacatggtgaaacccctgtctctactaaaaaaaaaaaaaaaaaawtatccgggcgtggtggtgcctgcctataatcccagctactcaggaggctgaggcaggagaatcgcttgaatccaggaggcgaaggttgcaatgagctgag

SEQ ID NO: 414103 - DNA, 201 bp, Homo sapiens
actcatcatggactttgactctgaagagctgtgatgcaaagaagcagggtgcagtgatggtggtgcaggtagcaaattgagttcctggggcagcagggccrgttatattacagtggctagagatagtggaggttggcagtggaagcagaggcatcctgatcagattagttctgctacttagttttaggcgttgttctcggc

SEQ ID NO: 414104 - DNA, 201 bp, Homo sapiens
attaggtttagcagaagcatattctttttccctttttgctcctcccagcatggtgtaccagagactcagttcttctctagtgattcttaaactttatattyaagttctaatgagaaagaggtttttggctagtttgtttcaggaggttgaacactaaagaatttaaggcaaagcaaggatgttctattttaccctgtttgg

SEQ ID NO: 414105 - DNA, 201 bp, Homo sapiens
aatcagcaagactccctgggcgtatgaccctccgagccaggtgcgggatacaatctcctggtgcgctgttttttaagcccgtgggaaaagcgcagtattgrggtgggagtgacccgattttccaggtgccgtctgtcgtccctttctttgactaggaaagggaactccctgaccccttgcacttcccgagtgaggcaatgc

SEQ ID NO: 414106 - DNA, 201 bp, Homo sapiens
aaactttgcagtttcctccatggtaacattttggacaagctgtagtatatcatggccaggatattgacattgacattgataaaatccaccaatcttgttcrgatttcccagttttacttgtactcatctatgtgtataaagttctattccaacaccacaaagatccttcctattcttttataaccactcccgtctcctttc

SEQ ID NO: 414107 - DNA, 201 bp, Homo sapiens
tgggagaggcatgctgtgtgcaggataagagttggaatagttaaggaatattgaattaggattggtgattgattaaatgtggagagtgaaggagagtgagrtgtcaaggcttctgacataagcacctggaaaagtaggaaggttagggaaaaaatgaatttagaattggaacttaactagttcaagtgcctgagagacatc

SEQ ID NO: 414108 - DNA, 201 bp, Homo sapiens
attgagatgattatagatttacatggagtcctaagaaataatatggagagatcactggaaaactttgcagtttcctccatggtaacattttggacaagctrtagtatatcatggccaggatattgacattgacattgataaaatccaccaatcttgttcagatttcccagttttacttgtactcatctatgtgtataaagt

SEQ ID NO: 414109 - DNA, 201 bp, Homo sapiens
atatttggcctaggacaaagaaagtagcatactttgagattattcttagcatttctggccttttctatctgcctgccctgcttgttcttcgttggattctrggttcctaaaaataaccagaatatttttctgcctcttagttttccaagtgtcttaagcaatcagaagcattttaattttggctcctttaggctggccctg

SEQ ID NO: 414110 - DNA, 201 bp, Homo sapiens
cttctttctcaaactccacatctatattcttaattatctcctggcatgtccatctgagtatctccaagacacctcaaagtgctgtcatttacacctacacrttcgatctcgttagtaaccacacattctatctctgtagtaactctaatgcattttacagctgaggaagctgaggtctagataggggaagtgaattatata

SEQ ID NO: 414111 - DNA, 201 bp, Homo sapiens
taagagttgtccacagtcagcagtggtgatcttcttgctggtcttgccattcctggacccaaagtgctctatggcctccacaatattcatgccttctttcrccttgccaaagaccacatgcttgccatccaaccactcagtcttggcagtgcagatgaaaaactgggaactgtttgtgttgggtccagcatttgccatgga

SEQ ID NO: 414112 - DNA, 201 bp, Homo sapiens
gaggtgggcagatcacctgaggacaggagtttgagaacagcctggccaacatggcaaaaccctgtctctactaaaaaaatacaaaaattagccgggtgtgrtggcacatgactgtaatcctagctactcaggaggttgaggcataagaattgctgaaacctgggaggcagaggttgcagtgagccaagatcgtgccactgc

SEQ ID NO: 414113 - DNA, 201 bp, Homo sapiens
ccagaaaactggggaatggatgaagaaggtgatgtaacccaagatctataaattcttggatatctttgttatatgctcctcatccttttttttttttttttgttacatcctgctgagttgctttgtcaatgaggggaggaataaaatgttctttttagaggaatgttaccacaacaaaaagctcatcagcacaaactgttc

SEQ ID NO: 414114 - DNA, 201 bp, Homo sapiens
agcacattttctctcttttttaggaacttaagaccccaactgagttgtttagaggaaggggccttaggctggggccaaattctatgtcttctatgcagacktgagataatgtgaaatgttttccttttacagggtgtttcccctggcttttcagcattcttctcaattctttaattgccatttaaagatttgtatgctgtg

SEQ ID NO: 414115 - DNA, 201 bp, Homo sapiens
ctgaggtgcctggatgacacattttcagcttccttgtaaacttgtaagtcccataagggccaggctgatctggcatttggggtagtgttgagggtgggaargaaccatagacagttgccctcttccatttggatgtgcctcaggagagttcctgagaacctaccctatccttctttgtagtgctgcctgtgctgtgggcct

SEQ ID NO: 414116 - DNA, 201 bp, Homo sapiens
ggaggtaagaatggatatggtgtgtgatcgagttagtagccaaaccaggacttcaacctggtctgtctactccaatgagctgtgcagagaagcactaatgrccatataatacctagaccacttatagcaggcagtctcactatgcatagcctccatttcctgggcagagtggtctgaggtgcctggatgacacattttcag

SEQ ID NO: 414117 - DNA, 201 bp, Homo sapiens
gactgcctcccctacgaccctttcaaggagccatcctggaggacctaaactggaaaggttggttagcatttggagaaagagaaaaggggggatggcaagcmatgaatgaaggaacaggtcccacagagaatgtcaatctagggggagtggaggatacatggaagaagcagtggagtaaaattaaagaaacagagaagtttg

SEQ ID NO: 414118 - DNA, 201 bp, Homo sapiens
gagggctgggtgtggtggctcacgcctgtaatcccagcactttgggaggctgaggcgggtggatcacgaggtcaggagatcgagaccatcagggttaacasagtgaagccccgtctctattaaaattacaaaaaatcagccgggcgtggtggcgggcacctgtagtcccagctacttgggagtctgaggcaggagaatggc

SEQ ID NO: 414119 - DNA, 201 bp, Homo sapiens
tgctgcgactggactgtatgtaaggcagataccttgttcagcccgccactactggaccatatctgtacataaggcagttctcttgtccagcccaccaccaytggactctcttccgtgtatgtaagcccctaataaaaccctgtgtcttgtttgctggctctaggtctcttctttggcctcttaaacctgctgccttcccta

SEQ ID NO: 414120 - DNA, 201 bp, Homo sapiens
tctgcccatccccttttaggaggtaatgcaggcccaggtgtatatatatgagtagcctctggcctcatgggtgtctgtgctgcatcaggtcaagtggaaaygcttagcatttaggaggaagtaattccagtttgccctggatgggattgaaaaaaaacccaaacatgtatttgaccttcactatatgtaaggcactgtact

SEQ ID NO: 414121 - DNA, 201 bp, Homo sapiens
gtttcagtctgtcctcttgttactatggaaactggaatccacattgtttttaccccatgcagtggtgtgcctggttcctcagtgtttatattttcaaggcktttatcattgtgcacttagagccgctgtgattgggactgattgttgggaaccagccttactgattgaacccagaagggtataatcttagagggtccactg

SEQ ID NO: 414122 - DNA, 201 bp, Homo sapiens
ccaaagtgctgggattacagatgtgagccacaacgctcggctgctattctgttttttaaactcacttggcgtatctttattctgtggattttgtagtttakcccggggatgtgtgtgtgtgtgcgcgtgtgtgcatgtgtatgcatcttatagagccccagaatgctgacaggaatcccttcctggtgtcacaaggcagtc

SEQ ID NO: 414123 - DNA, 201 bp, Homo sapiens
ctggcggttcagatttggtcagttcacagttcactgagaatatttatctttgagcagactcatattaacctttatttatctttgagcagacttatattaarttcttataaaactacaatgccaatttttaagtctacctcaggaagtagaactgtcacatatactggatgccctatgttgttaatgacctgtacattttct

SEQ ID NO: 414124 - DNA, 201 bp, Homo sapiens
attttacagttttcattgtagagatcttttacctccttggttaaatttattcttaggtattttattattttttgtagctattgtaaatgggattttttttwatttctttttcagatttgtttactagctctaacagttttttggtggtgtctgtaggtttttctagatttaatatcatgttattggctgggcatggtggct

SEQ ID NO: 414125 - DNA, 201 bp, Homo sapiens
tgtttacttccactttcttgctcattagcaatattatttgtatatggttgataattgtatatggttggttaaaatctgggtcaacatttttttttttttttgagacagagtctcgctctgtagcccagtcacccaggctggagtgcagtggcgcaatcgcagctcactgcaacctctgcctcccgggttcaagtgattctc

SEQ ID NO: 414126 - DNA, 201 bp, Homo sapiens
tttacctccttggttaaatttattcttaggtattttattattttttgtagctattgtaaatgggattttttttaatttctttttcagatttgtttactagytctaacagttttttggtggtgtctgtaggtttttctagatttaatatcatgttattggctgggcatggtggctcacacttgtaattccagcactttggga

SEQ ID NO: 414127 - DNA, 201 bp, Homo sapiens
tcttgattgaaagcttttctataccattttggttgaaagctcctgagtcttcttttttccaggttaagtagccctacttcttgaagaaaacattttctcarcctccttcttgtcttgatttcctgcctataagcacttttgttaatgtgtttcttagatcctatagttggctgcagacctccaagtgtgattttatcatca

SEQ ID NO: 414128 - DNA, 201 bp, Homo sapiens
cctgagagactcctcccagctgtctctttccctagttatctccagcaaattctctagtctacagtttagcctatatctccaatgaatctgctaatcttttyctttcaccacaacttctactcttttgagagtaccctacccttagtcttgaaattctctacactctgtcacagatgaggtcatttcccctgggaagagatt

SEQ ID NO: 414129 - DNA, 201 bp, Homo sapiens
aaatccatacagtattctaagtatcttttgataattttgaatttttttgccaacttattgtttgaaccaattagattgttttcgtcctgtaatatagctcwcagagagctcatattaggtatagaagggtcagctttgttacttgctatttatttttgtttgtaattttaatattatctttaacctatgggggttgttttt

SEQ ID NO: 414130 - DNA, 201 bp, Homo sapiens; identical to SEQ ID NO: 109077

SEQ ID NO: 414131 - DNA, 201 bp, Homo sapiens
gtttcttctgactgatgagggtgggaattccatgctacaggtttttttttttttttttttttttttttccctgagtctgcttgctagggaaaccatgctasttttgatctgtcatggtttttcctatgcagttgtgaaggcttatcaggcagcaggagccctggtatacttttgcagtagaaaggaacacttttatgtttt

SEQ ID NO: 414132 - DNA, 201 bp, Homo sapiens
ctggcatggtggcatgcccctttagccctttctactcaggaggctaaggtgagaggattgcttgaacccaggagtttgaggctgcagtaagctatgattgygccagtgtactctagcctgagtagcagagcaagacccctgtttcttaaaaaaaaaattcacattccataaaacttattattttgaagtgtacaatttttt

SEQ ID NO: 414133 - DNA, 201 bp, Homo sapiens
gtttatagatgagttgtttctgagcataagcaagttcaaatgagggaatggctcagtgggcacctgctgatacaagtcagaaaaggaaatataggtcatgrtggctggggagtttcatggatggatccagaagctggctttggtggtagaccctttattgggcaatacccttttaagttccagatgttccaagaggtctgg

SEQ ID NO: 414134 - DNA, 201 bp, Homo sapiens
gggtttcaccatcttggccaggctggtctcgaactcctgacctcaggtgatccacctgcctctgcctcccaaagtgctgggattacaggtgtgagccaccrtgcccagcctgaaactgagttttttttttagaagccatgagtctttcaaatttaaatagtgactcatagagaacaggaagaagttgctttataatgtgtt

SEQ ID NO: 414135 - DNA, 201 bp, Homo sapiens
agtgtgtttccaatatttaaaactcaacaaaagtagaattctacttgaagtagatattgccaggagacttggacaggggagggaaggagaggaggagtctrtagagcataatttgaaaactgctagacagtttatccattaaatatttgcttgaggtgggatagtgcttgaatcctttctttgcatctttctgacatttta

SEQ ID NO: 414136 - DNA, 201 bp, Homo sapiens
aatatttactgtctgactctttacagaaaaagtttatctggcctctagtctaacctatcaattttaaaaaaacagctttttggagaaagaattcacatacygtgcaattcacccatttatatacaattcaatgggttttagtatattcacagatatgtgcaaccatcacctcagtcaattaaaaacatttttgtcacctca

SEQ ID NO: 414137 - DNA, 201 bp, Homo sapiens
aaaatgagatttgggaatgtaatagagaatcaaggcgaagactaagttttctgggagtttttaaaaagattctttcgtgactgtgattctcagaaaaggtytgaggcttactgactagatagttgattttcaattttttattcaaataattttgcatttgttgtgactctttcttttgcaggtgacggaaatacaattcag

SEQ ID NO: 414138 - DNA, 201 bp, Homo sapiens
cagggggtgtgagaaggaagctagcagtcattgaatgcctactatgtgccaagtactgtgttaagtgctttcacagatatttaatttttttttttttttttgagatagagtctcgctttgtcgcccaggctggagagcaatggcacgattttggctcactgcaaccttcacctcctgggtccaagcgattctcttacctca

SEQ ID NO: 414139 - DNA, 201 bp, Homo sapiens
gtctacctggggttttgtctttgactcagtcagggacttgtttttgcaaagaggtggttcatatagactgggatctgcaaaagagtttggagagaaacttyctatgcaactaggaactcttgcatcctttccagcctctctgtatccccagaacacaggaggagctttacttgctcttaaaactactacttttaaaaatca

SEQ ID NO: 414140 - DNA, 201 bp, Homo sapiens
ttttttttttttttgagacagggtctggctctgtcggccaggctggagtgcagtgacacgatcttggttcactgcaacctttacctcctgggttcaaacgwtcctcccacctcagcttctcaagtagctgggactacaggcgcatgccaccatgtctggataatttttgcattttttgtagagacaggattttgccatgtt

SEQ ID NO: 414141 - DNA, 201 bp, Homo sapiens
cgtgagccaccactcccagccagtaatgatttttaaatctttaaatcccaatagctatggaaaggtggtttggcaatgttttagtggctgttggctgaagyttctttcaataggggcattttagaagacatttcctcctcctcggatctgatccactgatgtgcatttgataggtttaggggcaactttgagagtaaggcc

SEQ ID NO: 414142 - DNA, 201 bp, Homo sapiens
cgaggtcaggagattgagaccatcctggctaacatggtgaaaccctgcctctactaaaaatacaaaaaattagccggacgtggtggcatgcacctgtagtyccagctacttgagaggctgaggcaggagaatcgcttcaacccgggaggcacggaggttgcaatgagtggagatcgcaccactgcactccagcctgggtga

SEQ ID NO: 414143 - DNA, 201 bp, Homo sapiens
gccaaggcaggcagatcacgaggtcaggagatcgagaccaccctggataacatggtgaaaccctgtctctactaaaaatacaagaaattagccgggtgtgktggcaggcacctgtagtcccagctactcgggaggctgaggcaggagaatggcgtgaacctgggaagtggagcttgcagtgagcagacatcacgccacctc

SEQ ID NO: 414144 - DNA, 201 bp, Homo sapiens
gtatttagattatctcctctgggagaggcatgctgtgtgcaggataagagttggaatagttaaggaatattgaattaggattggtgattgattaaatgtgragagtgaaggagagtgagatgtcaaggcttctgacataagcacctggaaaagtaggaaggttagggaaaaaatgaatttagaattggaacttaactagtt

SEQ ID NO: 414145 - DNA, 201 bp, Homo sapiens
caattctcctgtctcagcctcccgagtagctggaattacaggtgtgcaccgccacgcccggctgatttttgtatttttagtggagatggggtttcaccatrttggccaggatggtctcaatctcctgacctcgtgatccgcccgcctcggcctcccaaagtgctgggactacaggcgtgagctaccgcccctggcctgttt

SEQ ID NO: 414146 - DNA, 201 bp, Homo sapiens
tgacccaacagtgaaacacagcaccttccatggtgaggataagctcatcagcgtggaggacctgtggaaggcatggaagtcatcagaaggtaataggcagyctggtcatcaatcctagttgtgggaaggtttagagaagagagaagcagcaacttggccttagaagaacatgtatataaaatgcttagtaaagggcaaatt

SEQ ID NO: 414147 - DNA, 201 bp, Homo sapiens
agtatacaatttaattacagtaattacactcacagtattgtgcaactttcaccactattttaaaacatttttcatcatcccaaacagaaactttgtacttrttaagcaataactccccattcctccctcctgctagcctttgttaacttccagtctactttttgtcttcgtgaatttgcctattctagatatttaattaag

SEQ ID NO: 414148 - DNA, 201 bp, Homo sapiens
accttttgtatctggcttcttagaataatattttggagcttaatctacgttgtaacgtgtcggtactttctttttttattattttttttggtggtaaaatrtatataaccaaattttgtcattttattcattgataagtatacaatttaattacagtaattacactcacagtattgtgcaactttcaccactattttaaaa

SEQ ID NO: 414149 - DNA, 201 bp, Homo sapiens
gatactgttttctccttattttacagatagaaatgtaggcatagagaatttaagtaattggtccaaattgtgatacagagaagcacagggactataagagyacagaagagggactcctaatcaaaccccgggggtcagtatagagaaggctcctagagaaattagaaaaagcctgagtagaatcttgaaacctgagtatga

SEQ ID NO: 414150 - DNA, 201 bp, Homo sapiens
cctgagttttagcaggatgcatagctgctcagcttcctttgcaactaagtgtggccacatgtgtcagttctatctggggggtgaggatccaagtggaaatsttatgtgtaccacttctatatcatgtacttaaaaacagtatgtggtgcttctctttccctttttcccttcctgctagctggaatatggtgagatctacag

SEQ ID NO: 414151 - DNA, 201 bp, Homo sapiens
gcttctcccctcgctttctctattttgtccccctcctttttcttctaccttgcctgcctttctctttttcctctttctcttccctttccttgtacagcctmagttgtgctaggaggagtgggccccagccataggggaaggcctttctcatttattccattctcgaatccctgctctttttgagctgggggcctcatcttt

SEQ ID NO: 414152 - DNA, 201 bp, Homo sapiens
aaaagagtatggcagtttagggactctaggcagatgtttattgaaagccaaaagtatctggcgtatccatctgagcagagatgccagaggactggatgaarcctgacctgagtgaagtaagcagaggctttcctggacctcatcaaaaactaaggtccagctgggcatggtggcacctgcttgcagtcccagctactcagg

SEQ ID NO: 414153 - DNA, 201 bp, Homo sapiens
gtgtcactctcttatgccttcattacctgacactccagaccatagtaaatgataacatctgcaatgcgttaggatatatattcattttcaggaataatacrttctagtccatttaacttccatcagcattttttttttttttgagtcagggtcttgctctgtcacccaggctggagtacagtgttgcaatctcagctcact

SEQ ID NO: 414154 - DNA, 201 bp, Homo sapiens
tcttgtggtattatatggtcaataacatatgtaaagaagagtgaataatgaggtatggattagaatggcacccagagggaaatgagactggaatcagagcygttccgaggaaataatgaaaatatgagaactttccctagggtgagataagtctgtgggaaatgtgtatgaggtgacaaaatcattcccagggtgaaagaa

SEQ ID NO: 414155 - DNA, 201 bp, Homo sapiens
ggttgatttaaattgtgtgacggaaggatgaaggaggcagtgttaggtgactgggcattactgtgatgctgttaacacatggaatacaagagagagagccrgggaagttaatgctgctcttgagatggttatgggtgatatccatgagaaaatatctggtagttgggggagaagacatgagttttggagttcctgagagag

SEQ ID NO: 414156 - DNA, 201 bp, Homo sapiens
actgtagcttcctgggatggtgtgacttaactaatccctaaaactctgtttaagtttatatactgcagaagcttgggaggcatttagattggaaaatgacytgagtgaaaataggagtgagcagagagcagcgatccccaatctttttggcaccagggatcggtttcatgcaagataatttttccacagaccagggtgcgg

SEQ ID NO: 414157 - DNA, 201 bp, Homo sapiens
ccccaagaagcttgggaggtggaggttgtggtgagctgagattgcgccactgcactccaccatgggtgacagagccagaccccatctcaaaaaaaaaaaarggggtatgtttgtataatggaatcttatttagccattaaatggagttaagtgttgatagatgccacaacatggataaaccttgaaaacattatgctaagt

SEQ ID NO: 414158 - DNA, 201 bp, Homo sapiens
taattggtttctcctccttcttccactagttaggtgctcccttctatgaacatctctataatgggacaccattttttttgtttgtttgtttttgttttttgagacagagtttcactcttgttgcccaggctggagtgcaatggcatgatcttggctcactgcaacctctgcctcccgttcaagcagttctcctgcctcagc

SEQ ID NO: 414159 - DNA, 201 bp, Homo sapiens
tgggcaacataacaagaccccatctctttaaaaaaaaaaaaaaaaacccacacatttcagtgcaatgcctggaacaaaacaacaacaacaacaacaacaamaaaaaacaaatagaaacaaaaggaaaaagaaatttcatttgtccaccaaggcctagatcagggtttcggaacctcagcattattgatattttgggccaga

SEQ ID NO: 414160 - DNA, 201 bp, Homo sapiens
tgtacaacaggaattacaaactgtgcccctgaagggtcagagggcattgtaagtgagtaatgtgggctgtataaatgcatgtgcataagtctgtgagtggkgagagctgtgggaaaatggagagcccacacctcttcagaaggagcagctctggcagactgttgccatgtagtcatgtactccaagagcagttctaagaga

SEQ ID NO: 414161 - DNA, 201 bp, Homo sapiens
gcaacataacaagaccccatctctttaaaaaaaaaaaaaaaaacccacacatttcagtgcaatgcctggaacaaaacaacaacaacaacaacaacaaaaamaaacaaatagaaacaaaaggaaaaagaaatttcatttgtccaccaaggcctagatcagggtttcggaacctcagcattattgatattttgggccagatag

SEQ ID NO: 414162 - DNA, 201 bp, Homo sapiens
ccagtcaaaccatcagatggctattggccttttaaaacctaagagaccagagccatagccactcagttaagccacttccttgattcgtaaccctcagaaastgtatgaaataatgtttattgttttaagcaactaaattttgggggtaatttgttatgcaattatagatattaatatacattcctacaagcagaatatgag

SEQ ID NO: 414163 - DNA, 201 bp, Homo sapiens
agctgagggtcctgtctgttaggaggaaaactaacaaacagaaaggacatccacaccaaaaacccatctgtacatcaccatcatcaaagaccaaaagtagrtaaaaccacaaagatagggaaaaaacagagcagaaaaactggaaactctaaaaagcagagcgcctctcctcctccaaaggaacgcagttcctcaccagca

SEQ ID NO: 414164 - DNA, 201 bp, Homo sapiens
agttgagagaagaaggcttcagacaatcaaactactccaagctacaggaggaaattcaaaccaaaggcaaagaagttgaaaactttgaaaaaaatttagamgaatgtataactagaataaccaatacagagaagtgcttaaaggagctgatggagctgaaagccaaggctcgagaactacgtgaagaatgcagaagcctca

SEQ ID NO: 414165 - DNA, 201 bp, Homo sapiens
tataactagaataaccaatacagagaagtgcttaaaggagctgatggagctgaaagccaaggctcgagaactacgtgaagaatgcagaagcctcaggaccyaatgcgatcaactggaagaaagagtatcagtgacggaagatgaaatgaatgaaatgaagcgagaagggaagtttagagaaaaaagaataaaaagaaacga

SEQ ID NO: 414166 - DNA, 201 bp, Homo sapiens
aatgaaatgaagcgagaagggaagtttagagaaaaaagaataaaaagaaacgaacaaagcctccaagaaatgtgggactatatgaaaagaccaaatctgcrtctgattggtgtacctgaaagtgatggggagaatggaaccaagttggaaaacactctgcaggatattatccaggagaacttccccaatctagcaaggcag

SEQ ID NO: 414167 - DNA, 201 bp, Homo sapiens
aggaaatacagagaacgccacaaagatactcctcgagaagagcaactccaagacacataattgtcagattcaccaaagttgaaatgaaggaaaaaatgttmagggcagccagagagaaaggtcgggttaccttcaaagggaagcccatcagactaacagctgatctctcggcagaaactctacaagccagaagagagtggg

SEQ ID NO: 414168 - DNA, 201 bp, Homo sapiens
ggaagcactaaacatggaaaggcacaaccggtaccagccactgcaaaatcataccaaaatgtaaagaccattgagattaggaagaaactgcatcaactaaygagcaaaatcaccagctaacatcataatgacaggatcaaattcacacataacaatattaactttaaatgtaaatggactaaatgctccaattaaaagaca

SEQ ID NO: 414169 - DNA, 201 bp, Homo sapiens
aaaattgaccacatagttggaagtaaagcactcctcagcaaatgtaaaagatcagacattataacaaactgtctctcagaccacagtgcaatcaaactagmactcaggattaagaaactcactcagaactgctcaattacatggaaactgaacaacctgctcctgaatgactactgggtacataacgaaatgaaggcagaa

SEQ ID NO: 414170 - DNA, 201 bp, Homo sapiens
actagttcaaccattgtggaagtcagtgtggcgactcctcagggatctagaactagaaataccatttgacccagccatcccattactaggtatacacccaraggactataaatcatgctgctataaagacacatgcacgcgtatgtttattgtggcagtattcacaatagcaaagacttggaaccaacccaaatgtccaac

SEQ ID NO: 414171 - DNA, 201 bp, Homo sapiens
gcatgagccactgtgcctggcccagatttgaattttagaaaaattgtactcactgcttggtagaggatgagtttgaaagaaactagaacagagacagggcraatagtgaggaaactgttgtaacccaggcaagagatgtagaagcctgaactgctttggcatagaggtatcgccctcagaaatcagatcaggcttgtgcag

SEQ ID NO: 414172 - DNA, 201 bp, Homo sapiens
cagagagtaccataaaaagatcaaggagggcctaaattgtcaggctacttgattccatagggaataaatagtccttgcacgttttgacaaggggagagacmtgacctgagttttgctttagcaaggttaatctcacagaatatgcacagtacattggtaaaggtgagattggaggcaatgagcctagataggagactttgc

SEQ ID NO: 414173 - DNA, 201 bp, Homo sapiens
aagtattccagtcataggaaatgttatgagtaaaggtctggagtgggaaaaagtaaagagtctttggggggcagtagtttagattggctggagagtggtarctgtgccagagagtaccataaaaagatcaaggagggcctaaattgtcaggctacttgattccatagggaataaatagtccttgcacgttttgacaagggg

SEQ ID NO: 414174 - DNA, 201 bp, Homo sapiens
aataacttagtatcccttaataatatgttctaatttgagagattctttttgccctggaaatgcatacctttaaaatctgttttagaccttagatccatccrttattggtttatcattatattggatgaaatgttgtgcttttttttttgacttagctcaaaatattttatatttcctttttgacatctttagttcacaagt

SEQ ID NO: 414175 - DNA, 201 bp, Homo sapiens
agtatgcactagcaccgcctatagctcgcatttctgctgattggtcattaagtatttagattatctcctctgggagaggcatgctgtgtgcaggataagakttggaatagttaaggaatattgaattaggattggtgattgattaaatgtggagagtgaaggagagtgagatgtcaaggcttctgacataagcacctggaa

SEQ ID NO: 414176 - DNA, 201 bp, Homo sapiens
cctttgtggaggtcacaggcaaacagggcaggggagcaaggccttaattacttagggactcctggagcaaagccacttggcagtgtctcagcttcttggtrggactggctccttctcctagtgacagtgcaaatactccttccctttatagcttttaaacctccaagagattggtcttcttccttgagcttcaagacattt

SEQ ID NO: 414177 - DNA, 201 bp, Homo sapiens
tctagcctttgtggaggtcacaggcaaacagggcaggggagcaaggccttaattacttagggactcctggagcaaagccacttggcagtgtctcagcttcwtggtgggactggctccttctcctagtgacagtgcaaatactccttccctttatagcttttaaacctccaagagattggtcttcttccttgagcttcaaga

SEQ ID NO: 414178 - DNA, 201 bp, Homo sapiens
gggtcaacatttttttttttttttgagacagagtctcgctctgtagcccagtcacccaggctggagtgcagtggcgcaatcgcagctcactgcaacctctkcctcccgggttcaagtgattctcctgcctcagcctcccaagtagctgggattacaggcatgtgccaccatgcctggctaatatttttattttttgtagag

SEQ ID NO: 414179 - DNA, 201 bp, Homo sapiens
tgagactctgtctcaaaaaaaaaaaaaaaaaataggacatctgtgtccaggaatctttttatctccccaccacccctcaagcagtgctgggctgactgcaraaggctcttccctgttctgcacttgttccatttctgtttttgaaagatgaagcctgggaggtgccagagctatgccagctgctatggggccagaaacagg

SEQ ID NO: 414180 - DNA, 201 bp, Homo sapiens
gacgtggtggcatgcacctgtagtcccagctacttgagaggctgaggcaggagaatcgcttcaacccgggaggcacggaggttgcaatgagtggagatcgyaccactgcactccagcctgggtgacagagtgagactctgtctcaaaaaaaaaaaaaaaaaataggacatctgtgtccaggaatctttttatctccccacc

SEQ ID NO: 414181 - DNA, 201 bp, Homo sapiens
agggcagcatgcactgggtgagggcctctagggagagtaaagcaggatacattcttgtccttatacttccttccctgtttctgtacctgctcacttttgcyctgcaacaaataaacctttaagcatctgttctcagcctggccttgcactgggcaaaactggaaacatgggcattatgaaacctgggccatacatctagaa

SEQ ID NO: 414182 - DNA, 201 bp, Homo sapiens
gttcctctactcagtggtgaaactaagctttctggttgtctgttcccctatgtgttaaagggaataatacctatcttgtttaattttatgagggttaagtrataatgtatgtgaaagtcttttgtaaactatgaaatactattattgtcatacttagtgggtggctggagccaatttgctagcactgtaaggaagcttttg

SEQ ID NO: 414183 - DNA, 201 bp, Homo sapiens
atgacttctgcaaacttgtctcatttaatccttaccatacctgaaatgagggacattattaaccctaattttgagaggaaaataggctcagagaggcaaartagcttgcccaaaagtcacacagcaagtaagtagcctgtttctatgggttctgcctttctttctttcttttttttattattatatattttaagttctagg

SEQ ID NO: 414184 - DNA, 201 bp, Homo sapiens
tttacattaggtatttcttctaatgctatccctcccccagcccccagcccccaacaggccctggtgtatgatattcccctccctctgtctgtatgttctcrttgttcaactcccacttataagtgagaacatgtggtgtttggttttctgtccttgtgatattttgctgagaatgatggtttccagcttcatccaagtccc

SEQ ID NO: 414185 - DNA, 201 bp, Homo sapiens
acagtgtaaaagcattcctatttctccacatcctttccagcatctgttgtttcctgactttttaatgatctccattctaactggcgtgagatagtatctcrttgtgattttgattttgatttgcgtttctctgatggccagtgaagatgagcattttttcatgtgtctgttggctgcataaatgtcttcttttgagaagtg

SEQ ID NO: 414186 - DNA, 201 bp, Homo sapiens
tgaacttatttgaagtgctgggcaaggggctacactccacaggacttcaggaaccaaataattctttctatgcttatttcacattgctacattttacaaakgagttttctggggtccaaagaaatgaaatgatttgcctaaagtcatacagtaactccatggtggaatctaagtctgagaacccaagtctctttgcttttt

SEQ ID NO: 414187 - DNA, 201 bp, Homo sapiens
atattagccctttgtcagatggatagtgcaaaaattttctcccattctataggttgcccgttcgctctgctgatagtttcttttgctgtgcagaagctctktagtttaattagatcccatttgtctgttttggcttttgttgccattgcttttggtgctttagtcatgaagtctttgcccatgcctatgtcctgaatggta

SEQ ID NO: 414188 - DNA, 201 bp, Homo sapiens
cacacacacacaggttagaaagcagtgtgtgtctgtgtgtgtatttgttgctgggtggtcgaatttgtggaggtcttgtttcaagaaacttttgctgacaagagcaaaggtcactggaactcacacttcatatctctgaagagataaatatgtaattaagacaactgaaataacttcgatggtaagaatgatgatgacagc

SEQ ID NO: 414189 - DNA, 201 bp, Homo sapiens
catcgatgttcatcggggacactggcctaaaattcttttatttgttgtgtctctgccaggctttggtatcaggatgatgctggcctcataaaatgagttarggaggattccctctttttctattgattggaatagtttcagaaggaatggtaccagctcctctttgtacctgtggtagaatttggctgtgaatccatctgg

SEQ ID NO: 414190 - DNA, 201 bp, Homo sapiens
ctgctcagcttcctttgcaactaagtgtggccacatgtgtcagttctatctggggggtgaggatccaagtggaaatcttatgtgtaccacttctatatcaygtacttaaaaacagtatgtggtgcttctctttccctttttcccttcctgctagctggaatatggtgagatctacagcaccttttttggtcccagagatgg

SEQ ID NO: 414191 - DNA, 201 bp, Homo sapiens
agtttggctggatatgaaattctgggttgaaaattctttaagaatgttgaatattggcccccactctcttctggcttgtagggtttctgccaagagatccrctgttagtctgatgggcttccctttgtgggtaacccgacctctctctctggctgcccttaacattttttccttcatttccaccttggtgaatctgacaat

SEQ ID NO: 414192 - DNA, 201 bp, Homo sapiens
ttttgttgatgttgatgctattcctttctgtttgttaattttccttctaacagacaggcccctcagctgcatgtctgttggagttggcgggaggtccactscagaccctgtttgcctgggtatcaccagtggaggctgcagaacagcaaatgttgctgcctgatccttcctctggaagctttgtcccagagggtcacccgc

SEQ ID NO: 414193 - DNA, 201 bp, Homo sapiens
tccagcccctacaggatcatatgaggttagaggagtggcagttctttaaaggaagggtggctgggtagttttgtagaatccttgagaaatagaattactgyttgcatatttgagccattggaaacaataacagtgtcatttttggagaagaatgatgggaggcactgacctaagggaattctcctctaaccatggctttca

SEQ ID NO: 414194 - DNA, 201 bp, Homo sapiens
ggaggcagtctgtccattatcggagctcaaacgctgtgctgggacaaccactgctctcttcagagctgtcaggcagggacgtttaagtctgcagaagctgwctgctgccttttgttcagatatgccctgcccccagagatggaatctagagaggcagtaggccttgctgaggtgcaatgggctccgcccagtttgagctcc

SEQ ID NO: 414195 - DNA, 201 bp, Homo sapiens
tagagaggcagtaggccttgctgaggtgcaatgggctccgcccagtttgagctccttgccactttatttacactgtgagcatagaactgcctactcaagcstcagcaatggtggatgcccctccccccaccaagctccagtgtcccgggtcgatctcagactgctgtgctagcagcaaggaaggctctgtgtgtgtgggac

SEQ ID NO: 414196 - DNA, 201 bp, Homo sapiens
gagaggcctgctggtctaggtttgcatgatcaatcacaagctaccttcctgagagagaaagtaccaaaatgtgtgtgcctaagtcacttcaaacatgtatmagatagccttagagttcaggatctaactagaaagttgggtagatatctcagggtttagaatgttgtgtaatggatggtggggtaccagaaaccctggttc

SEQ ID NO: 414197 - DNA, 201 bp, Homo sapiens
agcaatggtggatgcccctccccccaccaagctccagtgtcccgggtcgatctcagactgctgtgctagcagcaaggaaggctctgtgtgtgtgggacccrccgagccaggcacaggagggaatctcctggatctgccagttgcgaagaccgtgggaaaagtgcggtatttgggcagcagtgcactgttccaccaggtaga

SEQ ID NO: 414198 - DNA, 201 bp, Homo sapiens
gggagatcatttttctgggcgcatggaactaaatatacttactgacagctggtagcttggctctttgtagaactattgagctgtatagttctagccaatgytgcattccccatggtaaggcaggactcttggggagcctccttaggtattcctgagagaagagctgcttgttctaagtctgaaatagtaaatccctttggt

SEQ ID NO: 414199 - DNA, 201 bp, Homo sapiens
agttaagtgaggttctgcctttttcagggcagcgtctatagatcttgcctcttctcacatctgttgtgcacttgctataaagtatgatgggcgctttgtawccactctcttctttaatattcctgtcagtcctgggaatagtactgatagctgccatttactgagtgcttagtacatgccaggcattctactcaacactgt

SEQ ID NO: 414200 - DNA, 201 bp, Homo sapiens
ctctcctgacctacagaaggaatggtctggtggctaagataaaacacaagtcaaacttattaagagttgtccacagtcagcagtggtgatcttcttgctgktcttgccattcctggacccaaagtgctctatggcctccacaatattcatgccttctttcgccttgccaaagaccacatgcttgccatccaaccactcagt

SEQ ID NO: 414201 - DNA, 201 bp, Homo sapiens
tacaggtccttttttacttcctttttatgttaaagcaggtgaacttctgctctagatttgtgtgttaaggagctgtgggaactggcagttagtaccccacwttctggttccatgaagtcatttgcttgcatttacggagccccttgctgtatgctatgagataatggcattctgaggctggaggtgccaggattttgagag

SEQ ID NO: 414202 - DNA, 201 bp, Homo sapiens
ccgtgggaaccctagtcccacccttcccttaggtagtcttgtctctttgctgtgcgcatttgaaatatccaggtggtttcttagatggaatcctatttacmactagggtgttaaatggccttttcttgacatagacatgatataattcctgggaccacttgttgacttattctgtttcttctgactgatgagggtgggaat

SEQ ID NO: 414203 - DNA, 201 bp, Homo sapiens
ctttgtttacaaaaacaaggtgtttgggctagatttggcctgagggcctcagtttgctgatcccttgtctagcagagtgtctaaggacaaaatagaaattyggtaaatgtttgttgaattgtagacaaagaccttgatttcagaaatctcttcttgattttctagcagtggggcagcttgtatctccatggtagggctgta

SEQ ID NO: 414204 - DNA, 201 bp, Homo sapiens
gcaggagatacaggtccttttttacttcctttttatgttaaagcaggtgaacttctgctctagatttgtgtgttaaggagctgtgggaactggcagttagyaccccacattctggttccatgaagtcatttgcttgcatttacggagccccttgctgtatgctatgagataatggcattctgaggctggaggtgccaggat

SEQ ID NO: 414205 - DNA, 201 bp, Homo sapiens
ttctattggaattgccactaaaactgacctgggcacttcatcttcaatttcccatccttttaggacccctggtgggaggtttctgggaggaggtgccccaytctccagattggcattagaggcccagggtggtctccagcaagcatttattcatgggcacctccttacctgccagcccaaagtgggctggcccctcctgac

SEQ ID NO: 414206 - DNA, 201 bp, Homo sapiens
tcagggggcagtataggaaatgtgagggtgggtggtcagtttaatattataacccaggttttaagtagagaggctgtatagtttggaacattgccatatastctttttttttgaatttttgagacagagtctccctctgttgcccaggctagtgtgcagtggtgtgctttctgctcactgcagcctccacctcccagattc

SEQ ID NO: 414207 - DNA, 201 bp, Homo sapiens
caggtgtgcctattccaacaaccgtgggaaccctagtcccacccttcccttaggtagtcttgtctctttgctgtgcgcatttgaaatatccaggtggtttyttagatggaatcctatttaccactagggtgttaaatggccttttcttgacatagacatgatataattcctgggaccacttgttgacttattctgtttctt

SEQ ID NO: 414208 - DNA, 201 bp, Homo sapiens
catgtacttgttggttagttgtatatcttctttggagaaatgtctaagttctttgtctattttttaaaactaagttgtttgtttttttgttattgtaagakttctttatatattctggatactagacatttatcttttttaaaaacattttggggcaaacctttcttgacttaaaaatcacccactagcctttaaatatac

SEQ ID NO: 414209 - DNA, 201 bp, Homo sapiens
agttgaaatctaggtttgtacatgtgaggttcatggaggattcacacatggcactgcctgttccaagtagttcaagaagttctttctggtcagtagtcatsgcaaatgcctgtatctttcctgaacaactttcctcatcccccgcactcaggattttttttgttggcagtaagaagaagcctttggggcaacttgaccttt

SEQ ID NO: 414210 - DNA, 201 bp, Homo sapiens
aatgatattgatcatcttttcatgtacttgttggttagttgtatatcttctttggagaaatgtctaagttctttgtctattttttaaaactaagttgtttgtttttttgttattgtaagagttctttatatattctggatactagacatttatcttttttaaaaacattttggggcaaacctttcttgacttaaaaatcac

SEQ ID NO: 414211 - DNA, 201 bp, Homo sapiens
tggataacatggtgaaaccccgtctttactaaaatacaaaaaattagccaggtgtggtggcgggtgcctgtaatcctagctactcaggaggctgaggcagkagaatcacttttcactcaggaggcggaggttgcagtgagccgagatcgcaccactgcactccagcctggcgacagagcaagactctgtctcaaagaaaaa

SEQ ID NO: 414212 - DNA, 201 bp, Homo sapiens
aaaaaaggtcttatttggccgggtgcggtggctcatgcctgtaattccagcactttgggaggccgaggcgggcggattacgaggtcaggagatcgagatcwtcctggataacatggtgaaaccccgtctttactaaaatacaaaaaattagccaggtgtggtggcgggtgcctgtaatcctagctactcaggaggctgagg

SEQ ID NO: 414213 - DNA, 201 bp, Homo sapiens; identical to SEQ ID NO: 109139

SEQ ID NO: 414214 - DNA, 201 bp, Homo sapiens
tttgattaaggattggcatgggtgagtcatttcccatagtctgagggatgtgggatataaagaatgaattgttatctccgatgatatcttgaatatcacayattataggccaaatataggtgctaaaccatttggcttgaattctttatagaaaattcactgggaacccaatgataaaatagagaaagacggataacctaa

SEQ ID NO: 414215 - DNA, 201 bp, Homo sapiens
gagcatgatcgtaggcaagggcccatcaatgaaggtgttgaggatatagcattgtcctgctttggctcaaggggacttttcctgcctttgattaaggattrgcatgggtgagtcatttcccatagtctgagggatgtgggatataaagaatgaattgttatctccgatgatatcttgaatatcacacattataggccaaat

SEQ ID NO: 414216 - DNA, 201 bp, Homo sapiens
cccctgggctcaagtgatctgcctgccttggcctcccaaagtttgggattacaggcatgacccatagtgctctgccaaacatacataatttgagtttgctragaactattggtttaacacaattgtagataattataattttcttttctgattggaagtcttctcccggtacttcagctcacaaaggtggacacattccag

SEQ ID NO: 414217 - DNA, 201 bp, Homo sapiens
aacaccagttatctactctggcaatgtccatatcatcctcagaatttgagggcatacagggcctccaacaccaattccatttcctcattggtggagggacmgctctggtctcctgcctcagcctttatttatctcctgccttgctcttaagtttgagtttattgtgtgttttattcacacatattctcaaaacttgttcct

SEQ ID NO: 414218 - DNA, 201 bp, Homo sapiens
tatctctgtgctttgttacttagcaaaattacttaacatttcaaggttggagtttctttgtctataaaatgggtacaagagtccctgccctggtattgtgkgagtgttgtaaggattcagtgagttaatggacattgaaagtgctttgttgtatggtgaacagcatgatgtttggctttccctttcccaagttgagaggat

SEQ ID NO: 414219 - DNA, 201 bp, Homo sapiens
aaagtgcggtatttgggcagcagtgcactgttccaccaggtagagtcactcacggcttccctttggctaggaaagggaaatcccctgaccccttgcacttsccaggtaaggcaatgccccaccctgctttggcttgtcctccatgggctgcacccactgtccaaccagtcccaatgagatgaaccaggtacctcagttggg

SEQ ID NO: 414220 - DNA, 201 bp, Homo sapiens
ctgggaggtggaggttgcggtgagccaggtttgtgcccctgcactccagcctgggcaataagaatgaaactctgtctcaaaaaaaaaaaaaaaaaaaggcwtaaaagggggatctgtgttctggaaccctgtggcttctttgagttcatctcctgctggttaccaccttactcatttctctccaacgatactggccttctt

SEQ ID NO: 414221 - DNA, 201 bp, Homo sapiens
tcacaatattatattatgttcaccgaaattggtctgggtacaattagggatatacaaagtcaaatgtcaagtgctgcttctttggacctatccagctagaragcttttttattaggcacagaaaaagaagcccagcaatatctgtttcctatggtgcctaatatatgcaccctataccactctcttgacaatatctgttca

SEQ ID NO: 414222 - DNA, 201 bp, Homo sapiens
actactcttggcatctcctattcctcttccctgctgtttttttctttatttaaattatattttatttaaaaacatttttaaaattttattttatttgtaaytgatacataacagttgtacatattggccaggcatggtggctgacgcctgtaatccgagcactttgggaggctgaggcaggaggattgcttgagctcagga

SEQ ID NO: 414223 - DNA, 201 bp, Homo sapiens
ctgaggcaggaggattgcttgagctcaggagtttgagaccagcttgggaaacatagtgagacaccgtgtgtacaaaaaatttaaaaaaatagctcggtacsgtggtgcacacccatagtccaagttacttgggaagctgaggcaggaggatcacccagcctgggtgacagagcgagacactgtctcaaaaacaacaacaac

SEQ ID NO: 414224 - DNA, 201 bp, Homo sapiens
atgctgttgtgtaaatatacgacattttctttaaacattcatttgctgatgggccctgaggttgattctatatcttggctattgtgaatagtgctgcaatmaacatggaagtgaagatgtctcttcaacatgctgatttcatttcctttggatgtgtaccgaatagtgggatttctggatcatatggtagttctatttttc

SEQ ID NO: 414225 - DNA, 201 bp, Homo sapiens
atacttctgtgaatatactaaaaactatggggttttatactacaattagtatgtgaattaaatctcaataaatatgttttttaaaaaagtgtcaccgcatyggttggagtggtggtcacctttcgcttgcctttctgtagcccagcccataacaatccttagggccctgtagaaaagcactttgaaagtcatgttgatttc

SEQ ID NO: 414226 - DNA, 201 bp, Homo sapiens
gtgatctacccgcctcagcctcctaaaatgctgggattacaggcgtgagccactgtgcctggtgaatatttctttttttttctttctttttcttttctttytttttttcgaggtggagtcttgctctgctgcccaggctggagtgcagtggaatgttctcggctcactgcaacctctgccttccaagttcaagagattctc

SEQ ID NO: 414227 - DNA, 201 bp, Homo sapiens; identical to SEQ ID NO: 109154

SEQ ID NO: 414228 - DNA, 201 bp, Homo sapiens
tggctagccagttttcccagcaccatttattaaatagggaatcctttccccattgcttgtttttctcaggtttgtcaaagatcagatagttgtagatatgyggcgttatttctgagggctctgttctgttccattgatctatatctctgttttggtaccagtaccatgctattttggttactgtagccttgtagtatagtt

SEQ ID NO: 414229 - DNA, 201 bp, Homo sapiens
cagcctggagtgcagtggcatgctcatagcttactgcagcctcaaactcctgggctcaagcaatcttccaactacagcctcctgagtagctgggactacakgtgcacgccactatgcccagttaatttttgtattttttgtagagacggggtttcgccatgttacccaggctggtctcaaaactcctgggctcaagcaatc

SEQ ID NO: 414230 - DNA, 201 bp, Homo sapiens; identical to SEQ ID NO: 109163

SEQ ID NO: 414231 - DNA, 201 bp, Homo sapiens
aacacatattttatatgttatatgtattatatactgtattcttacaataaagtaagagaagaggaaatgttattaagataatcataaggaagagaaaatakatttactgtttattaagtggaagtggatcatcataaaggttttcatcctcatcttcacattgagtgggctgaggaggaggaggaagaagagagattagtc

SEQ ID NO: 414232 - DNA, 201 bp, Homo sapiens
tcttttgtattaaaatatttaaatttgagatatattattgttatgaagtacattatgtcctaaaattccaggaaaatacagttgagccttaacaacacagrggttaggggtgctgactgtcccttttcccccatgtagtcagaaatccacttgcaacttttgactccctcaaaattgaactattaatagcttgttgaccag

SEQ ID NO: 414233 - DNA, 201 bp, Homo sapiens
aactcctcatcttttagtacatagctccagtgtcaccactttttaagctttctctgtcctccttgcctgtaggcaggcagtctattctactgttactctcytatcatactttatatgtctcagttatcttgctgcattgtggttgctttgtatgtgattgccacacaagattggaagttttttaaagacagaaacactgct

SEQ ID NO: 414234 - DNA, 201 bp, Homo sapiens
taagagttctttatatattctggatactagacatttatcttttttaaaaacattttggggcaaacctttcttgacttaaaaatcacccactagcctttaamtatacctagctctttcatgtctcagcctgtgctcatgcttttctctttgtctagaatatccttcttttctctggtggttgaaattataattgttcctcaa

SEQ ID NO: 414235 - DNA, 201 bp, Homo sapiens
atcttcaccaaagtttgttattttttttattataaccattcttgtggatatgaaatagtgcctcactgtggttatgaaatagtacctcattgtggttttgmcatgcatttctctaatctctaatgatattgatcatcttttcatgtacttgttggttagttgtatatcttctttggagaaatgtctaagttctttgtctat

SEQ ID NO: 414236 - DNA, 201 bp, Homo sapiens
tagagaagagagaagcagcaacttggccttagaagaacatgtatataaaatgcttagtaaagggcaaattattgaagttattctacatatagtcactaaawaagactgaatatagtcactctgctgggcatgggggaaggttctccagagttggcgtttttcttcattaggatactttttgaattctatcctattcctacc

SEQ ID NO: 414237 - DNA, 201 bp, Homo sapiens
tcctgggttgaagtgattctcctgcctgtagctgggattgcaggcatgtactaccacacctggctaatttttgtatttttactagagacggggttcgccaygttggccaagctggtctcgaactcctgacctcaggtgatccacctgccttagcctcccaaagtgctgggattacagatgtgagccacggcgcccggcctt

SEQ ID NO: 414238 - DNA, 201 bp, Homo sapiens; identical to SEQ ID NO: 109174

SEQ ID NO: 414239 - DNA, 201 bp, Homo sapiens
gtctctccatataccctgttgagacccaactggtatagactctgtgttctagagtgcagaggggagcaatcaccaagagctagaagtgttcctgggggagscgggtaatcctaccaggatccttcctggctttactgggagggaactgatctgctactctttgcctcaacaggctggctgtcaccaacaccaccatgacag

SEQ ID NO: 414240 - DNA, 201 bp, Homo sapiens
atatacatgcataccttgttttattgtgctttgccttactgcacttggcagataattgcattttttacaagttgaaggtttgtggcaatcctgtgttgatsaagctgttggtaccatatttccaaaagcatgtgctcacttttgagtctctgtgtcggaatttttaagcaataagttatttttaaattaaggcacgcacac

SEQ ID NO: 414241 - DNA, 201 bp, Homo sapiens
attaggattaatgttgaactaagaagcattagattattatgaatggtcagaacacactctcatggagatccaggaagcaggacaggatgtgtggtgctggscacttttgtgttgtggcaatggcatgagtttgcaagcagtcaggccagagtttgaaatctggctttgctgttgtttgctggcctcatgacccttagtaaa

SEQ ID NO: 414242 - DNA, 201 bp, Homo sapiens
ggtctttaatagcatgtcctgttgggccctgggagacctggtttttgcctggtagcctagtgagcctatcacatgaggcctaggccagattatttttgcartgatggttcagggtttgataatgacatcagattagaaaatgaagacctttacctcactgtagtcccagatgagaagctgctagtgggaaccagaaggaag

SEQ ID NO: 414243 - DNA, 201 bp, Homo sapiens
cctctttttttttttgagacggagtctcgccctgtcacccaggctggagtgcagtggcgtgatcttggctcactgcaacctccgcctcccgggttcaagcrattctcctgcctcagcctcccgagtagctgggactacaggtgcacaccgccacacccagctaatttttgtatttttagtagagacggggtttcaccatgt

SEQ ID NO: 414244 - DNA, 201 bp, Homo sapiens
ggattacaggcgtgagccaccacgcctggccacacacgtatatatttgagacaatgcatgtgtgtgtgtgtgtgtgtgtgtgtgtgtgtgtgtgtgtgtgkatgtatttgagacagggtctcactctgtcacctaggctggattgcagtggtgtgatcatggctcactgttgcctcgaccttcctgggctcaggtgatcct

SEQ ID NO: 414245 - DNA, 201 bp, Homo sapiens
cggatcacgaggtcaggagattgagaccatcctggccaacatggtgaaaccctgtctctactaaaaatacaaaaattagctgggcgtggtggcacgtgccygtaatcccagctactcgggaggctgaggcaggagaatcgcttgaacctgggaggcggaggttgcagtgagctgagattgtaccattgcactccagcctag

SEQ ID NO: 414246 - DNA, 201 bp, Homo sapiens
gcagtgggttcctattgctagctgcgtcctgccccagctgctcggctgcctatcttcccccgacagtttggccttatcgtgcctacccattgtggcctccytgacatcccaacacacagcatctcctctagtactgttgctttcctcttcttcatacctctttttttttttgagacggagtctcgccctgtcacccaggct

SEQ ID NO: 414247 - DNA, 201 bp, Homo sapiens
aaccctgtctctactaaaaatacaaaaattagctgggcgtggtggcacgtgcctgtaatcccagctactcgggaggctgaggcaggagaatcgcttgaacvtgggaggcggaggttgcagtgagctgagattgtaccattgcactccagcctagcgacatagtagactccgcctcaaaaaaaaagaaaaaaaagataggag

SEQ ID NO: 414248 - DNA, 201 bp, Homo sapiens
attgttttgtatttttagtagagacagggtttcaccttgttagccaggatggtcttgatcccctgacttcgtgatctgcctgcctcggcctcccaaagtgygggattacaggcgtgagccaccgcgcctggcctctattttttaccgtaatttagaagtaatgatgagtgtaaataatactttgagatatctgtagcaatg

SEQ ID NO: 414249 - DNA, 201 bp, Homo sapiens
gctggagtgcagtggcccgatctcagctcactgcaagctccacctcccaggttcatgccattctcctgcctcagcctcccaagtggctgggactacaggcrtccgccaccacgcctggctaattgttttgtatttttagtagagacagggtttcaccttgttagccaggatggtcttgatcccctgacttcgtgatctgcc

SEQ ID NO: 414250 - DNA, 201 bp, Homo sapiens
gcatcttctctgggattctgttcaggtaggagaattggagatcacttatgctggtagcttggatgagacagcaagaaactcagtgtacataatgtctgtaygtactttcaagtcttttacactttagtgctttgtgactgcctcattgtgtgctccctgcagagaagtcggttatttctacttatacattggtcctctcat

SEQ ID NO: 414251 - DNA, 201 bp, Homo sapiens
tgaggccctcctggcctatcttagctgtggagaggacctcaggcttgctatgggatgtttacctcattggctgaagctggggataataagactgctttcartgcatcttctctgggattctgttcaggtaggagaattggagatcacttatgctggtagcttggatgagacagcaagaaactcagtgtacataatgtctgt

SEQ ID NO: 414252 - DNA, 201 bp, Homo sapiens
aaacatcagtttgacctctgggttcttttgtattaaaatatttaaatttgagatatattattgttatgaagtacattatgtcctaaaattccaggaaaatrcagttgagccttaacaacacaggggttaggggtgctgactgtcccttttcccccatgtagtcagaaatccacttgcaacttttgactccctcaaaattga

SEQ ID NO: 414253 - DNA, 201 bp, Homo sapiens
aaactctgattttcatcattttggtggtgaaaaaaatgaggcacaaaatattaagtaatttgcccatggtcttacatctagtaagtggcagattgcaaatycaaatcaagacacctggtttcaaagttcacattcttctttttttttttgagatgggatctttgctatcactcagggtggagtggtgcaatcttggctcac

SEQ ID NO: 414254 - DNA, 201 bp, Homo sapiens
ctgtgaattatatcttaataataaatatatacatgcataccttgttttattgtgctttgccttactgcacttggcagataattgcattttttacaagttgraggtttgtggcaatcctgtgttgatcaagctgttggtaccatatttccaaaagcatgtgctcacttttgagtctctgtgtcggaatttttaagcaataag

SEQ ID NO: 414255 - DNA, 201 bp, Homo sapiens
caaatccatagagacagaaaatagattagtggtttctggggctgggggtgggggcagtgggaaataggaagtgactgctaatagatatggcatttcttttyggggtaatgataatattctaacattaattttgccagtggttgcacaaccttgtgaatatagtacaatcattgaattgcccattttaagagagagacttag

SEQ ID NO: 414256 - DNA, 201 bp, Homo sapiens
taagcaaaagggagaatgtacttcttgcacaaaactgaaatatctatgaataggactttctacaggcattatctgactcagggcttaaattatatcagctkgattttttttttttttttttgagacaggctctcactctgttgcccaagctggagtgcaatggcatgatcgcggcttattgcaacctcgacctccgaggct

SEQ ID NO: 414257 - DNA, 201 bp, Homo sapiens
ggaactatgaaagggtgtcagtcttgattctactttaaaggagctcgctattattataaaggacagacatatcatagtattggcttttctcaagaggctgytttcataaaaggacagtatttcagtgaagaagtgaatccttaatggtgtaactttatatagttgggtcatggaagagtacagtaaaggaggatattcagc

SEQ ID NO: 414258 - DNA, 201 bp, Homo sapiens
ctctactaaaaatacaaaaattagctgggcgtggtggcacgtgcctgtaatcccagctactcgggaggctgaggcaggagaatcgcttgaacctgggaggyggaggttgcagtgagctgagattgtaccattgcactccagcctagcgacatagtagactccgcctcaaaaaaaaagaaaaaaaagataggagttaagtca

SEQ ID NO: 414259 - DNA, 201 bp, Homo sapiens
agttcctctactcagtggtgaaactaagctttctggttgtctgttcccctatgtgttaaagggaataatacctatcttgtttaattttatgagggttaagtaataatgtatgtgaaagtcttttgtaaactatgaaatactattattgtcatacttagtgggtggctggagccaatttgctagcactgtaaggaagctttt

SEQ ID NO: 414260 - DNA, 201 bp, Homo sapiens
ttatttccatgggctgggcttctagggagcaagaggggtctgatctctaagctgattcctggctactttgctgggccccttgttcttgggccctttgccarttaggagctaactgctgctgtctgagcagtccccatacctcatttgtttgaaaaacatgtactgtttccattccaaaggcaaaagaatctaggcaggaga

SEQ ID NO: 414261 - DNA, 201 bp, Homo sapiens
ttagaaaacattcagtctttcaccataaaatataatgttgggccagatgcggtggcttatgcctgtaatcccagcactttgggaggctgaggtgggtggawcacgaggtcaggagtttgagaccagcctggccaacattgtgaaacctcatctctactaaaaatacaaaaattagctggttgtggtggcgggcgcctgtaa

SEQ ID NO: 414262 - DNA, 201 bp, Homo sapiens
cactccagcctgggcaacaagagcaaagctccatttcaaaaaaaaaaaaaaaaaaattaaaaacttttttttttttgtggagatggatttgcccaggctgktcttgaactcttggcctgaagcgatcctcgcacctcggcctcccaaagtgctaggattacaggtgtgagctactgtgtctggccatgtgtttacctctga

SEQ ID NO: 414263 - DNA, 201 bp, Homo sapiens
gtattcatgctatcctgttctagagtctctggatttcacagtagcctagaaatgttctccatagattgagacttctggacctttccctgatctgtgccaaraatggcctggtagtccaggatacctagttcctacagtgacttcagtcctacagccagaactgaggcttctggtgacattgctttatatcctttataccag

SEQ ID NO: 414264 - DNA, 201 bp, Homo sapiens
aggagttcaaggctgcagtgagctgtgaccatgccactgcactcaagcctcggtggcagagcaagacctgtctctcttttttttttttttttgagatggartctcactctgtcacccaggctggagtgccatggcgtgatctcagctcactgcaacctccgcctcccaggttcgagtgattcttctgcctcagcctcccaa

SEQ ID NO: 414265 - DNA, 201 bp, Homo sapiens
gacagaacaccgagtgaccatatcctatcagctactcttttttttttttttttttttttgagatgaagtcttgctctgtcgccaggctggagtgcagtggygcgatctcggctcactgcaacctctgcctcctgggttcaagcgattctcccacctcagcctcccaagtagctgggattacaggcgcctgccaccactccc

SEQ ID NO: 414266 - DNA, 201 bp, Homo sapiens
gtttaaacacaatacagatataaaaattattattattattattaattttttttttgagacagagtctcgctctgtcgcccaggctggagtgcagtggcacratctcagctcgctgcaacctccacctcccgagttcaagcaattctcctaccttagcctcctgagtagctgagattataggtgcccgccaccacgcccagt

SEQ ID NO: 414267 - DNA, 201 bp, Homo sapiens
acacacacacacaggttagaaagcagtgtgtgtctgtgtgtgtatttgttgctgggtggtcgaatttgtggaggtcttgtttcaagaaacttttgctgacaagagcaaaggtcactggaactcacacttcatatctctgaagagataaatatgtaattaagacaactgaaataacttcgatggtaagaatgatgatgacag

SEQ ID NO: 414268 - DNA, 201 bp, Homo sapiens
gagattataggtgcccgccaccacgcccagttaatttttgttcttttagtagagatggggtttcaccatgttggccaggctggtcttgaactcctgacctyaggtgatctgcccgcctcggcctcccaaagtgctgggattacaggcgtaagccactgcacctggcctataaattattttaaaagggtactttttatgact

SEQ ID NO: 414269 - DNA, 201 bp, Homo sapiens
aaatacagcagccaggggagatgggtggccttcaggtgtaacacacacacacaggttagaaagcagtgtgtgtctgtgtgtgtatttgttgctgggtggtygaatttgtggaggtcttgtttcaagaaacttttgctgacaagagcaaaggtcactggaactcacacttcatatctctgaagagataaatatgtaattaag

SEQ ID NO: 414270 - DNA, 201 bp, Homo sapiens
caccacgcccagttaatttttgttcttttagtagagatggggtttcaccatgttggccaggctggtcttgaactcctgacctcaggtgatctgcccgcctmggcctcccaaagtgctgggattacaggcgtaagccactgcacctggcctataaattattttaaaagggtactttttatgactattcattaaaaacatcac

SEQ ID NO: 414271 - DNA, 201 bp, Homo sapiens
gttggccatatacacagagcccctggctgccttgtgttgatctctggcctaggtaatgaccagaaatctcactggcaggcaggcaggcaggcaggcaggcvggcaggctttcaaatctcatgtgcctctaattttctcagtgtgattcagtagctctgctcctgtttggcctctctgggttatctcaggcctctcaggaag

SEQ ID NO: 414272 - DNA, 201 bp, Homo sapiens
tcactgtgcctggcctgtcatctggatcttgactcagcttttcctctgtatgaaggcttccagcagcatcagggaggttgtatacacaacccccctgcccaaacacacacacacacacacacacacacacacacacacacacacacacacacacacatgcttagaacgtgaatgatggagccagactgcctgagaccaaat

SEQ ID NO: 414273 - DNA, 201 bp, Homo sapiens
gagttatcagcaccataagagagggtaaagaaagaaagaaaagaaaagtaaaaaagaaattaaaactgtgctttatttattattattattatttttgaatrtttccttgtctcttaagggcaagagccatgtctggtttgttggctgtagtacatatcctcagtacctatgagagtgctggtcagagagtatgtgcccagt

SEQ ID NO: 414274 - DNA, 201 bp, Homo sapiens
cactgtgcctggcctgtcatctggatcttgactcagcttttcctctgtatgaaggcttccagcagcatcagggaggttgtatacacaacccccctgcccaaacacacacacacacacacacacacacacacacacacacacacacacacacacacatgcttagaacgtgaatgatggagccagactgcctgagaccaaatc

SEQ ID NO: 414275 - DNA, 201 bp, Homo sapiens
ctgtgcctggcctgtcatctggatcttgactcagcttttcctctgtatgaaggcttccagcagcatcagggaggttgtatacacaacccccctgcccaaacacacacacacacacacacacacacacacacacacacacacacacacacacacatgcttagaacgtgaatgatggagccagactgcctgagaccaaatctt

SEQ ID NO: 414276 - DNA, 201 bp, Homo sapiens
gtgcctggcctgtcatctggatcttgactcagcttttcctctgtatgaaggcttccagcagcatcagggaggttgtatacacaacccccctgcccaaacacacacacacacacacacacacacacacacacacacacacacacacacacacatgcttagaacgtgaatgatggagccagactgcctgagaccaaatcttgg

SEQ ID NO: 414277 - DNA, 201 bp, Homo sapiens
cctaaaacttaaagtataataataataataaaaaagattattctagtgtctaatatggtagatagactgacagaaaagagactagacgtacaaagataagygagaaatgactgctgtatccctgccttgagcaacagcttctgatctcagtggaaacagatatttcactcatgaaacgtacatgtcctagaactctgtaaa

SEQ ID NO: 414278 - DNA, 201 bp, Homo sapiens
tcaagagtcattgtcctttgtaggctgatgtccagtgtcctgaaaaccattatttcatatatgttgtcttttttgggaggggtaattttaattcaggaggragggtaaattccatctctggtacttcagcttaccctgaaacagaagtgtcagctgaatcttcttttgcttgggccgttgttcttcatataccattattct

SEQ ID NO: 414279 - DNA, 201 bp, Homo sapiens
tatctatatctatctctttctattatagaatttgtcacactgaatacagttatctgtctacttgtctttgttggagtaaatcatgagctcctcagtggcasggagagctttctgatttatcgccacgtatttagggcttagcacagggcttggcacttagtaggcacttgaaagaactcggtgaatgaatagatgaatgaa

SEQ ID NO: 414280 - DNA, 201 bp, Homo sapiens
tgcccattttaagagagagacttagaattttagggtctgtgaattatatcttaataataaatatatacatgcataccttgttttattgtgctttgccttaytgcacttggcagataattgcattttttacaagttgaaggtttgtggcaatcctgtgttgatcaagctgttggtaccatatttccaaaagcatgtgctcac

SEQ ID NO: 414281 - DNA, 201 bp, Homo sapiens
aatatttgaaaatcgccggctggaatctgaggaaaatactaaggagctctttgccaggagacttctgaaaggggtagggacatgcctgctgggtgtttacmaaaagtcccttgatctgtgcccctctagactttatttcccctctgagcatggactaaaaatccctatttcagttctattctttaatacccatttaggagg

SEQ ID NO: 414282 - DNA, 201 bp, Homo sapiens
ccaaactgtcaaatgacagtttcctcacttgaaaaatggagttatcagcaccataagagagggtaaagaaagaaagaaaagaaaagtaaaaaagaaattaraactgtgctttatttattattattattatttttgaatatttccttgtctcttaagggcaagagccatgtctggtttgttggctgtagtacatatcctcag

SEQ ID NO: 414283 - DNA, 201 bp, Homo sapiens
gtgtctgtcagttgatgaatggaaaaaaaaatggtatatacatacaatagaatattaatcagtcactaaaaggaatgaagtactgatatatgctacaatgyggatgaaccttgaaaacatgccaagtaaaagaagccagtcacaacaggccacatattatataattttgtgagttcacttatataaaatgcccagaacaca

SEQ ID NO: 414284 - DNA, 201 bp, Homo sapiens
ggttaattaaaattttttttccttttctatatttcatttcaatagcacattagcaggtttatatataatgacagtgagtttagattaggataattcataartcccagaatcactgggtcatatgacatgacagtttgacctgggctgcacaggaaatgcatttataaatggtaggaggtggggaaaatatgtagaggataa

SEQ ID NO: 414285 - DNA, 201 bp, Homo sapiens
atgctaattttagctgagggtggctcccggaactgggctggggccaagagcaggtaggtggggcttggctgaagctaatactggggcctggggagagggayacactaagcctggggtagccaggatataatctgctcccaggcctcagctttgacaatcacccttagctaggttaattgattcagcaaacattgaacaatg

SEQ ID NO: 414286 - DNA, 201 bp, Homo sapiens
cttatatatctagatgatacagaataaacttttgctttttacttttagcttatttccaaaatataaatatagaatcaaaacactttaatggtaaattgtcttttttttttttttgagatggagtattgctctgtcactcaggctggagtgcagtgacgcaatctcggctcactgcaacctctgcttcccgagttcaagcga

SEQ ID NO: 414287 - DNA, 201 bp, Homo sapiens
tggagagtgggtgttctatattttagacataagctaaagggatgaaattttgaatgtagacattggctggctattaggaaggtttttttttttttgttttktttttttcgcctgaagtaaaaggcattctagccttcctcaggaccaccccatgacttgagcttttggagacaattcttcacacaacatatatttcagagg

SEQ ID NO: 414288 - DNA, 201 bp, Homo sapiens
cattcacaattgcttcaaagagaataaaatacctaggaatccaacttacaagggatgtgaagcacctcttcaaggagaactacaaaccactgctcaatgawataaaagaggacacaaacaaatggaagaacattccatgctcatggataggaaaaatcaatatcgtgaaaatggccatattgcccaaggtaatttatagat

SEQ ID NO: 414289 - DNA, 201 bp, Homo sapiens
gaatattttttggagagtgggtgttctatattttagacataagctaaagggatgaaattttgaatgtagacattggctggctattaggaaggttttttttkttttgttttttttttttcgcctgaagtaaaaggcattctagccttcctcaggaccaccccatgacttgagcttttggagacaattcttcacacaacatat

SEQ ID NO: 414290 - DNA, 201 bp, Homo sapiens
cctcaaggatctagaactagaaataccatttgacccagccatcccattactgggtatatacccaaaggattataaatcatgctgctataaagacacatgcrcacgtgtgtttattgcagcactattcaaaatagcaaagacttggaaccaacccaaatgtccatcaacgatagattggattaagaagatgtggcacatata

SEQ ID NO: 414291 - DNA, 201 bp, Homo sapiens
ggtgttcaggtgtgcctattccaacaaccgtgggaaccctagtcccacccttcccttaggtagtcttgtctctttgctgtgcgcatttgaaatatccaggyggtttcttagatggaatcctatttaccactagggtgttaaatggccttttcttgacatagacatgatataattcctgggaccacttgttgacttattctg

SEQ ID NO: 414292 - DNA, 201 bp, Homo sapiens
tttaattctttttttttttttttgaggcagggtctcgctctgttgcccaggctggagttcagtggcacaaacatggatcactgcagcctcagcctcgtggsctcaagcgatcctcctacctcagcctcctgagtagctgggaccacaggtgtgtgccatcatgcctggctaattttttaaatttttgtaaagacagggttt

SEQ ID NO: 414293 - DNA, 201 bp, Homo sapiens
tcttgcgtgaatttgctgaggataacagcttccaactctattcatgtccctgcaaaggacatgatctcgttccttttcatgggtgcatagtattccatggkatatatataccacattttctttatgcagtctttcattgatgggcatttgggttgattccatgtctttgctattgtgaatagtgctgcagtgaacatacat

SEQ ID NO: 414294 - DNA, 201 bp, Homo sapiens
gcaggagaatcgcttgaacctgggaggcagaggttgcagtgagtcgagatcaagctattgcactccagcctgggcctgggcgacaagagcaaaactctgtytaaaaaaaaaaaaaaaagactttacatttctggccagagcgtccatcccttactcctccctcacctcatccccattctaggccccatgctattttatctc

SEQ ID NO: 414295 - DNA, 201 bp, Homo sapiens
ctttgccacttacttgtgtgtgactttgggcaagttactcaactctaagtctccattttcttatctagaaagtcgcactaggccgggtgcagtggctcacrcctgtaatcccagcactttgggaggccaaggtgggtggatcacgaggtcaggagatcgagactatcctggctaacatggtgaaaccccgtctctactaaa

SEQ ID NO: 414296 - DNA, 201 bp, Homo sapiens
tgatacaagtcagaatgtggttactgtggggtatggttactcatggtagtattgactggaaaggggcaagaagggtggagccttcctggaaatgttctatrttttttatttcagtggtagttacatgaacatatagattacataaaaattgaatgtatataatgtaaaaatatatattttaaattgtctatatatttactt

SEQ ID NO: 414297 - DNA, 201 bp, Homo sapiens
cattttcttatctagaaagtcgcactaggccgggtgcagtggctcacacctgtaatcccagcactttgggaggccaaggtgggtggatcacgaggtcaggwgatcgagactatcctggctaacatggtgaaaccccgtctctactaaaaatacaaaaaattagccaggcgtggtggcaggtgcctgtagtcccagctactc

SEQ ID NO: 414298 - DNA, 201 bp, Homo sapiens
gaggccaaggtgggtggatcacgaggtcaggagatcgagactatcctggctaacatggtgaaaccccgtctctactaaaaatacaaaaaattagccaggcrtggtggcaggtgcctgtagtcccagctactcgggaggctgaggcaggagaatggcgtgaacccgggaggtggagcttgcagtgagctgagatcgcgccac

SEQ ID NO: 414299 - DNA, 201 bp, Homo sapiens
tttagagtctgagtataatatgtgatctcaacatccattattcccattctatgccaggagtttttgcaagatcggtattgacttcttgatcttcttctttyttttttttttttttttgagacagggtcttgctctgttgctgaggctggagtacagtgacatgctcacagctcactgcagtcttgacctcccaggcccaag

SEQ ID NO: 414300 - DNA, 201 bp, Homo sapiens
gaacatacatgtgcatttatctttataatagaatggtttatattcctttgggtgtatacccagtaatgagattgctgggtcaaatggtatttctgcttctrgatctttgaggaatcaccacagtgtcttccacaatggtgaactaatttgcattcccaccaacagtgtaaaagtgttcctttttctctgcaaccttgccag

SEQ ID NO: 414301 - DNA, 201 bp, Homo sapiens
tactacccaagatgctaactggacaccagtttctgggattctttgtggatatgtgtcattagtactttttaatttttttatacctcccccctttacctccrtaagtagtctgtgggggtaagtgatacttttttgtgagaaaacataatataaatactgatgggatggacaacaagtgatccaggacccacagattgccat

SEQ ID NO: 414302 - DNA, 201 bp, Homo sapiens
taataaaaaagacagtaacaagtgttggtgaggatgtgttgaaattagaataatagccaaaaagtggaaacaactcaagtgtctgtcagttgatgaatggaaaaaaaaatggtatatacatacaatagaatattaatcagtcactaaaaggaatgaagtactgatatatgctacaatgtggatgaaccttgaaaacatgcc

SEQ ID NO: 414303 - DNA, 201 bp, Homo sapiens
tggcctacccaacatttcatagcacctaggttctcttactactctgcagccatgctgccagacttctctaatctgtctctactaaccttgtggtttctctmttggtggtctttaatagcatgtcctgttgggccctgggagacctggtttttgcctggtagcctagtgagcctatcacatgaggcctaggccagattattt

SEQ ID NO: 414304 - DNA, 201 bp, Homo sapiens
tctttctttctttcttttttttttttgagatggagtctcgctctgttgcccaggctagagtgcagtagcatgatctcggctcactgcaacctccgcctccygggttcaggcaattctcctgcctcagcctcctgagtagctggaattacaggtgtgtcccaccatccctggctagtttttggatttttagtagagacaggg

SEQ ID NO: 414305 - DNA, 201 bp, Homo sapiens; identical to SEQ ID NO: 109228

SEQ ID NO: 414306 - DNA, 201 bp, Homo sapiens
atctccagcctgggtcaggtccactgactgcatgtgccctgttccttggggcctggcccagactggataatatcctaaggtgtgacaggagtaagtggggraggaaggcatggaaaatggtgactcggagcaggctgtaggttctgtgttagcttgagtcccaggaaatacagccagctatgagaaggcagagattttatt

SEQ ID NO: 414307 - DNA, 201 bp, Homo sapiens
atggctgctcaacttctgtctattcctctttcctctctccttcccacctgcctgttcatcctatttctctctcctgccgctctatccccattttcctaccytgtccttgtcttctcgtgttgtccctctctcctcttcgcctttcccctatcacctcatccaatatatgtccctttcttcctctctgccccatgtcttgca

SEQ ID NO: 414308 - DNA, 201 bp, Homo sapiens
gagcaatggccttccagtcattcactaacctttactgagcacattctatgtaccagcataatcggcagggtccctgctctccagtacttctatctaaatgragatagctatgtcaacaaatatagtaaagtgtcaacaaatatagtaagtgttatagctattatgtaagtctttccagagttcaactgggggcacaaacta

SEQ ID NO: 414309 - DNA, 201 bp, Homo sapiens
gttcagtctctacagatctatgtggtaggaacggccagcctgtaatcctttttctaattctaagttaaccaagggggagcaaaaagtagtgagatttcttrgaaaactattttcaaccaaacaggctcttagggcccacttcctgccctttgggaatggctggcctcgatttagggtgccagcagaagaatgctattgaac

SEQ ID NO: 414310 - DNA, 201 bp, Homo sapiens
gttatccatatacagcttatttataataaaaatggtacagaggagaggctgattgccattggccccagcctcatctctgggatggctccaacagctgttgkttcataactctttgcctactttacacgctgaatatgctagggcttgggctgggagtgggaaggggatggagtactgcttggacttcttgtcatgtcaaac

SEQ ID NO: 414311 - DNA, 201 bp, Homo sapiens
tttaagcctatggctgcaccagttcagagccagagcattcaccactggtggggcccaggtattggaaaaccatttgccagacagatgatggtatgatgacrtttgtttttgtttcttatctgtttcttccctccctatcacttttccctttcttgtctttctctcttggcccttctttctacctgcttatccttttgcttt

SEQ ID NO: 414312 - DNA, 201 bp, Homo sapiens
catggtgaaacacaatctttactaaaaataaaaaaataaaaaaaaaaagaaaagaaaattagctggacatggtggtgcacacctgtaattccagctactcrggaggctgaggtaggagaatcacttgaacccgggaggcggaggttgcagtgagccgagattgcaccactgcactccagcctgggcgacacagtaagactc

SEQ ID NO: 414313 - DNA, 201 bp, Homo sapiens
agttgcagtgagccgagatgacaccactgcactccattctgggcaacagagcgagacttcatctcaataataataataataataataataataataaaatatctggaatgagtgtgaaattatctggaaatttaatatgtttcccttggggctgttcttcttccctctttctctttatgaagtattcaaaaactctaaggg

SEQ ID NO: 414314 - DNA, 201 bp, Homo sapiens
aatgaacaagatagatatggttcctgctctcctagagcttgcagtgtagtagggaaggcaaaaatgaacaaaataatcataatgaagtctgatgaatgtcwtgaagtgcaaataagggatgtgatgggagggtgcatatatcagaggaacttaatattgtttagggtgttaggaaagacctgacattagctgaggaggtga

SEQ ID NO: 414315 - DNA, 201 bp, Homo sapiens; identical to SEQ ID NO: 109233

SEQ ID NO: 414316 - DNA, 201 bp, Homo sapiens
actatgttgcccaggctggtcttgaacttctgggctcaagtgattttcctgccacaggcttgagccaccatgcctggcctatttagaactttaaaattatwtttttttttctgtaagtctgtaagttgtcttgtagtggtcttatatatctttttttttcttttctttttttttttttgagatggagtctccctctgtcac

SEQ ID NO: 414317 - DNA, 201 bp, Homo sapiens
gaggcgggggttgcagtgagccaagattgtgccactgcactccagtctgggcaacagagtgagacactgtctcggaaaaataaataaataaaataaaatamcaaaattatatatatatataatgttggctgtgggttttttgtagtgcctctctactcctagtttgctgagagcctttatcaggcatagatactggatttt

SEQ ID NO: 414318 - DNA, 201 bp, Homo sapiens
cttgacctcaggtgatctgcctgcctcagcctcccaaagtgctgggattacaggtgtgagccactgcgcccggccatttttttgtatttttagtagagacrgggtttcgccatgttggccaggctgttctcgaactcctgacctcaggtgatctgtccaccttggcctcccaaagtgctgggattacaggcgtgagccacc

SEQ ID NO: 414319 - DNA, 201 bp, Homo sapiens
atttaactgtgaaaagagagtgcccgtcagtcagtcagtcagtcctgacgtctaggaaccagttctgtgatggcagttatgagaaattcactggtcctgagaaaaaaaacttacacacccacaagaagcagcagtgagagcacacttaatgcagacttagttccagactcagcttataggataagaatgctaatgtctaga

SEQ ID NO: 414320 - DNA, 201 bp, Homo sapiens
gcgccattgtactccagcctgggcaacaagagcaaaactccatctcaaaaaaaagaataacatcattgaaagatagtagtatgatacctagagacacaaartgaacaaccctcttgaagttaaaaacaacttaaaatgttgggtaaattttttttttttgaattttaatgtatccatgaccatgcaaaacaaagaaaaatg

SEQ ID NO: 414321 - DNA, 201 bp, Homo sapiens
aaagataaggtcttgctctgtcacccaggctggaatgcagttgaagatcacagttcattgcaaccttaaactcctggactcaagtgaccctcccacctcaractactgagtagctgggattataggcatgtgccactgtgcccaactaattattttaaaatgttttgtagagtgagggtatcactgtgttgcctaggctgc

SEQ ID NO: 414322 - DNA, 201 bp, Homo sapiens
aactatttaagaaaaactttatttgttcatcagaacatattgctggtcagttcatgataagccacaaacggagggtaaacacttcatgtgagaagagctayaaaaagtctgtaaacattgttgaagataccagttcctggaagtttacagacctttaaatgtacggtgtctcaccaggtgctaatttcagttggcatgtgc

SEQ ID NO: 414323 - DNA, 201 bp, Homo sapiens
ttggccaggctggtctcgaactcttgacatcaggtgatccacccgcctcagcctcccaaagtgctgggattacaggcctgaggcaccgcacccagccctcttttttttttttttttttttccacaccaccacaatatcattgtgaagtcccagtataaaatattttattaatatcaccaaatagccagttttatagtttgt

SEQ ID NO: 414324 - DNA, 201 bp, Homo sapiens
caccccaccagcaggctattgtataattcgttagaacctgtttaagttttatgtgtgtacagctgaatccttgtaatgttgtacctttttttttttgagayggaaccttactctgtcgcccaggctggagtgcagtgcagtggcatgatcttggctcactgcaacccgtgcctcctgggttcaagtgattcttctgcctca

SEQ ID NO: 414325 - DNA, 201 bp, Homo sapiens
ccacccaccttggcctcccaaagtgctaagattacaggtgtgagccaccacgactggcctcaaatttcttttttttttttttttcttcttctttttgagayggagtcttgctctgttgccgaggctggagtgcaatggtgcagtctttgctctctgtaacctacacctccaaggttcaagcagttctcctgtctcagcctc

SEQ ID NO: 414326 - DNA, 201 bp, Homo sapiens
agtttgcaacaggtaagaaatttggagagagggagacaaagaatggaaataacattattgcacttctctgtgcttaatatttgctaggtatctcatctcayttaaactaggtcattttatatcattttgtcagtgcattactgtggatattttctggtacaaagacataggttaggtgtcttttcttttggaagaaaatcc

SEQ ID NO: 414327 - DNA, 201 bp, Homo sapiens
tcttcgcagcactttatttctaatagtttagtgtgtatttctttgcagtcaaggacattttttcttacataaccacagtacagttatgaaaatatgaaaawattgatataagaatgatatctatacatctcatttagattttgccagttgtcataatctaatcccttaaagaaaagaaaaactattcttttcctgaatcag

SEQ ID NO: 414328 - DNA, 201 bp, Homo sapiens
aagtgctaagattacaggtgtgagccaccacgactggcctcaaatttcttttttttttttttttcttcttctttttgagacggagtcttgctctgttgccraggctggagtgcaatggtgcagtctttgctctctgtaacctacacctccaaggttcaagcagttctcctgtctcagcctctggagtagctaggactacag

SEQ ID NO: 414329 - DNA, 201 bp, Homo sapiens
tacacctccaaggttcaagcagttctcctgtctcagcctctggagtagctaggactacagacatgtgccaccacacccggcagtttttgtatttttagtaragatggggttttgccatgttggccaggctggtctcgagctcctgacctcaggtgatccactcacctcagcctcccaaagtgctaagattacaggcatgag

SEQ ID NO: 414330 - DNA, 201 bp, Homo sapiens
cgtggcagtgggcacctgtaatcccagctttttgggaggctgaggtaggagaatcgcttgaacccaggaggcagaggttgcaatgagccgagatagcgccmctgcactccagcctgggcgataaaagcaaaactctgtctcaaaaaaaaaaaaaaaaaagaaagccttggttgtttcacatttccagtgtctcttaaaata

SEQ ID NO: 414331 - DNA, 201 bp, Homo sapiens
cagctttttgggaggctgaggtaggagaatcgcttgaacccaggaggcagaggttgcaatgagccgagatagcgccactgcactccagcctgggcgataaragcaaaactctgtctcaaaaaaaaaaaaaaaaaagaaagccttggttgtttcacatttccagtgtctcttaaaatactactgttaattagttcatcagtt

SEQ ID NO: 414332 - DNA, 201 bp, Homo sapiens
atcttcaagatatctattagggatctcaaaatcatcatctctaaaatttaactattactaactgcatttgttcctatgtttctttttttttttttttcttytttttttttcgagacagggtcttactctgtctcccaggctggagtgcagtggcacaatcaatctcagctcactgcaacctccacctcctgggttcaagcg

SEQ ID NO: 414333 - DNA, 201 bp, Homo sapiens
ctttagagccaatatattattttcaggccctcattctaaattatccctggctgggcacggtggctcacgcctgtaatcctagcacttagtgaggctgagastggcggatcacgaggtcaggagatcaagaccatcttggccaacatggtgaaaacccgtatctactaaaaatacaaaaattagccaggtatggcagcacac

SEQ ID NO: 414334 - DNA, 201 bp, Homo sapiens
ttttattcttctttagctttttttcttgctgctgtcttccctatttataccccagctacaataaattaacagttcctcaaaagcacctctgcacttttttkttgttgttgagatagagtcttgctctattgaccgggctggggtgcagtggcgcagtctcggctcactgcaacctctgcctcccagattcaagccattctc

SEQ ID NO: 414335 - DNA, 201 bp, Homo sapiens
ttcagaacactacttatggagaaatacccagctctgccatttattttattttgttttattttattttattttattttattttattttattttattttgttattatttatttatttatttatttatttatttatttatttatttattttgagacggagtctcccactgttgcccgggctggtgtgcagtggcgtgatctcgg

SEQ ID NO: 414336 - DNA, 201 bp, Homo sapiens
tcagaacactacttatggagaaatacccagctctgccatttattttattttgttttattttattttattttattttattttattttattttattttgttattatttatttatttatttatttatttatttatttatttatttattttgagacggagtctcccactgttgcccgggctggtgtgcagtggcgtgatctcggc

SEQ ID NO: 414337 - DNA, 201 bp, Homo sapiens
taatgctgcttaaatttagagcaatccaatcaataacatgcatttatttatttatttagagacggacagagtctccctctgttgcccaggctggagttcartggcgtgatcctggctcactgcagcctccgcctcctgggttcaagtaattctcccacctcagcttcccgagtagttaggattacgggcgcatgctaccat

SEQ ID NO: 414338 - DNA, 201 bp, Homo sapiens
gaggtgggtgaatctcttgagcccagggattggtgtccagcctgggcaacatggtaaaaccctgcctctacaaaaaatgcaggaattagtggggtgtggtrgtgtgtgcctgtagtctcagttacttgggaggctgaggtgagaggatcgcttgagcccaggaggtgaagattgcagtgaactgtggtcacaccattgtac

SEQ ID NO: 414339 - DNA, 201 bp, Homo sapiens
gagtgcagtggtgcgatcttgactcactgcagcctcaacctccctgggcttaggtgatcctcccactttagcttcccaagtgtctgagactacaggcacgyaccaccactacacctggctaattgtttgggatttttgcagagtcagggtttcaacatgctgcccaagctggtcttgaacccctggattcaagagttctgc

SEQ ID NO: 414340 - DNA, 201 bp, Homo sapiens
accaaacaccgcatattctcactcataggtgggaattgaacaatgagatcacaaggacacaggaaggggaatatcacactctggggacggtggtggggtcrggggaggggggagggatagcattgggagatatacctaatgctagatgacacgttggtgggtgcagcgcaccagcatggcacatgtatacatatgtaacta

SEQ ID NO: 414341 - DNA, 201 bp, Homo sapiens
caaaaatacatagacatgaattttcgtatgttttaaaatggttcataggtactttggagtccatgtgccacaggtcaagaaaccctgcctatcttgaatcytattaatagtcgtaatagaactgaggtggcagacagacattatttttcttacagtcatttcttctaagtcttacgtgaacaacattagcactgatatgaa

SEQ ID NO: 414342 - DNA, 201 bp, Homo sapiens
aatcttaaggccagttttgcctagtagctgctaaaaccacctgccttactctgtggctagttttacctactgctgtcactcaccaatcagagcttaccaayacttgagaactctcactagcaccaatgagctttctattaaaacaatatacataacatttatctttcctacttaaaccccaatcttttctttattcttcag

SEQ ID NO: 414343 - DNA, 201 bp, Homo sapiens
tcaatcatttaattatgtttaataaaatcctgacatcatctcattaattttgcaccaaaggcagcgcaccacttattcctctaattctttttttcttcccytttcctttttcttttttttttcttttcttttcttttttttttttttttttttttttttttaagacagtctcactctgtcgcccaggctagagtgcattgg

SEQ ID NO: 414344 - DNA, 201 bp, Homo sapiens
attactcttttccagcttaatttcccattgattactattaatttatatatcactcttctagtaatttaacagatagggttgtttcaaattcaaatcttgtyttttccattcagacctcattattattgtacttaatattataatttagaatttaccttaaggtatctcaggaccattgaacatcttctagtgtattagggt

SEQ ID NO: 414345 - DNA, 201 bp, Homo sapiens
cagcctgaaatatttatagtgtagaataatagaaaagtagaaggaaaggaagtgatatttataatgagtaggacaatgacataaccaaaataaagcaattyttcaacattactcttttccagcttaatttcccattgattactattaatttatatatcactcttctagtaatttaacagatagggttgtttcaaattcaaa

SEQ ID NO: 414346 - DNA, 201 bp, Homo sapiens
actttgggagacgaaggcgggtagatcacagggtcaggagttcgagattagcatggccaacatagtgaaaccccttctctgctaaaaatacaaaagttatytggttgtggtgacacgtgcctgtagtccgagctacttgggaggctgaagcaggagaattgcttgaagctggaagcggaggttgcagtgagctgagattgt

SEQ ID NO: 414347 - DNA, 201 bp, Homo sapiens
cactttgggagacgaaggcgggtagatcacagggtcaggagttcgagattagcatggccaacatagtgaaaccccttctctgctaaaaatacaaaagttayttggttgtggtgacacgtgcctgtagtccgagctacttgggaggctgaagcaggagaattgcttgaagctggaagcggaggttgcagtgagctgagattg

SEQ ID NO: 414348 - DNA, 201 bp, Homo sapiens
tattcagttccgaaatttgtgggggttttttggtttgttttctgtttttttttgttttgttttgttttttgctttttcagtcagggtcttgctttgtcacmcagactggagtgcagtggcatgatcttggctcactgcaacctctgcctcctgggctcaagtgattctcccacttcagcctcccaaatagctgggaataca

SEQ ID NO: 414349 - DNA, 201 bp, Homo sapiens
tggtagagatggggtttcacctgtttggccaggctggtatcaaactcttgacctcaagtgatccacccaccttggcctcccaaagtgctaagattacaggygtgagccaccacgactggcctcaaatttcttttttttttttttttcttcttctttttgagacggagtcttgctctgttgccgaggctggagtgcaatggt

SEQ ID NO: 414350 - DNA, 201 bp, Homo sapiens
cctgtgttcaggctctgatactcatttttctgcttgatccagtcttttgttgaagcttgcaaatgtattttttattttattcaatgaattattcagttccraaatttgtgggggttttttggtttgttttctgtttttttttgttttgttttgttttttgctttttcagtcagggtcttgctttgtcacacagactggagt

SEQ ID NO: 414351 - DNA, 201 bp, Homo sapiens
gtttgactataacgtgccatgaagaagacctttttggatcttagcctcttgtatctaaatgtctgtatctcttgctagacttgggaagtttccatctattmttttattaagtaggttttaaaatgctttcattctgtcttggccttctgggaccccaaattgaacatttgggtgctctgtggtatttcatatatcacaaag

SEQ ID NO: 414352 - DNA, 201 bp, Homo sapiens
cctttttgcagtgacagaagaggagcatgtaaattacccaagggaatgttggtgaatgtcaactcagaaagactgacctgaaaatcatttgtgtcctactrttggacttatcccaatacagatgtgtgtgtttttctggagggaggaagaaattttaaatttttaaaacagctgtcaagataaacactgttatacacctgt

SEQ ID NO: 414353 - DNA, 201 bp, Homo sapiens
cgcagtctcggctcactgcaacctctgcctcccagattcaagccattctcctgcctcagcctcccgagtagctgggattacaggcatgcaccaccacacgyggctaatttttctatttttaatagagacggggtttcatcatgttggccaggctggtctcgaactcctgacctcaggtgatctggccgtctcagcctccca

SEQ ID NO: 414354 - DNA, 201 bp, Homo sapiens
gtgtaaggaagggatccagtttcagctttctacatgtggctagccagttttcccagcaccattcattaaatagggaatcctttccccattgcttgtttttstcaggtttgtcaaagatcagatagttgtagatgtgtgatattatttgtgagggctctgttctgttccattggtctatatctctgttttggtaccagtacc

SEQ ID NO: 414355 - DNA, 201 bp, Homo sapiens
ttcagtatgatattgggtgtgggtttgtcataaatagctcttattattttgagatacgtcccatcaatacctaatgtattgagagtttttagcatgaagcrttgttgaattttgtcaaaggccttttctgcatgtattgagataatcatgtcgtttttgtctttggttctgttcatatgctggattacatttattgatttg

SEQ ID NO: 414356 - DNA, 201 bp, Homo sapiens
tttgtctttggttctgttcatatgctggattacatttattgatttgtgtatattgaaccagccttgcatcccagggatgaagccaacttgatcatggtggmtaagctttttgatgtgctgctggattcggtttgccagtattttattgaggatatttgcgtgaatgttcatcagggatattggtctaaaattctctttttt

SEQ ID NO: 414357 - DNA, 201 bp, Homo sapiens
tgaagaatgttggatgttggcttccactctcttctggcttgttcagtttctgctgagaaatccactgttagtctgatgggcttccctttgtgggtaaccckacctttctctctggctgcccttaacattttttccttcatttcaactttggtgaatctgacaattatgtgtcttggagttgctcttctcgaggagtatctt

SEQ ID NO: 414358 - DNA, 201 bp, Homo sapiens
taacattttttccttcatttcaactttggtgaatctgacaattatgtgtcttggagttgctcttctcgaggagtatctttgtggcgttctctgtatttcctgaatctgaacgttggcctgccttgctagattggggaagttctcctggataatatcctgcagagtgttttccaacttgtttccattcttcctgtcactttc

SEQ ID NO: 414359 - DNA, 201 bp, Homo sapiens
actagttttttctttaaaattctgaggtctgatcttactttcttaacatttgtaatctaaatttgaagcagtatcacctttaaaatgccttccaaattttmattttttttcattctttccattatgatgatttttttgtttttttgtttttttttgagacggagtttcgctcttgttgcccagactacagtacaatggtgc

SEQ ID NO: 414360 - DNA, 201 bp, Homo sapiens
tttcttaacatttgtaatctaaatttgaagcagtatcacctttaaaatgccttccaaattttcattttttttcattctttccattatgatgatttttttgtttttttgtttttttttgagacggagtttcgctcttgttgcccagactacagtacaatggtgcagtctcgactcaccacaacttctgcctcccaggttcaa

SEQ ID NO: 414361 - DNA, 201 bp, Homo sapiens
atggctttattatatattaatcagtattctctttagcaatctattttaatgaattcttatctcctcacctgtacagtgtgtacgtatatagatagatagayagatagatagatagatagatagatagatagataggtagttcagtgttatctttcttaaatccttttaaattgtgacatcttatatatacaaaagactgaa

SEQ ID NO: 414362 - DNA, 201 bp, Homo sapiens
cagcccaataggtgtaacattatgtctcctagtttctgttactttgaatttcttgggcaggcataagtttgaacatcttttttatgtttgtagacatttgtttttttttttttttgtgaagtatttttgatattctttgttgaaataaaatttgccctgctctccccactgccaggtagctagtactacagcaggcacatg

SEQ ID NO: 414363 - DNA, 201 bp, Homo sapiens
attttccaaaggctttatccctatatatatagaattttatacagattatctagggcagatcaagtaagtaaagagatgactgtagtgtttgtgattatgakgtgtgtgtgtgtgtgtgtatatgtatatgtatacacacacataaaggattatacatttactggttttatttaatgtttaggaaaaatggactttatgtat

SEQ ID NO: 414364 - DNA, 201 bp, Homo sapiens
ttgattgattgagacagagtctagctctgtagcccaggctggagtacagtgccacaaacacggctcactgcaacccccgcctcctgggttcaagcggattytactacctcagcctcctatgtagctagaattacaggtgtgagccaccatgcccagctgtttttgtatttttagtagagatagggtttcaccatattggcc

SEQ ID NO: 414365 - DNA, 201 bp, Homo sapiens
agaacagaccagtacacagacatttacctgggattaactgaactgattatttttttctttattttactgaaatgagaagtagtaacattttagtagaattrtaaaatgttgaattggaatcagtttgcagtgcatgtaaaatgtgattaagagatctgcataaacaagtcagtaactttgttttcttttggtaccaaaagg

SEQ ID NO: 414366 - DNA, 201 bp, Homo sapiens
gacaagaaacttctttaaaactatgaaacagcctgaaatatttatagtgtagaataatagaaaagtagaaggaaaggaagtgatatttataatgagtaggrcaatgacataaccaaaataaagcaattcttcaacattactcttttccagcttaatttcccattgattactattaatttatatatcactcttctagtaatt

SEQ ID NO: 414367 - DNA, 201 bp, Homo sapiens
cttaacctaatagaatttgaagaatgtggactctgtactatgtagatatctagattgaattgatttatcttttaggtttaccttacagggagcttaggcaratttaaaactcatctttaaccaccatattgactgctcttttccatatatttatatttcctctttgtagccttgatgttttttattcttctcaatttaaaa

SEQ ID NO: 414368 - DNA, 201 bp, Homo sapiens
cttacaatacaccactccatttgtgttgcatacatcactgtggaaactgctccaagatgagaaaggtaaacagaaaatgttaaagaaaatagaattagaartgacaagtgccaaaagacaaatgaataattaaaaaattgggatgactccagaaattgtaatgaatttgtaatatgcaaaaatgtaacaaagaaaatatac

SEQ ID NO: 414369 - DNA, 201 bp, Homo sapiens
accaatatggtgaaaccccgtctctactaaaaatacaaaaaaattagccaagtgtggtggtgtgcgcctgtagtcccagctactcaggaggctgagacagragaattgcttgaactgggaggcggagatcacaccactgcactccaccctgcgtgacagagtgagactcagtctcaaaaaaaattaaataagcaaataagt

SEQ ID NO: 414370 - DNA, 201 bp, Homo sapiens
gtaggccaaggtgggaggatttcttgagcccagatgttcgagaccagcctaggcaaaatggcgaaatcccgtctctaccaaaaatacaaaaattaaccagrcacagtggcatatgcctctgttcccagctacttgagaggctgaggtggaaggatagcttgagcctgggagatttaggctacaatgagccgtggtcatgcc

SEQ ID NO: 414371 - DNA, 201 bp, Homo sapiens
caggctggtctcgagctcctgggtgtaagcaatccactggctttagcctcccaaaatgtttggattacaggcgtgaggccaccctgcctggcccgtttcastctttttatgtgcatgtgagtatatatgaactgtgtaggatggctgggtgtggtggcttatgcctgtaatcccagcactttgggaggctgaggcaggcgg

SEQ ID NO: 414372 - DNA, 201 bp, Homo sapiens
aattaaccaggcacagtggcatatgcctctgttcccagctacttgagaggctgaggtggaaggatagcttgagcctgggagatttaggctacaatgagccrtggtcatgccactggaccctagcctgggtgaaagagtgagaccctgtctcagagaaaaaagaaaaacccactaccaaaaaggtagattcttaggtcattg

SEQ ID NO: 414373 - DNA, 201 bp, Homo sapiens
ctccaggtttataggtttaatcaaggtggtggccccacatgatataaagacagctacttagagacaacttcatgtgacagtttgtattggctaaaaaaccmctaaagtttacatcctataaatgtatgggtatggtggcacacgcctgtgatcccaactattcaggaggctaaggaatgagaattgcttgaactcgggagg

SEQ ID NO: 414374 - DNA, 201 bp, Homo sapiens
ccccacccagccagaaaaagtgcttttgatgccatgctgctttctaaaaataagataaaatattggtttcatttaggaaaaagaaaatttgaaaggaagcrtcaatataaggacattttatatgaactaagagaagtagataaagtagcatagattactcttctgtattcacccattagcttcagttcccactcctgtaat

SEQ ID NO: 414375 - DNA, 201 bp, Homo sapiens
caggccgacagagtgagacttcatctcaaaaaaaacataaaataagccgatcacggtggctcaggcctgtaatcccagcactttgggaggctgaggtgggyggattacttgaggtcaggagttcgagaccagcctggccaacatggtgaaaccctgtctctactagaaaatacaaaaattagctgggcatggtggcaggca

SEQ ID NO: 414376 - DNA, 201 bp, Homo sapiens
gcttacctgctactagattcatgattaagtcccataatatctcctcacagtactatcataagagctttatacttgtttgccttatagctaggctgtaatcsctctgtcctttccaccactgtgcctcaaattaacatttatatagatagcttcattagacaaaatgaaatcttaagttccctggactaacattgaaggcct

SEQ ID NO: 414377 - DNA, 201 bp, Homo sapiens
agcattgcttgctttttgttcttttagttacttttcattcagcaaacattctcacatcttttctattaaaaaggtcaagaatgaccaaaaaaaaatccatyaaccttaaaagacttctatcagccccatcctatttttcactgactctttataatcatacttttttgaaagagttgacttcttccttatcttcctttcagc

SEQ ID NO: 414378 - DNA, 201 bp, Homo sapiens
acagatgtctttaagactagttgagtcttttcatccttttatgttacaatgaaacatttcagaatcatattttcagagctattcttatacaataccataayagatttattctgaacaaactattattccattattttaatcttcttcttaatatttcatctttgatctaatgtgggggtcaggttgctagttaaaatgtaa

SEQ ID NO: 414379 - DNA, 201 bp, Homo sapiens
tatgtattatttctttgtgttgggaactttccaaatcttctattaataaatattttgaaatattccataaattattgttaactatagtcaccctactgtgstatcaaacactaaaacttatttcttctaactgtatttttgaacccattaaccaacctctctttattccaccctctggtagcgatcattctactgcccctc

SEQ ID NO: 414380 - DNA, 201 bp, Homo sapiens
attggttattgctatcggagggagatgttaacagattttttctgttaccttttatctggcacttgtgctcaactaaacttactagaacttgagtctaatartttgtagattctggttgtttttctttgtagatgatctggtctcttcctttctaatttttatgtgtctgtctctaactctcttataacattggccagaacc

SEQ ID NO: 414381 - DNA, 201 bp, Homo sapiens
ttaatttttgctctttatttctggttttctgagtttcattatgttttgctgtaggcgtagaatatattttgacaggggcagggggtattgtttttcattcrttctaaaatttcttaattgttatctctttaaattttctttccattttatttatcttctccttcaggaactttgtgtaaatttgttatactctcttctgtg

SEQ ID NO: 414382 - DNA, 201 bp, Homo sapiens
aagctttttctgtaagatcaggaacaaggtgaggatgcccactctcaccacttctattctgtgtattaccagaagttctgcccagagctattaggcaagcaaaaaaaaaaaacggaagaagtgaaattgtttctgttaacagatgacataatcttatatatagaaaaccaggctgggcatggtggctcatgcctgtaatct

SEQ ID NO: 414383 - DNA, 201 bp, Homo sapiens
agtcatttactcttgggaagggagatgtatcagacgtatataggaatttttaactgtattatatttcttagctgagcagtggatatatgcagttattcatkatattgtcccctataccttgttttatgtctgaaattttttgtctgaaaaaagaaatattcttgtcccacgcatgttcagtattatgtaggtctaggaaca

SEQ ID NO: 414384 - DNA, 201 bp, Homo sapiens
aggccagtatagatccctgatgagtatatatgcaaaaagtcctaaacaaaagactagcaaccaaatttaacagcatattattcaccaaatgaaagtcaatyaatatggtatgccacattaacagaatgaaggataaaaatcacttggtcatctcagtagataccagacaaagagttttataaaatccagcacccttttcat

SEQ ID NO: 414385 - DNA, 201 bp, Homo sapiens
tgttcccaccccccttgactatgatggtcaggagaagctttgttctctctgctcttctgggatcttcacatctccattgctcctgggagccaaattttccrtttggtctgtgctgagatttgtccttagtctcatgaccaggaggaaggtctgtgtattatatcaagacaagggctactagcattgtcctataggcacctg

SEQ ID NO: 414386 - DNA, 201 bp, Homo sapiens
ttattttgacataagagacttgcctgggattcagagttcttaaattctgtcacacttacaatttagtgctaggcctggtctttagtatcatcagttctctwtctaaaggaaataaatgtttccaaagaggcaacacttggctttgaactggtgatgaaacaccctggccctgtcattttctctttagcctttcagtgacac

SEQ ID NO: 414387 - DNA, 201 bp, Homo sapiens
attcacctactatcatgaaaacaacaccaaaagggaaatccatccccatgatccaaccacctcctaccaggccccacctccaacattggggattacaattygacatgagatttgagtggggacacagacccaaaccatattaggaggtaaaagactcactgaaaacaacaaaacattgatgaaagaaattaaaggagacac

SEQ ID NO: 414388 - DNA, 201 bp, Homo sapiens
tttataaatgcatctccaacagttttctgtttgtggaatgctagttgcattaaatgctttaaggggaaaacagtttggaggtcagtgaattctaagcaggrccacatattatacctgtctcagagattataaaatcacattatgttatttaagattccaagacatcctaattaagaaaagccctgcttaccttcatttaac

SEQ ID NO: 414389 - DNA, 201 bp, Homo sapiens
ttaagattccaagacatcctaattaagaaaagccctgcttaccttcatttaacccagaatttcccaaaattattttacgtggaaattctcccaaacccctggtgtgtgtgtgtgtgtgtgtgtgtgtgtgtgtgtgtgtgtgtgtgtgaatgttaagcttctatttgggatactctacttgaaagtattcttattttcatt

SEQ ID NO: 414390 - DNA, 201 bp, Homo sapiens
agataataactggagttgtgtatatgtttttacattctttttttcccaattctcatttttcccttactcagttaattcatattaattcatattagtgtctrttattctgttagttacagtcctaaccaagtaaacatgaagcacagtttgttttttctgagagtgttcttttctcattattaggaagagagggagatattt

SEQ ID NO: 414391 - DNA, 201 bp, Homo sapiens
aagattccaagacatcctaattaagaaaagccctgcttaccttcatttaacccagaatttcccaaaattattttacgtggaaattctcccaaacccctggtgtgtgtgtgtgtgtgtgtgtgtgtgtgtgtgtgtgtgtgtgtgtgaatgttaagcttctatttgggatactctacttgaaagtattcttattttcattta

SEQ ID NO: 414392 - DNA, 201 bp, Homo sapiens
tgaggcaggagaatcacttgaacccaggaggcagaggttgcagtgaaccgagatcacgccaccacactccagcctgggcaatggagtgagacttcacctcaaaaaaaaaaaaacaaaaaaaaaataaacaaaaaaaagacactattaggcttaaagtcattgaagtggtcatatgtaacttaaaataacctaagaaaccag

SEQ ID NO: 414393 - DNA, 201 bp, Homo sapiens
tgtccactaaaaagtttgagcctccttctatttaaggtctcttgccaacagaaaaatagaagagcccagattttccactgtcattacgtggatttttaggwttttaaacatgtcctataggtgtgggtaatatgcatgtatacacacacacacacacacacacacacacacatatatgcataattattttccttactatta

SEQ ID NO: 414394 - DNA, 201 bp, Homo sapiens
atcacttgaacccaggaggcagaggttgcagtgaaccgagatcacgccaccacactccagcctgggcaatggagtgagacttcacctcaaaaaaaaaaaamcaaaaaaaaaataaacaaaaaaaagacactattaggcttaaagtcattgaagtggtcatatgtaacttaaaataacctaagaaaccagtgaggaatgcca

SEQ ID NO: 414395 - DNA, 201 bp, Homo sapiens
aaaggacatgaactcatcatttttatggctgcaatagtattccatggtgtatatgtgccacattttcttaatccagtctatcattgttggacatttgggtyggttccaagtctttgctattgtgaataatgccgcaataaacagacgtgtgcatgtgtctttatagcagcatgatttatagtcctttggttatatacccag

SEQ ID NO: 414396 - DNA, 201 bp, Homo sapiens
tgattgaagatcaaatgaatgaaatgaagcgagaaaggaagtttggagaaaaaagagtaaaaagaaacaaacaaagcctccaagaaatatgggactatggkgaaagaccaaatctacatctgattggtgtacctgaaagtgacagggagaatggaaacaagttggaaaacactctgcaggatattatccaggagaacttcc

SEQ ID NO: 414397 - DNA, 201 bp, Homo sapiens
caaagaatcaaaaattagttgggcatggtggcacgctcctagagtcctggctacttgggaggctgaggtgtgggaagttcacttgagcctgggaggttgakgctgcagtgagtcatgattgcgctagcacactcagcctgggcaacagagtgagaccctgtctcaaagagtctaaggccaggcatggtggttcatgcctgt

SEQ ID NO: 414398 - DNA, 201 bp, Homo sapiens
ttctgtagtcttatatttgtgctactctctctgccttaccctgcatgtttctattctagactgcaatagggagggcctgggccaaacatccctacctctgraccctcaccctatttcaaatcctttatgtcaaagaaagtcaatataccctaggtagctacaagtccaattattattgaggtatttagctgtaaaatttgt

SEQ ID NO: 414399 - DNA, 201 bp, Homo sapiens
attgaatccagtaaatatttgttgcatgaataaatgatgaccattttgtataaaaatcaggtttttccacagaattattcaataattacataaaggacaawtaaacatacttttccctaattataggtttaaaattctctctttgtgcctctggatgacgtgggttataccacatgttgagtcagcgttgataaatattta

SEQ ID NO: 414400 - DNA, 201 bp, Homo sapiens
agaaactaatcccctttaaatcttttgagagacttgtctagatttctaggtgatcctgaatgcattttgatcatcaacatcctgtacgccaagttgatgastttattaaagacattccactaataaatagcactcccaggactcttcatgtatcattttgcctctgttttaaacattgtgctatttctgttttgctaactg

SEQ ID NO: 414401 - DNA, 201 bp, Homo sapiens
atatttgtgctactctctctgccttaccctgcatgtttctattctagactgcaatagggagggcctgggccaaacatccctacctctggaccctcaccctrtttcaaatcctttatgtcaaagaaagtcaatataccctaggtagctacaagtccaattattattgaggtatttagctgtaaaatttgtccttccatcact

SEQ ID NO: 414402 - DNA, 201 bp, Homo sapiens
gaactgagctcaaatttaaatttccttccattctagaataaaacagatgcatttttgtttatttcagtgcacatgatctcacaaaatgggatctctttggwaattgctacagattattgaagactggaattgaacatggagccatgccagaacaggtaggagtttattggtattccttctgtatgactctagaaagttgtt

SEQ ID NO: 414403 - DNA, 201 bp, Homo sapiens
tttgagctctcctacttcagcatatgcttattataaaagaagaaatacaaaaatagtaatataaacaaaataaaactgactcttaccacttgtagataacmactgttaatattttggtgtattttcttttcttttttttttttttttttttgagacggagcctggctctgtcacccagggtggaatgcagttgcacaatct

SEQ ID NO: 414404 - DNA, 201 bp, Homo sapiens
cactacaattatttttaggtaattagaaggcatgcagtaaatattttgcttttgtttaatttctccaaaacacaatagattataaaagctgctgattagtsccaagataagaagagcattcactgccttcaggttacttagagctagatccttgaaggaagttagaaactttaaataggaattttcttagcctctgttcag

SEQ ID NO: 414405 - DNA, 201 bp, Homo sapiens
gatcctgagaactaaaaactctgaaaacctctgccctagaaaaatgcatgcagagtgcaccaagacacatatataagcatgttaatcgcaatatgatccayaatggcctaaaactcaaagcagtgtaaaagtttatcaatgatagacgaatagggagtattctaaatattacacggaactaaaaactaatgaactctaggt

SEQ ID NO: 414406 - DNA, 201 bp, Homo sapiens
aaaaaattctccctttgaagttgtaggaaacttagaatgtgtatgaaacaggattttctatcacattaatttaaagtctctctttagagtatgttacccarcgtattttcctttcctgtatttgagtgttacagtataatcattagtgttttcagtatgttttgtctaattatcctatttgtagttttttttctcgtgaaa

SEQ ID NO: 414407 - DNA, 201 bp, Homo sapiens
tcctttactgccttcttttatattaaatgtatgttttctagtgtagcatactaattcctttaattaatctttaattgtatttttttagttattttcctagkggccttaccaggccttacagtatacatcttatcaaaatttactggccgagtgcagtggctcacacctgtaatcccagcactttgggaggctgaggtgggc

SEQ ID NO: 414408 - DNA, 201 bp, Homo sapiens
acagtagtccccaggttttatttttatttttgtttccttcttgagacagggtctcgcttgttgcccaggctggagtgcagtgacacaatcatggcttactycagccttgaactcccaggctcaagcagtcctcccacttcagcctcctgagtagctgggactacaggcgtgtaccactatacctggctaattttttatttt

SEQ ID NO: 414409 - DNA, 201 bp, Homo sapiens
ttagtcagtgagaagaatatgagctcttatatcagatagtcctagtttcaacccctcgctaataattactgtttcttaggatcaatgtaaatgttaaactrtataatagtaagcccttaaaccagtgcctggtgggttgtaagcactcgataaatttaaaatattttaagccagggtcttgctctgtcacccaggctggaa

SEQ ID NO: 414410 - DNA, 201 bp, Homo sapiens
tgaattcagtatttgattttgttcagagtttgttgagtctcccttatgtaaaatgcttggggaccagaagtgttttggattttggattttttttggttggrggggttttggaatatttgcatatacataatgagatatcttggggatggaacccaagtctaaacgcaacatttatttatatttcgtatgtgtatacatatt

SEQ ID NO: 414411 - DNA, 201 bp, Homo sapiens
cctttgtattccaggctttcatgttactctgtgatcttctgatgattttcagccaccaattaatgacaggtggcagagagggccttcagcctttggtgttyaatccagatactggactccaatctgaactcctcagttttgtgatggatcacgtttttattgaccaagacgaggagaaccagagcatgggtacttgtagct

SEQ ID NO: 414412 - DNA, 201 bp, Homo sapiens
cccttctccaaactctaagaaaaccattttcatatgttcataatcatacctatgtcataatctcactgatatcattatttcattttctgtctgtctgtctrtctatctatctatctttcttttttgttaagagatggggttttgctatgttgtctaggctcgacatgaactcctagactcaagtcatcctcctgcctctgc

SEQ ID NO: 414413 - DNA, 201 bp, Homo sapiens
gctctctaaaataatataagaagtatatttgatccacaagtctatttgatgctgttcggctgttctttcacaacattttggaaaatactagtctgtgaaasagtatgtttatttagagtctatattcatctcaggagacaaatttacctgctacttgtcttaagcaaaaaaatgtgttcttctcaaaccactgatgcttca

SEQ ID NO: 414414 - DNA, 201 bp, Homo sapiens
atcctttgacatctgtgatagttctggaagtgttttgcttcgatctcccttgaaggaagtctctattgaggagtgttagctgatagcttccagctgcagarcctttgggattggctacatcattgagccacattctcctcaggcagctccctcccagtgactgatcccagtagatactacggtctgaccatttctgctcaa

SEQ ID NO: 414415 - DNA, 201 bp, Homo sapiens
aaaataacagaaactgggattttattttaggcttgtctaacttcaaagcttagctcttttcactagaccacaaagcttcagcatgattattgtagtgatagatgcataaattactaacctaacaccaaatatagagagagacttaagtgagaggagcaagagaagacttcctaaagctaatgtgtaaacagagttgcatgg

SEQ ID NO: 414416 - DNA, 201 bp, Homo sapiens
caagacacataattgtcagattcaccgaagttgaaatgaaggaaaaaatgttaagggcagccagagtgaaaggtcgggttacccacaaagggaagcccatyagactaacagtggatttctcagcagaaactgtacaagccagaagagagtgggagccaacattcaacattcttaaagaaaagaattttcaacccagaattt

SEQ ID NO: 414417 - DNA, 201 bp, Homo sapiens
atttttatcaccgaagtcttgtaatgtcagttgtaaaatgtatagaaaatatgtcttgagtgtggtggctcatgcctgtaatcccagcactttgggaggcwgaggcaggcaggtcacttgagtctaggagttggagaccagcctgagcaacatggtgagaccctatctctacaaaaataaaaataaaaatttagttaggca

SEQ ID NO: 414418 - DNA, 201 bp, Homo sapiens
aactcccaggattgactatgactccaggaaggttcttcttggctgtctctttctctggttttctctgttgaacttccggctgttttgcgctgtcatttgtygctgctagtgtcagagaactaccagcaccctctcattttcactccatcaggatctctgttgtcaacacccttaggaaaggaattttctacatttcattcc

SEQ ID NO: 414419 - DNA, 201 bp, Homo sapiens
tccttctctgctccacccaccccccaagaaaggtataaaaccaaaatgaaaaatactagtttttttggttcttttcttataaaatgattgtactttctttstggtaaattaaattagggtcttgttggaaatgcatgagttctacaggagctctaccagtgtagttttaaaatcacttaattatgaatcactgtttttcca

SEQ ID NO: 414420 - DNA, 201 bp, Homo sapiens
agctgcagtttcttcttcatagtcagcctcagccaccagggagaactttaacttttatgccactgaaatggggaggagggcagaatttggatggcatggamcagcatccctcttctcccagaataacacctctggctctttgagcaggggagagagtaggtaacccctggttctcagcttgccccaggtttggaatctctc

SEQ ID NO: 414421 - DNA, 201 bp, Homo sapiens
tcagagcagaactgaaggagatagagacagaaaaaacccttcaaaaaattaatgaatctaggagctggttttttgaaaagatcaacaacattgatagaccrctggcaaggctaataaagaagaaaagagagaagactcaaatagacgcaataaaaaatgataaaggggatatcaccaccgatcccacagaaatacaaacta

SEQ ID NO: 414422 - DNA, 201 bp, Homo sapiens
ggtttggaatctctcgacagggagtttgaggtggggcattcagggttccagtgttctcagcctgctgtgcccagggtagtgttttaccccaggagtggagrcttggtgggataaaaggagcttcatttttcctggttgctgttcagaatagaacttacacaacacagggctgggaggtgatgagaaatgcaaatggtatgc

SEQ ID NO: 414423 - DNA, 201 bp, Homo sapiens
  misc_feature (1)...(201): n = A,T,C or G
caatgagatgttaaggcaaaaaggttgaaacagatgaagtaagacagaaaagcatcaaggaaaaagaagttgaggaagcatggagcacaaaggaagacagnccaaaagaggaaaaaattagctaggtctataaaatcaatccccatactatatgcctctaatacattaaaatataaagtaagatagtcacaatgctattct

SEQ ID NO: 414424 - DNA, 201 bp, Homo sapiens
agaaatggataaattcctggacacatacaccctcccaagactaaaccaggaagaagttgaatccctgaatagaccaataacaggttctgaaattgagacamtaattaatagcctaccaaccaaaaaaagtccaggacgagatggattcacagccaaattccaccagaggtacaaagaggagctggtaccattccttctgaa

SEQ ID NO: 414425 - DNA, 201 bp, Homo sapiens
tgcaacctacagaatgggagaagatttttgcaatctactcatctgacaaaaggctaatatccagaatctacaaagaattcaaacaaatttacaagaaagaaaacaaacaaccccatcaacaagtgggctaaggatatgaacagacacttctcaaaagaagacatttatgcagccaacagacacgtgaaaaaatgctcatta

SEQ ID NO: 414426 - DNA, 201 bp, Homo sapiens
actggagaaaagagcagtaagggtgaaggtgggactgatagtggccaagccccatgagaagacatgtttaaccttgctgtccttcccacaaacatgcattmctacaaatgtgttagaaataggctcagatgtgtaaaaatctacaggctgctttctgtagctctttcttttctcttccctacccactccttcagaatagca

SEQ ID NO: 414427 - DNA, 201 bp, Homo sapiens
gcaacctacagaatgggagaagatttttgcaatctactcatctgacaaaaggctaatatccagaatctacaaagaattcaaacaaatttacaagaaagaaaacaaacaaccccatcaacaagtgggctaaggatatgaacagacacttctcaaaagaagacatttatgcagccaacagacacgtgaaaaaatgctcattat

SEQ ID NO: 414428 - DNA, 201 bp, Homo sapiens
agaagacatgtttaaccttgctgtccttcccacaaacatgcattcctacaaatgtgttagaaataggctcagatgtgtaaaaatctacaggctgctttctrtagctctttcttttctcttccctacccactccttcagaatagcagtgagcaagagatagctcattagagtcctggcccggaattcctgtaataacaaaat

SEQ ID NO: 414429 - DNA, 201 bp, Homo sapiens
caacctacagaatgggagaagatttttgcaatctactcatctgacaaaaggctaatatccagaatctacaaagaattcaaacaaatttacaagaaagaaaacaaacaaccccatcaacaagtgggctaaggatatgaacagacacttctcaaaagaagacatttatgcagccaacagacacgtgaaaaaatgctcattatc

SEQ ID NO: 414430 - DNA, 201 bp, Homo sapiens
tcctgtaataacaaaatacagatagcaactccctatctgcagagttaactgctttgagaggaagggagtggggccaggcgtgagaaataatagtgatcctygtaggaacaaatttttagtcgcatgtaagcattttatttcacttcttttcttagagaatctttgcccccaccttttatttattggaaattctgttccatt

SEQ ID NO: 414431 - DNA, 201 bp, Homo sapiens
ctttaatacatgtgttcctgttaatattatgtccaatcacaagtgcctgattggctggtctagaaaagttagagaagaaagatacaggtcttgtttaatayccatttcatgttcagctctcagaatattcatttaaaagaatctggaatgtaaaagtaggtgtctattcataccaaattcagaacttctccaaaattatat

SEQ ID NO: 414432 - DNA, 201 bp, Homo sapiens
aacctacagaatgggagaagatttttgcaatctactcatctgacaaaaggctaatatccagaatctacaaagaattcaaacaaatttacaagaaagaaaacaaacaaccccatcaacaagtgggctaaggatatgaacagacacttctcaaaagaagacatttatgcagccaacagacacgtgaaaaaatgctcattatct

SEQ ID NO: 414433 - DNA, 201 bp, Homo sapiens
agactccatctcaaaaaaaaaaaagaaaaaaaaatagcataaggccaggtgcggtggctcacacctgtaatcccagaactttgggaggccaagatgggtgkatcacctgaggtcaggagtttgagaccagcctggccaacatggtaaaaccccatctctactaaaaatacaaaaattaaccagatgtggtggcacacgcct

SEQ ID NO: 414434 - DNA, 201 bp, Homo sapiens
acatatgtaacaaacctgcacgttgtgcacatgtaccctagaactaaaagtagagtgaaaaataattataattaaaaacaaaaaagaacagcaaaaaaagaaaaaaacaagaggaactctactatagtggggttttgtgatatagaagcagcaggtaggctgctgagatacctttaggaagcatcttttctttctagtcta

SEQ ID NO: 414435 - DNA, 201 bp, Homo sapiens
tgcttttatgcacaagaaggccttagctcctgaaactttcttctgagactttcctgtgatctttctactttctgctgtgatgttttcctggttgaaccaasggcacacttatcctttttccttcattctgaatcactcacctgacttcaggtgttacctcttcccctgacatgctaaaattgtaggtgatcataaatatta

SEQ ID NO: 414436 - DNA, 201 bp, Homo sapiens
tggcaccactgcactccagcctgggcgacaaagcaagaatccatctcagaaaagaatgataaaaataaataaatccagcctgaccaatatggtgaaacccygtctctactaaaaatacaaaaaaattagccaagtgtggtggtgtgcgcctgtagtcccagctactcaggaggctgagacaggagaattgcttgaactggg

SEQ ID NO: 414437 - DNA, 201 bp, Homo sapiens
catgcagtaattgactcattcaaagccttgctttcattttatttatttatttcctttatgtgggttattcactcattctccttttctccataggtttgatmcacacacacacacacacacacacacacacacacacacaaataaatacagagagcacacgtttatttgtatgtgttcttatatatattgttgttttgtgtg

SEQ ID NO: 414438 - DNA, 201 bp, Homo sapiens
catatgtaacaaacctgcacgttgtgcacatgtaccctagaactaaaagtagagtgaaaaataattataattaaaaacaaaaaagaacagcaaaaaaagaaaaaaacaagaggaactctactatagtggggttttgtgatatagaagcagcaggtaggctgctgagatacctttaggaagcatcttttctttctagtctat

SEQ ID NO: 414439 - DNA, 201 bp, Homo sapiens
tttattctaaagcttttatgtgtgaaatctttagggttttctacatacaggattatgttgtctgaacagaaacaattttacttctttcatttcaatttggwtgcttttattttaatttctttttcttgcctaattgctctgattaggacttcagtactattttaaatagaagtagtaaaagcaggcattcttcttatgttc

SEQ ID NO: 414440 - DNA, 201 bp, Homo sapiens
tccatctcaaaaaataagaaaaataatccaaagaactcactatcatgagaagagcatgtgggaaactgcccccatgatcccagttacctccacctggtccygctttggcatgtggggattatggggattacaattcgaggtaagatttgggtggagacacagagccaagccatatcaggtatatacccagtaatgggattg

SEQ ID NO: 414441 - DNA, 201 bp, Homo sapiens
atatgtaacaaacctgcacgttgtgcacatgtaccctagaactaaaagtagagtgaaaaataattataattaaaaacaaaaaagaacagcaaaaaaagaaaaaaacaagaggaactctactatagtggggttttgtgatatagaagcagcaggtaggctgctgagatacctttaggaagcatcttttctttctagtctatg

SEQ ID NO: 414442 - DNA, 201 bp, Homo sapiens
gtttattttaatttctgattggttattgctatcggagggagatgttaacagattttttctgttaccttttatctggcacttgtgctcaactaaacttactrgaacttgagtctaataatttgtagattctggttgtttttctttgtagatgatctggtctcttcctttctaatttttatgtgtctgtctctaactctctta

SEQ ID NO: 414443 - DNA, 201 bp, Homo sapiens
ttcataaaggcaagagatttaattgacacacagttctgcattgctagggaagcctcaggaaacttacaatcatggcagaatgcaaaggagaagcaggcacrttcttcacagggcagctggatggaagtgagtgcaagcaggggaaatgccagagacgtataaaaccgtcagatctcaggccaggtgcagtggctcatgcct

SEQ ID NO: 414444 - DNA, 201 bp, Homo sapiens
atttacaagatttttaatattttaatatttacaagttagtaaatattacagccaagatcagagtctgtttctgttgaatctaatctactttacatgattcttttttttttttttttttaaatttttggtgagatagggtcttgctctttcactgaggctggagtgcagtgacataatcttagctcactgcagctttgactt

SEQ ID NO: 414445 - DNA, 201 bp, Homo sapiens
gtctccttttaaaaatttgactaagtaaaatattcatgacactacatttttgtttaaacatagtgctatttcaatctgtatttattcccatatgttgtgtstttattctccagattgatacattggtttgtcctttttaaccaagtattttatacattctcattaattatacaaaaatttggacttgaagctatactataa

SEQ ID NO: 414446 - DNA, 201 bp, Homo sapiens
ggaaggcagcatataaatattagtaggcagaggggcagtttttggcagaggtgacttgctatctaccaaaagttatttttcctttttcatagtgaagaacsttcaaggaggccgctggcaaacagagactccatttctctacttccattgcattcatatatggctagctaacaagttcttgcctgtgaagtattaatatta

SEQ ID NO: 414447 - DNA, 201 bp, Homo sapiens
gcagtatcacctttaaaatgccttccaaattttcattttttttcattctttccattatgatgatttttttgtttttttgtttttttttgagacggagtttygctcttgttgcccagactacagtacaatggtgcagtctcgactcaccacaacttctgcctcccaggttcaagcgattatcctacctcagcttcccaagta

SEQ ID NO: 414448 - DNA, 201 bp, Homo sapiens
atataaagttttcagagaaagaaaatcattatattctttttctaattcagaatcaaaggagatttcttttttcttaatatataaaaactaagctttttttwaaaaaaaattttctaggaccatatcatagtagagtgctttatcagacttgaatagatttgttggattttagaatatttgatctaaaaatctaattctgcc

SEQ ID NO: 414449 - DNA, 201 bp, Homo sapiens
ttttttcattctttccattatgatgatttttttgtttttttgtttttttttgagacggagtttcgctcttgttgcccagactacagtacaatggtgcagtstcgactcaccacaacttctgcctcccaggttcaagcgattatcctacctcagcttcccaagtagctgggattacaggcatgcgccaccctgcccggctaa

SEQ ID NO: 414450 - DNA, 201 bp, Homo sapiens
aattcccaaacttaagcaatctgatatcaagtgttggtagaaatgtgaagacccagcaactgtcaatgactagtagatacaaacactttgaataacagttkcagaatatctaataacattgtacatacacatactgtatgatccagaagtcctattcttagagcatcaggaataggattttgtccctattttccagagaga

SEQ ID NO: 414451 - DNA, 201 bp, Homo sapiens
cacaacttctgcctcccaggttcaagcgattatcctacctcagcttcccaagtagctgggattacaggcatgcgccaccctgcccggctaattttgtgttyttattagagacagggtttctccatgttggtcaggccggtgtcgaactcccgacctcaggtaatccgcccgcctcagcctcccaaactgctgggattacag

SEQ ID NO: 414452 - DNA, 201 bp, Homo sapiens
gcattggtgtgatcttgactcataaaacctctgcctcccaggttcaagtcattctcctgcctcagcctccttagtaaccaggaatacaggcatgtgccacyatgcttagctaatttttgtatttttagtagagacagggttttgccatgttggccaggctggtctagaactcctgacctcaggtgatccactcacctcggc

SEQ ID NO: 414453 - DNA, 201 bp, Homo sapiens
atgggtaggagtgataagttattggaatttggccaggtgtggcatttacgtactgtaatagaaataatattagagtatattagagccccaaagtagagcasttatcataaaagcaactggaattttcattcccattataagttattttacagttttctgaagtatttttcatgaatactaccttatttaattgttaagaag

SEQ ID NO: 414454 - DNA, 201 bp, Homo sapiens
tatataaagttttcagagaaagaaaatcattatattctttttctaattcagaatcaaaggagatttcttttttcttaatatataaaaactaagcttttttwaaaaaaaaattttctaggaccatatcatagtagagtgctttatcagacttgaatagatttgttggattttagaatatttgatctaaaaatctaattctgc

SEQ ID NO: 414455 - DNA, 201 bp, Homo sapiens
acagttacctaaaatatgttggctggactcttcatgacagggtaagttactctgttctaagctttgatggaagttatgtttgtctcagtactaaaatgctrggaatcaaaatgacagtagttgatttttcaggagttgtaatcatgtggaaattttaagatgatgcagctgaataactatttacttgatgattgtgatgaa

SEQ ID NO: 414456 - DNA, 201 bp, Homo sapiens
cactttaatagagactcctgggttttcttatcaactgtaggaaaggagaattgtctttactaaattttgctaacttttgcattaactaaagacttcaaccytgggttgaatggttagaggggcatccttgccttgttctttaattagttgaaatatcttaagtatttcaacaacaaatatattttagtctttttatccttt

SEQ ID NO: 414457 - DNA, 201 bp, Homo sapiens
  misc_feature (1)...(201): n = A,T,C or G
tatctggaaatatacagacaaaattggtcacagtgggtttgtttgcctttggggtcaagggttgtagaagttatatttctcactatgtatttttattattnaaccctcactttttcaatttaaggttttgtgttgaaacacacatctgtgtgcacatacacatctattgaaaatgctgtttccatcttaactgatgtgttt

SEQ ID NO: 414458 - DNA, 201 bp, Homo sapiens
atgcaagaagagaaacatttcaccttataccttttacatattttttaattacctattctgaaaataactgtttaaaattctgagctataggttttttcttytttttttctttctatcagttatttaatgaacttgttcaagagcaaggtcccaacctagataggacatctgcccatgtcagtggcattaaagaactggcac

SEQ ID NO: 414459 - DNA, 201 bp, Homo sapiens
aggtctataaaatcaatccccatactatatgcctctaatacattaaaatataaagtaagatagtcacaatgctattctattaaaattcttcctaatatagrtgagatacaggtaatttgagggtagatttctgcagcaaattgaatataccagaatagttgttttccagttctaccacttggttggaacagtaagacagtg

SEQ ID NO: 414460 - DNA, 201 bp, Homo sapiens
caaaaacaaaaacaaaaatagccagatgtgttggcacgcaccccgtagtcccagctactcgggagggtaaagtgacaggatggcttgagcctgggaggtcmaagctgcagtgagttatgattgcacctctgccttccagcctaggtgacagagtgagaccccatttctaataataataattattattaatgaaatacaaat

SEQ ID NO: 414461 - DNA, 201 bp, Homo sapiens
ctaaaggattttatttctccttcactcatgaagcttagtttggctgcatatgaaattctgggttgaaaattcttttcttgaagaatgttggatgttggctyccactctcttctggcttgttcagtttctgctgagaaatccactgttagtctgatgggcttccctttgtgggtaacccgacctttctctctggctgccctt

SEQ ID NO: 414462 - DNA, 201 bp, Homo sapiens
gttgcagtgagctatgatcatgccactgcactccagcctgggcgacagaggaagactcccatcatttaattttttaaaaaggcagtaatggctaaatctgkttttataaccctcttggactatggggaatgggaagttaaattgtcatgaaaatctgatcaacagtaggtattcctatatgttaaaaaaaaaaaaaaacct

SEQ ID NO: 414463 - DNA, 201 bp, Homo sapiens
attacatatagtacataatacttgataataaatgactatgtcactggtttgtatatttattgtactatacttccaattgttattttagagtgtactcctayttataaaaaaatgttaactgtaaaacagtctctggcaggtctttaaggagatattctagagggaaggtattgttatcataagagatgacagcttcatggg

SEQ ID NO: 414464 - DNA, 201 bp, Homo sapiens
aaaaatatcagaaacctgagaaatacgaggagaaacaggatgctcgatggcaaaagaggaacctaacacacacatctctgagacttgagaggaaaagcaayaggattcatactatgtattgggattaaaattcttcagaaggaaaaccaaagcagtaatactttttaagaagccttatcatattagaataatttagaattt

SEQ ID NO: 414465 - DNA, 201 bp, Homo sapiens
gagatgaaatcttgaatgaaccaaaggaatgattcttaattgtcttggaattcagtctaatttgtgtagtctgtaggtcatgattagaaggtatacttcasttggttagaataactttaatctgagaaacagccaggactccaaatggtggagtctgatgagctttctgacaatacctttttcttaccagtcggggtctaa

SEQ ID NO: 414466 - DNA, 201 bp, Homo sapiens
ttaatatgaggttgagttcagtttgctagtgttttgtttaatcttgaaacatttgaaaaatgaagttatcttttttaaaaaaatgtaatgccaatttttgmtgtaaatggcagtggctgtgttcattttatagatactttatatagcctggtatttcagctcttatttataacctcatgccttgtatactaccttgtttgg

SEQ ID NO: 414467 - DNA, 201 bp, Homo sapiens
tacagttctgaaaaaaacctggtcaccaaaaatatcttctctgctaattcagcaattcttgggctccagttaggggagctggggcctcactttctcccagrattgtgggcttcactggaagtgaaggtgcaggaatgactggactgtccaccccagccctgcctgcctgtggttttggccagggagcaagccatgaggtgc

SEQ ID NO: 414468 - DNA, 201 bp, Homo sapiens
atgcaaaaaaggcaaaggtgtgggagacaaatcagcaagcaagctttccagacagccaaggaaggaaggtcatttaaggatggtctgtaacagctcatctwgatggttacaagagtatgagactagatgagcactttcaggcttgggtcaggcttgcaaatctcccatttgtggcttgactgtaactccctgtttgcccct

SEQ ID NO: 414469 - DNA, 201 bp, Homo sapiens
tatgtaacaaacctgcacgttgtgcacatgtaccctagaactaaaagtagagtgaaaaataattataattaaaaacaaaaaagaacagcaaaaaaagaaaaaaacaagaggaactctactatagtggggttttgtgatatagaagcagcaggtaggctgctgagatacctttaggaagcatcttttctttctagtctatgt

SEQ ID NO: 414470 - DNA, 201 bp, Homo sapiens
tcacttaataatatgcatttaaagttcttccatgtcttttcaagacttagagctcatttcttttagcacagtttatctgtctattcacctaccgaaggacrtcttggttgcttccaagttttgtcagtcagttgtgtgtaaagttgctataaacgtgtgtggacatatgtttcaactcatttgagtaaattctaagaagta

SEQ ID NO: 414471 - DNA, 201 bp, Homo sapiens
aatagcttatttttattttcgagacagggtcttgctctgtcatccaggctggagtgcagtggcatgattacaacttactgcagcctcaacctcctgggctwaattgaccctcctgccttagcctcctgaagctgggactacaggcatgtgccatcacacctggctaattttccttttctttctttttccttttcctttcct

SEQ ID NO: 414472 - DNA, 201 bp, Homo sapiens
cagaatgtcatatagttggaatcatacaatatataatcttttcaaattggcttctttcacttaataatatgcatttaaagttcttccatgtcttttcaagrcttagagctcatttcttttagcacagtttatctgtctattcacctaccgaaggacgtcttggttgcttccaagttttgtcagtcagttgtgtgtaaagtt

SEQ ID NO: 414473 - DNA, 201 bp, Homo sapiens
gcacagttgtggattactgcaaccttgaattctgggtttatgtaatcctcccacctcggcctccccagtagctgagactacaggtgcacatctcaatgccyaggtaatttttaaattttttgtagagatggagtcttgctatgttacccaggctggtcttgaactcctgacctcaagtcatcctttcacctctgcctcaca

SEQ ID NO: 414474 - DNA, 201 bp, Homo sapiens
tcagctcactgcaatctctacctcctgggttcaagccattctcctgcctcagcctaccgagtagctgggattactggcgtgcgtcaccacatctgggaaattttttttttttttttttttgtatttttagtagacacggggtttcaccatgttggccaggctggtcttgaactcctgacctccagtgatccacctgcctca

SEQ ID NO: 414475 - DNA, 201 bp, Homo sapiens
tttttcaggatgtttacatttgtttttcaggttttttaccttatattttggtttaaggacagcagcaattatttaataacatagaactgatcaaaatgtaratagagtttccgaataacaaattgagtatacgtgtagatagaaatacagatacagcatacatacatactatatgtatttagaaaacacatatgtttacat

SEQ ID NO: 414476 - DNA, 201 bp, Homo sapiens
ccatgaagtcaaaactatttttacaataagatcaagatgttatttcctttttacactctcattctcttgcaagtgtacaggtggggtattggtgtcatagsaaggaatattcatgttgtctacagaggttattaaactataccttcttttcccaaactactttgtgagactggattttttcatatatttcaatgaaaacaa

SEQ ID NO: 414477 - DNA, 201 bp, Homo sapiens
aggatggtcttgatctcttgacctcacgagccacctgcctcagcctcccaacatgctggaattataggtatgagccaccgtgcccggccctaattttgtatttttaatagaggcggagtttcaccatgttggtcaggctggtctcgaactcttgacctcaagtgatccacccaccttggcctcccaaagtgctgggattac

SEQ ID NO: 414478 - DNA, 201 bp, Homo sapiens
gtttggtagatttcagcagagaagccctttaataccaggcttttctttgtgtaaaggtttttaattactgattcaatttatatatcctgaatttttttaarttttgttttgttttttattaatttattttcttgagacagggtctctgtctgtcaccctgcctggagtgcagtggcacaatcacaactccgtagaacctca

SEQ ID NO: 414479 - DNA, 201 bp, Homo sapiens
agtaattttgagtattttaagaattacttagttgtggcagatcaaaatcaaagagaaataaagcaatcaaatgtgctatgaaagtcacctatttctttctrtaactgctttgcaaaaaagggttcctatgtaggtaggaagaaaaaaaaagctttcatcaaactctgtaatgtgacatacttaatatgttctttttctgtt

SEQ ID NO: 414480 - DNA, 201 bp, Homo sapiens
acagcaggccgtgggggctacgaagtccagcagagtcaaaggaatgagaaaagacaagttaagaatgagtgcataaagtgggtccagggggccaacgctgrtatggaggctgcgaaggccccgagctctgggagcccacactatttattggtgatgaaagaaagaagcaggtggtgaggacgtttggatgtgggggtaaac

SEQ ID NO: 414481 - DNA, 201 bp, Homo sapiens
atccattttttatctgtctagacttctaagtcaaaaagacatgaatctaggttaatgcctcccttttcttcatcagcacacacactgtacatcctacttgytgtctaccttgtcattatttaccaaaaatgcatttgagtgccaagtcctgaggatataatggtgtgctacaagcaatccttaatctcatgagactcttga

SEQ ID NO: 414482 - DNA, 201 bp, Homo sapiens
tttaatttaacttctggggtacatgtgcacaatgtgcagctttgttacatatgtatacatgtgccgtgttggtgtgctgcactcactaactcgtcatttayattaggtatatctcctaatgctatccctccccccaccccacaacagtccccagtgtgtgatggtccccttcctgcgtccaagtgttctcattgttcaatt

SEQ ID NO: 414483 - DNA, 201 bp, Homo sapiens
aagttactctgttctaagctttgatggaagttatgtttgtctcagtactaaaatgctgggaatcaaaatgacagtagttgatttttcaggagttgtaatcrtgtggaaattttaagatgatgcagctgaataactatttacttgatgattgtgatgaaactggaagcatttgcccaggggtgaagaccctatcttgtttag

SEQ ID NO: 414484 - DNA, 201 bp, Homo sapiens
ttcaagaccaccctggccaatatgatgaaaccccatctctactaaaaatacaaaaattactcaggtgtggtggcttgcacctgtagtctcagctacttggrtggctgaggcaggagaatcacttgaacctggaggcagaggttgcagtcagccgaaatcatgccactgcactccagcatgagcgacagagcaagactccat

SEQ ID NO: 414485 - DNA, 201 bp, Homo sapiens
acaaaccatgatagcattttgggtcaagaataccagacattccttttattacgaagtagttgccctttaaggtagttgagttttccgtttcatttggatartgtgctgtgttgagctttggttgttaattgataaatgtggtatcctctctgtgaaagcttttaaaatgcataacacgtatttcagaaagcagctgttgct

SEQ ID NO: 414486 - DNA, 201 bp, Homo sapiens
cacttaaacaattattgattttttttgtggcccaggctaactgtaaaactcactaattatgatttatgttttgttttctggaaaacaactttggctgtcartgtcacactacaactatagaagaaattgtatgactgctgccactaccactgttatactcttccaaattcagaacatatgctgttggaagtagcttatgta

SEQ ID NO: 414487 - DNA, 201 bp, Homo sapiens
gtgctccaaccagactaaatactatactctgtagtgagtaccctcctcccaacagtttaccttataactgtccctggaaagctgttctgctgtggaatcaygtgaccattccttcacttcatgctcaaatgtcaaggtctcagagaggccttcccaaatgaccatctaaaatagcacccccttaatcattaactgacgtgg

SEQ ID NO: 414488 - DNA, 201 bp, Homo sapiens
ttaaaccccaatcttttctttattcttcagacatactaaagaccacctcagtctttgtgtttgttccaagttgcacttctggttttatatattcccagctraaatattttgcttagagatttgtctctatactttgattttgatactcggcatactagtccccccaaccctttgcagtcatggatctttttactgcctttt

SEQ ID NO: 414489 - DNA, 201 bp, Homo sapiens
gtcatgattagaaggtatacttcacttggttagaataactttaatctgagaaacagccaggactccaaatggtggagtctgatgagctttctgacaatacytttttcttaccagtcggggtctaatggaggaagatgctgagcccatctttgaagatgtgatgatgtcatcccgaagccagttagaagatatgaatgaaga

SEQ ID NO: 414490 - DNA, 201 bp, Homo sapiens
caaatacatctagactttttgatctgttcagttggttactttcaaaattgggttcatggattagagctgtttttcaaactagatttattatgttactgttstttaccttatgatctttaagctctgttcttgttgcctaacctttgtaaagccagttctcccaacaagatgatgttggcctaacggttcgaggcgattgct

SEQ ID NO: 414491 - DNA, 201 bp, Homo sapiens
atgtaataagccattctaggtttggcaattgaattttatccagttacctccttcccatgggtatgcaatatgtattggttatgatctgtatgttttcttaycaggtggaaatttttctttatagacaagccattgcttcaaccatggccaaaattattcttgagaaaattattcccatttggggaactccccttgaagttc

SEQ ID NO: 414492 - DNA, 201 bp, Homo sapiens
aaatgaagtactgaattagtgtcagaagaggcagagcattacataagtcattaaaattcacactgaaaccagcctagtaacatggtaaccccgtctctacaaaaaaaaaaaaaaaagccaggcggggtagcacactcctatagtcccagctactccaggggctaagttcggaggatcacttgagcccaggaagtcaaggct

SEQ ID NO: 414493 - DNA, 201 bp, Homo sapiens
taccacgcctggctaatttttgtacttttagtagaggtagggtttcaccatgttaagcaggctggtctcgaactcttgacctcaggtgatctgcccacctyggcctcccaaagtgctgggattacaggaatgagccactgtgcctggcccactgcaattgactttttttttttttttttttttttttgagatggagtcttg

SEQ ID NO: 414494 - DNA, 201 bp, Homo sapiens
gtcaggagttgaaggccagtctggccaacgtggtgaaaccccatctctaccaaaaatacgaaagttagccaggcatggtggcgtgggcctgtaatcccagctactcgggaggctgaggcaggagaatcacttgaacgcaggaggtggaggttgcagtgagctgaggtcacaccactgccctccagcttgggcgatagagca

SEQ ID NO: 414495 - DNA, 201 bp, Homo sapiens
gtggagagatggagtaacttgtattttttactttgactaagatgacagagatgtgaagtaagtacagctggtccaagagtttctaatggaattccaagggaaaatgattaatttcctttaaaaaataaaaataaagatagttgaagagaccgcaaggagtagggaaaagtgacctagatccagcatataacttcagaaaat

SEQ ID NO: 414496 - DNA, 201 bp, Homo sapiens
tgatgttaaaccaagtcacctagatttatttacaaaatgggctttcagggttcaaaggcatgcgaaagtaactcccccattgaggactccagctggttatrtgcttaaacattacggtctgtctctctcttttttttttttttgagacagagtctcactctgttgcccaggctggagtgcagtggtgcaatctcggcgcac

SEQ ID NO: 414497 - DNA, 201 bp, Homo sapiens
atgaaaatcatttatacaaattgaggttaattgtcatacctagctaaactggagtcaaggggccaaggaggaaaaagcatttatggtacaaagcacatgcttccagggattgtctcacaagcccagccaccaaaatgaccttgtataaacttaagcccagttttacctagtagctgctaaaaccacctgccttgactctaa

SEQ ID NO: 414498 - DNA, 201 bp, Homo sapiens
agttggagatgtaggactaaattttgggaaagcagacacactgtgacagactaccaacatcagtttaaatcacagtggccttaagactgtcttacagtgtktgtgtgtgtgtgtgtgtgtgtgtgtgtgtgtgtgtgtgtgtgtgtgtgtgtgtgtcggggggtgttttacagcaaaatcaagttgctgaataaattttta

SEQ ID NO: 414499 - DNA, 201 bp, Homo sapiens
ccgggtgtggtggcacacctgtaatcccagctacttaggaggctgaagcaggagaatcctttgaacctgggaggcggaggttgcagtgagctgagatcacrccattgccttctggcctgggcgatggagcaagactgtctcaaaaaaaacaggctgggtgcagtggctcacacctgtaatccccgtgctttggtaggccaa

SEQ ID NO: 414500 - DNA, 201 bp, Homo sapiens
tcactaaagtgagagctccatgagaacagggattttgtcgtttgttcctaagattcccttttacctagagcaatgcctagaaataagatacctttagcaattttttttttttttttttgagacatagtctcgctctgtcacccaggctggagtgcagtggcgcgatctcggcttactgtaagctccacctcctgagttcat

SEQ ID NO: 414501 - DNA, 201 bp, Homo sapiens
agatctttgaaggcaatacaagaaacctggaagccataaaacaaaaggagacagacgtggctttttaaaaattaacaatttctgtctgacagaagataccrtgaagagtctgataacaaatgacaaactgggagaaaatacttgcatcattcaaaagataaaaagtactacccctaccatacaagagttctcagattgata

SEQ ID NO: 414502 - DNA, 201 bp, Homo sapiens
aattactttaaaaaaaaaaatagcaaagtacagagcttaactttagtctttaaaataagcagtaatagaatgttttcagtttttttaataatgtgttcatytttaatacatggttgttgtaaaactgtctactcatgctcatgtattttgttttaccttagcaatgtctgatcgtcaagagagtgctcttatagagctaat

SEQ ID NO: 414503 - DNA, 201 bp, Homo sapiens
aggctaaggtgggaggatcccttgagcccaggagttgcacaggctgcagtaagctatgatcgctccatttgtactccagcctgtgcaagaccctgtctctaaaaaaaaaaaaaaaaaagcaacaatagtttcagaaattgataagtatgagataactactaaaaagtttagggaatatgatgatcttcgctaactgacttt

SEQ ID NO: 414504 - DNA, 201 bp, Homo sapiens
gtacccacatgcttggtcgataagatctgtagtttgttaccagagtggcactgcgtgcaaaaaccagaagctttgttgtcagagagaatggattaagtggmtcatgcctgtaatcctagcacttatgaggcctaggtgggggattacttgaagtcaggagttcaagaccagcctggccaacatagtgaaaccccgtctcta

SEQ ID NO: 414505 - DNA, 201 bp, Homo sapiens
aaagaaaacaaaaattaaaatctttagttactgtattattcaaaaatgtctactttcaagaaaaactacagccatgcaaagaaacagtaaaatgtgaccayactcaggaaaaaaagcagacaatagaaatggcttctcagtagggctatatgttggatttagcaggcaaagacttcagaggccttttaataagtatattca

SEQ ID NO: 414506 - DNA, 201 bp, Homo sapiens
gtgatttttacttaaaaaataaatgtaaaagcactttgggaggatgaggcaagaggagttcaagaccagcctgggctgaacatagtgagatcatgtctttmcacacacacattctcattctctctgtctctctgtctctctgtctctctgtctctctctctctctctctctctctctctctctctctttcggcatggtggt

SEQ ID NO: 414507 - DNA, 201 bp, Homo sapiens
gggagttgaacagtgagaacacttggacacaggaagggaacgtcacacgctgggacctgccgtggggtggggggaggggggaggaatagcattaggagatwtacctcatgtaaatgatgagttaatgggtgcagcacaccaacatgacacatgtatacatatgtaacaaacctgcacgttgtgcacatgtaccctagaact

SEQ ID NO: 414508 - DNA, 201 bp, Homo sapiens
ttgaagatgtgcattgcttctaacccaataatttcacttgtaggtatcaaaacagtgtctcacagatgttgttgactatgtcctacattaggtacacagtrgcttcaagaaagaatacttacttgcctactacatgtggagcattttggtattttctgtcctatatacttttatgtatttgttgccactcactgaatcaat

SEQ ID NO: 414509 - DNA, 201 bp, Homo sapiens
agcagtcaaagtggattggagcactagaacccaaagaggagacaagttacccagggagtttttatagctacagaataggctctctggccccacatggtcarattgcaagtctggaaaaggatatttacatttttaaagttaagatgggaaggattgaactggcatctgaagtagacaaggactgggattcctagaaaacat

SEQ ID NO: 414510 - DNA, 201 bp, Homo sapiens
tgcctcagctttccaagtggctgggactgtggtcacgtgccaccattcctcactaatatttttttgttttgttttttggtagagatgagggtctttgtatsttgcccaggctggtcttgaactcctggcctcaagtcatcctcctgccttggcctcccaggagttgttggaattacaggtgcaagtcactgtgcctggccc

SEQ ID NO: 414511 - DNA, 201 bp, Homo sapiens
ctcactatcatgagaagagcatgtgggaaactgcccccatgatcccagttacctccacctggtcccgctttggcatgtggggattatggggattacaattygaggtaagatttgggtggagacacagagccaagccatatcaggtatatacccagtaatgggattgatgggttgaatggtagttctgtttttaggtctttg

SEQ ID NO: 414512 - DNA, 201 bp, Homo sapiens
ggttcaccacattgcccaggctggtcttgaacttgtgggctcaagctgtccacccacctgggcctcccaaagtgctgggagtacaggcatgaaccaccacwcctggcctaacatatttttcctaatactaaagatgttgaggctggacgcggtgtcctatgtctataatcccagcactttgagaggtcgatacaggcagat

SEQ ID NO: 414513 - DNA, 201 bp, Homo sapiens
gtcactctcagactcctgagggataaacatttctttataccttatggttgattttatattcacatatgattcattattgattaacttttcttatagaatcrgcatctccagacttttcctctgaggaaggaaatgacatatgaaattgctttaatttatgatcagaggctgaaaataattttgcctcagaaaattgaagtc

SEQ ID NO: 414514 - DNA, 201 bp, Homo sapiens
agaaataaactttaaaatttcatttgcaatgaaaagtcccaagcatcataaatactaacttagcaaaaagaatatcgccacagatgttaaagacaacaaaygttcctccaccctgagtataatttacatacggtaaaattcaaaactttttttagtgttcagtttcatgagtttcatgtgcatccgttgtgcaaccatcaa

SEQ ID NO: 414515 - DNA, 201 bp, Homo sapiens
attatctgggacccctagtgacatagctttgaagcacaggttgaagaaacaggacttgatcatttatgcagtctgataagaaactgctaaagaatcttaartagtctcaaatatttaaatcttaaattatgtaactggagccaattatacaatgtcatctataaacaaggtacttgctaaaactttttgctctataattta

SEQ ID NO: 414516 - DNA, 201 bp, Homo sapiens
ttacaatgttgatttacattttatttaatcagaccttgcataaactagtattggatctgtcatagcctgactgaactattcaaaactagaatacaagtgtrgttgagaatgtgacctacttggcaaaagtgatcagcatgccatggatactaatcattaatttccataagtatcactcagtctacattattgattaatagg

SEQ ID NO: 414517 - DNA, 201 bp, Homo sapiens
tccttatgcgaataccacactgttttgactcccttggctttgtagtaaatttgaaattggaaagttttagtctcaaattttattgtgctttttcaatattrttttgactgtttgggaccccttgcaattctgtatgagtttgaggattggactttccatttttgcaaaaaagtccattggaattttgataggggttgcacc

SEQ ID NO: 414518 - DNA, 201 bp, Homo sapiens
attcaatatcaacctgaagtcagttacaagttaaaaatgtatattataatccctacagtaatcattcatatttaaaaataaaaacagaggaattatagtgrtcctcatctgctagagacatatgctgaaatatttaagggtgaaattatataccgtttacccttgaacaatgcaggggttagtggcactgacctgcacagt

SEQ ID NO: 414519 - DNA, 201 bp, Homo sapiens
aaatctatagttttttggttagcctgatcagcctcttttctctttgctccccttttcccttttctttataccttttacatgtatatatgtgtgtgtgtgtrtatatatatatgtatctataaatatttatatacaaatttatatacaaatatatatttatatacaaatatatatacaaatatatatacacatatatgaaag

SEQ ID NO: 414520 - DNA, 201 bp, Homo sapiens
gagtggctgggttttacaggcctgtgccaccacgcctagctagttttctgtatttttagtagatacggggtttcaccatgttggccaggctggtctcgaaytcctttcctcaggtgattctcccaccttggcatcccacagtgcggggattacagacgtgagccctcattcctggctggtgtctatttgctctctaatttc

SEQ ID NO: 414521 - DNA, 201 bp, Homo sapiens
cagaggttgcggtgagccgagattgcaccactgcactctagcctggcgacagagtgagactccatcaaaaaagaaataatgaataatcttatgcatatctmattacttgtaccaggtgtgttggtgagatagaattggtattgctaggtcaaaggaaaaatatatatacaattttgttagatattggcaaattccttcttc

SEQ ID NO: 414522 - DNA, 201 bp, Homo sapiens
cacacctgtaattccagcactttgggaggccaaggtgggcggatcacttgcggtcaggagttggaccagcctggccaatatggtgaaaacccgtctctacsaaaaatacaaaacttagcccgacttagtggtacgcacctgtagtcccagctacttgggaggctgaggcaggagaatcgctcaaacccaggaagcaaagcg

SEQ ID NO: 414523 - DNA, 201 bp, Homo sapiens
  misc_feature (1)...(201): n = A,T,C or G
aaaacaaaatgtatattttccatactatttcttattttgatattgggctagagtcgtttggtgaaagagtacagtattacttatcctttgctgtctcttanaaatagtgacaagtatctttattgagttatcagcatttaacttaaaatggaaacagagatggtcttccctaaaccttattctttaaatcttcagaacact

SEQ ID NO: 414524 - DNA, 201 bp, Homo sapiens
catctggatgctttattaaaacagattaagtttgttgtggagaaacacgtagaatcagatgttctagaagcctgcagtaaaacctatagtatcttatgcartgaagaatataccatccagaacagagttgacatagctcgaagccagctgattgatgagtttgtagatcgattcaatcattctgtggaagacctattgcaa

SEQ ID NO: 414525 - DNA, 201 bp, Homo sapiens
tgaacaatcaaataggcagtgctattacttcttgcacatattcttaaacattgaggttcacatttatgaagtggcaatttatattggaatgtttctgttcygtaaaaccatttgacattatgatggcaaatcccttcaagataataaaatgcagaatacttaggggaaatgattatgttaaactgaacttacattttaata

SEQ ID NO: 414526 - DNA, 201 bp, Homo sapiens
tacaatgttctttctacattaaagcggttaacttcttttcacaagtacgttattttatttaaagtaaaggcaacgaggtggctcatgcctgtaaccccaayactttgagaggccgagatgggcagattgcttgaggccatgaattggagaccagcctggcgaaaccctgtctgtacaaaaaatacaaaaattgggcatgag

SEQ ID NO: 414527 - DNA, 201 bp, Homo sapiens
ttaccaatattcttgggattcatgagcatgagttgtctttccattcgtttgtgtcctcttcagtttctttcatcagtcttttgtagttttccttatagagrtccttcactttagttagctttatttctagatcttttattttttctagctgttgtaaatgggattgccatcttgatttttttacagctgttttattaatgg

SEQ ID NO: 414528 - DNA, 201 bp, Homo sapiens
gttttatatagtcagaagtttatgatactgaaatgtctgggaaaagattactcagtaacagttacactttttcagtttggacaaccctggtcatataattygtttctggctatttttattatcgatttcttactgctgatccagtaagttatagaattgtactagtagttttttaatgggcctgttatattctcttaatct

SEQ ID NO: 414529 - DNA, 201 bp, Homo sapiens
gcaggattaaatgttttcctatagcaggaactatggtaagcactttttgtatccacttagcaccttccactgtaaaatgtatatagtcagcacttagtgayttactaagatgatttaacaaattatttccttttagatgtataatttttaaaataatgtttattacttttttatttaactcatatatactcttgttagaaa

SEQ ID NO: 414530 - DNA, 201 bp, Homo sapiens
ctgtctcaacctccttagtggctgagattacaggccaccatgcccagataatttttgtgatgttttgtttgtttgttttgagatggagtctcactctgtcrcccaggctgtagtgcagcggcgtgatctcggctcactgcaacctccgcctcccgggttccaacgattctgctgcctcagcctccccagtagctgagatta

SEQ ID NO: 414531 - DNA, 201 bp, Homo sapiens
taatttcttagatttcttcataagctcttctttgtcattcatctttcaaatattggtatttcccaggatacttgctgtcacctttctctgtgtattctccytgagcagtctcatccacttctgacacatctgttgctatctaaatgctgaagactcccaaatccttgtttacttctttctcttaggctttgaactcacata

SEQ ID NO: 414532 - DNA, 201 bp, Homo sapiens
atttaattgcttattatacagactttgagataatattcctattttcagaccataacacacttcatcttctatggaacctactacttctaatagctgatggkgtctggattctactaagctaaaatagcttatttttattttcgagacagggtcttgctctgtcatccaggctggagtgcagtggcatgattacaacttact

SEQ ID NO: 414533 - DNA, 201 bp, Homo sapiens
cagatacttcaccagtcctttaaaaagaagtttcaggaaaagagagaagcccttggtcatggtagtgtgcacctgtagtcccagctacacaggaggatgaratggtaagactgcttgagcccaggagttccagggtgcagtgaactatgatcaagccactgcactccagcctgaacgacagagcaagaccccgtgtctaaa

SEQ ID NO: 414534 - DNA, 201 bp, Homo sapiens
catttaaattttaatttctcatttatctaatttatttaaagcactgttcctcagactttagcacacaccagaatcacctacagagcttgttcaaacagatrgctgggcaagaagttcctaggcaatgttgatgctggtgatttgggaactacacattgcaaatatctgctttaaaattttgttattttttggcttaacctg

SEQ ID NO: 414535 - DNA, 201 bp, Homo sapiens
ggcacacactaccatacctggttaattttttgtattttcagtagagacgaagtttcgccatgttgcccaggctggtctcaaattcctgggctcaagccatytaccaccctcagcctcccaaagtgctgtgattaggtgtgaactatcatgcctggcctaattgtttcttaagttgaaaactaaaattattcattttatatc

SEQ ID NO: 414536 - DNA, 201 bp, Homo sapiens
ccgcctcagcctcccaaagtgctgggattacaggcctgaggcaccgcacccagccctcttttttttttttttttttttccacaccaccacaatatcattgkgaagtcccagtataaaatattttattaatatcaccaaatagccagttttatagtttgtaatcatcttatgaacatttaaaatctagttcggtggttagag

SEQ ID NO: 414537 - DNA, 201 bp, Homo sapiens
gtaaatctatagttttttggttagcctgatcagcctcttttctctttgctccccttttcccttttctttataccttttacatgtatatatgtgtgtgtgtrtgtatatatatatgtatctataaatatttatatacaaatttatatacaaatatatatttatatacaaatatatatacaaatatatatacacatatatgaa

SEQ ID NO: 414538 - DNA, 201 bp, Homo sapiens
tcctaaatttctagaagtgaagtttgttagtatatgctgtttgttttgaaagcttttgacatatattattgcctttcacacagcaaaatatatgggtataygctatgttactgcttataatggttaagtcttttctaatttttaagtggtgaagtttaaatcagtactttctatattgttcattatttgtgaataaaggtg

SEQ ID NO: 414539 - DNA, 201 bp, Homo sapiens
gaggtggagtttcgctctgtttcccaggctagagtgcagtggcatgatctcggctcagtgcaacttccacctcccggattcaagcgattcttctgcctcarcctcccgagtagctgggattacaggtatgcaccaccacgcccggctaattgttgcatttttagtagagtcgggattttaccacgttggttagactggtct

SEQ ID NO: 414540 - DNA, 201 bp, Homo sapiens
tcttaaatttctgacctcaggtaatctgcccattgtggcctcccaaagcgctgggattaaaggcttgagccacagcgcccagccaagttataaattttttrtagagacaggatcttgctatattgcccaggctggtctctaactcctggcctcaagtgattctcctgcctcagtctcctaaagtgttgggattacaaatgc

SEQ ID NO: 414541 - DNA, 201 bp, Homo sapiens
tattttgttttcagacagagtattgccctgttgcccaggctggagtgcagtggcgtaatctcggctcactgcaacctccgcgggttcaaatgattcccctscctcaacctcctgagtagatgggattacaggcatgcgccaccatgcccggctgatttttgtacttttagtactgatggggttttactatgttggccaggc

SEQ ID NO: 414542 - DNA, 201 bp, Homo sapiens
cgtgatctcggctcactgcaaccgctgcctgtagggttcaaataattctactgtctcagcctcccgagtagctggcactgcaggcacccgccaccatgccyggctaatttttgtatttttttttagtagaggtggggtttcactatatgttagtcaggctggttttgaacttctgacctcaggtgatccacccatctcagc

SEQ ID NO: 414543 - DNA, 201 bp, Homo sapiens
tgggattacaggcatgagccactgcacccggctgtatggatctttatgaaaaagcttgctgaccctggacatcatttacaatattatttatagtttcattkttgttgttttgttttgtttgtttttgagacagagttctactctttcgcccaggctggagtgcagtggtgctatctctgctcactgcaacgtccatctccc

SEQ ID NO: 414544 - DNA, 201 bp, Homo sapiens
taatatcataagataatgagaaggttaagtgtgtgtagatttcttttggtggtgggaataggtgttgaggcagggttaacaataccttgtggttttatgcrgtatgcatttacaaagaagagcaaagagaaatagaacagacaaaaacgattaagtgttgctgtgtacacgttgctgttataaaccatttatgtaaattcc

SEQ ID NO: 414545 - DNA, 201 bp, Homo sapiens
tctcatgtatgtaacacttaaaaaattgaaatattgatatttatattttgagagagagagacagagagatgcaaaagcctaaatatttatggcagcgtcaractattaacagtggtattctgcagatgggattcagagttaggatgagataaagtgaaacttttccttgtattcttatatattttctgttgctcgaaattt

SEQ ID NO: 414546 - DNA, 201 bp, Homo sapiens
gtgctcattgataaggaagtagctaaataagttcagtgcatattatggagtgccattcaggaatctaaaatatttatatggaagattctcatgtatgtaayacttaaaaaattgaaatattgatatttatattttgagagagagagacagagagatgcaaaagcctaaatatttatggcagcgtcagactattaacagtgg

SEQ ID NO: 414547 - DNA, 201 bp, Homo sapiens
aagagaaacttgattatgtagtaagatttatttatgtacaagaacagtcatttcagccctgtttgtaatagtgcaaaactagagacaaactaagtgctcaytgataaggaagtagctaaataagttcagtgcatattatggagtgccattcaggaatctaaaatatttatatggaagattctcatgtatgtaacacttaaa

SEQ ID NO: 414548 - DNA, 201 bp, Homo sapiens
tgtttagtctacttttctaaggaagagacagttgaactgaggtcttaagtggggtttaggagaagaagaagggagcaggctattaggcccagactgagatkatgtcatgcaaggaccctgcgatatgtttgaaggcctgaaataaagcctccccccaccccttttttttctccagcactggggatggagagtgacatgaga

SEQ ID NO: 414549 - DNA, 201 bp, Homo sapiens
ttagaaggtgccgccattggtgctgccttctcttcccacagcctgtaactcagtgttttgtacttcactgaattgtgatggttagaaacttcgtgggtagwttgtggaactcatacagttaaacatattttttaaaatgatgttgctgtgacttcatagacaagcctggaaggggcaccttaggaagccccttcgcttcag

SEQ ID NO: 414550 - DNA, 201 bp, Homo sapiens
tttggtaatttgtatttctcaggcaatatgtctatttcatgcaaattgtaaatttaatggcataatgttattcataatattttgtagttgttttaattttkggggggttgtcagcccccttatttattcttgtgtgatttgtgtcttctcttttgtctttctcagtttcactgtaagtttgttttgttgatcttttcaaat

SEQ ID NO: 414551 - DNA, 201 bp, Homo sapiens
aagcagttacttgctatgaacagcatggacagtaaattttctaggatacttttgaagaaaagatttattacttcatccagtaacatttgaaatgttgagayctagaggtatggaagaagaggaagagtgatgtgatggaggtgaaatggagatggagagtggtatgagcagaggcagttggggctgaagtcaatgaaactt

SEQ ID NO: 414552 - DNA, 201 bp, Homo sapiens
gtctcgatctgctgaccttgtgatccacctgcctcagcctcccgaagtgctgggattacagccatgagccactgcgcccagcctggtttattttctttagkgctttttctttaatatatttgtaattttattgagattacaatgtactttcaatttttatcttctcttcaattaacatattttcttcagttattaagaaaa

SEQ ID NO: 414553 - DNA, 201 bp, Homo sapiens
tgagtttcaaacatttggctgttgtgaataatgctgtgaacattcatttacaagtcttggtgtagacatatgtttcattcctctttggcagatacctaggwttggaattgctcggtcatgtagtaaatttatgtttaatattttaagaaaccgctaaattgttttccagaatggttgtactgttttgccccctccctgcct

SEQ ID NO: 414554 - DNA, 201 bp, Homo sapiens
taatccttagtttgcctttttctgtaacagagattatttccttgtgtaccttatatagctgtgaagattaagcaagatactgttctattgagtcccttttstgcttcctgtaccctcctgtgtggttcatccttttggaatattacaagagcataatgagccatcccccgcagtagactacccatgcagattaccgggaga

SEQ ID NO: 414555 - DNA, 201 bp, Homo sapiens
ggccaggactttgagaccagcctggtcaacatggcaaaaccccatctctactaaaaatacgaaaattagctaggcaaggtggcgcacacctgtgatcccasctacttgggagactgaggcaggagaatcacttgaacctgggaggcagaggttgcagtgagccgagattgtgctgctgcactccagcccaggtgacagaac

SEQ ID NO: 414556 - DNA, 201 bp, Homo sapiens
ttcctttcatagcttttatcatgatgcaagtcgggaatctgcatactttgattctgtataacaatggtttagatataataaaagtgatgagcactttaagyagttatttatatattattactactcagttcatttacataccttattttcaagagagaacctctgattgatctcttggccttctttttttcccttccagca

SEQ ID NO: 414557 - DNA, 201 bp, Homo sapiens
agtttagtggatagcttgatgtagggtagacaggaaattttaaattcataaatccctttgtctaggctgagcgtggtggctcactcttgtaatcccaacaytttgggaggctgaggctggcagatcacttgacctcaggagtttgagaccagcctgggcaacatggtgaaaccctgtctcaaaaaaacaaaaacaaaaaca

SEQ ID NO: 414558 - DNA, 201 bp, Homo sapiens
attaaacaaaattttagaaaaagggctagataagggaaacttgcttatatattcaagttggttgaattaagttacatattaagttataacaaattatgccrtaagtctagtataatcaaagcagtaaagcattgtcatagaaatatacaaatagattagtgaaactaaagaatccaaaaatgcctgaaccatgtttaaaaa

SEQ ID NO: 414559 - DNA, 201 bp, Homo sapiens
aagactgatactgatctttgtctttctgtatgtatgtatcctatttctttagcttccttttgaattttccctttaactgtggtttttagcagtttgtgtaktttgatgtattctgcttgggaattctctgatcttacatctgttttgatatcttacatgattttttgaacattcttccccattatatctcttcaaatattt

SEQ ID NO: 414560 - DNA, 201 bp, Homo sapiens
acaaaaggcttttgaggctgtggacaaagcttacaagttgctactagatcaggagcaaaagaagaggaccctggatgtaattcaggcaggaaaagaatacrttgaccacactgtgaaagagcgaaaaaaacaaagaaggaaggaaaacctacaattgtagaggaggatgatcctgagctgttcaaacaagctgtatataaa

SEQ ID NO: 414561 - DNA, 201 bp, Homo sapiens
ataactgtatgctatatgggttctttttttattccagtttgatgtatgagaatacttaggcatagtgagttgcaaagctagaaagtagaatacgtggtatragaactcaggtaattgagccccagaaccgaaactcttaaattactcttacatttcttttgattttaaggtttatgttactgagatattttaaaaatagtc

SEQ ID NO: 414562 - DNA, 201 bp, Homo sapiens
agtaaatgctgaggttactttctgtaagcaaagaattttagttaattggttctcatcagcaggtagggctagcaatagattaaaactttattaatgaggcmgagcgtggtggctcaagcctgtaatcccagcagtttgggaggccgaggtgggtggctcacgaggtcaggagtttgagatcagtgtggccaagatggtgaa

SEQ ID NO: 414563 - DNA, 201 bp, Homo sapiens
tgcctgccaccgtgctttaaaattctttaaactgttatttagaattttacataatgtactgtataattgatatagttcacaaagaaaagaaaaagcaaacrcagagtaagatgtggaatctgtgtgaaatctttacagataacttcagccaatctttatcctctgtatctatcccgttgcatttattgttggcgtcataag

SEQ ID NO: 414564 - DNA, 201 bp, Homo sapiens
tagaagtgaacaaaaaggacaaacaataccttccctcatgaaacttacattcctttatgcttttgtcttcctcctgtagctgtgaattaatattcattctrgagttccaggtactcttccagtcacttaccacaataactgtatgctatatgggttctttttttattccagtttgatgtatgagaatacttaggcatagtg

SEQ ID NO: 414565 - DNA, 201 bp, Homo sapiens
ggtaaaatagtcaggatatggtagaaggggaagaagggtaggtagaaggggaaatcaagactgatttcagggttttttattttctagcttggatgactgcrtgatttcattacataaaatgaggaatttggataaaacacataatcttaaattttacttaggttcttgttttggaggacagagagggtagaggattgttag

SEQ ID NO: 414566 - DNA, 201 bp, Homo sapiens
atagaatcttttctttatataacataccccttattgcttccctcagatttttctcctccttttctaaatcaagcttgtccaacctgtggcccatgggctgyatgcagcccagaatggctttgaatgtggctcaacacaaatttcataaactttttaaaaacattatgaggtttgttttgtttgtttgttttttaccttatt

SEQ ID NO: 414567 - DNA, 201 bp, Homo sapiens
tgaatatgatatgattcttttcttttgatgctttgaatatttcttctttgtccttgatttttgttaatttgattatgatatgccttgggaaattcctcttygggttgaatttgtttgatgacatctgagctttctgttcctggatgctgttgtctttctccagatttggggaattttcagccttactcttttaatatgctt

SEQ ID NO: 414568 - DNA, 201 bp, Homo sapiens
aaaaaattttaaatgggtggcatgcacctgtagtcccagctacttgggaagccgaggtgggagaatcacttgagcccagaagtttgaggttgcagtgagcyatgatcatgccactgcactccagcctgggcgacagaggaagactcccatcatttaattttttaaaaaggcagtaatggctaaatctggttttataaccct

SEQ ID NO: 414569 - DNA, 201 bp, Homo sapiens
ttcgttgtgaacaagctactaatccatttatattttctagttattgcactattaagttattttgtatatttatcttgtcagctaccttgtcaaattttccyattattaatctcttgaatcactttaatagagactcctgggttttcttatcaactgtaggaaaggagaattgtctttactaaattttgctaacttttgcat

SEQ ID NO: 414570 - DNA, 201 bp, Homo sapiens
ttagaaacagtgcatgcttgtttttaattatatggatatgtttgcagataaatgaatcagttcttctaaagcactgaacagttcagtttttttaataaccraatgttcatacttgcacatgaataacctaaaaggagcaaaaaggggaaattatttaccagctcaaactgtcttgttcctttacctgtatttcccatattc

SEQ ID NO: 414571 - DNA, 201 bp, Homo sapiens
tttttaaaaacattatgaggtttgttttgtttgtttgttttttaccttattagctatcattagtgtattttatgtatggcctacagcaattcttcttccartgtggcccagggaagccaaaagattggatacctgtgttctaaatcaagggtccccaaccactgggctgtggacccatactggtctttggcctggtagaaa

SEQ ID NO: 414572 - DNA, 201 bp, Homo sapiens
cccctaagtggtacagtaatcattttccttactacagtaggtttttcattaaaaattgtttttcctaataagtaacagttactagttgtttgttaaatgayttcttgttgcttacacaatttatctatgtaagtagctccctgccaggtgcggtggctgatgcctgtaatttcagcactttgggaggctgaggtgggcgga

SEQ ID NO: 414573 - DNA, 201 bp, Homo sapiens
gaacactacttatggagaaatacccagctctgccatttattttattttgttttattttattttattttattttattttattttattttattttgttattatttatttatttatttatttatttatttatttatttatttattttgagacggagtctcccactgttgcccgggctggtgtgcagtggcgtgatctcggctca

SEQ ID NO: 414574 - DNA, 201 bp, Homo sapiens
aacactacttatggagaaatacccagctctgccatttattttattttgttttattttattttattttattttattttattttattttattttgttattatttatttatttatttatttatttatttatttatttatttattttgagacggagtctcccactgttgcccgggctggtgtgcagtggcgtgatctcggctcac

SEQ ID NO: 414575 - DNA, 201 bp, Homo sapiens
gattcataaagcaagtccttagtgacctacaaagagacttagactcccacacaataataatgggagactttaacaccccactgtcaatattagacagatcragacagaaagttaaaaaggatatccaggaattgaactcaactctgcaccaagcagacctaataaacatctacagaactctccaccccaaatcaacagaat

SEQ ID NO: 414576 - DNA, 201 bp, Homo sapiens
ataaacatctacagaactctccaccccaaatcaacagaatatacattcttttcagcaccacacctattccaaaattgaccacatagttggaagtaaagcamtcctcagcaaatgtaaaagaacagaaattataacaaactgtctctcagaccacagtgcaatcaaactagaactcaggattaagaaactcactcaaaaccg

SEQ ID NO: 414577 - DNA, 201 bp, Homo sapiens
agttgctactagatcaggagcaaaagaagaggaccctggatgtaattcaggcaggaaaagaatacgttgaccacactgtgaaagagcgaaaaaaacaaagaaggaaggaaaacctacaattgtagaggaggatgatcctgagctgttcaaacaagctgtatataaacagacaatgaaactctttgctgagctggaaattaa

SEQ ID NO: 414578 - DNA, 201 bp, Homo sapiens
ccgtaacatcacaattaaaagaactagagaaacaagagcaagcacattcaaaagctagcagacggcaagaaataactaagatcagagcagaactgaaggamatagagacacaaaaaacccttcaaaaaatcaatgaatccaggagctggttttttgaaaaaatcaacaaaattgatagaccactagcaagactaataaaga

SEQ ID NO: 414579 - DNA, 201 bp, Homo sapiens
taggcattaccattcaggacataggcacaggcaaggacttcatgtctaaaacaccaaaagcaatggcaacaaaagccaaaattgacaaatgggatctaatwaaactaaagagcttctgcacagcaaaagaaactaccatcagagtgaacaggcaacctacagaatgggagaaaatttttgcaacctacttatctgacaaag

SEQ ID NO: 414580 - DNA, 201 bp, Homo sapiens
tacagaatgggagaaaatttttgcaacctacttatctgacaaagggctaatatccagaatctacaatgaactcagacagatttacaagaaaaaaacaaccmcatcaaaaagtggacaaaggatatgaacaggcacttctcaaaagaagacatttatgcagccaaaaaacacatgaaaaaatgctcatcatcactggccatc

SEQ ID NO: 414581 - DNA, 201 bp, Homo sapiens
aaatttttgcaacctacttatctgacaaagggctaatatccagaatctacaatgaactcagacagatttacaagaaaaaaacaaccacatcaaaaagtggrcaaaggatatgaacaggcacttctcaaaagaagacatttatgcagccaaaaaacacatgaaaaaatgctcatcatcactggccatcagagaaatgcaaat

SEQ ID NO: 414582 - DNA, 201 bp, Homo sapiens
gcaacctacttatctgacaaagggctaatatccagaatctacaatgaactcagacagatttacaagaaaaaaacaaccacatcaaaaagtggacaaaggayatgaacaggcacttctcaaaagaagacatttatgcagccaaaaaacacatgaaaaaatgctcatcatcactggccatcagagaaatgcaaatcaaaacca

SEQ ID NO: 414583 - DNA, 201 bp, Homo sapiens
atttcagttttgtctcttccttttcccttttttttttttttttttttttttttttgaggcaagagtcttgctctgtcccacagactagaaggcggccaggyacagtgactcacacctataatcccagcattttgggaggatgtagcagctggattatctgagatcaggagttagagaacagtctgcctaacatgacgaaac

SEQ ID NO: 414584 - DNA, 201 bp, Homo sapiens
cctgagctcaggtgatcctcccgcctcggcctaccatagtgcttgaattacaggcgtgagccaccgcatctggccaaaatctaaagtaatattaattcaartttttaactctctctctttttacttatgtcctcagattttctaatccttagtttgcctttttctgtaacagagattatttccttgtgtaccttatatagc

SEQ ID NO: 414585 - DNA, 201 bp, Homo sapiens
ttatctgacaaagggctaatatccagaatctacaatgaactcagacagatttacaagaaaaaaacaaccacatcaaaaagtggacaaaggatatgaacagrcacttctcaaaagaagacatttatgcagccaaaaaacacatgaaaaaatgctcatcatcactggccatcagagaaatgcaaatcaaaaccacaatgagat

SEQ ID NO: 414586 - DNA, 201 bp, Homo sapiens
taaaatggaaacagagatggtcttccctaaaccttattctttaaatcttcagaacactacttatggagaaatacccagctctgccatttattttattttgdtttattttattttattttattttattttattttattttattttgttattatttatttatttatttatttatttatttatttatttatttattttgagacg

SEQ ID NO: 414587 - DNA, 201 bp, Homo sapiens
gaccagcctgggaaacatagcaagactcccatctctaagaaaaaaaaaattttaaatgggtggcatgcacctgtagtcccagctacttgggaagccgaggygggagaatcacttgagcccagaagtttgaggttgcagtgagctatgatcatgccactgcactccagcctgggcgacagaggaagactcccatcatttaat

SEQ ID NO: 414588 - DNA, 201 bp, Homo sapiens
tagaaatttagaagaaaactttaaaaggaagagaagaaagtatcacacatagtcataatttttaagattttggttcctggtgttttgtttggtgtttggtytaggcttatgttaaagttatatttgttttataaaagtggaatgattaattttttccactgttgatattccttgaatatatgtgaatttttaatatatggt

SEQ ID NO: 414589 - DNA, 201 bp, Homo sapiens
aaacatagcaagactcccatctctaagaaaaaaaaaattttaaatgggtggcatgcacctgtagtcccagctacttgggaagccgaggtgggagaatcacytgagcccagaagtttgaggttgcagtgagctatgatcatgccactgcactccagcctgggcgacagaggaagactcccatcatttaattttttaaaaagg

SEQ ID NO: 414590 - DNA, 201 bp, Homo sapiens
aaaattttaaatgggtggcatgcacctgtagtcccagctacttgggaagccgaggtgggagaatcacttgagcccagaagtttgaggttgcagtgagctaygatcatgccactgcactccagcctgggcgacagaggaagactcccatcatttaattttttaaaaaggcagtaatggctaaatctggttttataaccctct

SEQ ID NO: 414591 - DNA, 201 bp, Homo sapiens
tttctcctacatccttgccagcagtagggctgtaactttttaagtttgccagcccaataggtgtaacattatgtctcctagtttctgttactttgaatttyttgggcaggcataagtttgaacatcttttttatgtttgtagacatttgtttttttttttttttgtgaagtatttttgatattctttgttgaaataaaatt

SEQ ID NO: 414592 - DNA, 201 bp, Homo sapiens
gggtggcatgcacctgtagtcccagctacttgggaagccgaggtgggagaatcacttgagcccagaagtttgaggttgcagtgagctatgatcatgccacygcactccagcctgggcgacagaggaagactcccatcatttaattttttaaaaaggcagtaatggctaaatctggttttataaccctcttggactatgggg

SEQ ID NO: 414593 - DNA, 201 bp, Homo sapiens
cataagtttgaacatcttttttatgtttgtagacatttgtttttttttttttttgtgaagtatttttgatattctttgttgaaataaaatttgccctgctytccccactgccaggtagctagtactacagcaggcacatgccatcatgcctgattgttttttttttttctttttcttctttttcttttttttttttttttg

SEQ ID NO: 414594 - DNA, 201 bp, Homo sapiens
agatcgcgccattgtactccagcctgggcaacaagagcaaaactccatctcaaaaaaaagaataacatcattgaaagatagtagtatgatacctagagacmcaaagtgaacaaccctcttgaagttaaaaacaacttaaaatgttgggtaaattttttttttttgaattttaatgtatccatgaccatgcaaaacaaagaa

SEQ ID NO: 414595 - DNA, 201 bp, Homo sapiens
taaacaggactgacaccatgattcagactcctggccccctgccagcaccacaactcacatccactgtactgcgggagaacagtcggcccatgggagaccasattcaagaacctgagtctgaacatggttctgaaccagactttttacacaagtaagtagcaaaaatttgtctttttcacaaaaagcctttaaagaaagtaa

SEQ ID NO: 414596 - DNA, 201 bp, Homo sapiens
ggcattaaattgtcagattgctataaaaacttctaaatgttttcaattttttgctcataatgaccttctaataaacttgttgtggtcagcacccatttgcrgacgacactatcagtaccactgtactagaacatatttaccattttatagtcagcagttaaaatgtgaaagctaaatgaaggacgtattcttctccttgct

SEQ ID NO: 414597 - DNA, 201 bp, Homo sapiens
aattccaacactttgggaggctgacgtgggagaatcacttgaggccaggagttcaagaccaacctgggcaatatagtgggacccccatctctacaaaaaawttttttttttaattagctgggcatggtggtagctgtagtcccagctactcaggaggctgagatgagaggatcacttgagcctggtgggggtcgaggctgc

SEQ ID NO: 414598 - DNA, 201 bp, Homo sapiens
gtgaaaaccaatttcatagacattatttttattaaaaaatagtgatgagtaggaaaataatatagtcacatgatttaaaattcaaagtagaccaggcactrcggttcatccctgtaattccaacactttgggaggctgacgtgggagaatcacttgaggccaggagttcaagaccaacctgggcaatatagtgggaccccc

SEQ ID NO: 414599 - DNA, 201 bp, Homo sapiens
ggaaccagcaatgttaatagctcaactgatgatcattggtcaagctagtcagattttagaaataggaaataattcttttgtcagaagaccttattttaaacacacacacacacacacacacccgtataattttgttttctagttcttgcctactgaagagtggtaatattgatgtatagagtgactcatttgcttagggta

SEQ ID NO: 414600 - DNA, 201 bp, Homo sapiens
ttatcctgttacattagtctgtctagccttgtaccaatatcactgcctcatttattgagcttaataaaataaatctaaatatcctgtagaataagtatcctttttttttttccttgaaacatgctctcgctctgtttcccaggctggcgtgcagtagcgtgataacagtgtactgtagccttgacctcctgggcttatacg

SEQ ID NO: 414601 - DNA, 201 bp, Homo sapiens
cacatggacacaggaaggggaacatcacacactggggactgttgtggggtggggggagtggtgagggatagcattaggagatacacctaatgctaaatgaygagttaatgggtgcagcacaccaacatggcacatgtatacctatgtaacaaacctgcacgttgtgcacatgtaccctaaaacttaaagtataataataat

SEQ ID NO: 414602 - DNA, 201 bp, Homo sapiens
tgtaatgttggtcatttagaagcaagctgaaagtttgttacgtaaagtaattttgtattattttgttgagaaaatgttaaaatgaaatgggtcatttagayagtgagggagcaagccagccaaccattatttgtttttctttctgtagtcatttatacagttatagaaacatttaaatctctcaagaggtcacatattttt

SEQ ID NO: 414603 - DNA, 201 bp, Homo sapiens
atgcattcttctggagtacctcctgaaggacctgcctgaggatgtttcacagttaatttttttcataagtaggagtacactctaaaatcatgattaaaagtatagaatagaaattagtatagtatagtatagtatagtatagtatagtatagtatagtatagtaaatacatacgccagtaacatagtcattcattatcctc

SEQ ID NO: 414604 - DNA, 201 bp, Homo sapiens
tcttgacttcaggtgatccacacactttggcctcccaaagtgctgggattacaggcatgagctaccttgtccggccccccaccttctttctttagagagagggtcttgttctgttgcccaggctggaatgaggtggcttggttataacttactgtagccttgaactcctgggatcaagtgatcttcctacctcagtctccc

SEQ ID NO: 414605 - DNA, 201 bp, Homo sapiens
atgtccggctaatttttgtatttttacaaaagttggctcagtttgtaatgccaggactaacagtatatggaggacttctgtgataatgcacctaaaactcyatccattttttccccttaattttttccctgaagtttaaatgtagtatggtagatactgggatttttatatatgttaaatgtatttaatatttgtaatgtt

SEQ ID NO: 414606 - DNA, 201 bp, Homo sapiens
tgcattcttctggagtacctcctgaaggacctgcctgaggatgtttcacagttaatttttttcataagtaggagtacactctaaaatcatgattaaaagtatagaatagaaattagtatagtatagtatagtatagtatagtatagtatagtatagtatagtaaatacatacgccagtaacatagtcattcattatcctca

SEQ ID NO: 414607 - DNA, 201 bp, Homo sapiens
cattcttctggagtacctcctgaaggacctgcctgaggatgtttcacagttaatttttttcataagtaggagtacactctaaaatcatgattaaaagtatagaatagaaattagtatagtatagtatagtatagtatagtatagtatagtatagtatagtaaatacatacgccagtaacatagtcattcattatcctcaag

SEQ ID NO: 414608 - DNA, 201 bp, Homo sapiens
attcttctggagtacctcctgaaggacctgcctgaggatgtttcacagttaatttttttcataagtaggagtacactctaaaatcatgattaaaagtatagaatagaaattagtatagtatagtatagtatagtatagtatagtatagtatagtatagtaaatacatacgccagtaacatagtcattcattatcctcaagc

SEQ ID NO: 414609 - DNA, 201 bp, Homo sapiens
ttttttgggacgagtcttgctctgtcgcccaggctggagtgcagtggcatgatcttcgcttactgcaaccttcgcttcccaggttcaagtgattctcctgycccagcctcctgagtagctgggaatgcaggcacgcaccaccatgcccggctaattttttttttttttttttttttttttttttagacagtttcactcttg

SEQ ID NO: 414610 - DNA, 201 bp, Homo sapiens
ttcttctggagtacctcctgaaggacctgcctgaggatgtttcacagttaatttttttcataagtaggagtacactctaaaatcatgattaaaagtatagaatagaaattagtatagtatagtatagtatagtatagtatagtatagtatagtatagtaaatacatacgccagtaacatagtcattcattatcctcaagca

SEQ ID NO: 414611 - DNA, 201 bp, Homo sapiens
tggaaccagcaatgttaatagctcaactgatgatcattggtcaagctagtcagattttagaaataggaaataattcttttgtcagaagaccttattttaaacacacacacacacacacacacccgtataattttgttttctagttcttgcctactgaagagtggtaatattgatgtatagagtgactcatttgcttagggt

SEQ ID NO: 414612 - DNA, 201 bp, Homo sapiens
ctggagtacctcctgaaggacctgcctgaggatgtttcacagttaatttttttcataagtaggagtacactctaaaatcatgattaaaagtatagaatagaaattagtatagtatagtatagtatagtatagtatagtatagtatagtatagtaaatacatacgccagtaacatagtcattcattatcctcaagcattagg

SEQ ID NO: 414613 - DNA, 201 bp, Homo sapiens
gaaccagcaatgttaatagctcaactgatgatcattggtcaagctagtcagattttagaaataggaaataattcttttgtcagaagaccttattttaaacacacacacacacacacacacccgtataattttgttttctagttcttgcctactgaagagtggtaatattgatgtatagagtgactcatttgcttagggtaa

SEQ ID NO: 414614 - DNA, 201 bp, Homo sapiens
tggagtacctcctgaaggacctgcctgaggatgtttcacagttaatttttttcataagtaggagtacactctaaaatcatgattaaaagtatagaatagaaattagtatagtatagtatagtatagtatagtatagtatagtatagtatagtaaatacatacgccagtaacatagtcattcattatcctcaagcattaggt

SEQ ID NO: 414615 - DNA, 201 bp, Homo sapiens
aaccagcaatgttaatagctcaactgatgatcattggtcaagctagtcagattttagaaataggaaataattcttttgtcagaagaccttattttaaacacacacacacacacacacacccgtataattttgttttctagttcttgcctactgaagagtggtaatattgatgtatagagtgactcatttgcttagggtaag

SEQ ID NO: 414616 - DNA, 201 bp, Homo sapiens
agtacctcctgaaggacctgcctgaggatgtttcacagttaatttttttcataagtaggagtacactctaaaatcatgattaaaagtatagaatagaaattagtatagtatagtatagtatagtatagtatagtatagtatagtatagtaaatacatacgccagtaacatagtcattcattatcctcaagcattaggttct

SEQ ID NO: 414617 - DNA, 201 bp, Homo sapiens
catcccaacactttgggaggctgtggcgaaaggattacttgagccctggagtttgagactagcttgagtaacatagcaagaccctgtctctatttaaattaaaaaaaaaaaaaaaaagttaaaaaaccccacatacacaaattttatctgggtcaagaaccagaatgtcagcaccaccgaactctcttactgtgcgcccct

SEQ ID NO: 414618 - DNA, 201 bp, Homo sapiens
tacctcctgaaggacctgcctgaggatgtttcacagttaatttttttcataagtaggagtacactctaaaatcatgattaaaagtatagaatagaaattagtatagtatagtatagtatagtatagtatagtatagtatagtatagtaaatacatacgccagtaacatagtcattcattatcctcaagcattaggttctat

SEQ ID NO: 414619 - DNA, 201 bp, Homo sapiens
aaaccccatttctactaaaaatatgaaaaattagccaggcctggtggcgggcgcctgtagtcccagctactctggaggctgaggcaggagaatggtgtaarcccgggaggcagagcttgcagtaagccaggattgcgccactgcccttcagcctgggtgacagtgtgagactccatctcaaaaaaaagaaaaaaataaata

SEQ ID NO: 414620 - DNA, 201 bp, Homo sapiens
tcctttatggttttctagttagaagtcttgcatatcttttgttagatttattcttagatacttgattttcttatgccatagtaagtatatatatatatatwtatttttctttttgtaagtgggatttcagaaattgtcatactttaaccaggagttttatagcaaaggtttttgtgaaaaattatattctataataggttt

SEQ ID NO: 414621 - DNA, 201 bp, Homo sapiens
ttatttctacttctcaaataatttcttagatttcttcataagctcttctttgtcattcatctttcaaatattggtatttcccaggatacttgctgtcaccyttctctgtgtattctccttgagcagtctcatccacttctgacacatctgttgctatctaaatgctgaagactcccaaatccttgtttacttctttctctt

SEQ ID NO: 414622 - DNA, 201 bp, Homo sapiens
gaggcaggagaattgcttgaacccagaaggcagaagtttcagtgagctgagatcaccccactgcactctagcctgggtgacagagtaagactctgtctccaaaaaaaaaaaggaagaatgtaaatctgaaatggtaagtatgtgagtggatataaaaggtaaaaggctgtgtgtgtgtgtgtgtgtgtgtgtgtgtgtgtg

SEQ ID NO: 414623 - DNA, 201 bp, Homo sapiens
ctttatggttttctagttagaagtcttgcatatcttttgttagatttattcttagatacttgattttcttatgccatagtaagtatatatatatatatatwtttttctttttgtaagtgggatttcagaaattgtcatactttaaccaggagttttatagcaaaggtttttgtgaaaaattatattctataataggtttaa

SEQ ID NO: 414624 - DNA, 201 bp, Homo sapiens
gagatggagtaacttgtattttttactttgactaagatgacagagatgtgaagtaagtacagctggtccaagagtttctaatggaattccaagggaaaatkattaatttcctttaaaaaataaaaataaagatagttgaagagaccgcaaggagtagggaaaagtgacctagatccagcatataacttcagaaaattttct

SEQ ID NO: 414625 - DNA, 201 bp, Homo sapiens
gatatggtaacctgctttcctatataataaatttgtcttcatttaagttagttataaattaggcagcctgggcaacataatgagaccctgtctttttttgttttttttgagacagagtctcgctctgtcgcccaggctggagtgcagtggcatgatctcggctcacttcagcctccacctctcgggttcatgtgaatctcc

SEQ ID NO: 414626 - DNA, 201 bp, Homo sapiens
ttgaagtataccatttagtgtcatttagtgcaattgtgttgttgtgcaatcatctctagtttcaaaatgttttcattataccaaaagagcatctcatatcygtaagtaataacttcctatttccttgacaccctcccccccagtctcctggcaatcactaatatgctttctatctctatggatttgcttatttattatatt

SEQ ID NO: 414627 - DNA, 201 bp, Homo sapiens
aagtaatttcatagctgtaaatagtatagtataactgaagtattaaggaaattttgaaagatttcatcaaggaatgtctgatcgttttctttataatgcarttaatgttgaaatacacagtaaaataaattctcctggtaaattgcattataaaatttaccaggagaataaaaaggtgctttttaaaagtttgtattggcc

SEQ ID NO: 414628 - DNA, 201 bp, Homo sapiens
ttctcgacagtggctggcatcattttacatttctactagcaatgtatgagagttcctattccttcacatccttgctaacacttgctgttttcctttttttwaaaaaaatatagccgcctgctattgtttgaatatgatttgtttgtaccaccaaaactcatgttgaaatttgatccccagtgtggtgatattgggaggtgg

SEQ ID NO: 414629 - DNA, 201 bp, Homo sapiens
cctcctgaaggacctgcctgaggatgtttcacagttaatttttttcataagtaggagtacactctaaaatcatgattaaaagtatagaatagaaattagtatagtatagtatagtatagtatagtatagtatagtatagtatagtaaatacatacgccagtaacatagtcattcattatcctcaagcattaggttctatac

SEQ ID NO: 414630 - DNA, 201 bp, Homo sapiens
ctgaaggacctgcctgaggatgtttcacagttaatttttttcataagtaggagtacactctaaaatcatgattaaaagtatagaatagaaattagtatagtatagtatagtatagtatagtatagtatagtatagtatagtaaatacatacgccagtaacatagtcattcattatcctcaagcattaggttctatacacaa

SEQ ID NO: 414631 - DNA, 201 bp, Homo sapiens
atgtgtgctaaagttaattctgtacagttatgattaatactatatcttttttttttttttgagttggagtctcgctctgttgcccaggcaggagtgcagtrgtgtgatctcggctcacttcaacatctgcctcccgggttcaagcgattctcctgcctcagcttcctgagcagctgggattacatgcgcttgccaccacat

SEQ ID NO: 414632 - DNA, 201 bp, Homo sapiens
tgaaggacctgcctgaggatgtttcacagttaatttttttcataagtaggagtacactctaaaatcatgattaaaagtatagaatagaaattagtatagtatagtatagtatagtatagtatagtatagtatagtatagtaaatacatacgccagtaacatagtcattcattatcctcaagcattaggttctatacacaag

SEQ ID NO: 414633 - DNA, 201 bp, Homo sapiens
gcggtggcgcgatctcggctcactgcaagctgcgcctcctgggttcatgccattctcctgcctcagcctcacaagtaactgtgactacaggcgccacaccyggctaatttttgtatttttagtagaggcagggtttcaccgtgttagccaggatggtctcgatctcctgacctcatgatccacccacctcggcctcccaaa

SEQ ID NO: 414634 - DNA, 201 bp, Homo sapiens
atttttgtattttgtatagagatgagattttgccatgttgcctaggctggtctcaaactactggcctcaagtaatcagcccgccttggcctcccaaggtgmtgggattacaggcgtgagccagtgtgtgtggccgaagttaaggaatttaaatgccttggatcacactcctcttaagtggcagagtcacacaatcattgcg

SEQ ID NO: 414635 - DNA, 201 bp, Homo sapiens
gaaggacctgcctgaggatgtttcacagttaatttttttcataagtaggagtacactctaaaatcatgattaaaagtatagaatagaaattagtatagtatagtatagtatagtatagtatagtatagtatagtatagtaaatacatacgccagtaacatagtcattcattatcctcaagcattaggttctatacacaagt

SEQ ID NO: 414636 - DNA, 201 bp, Homo sapiens
acaggtgcctgccaccgtgctttaaaattctttaaactgttatttagaattttacataatgtactgtataattgatatagttcacaaagaaaagaaaaagmaaacgcagagtaagatgtggaatctgtgtgaaatctttacagataacttcagccaatctttatcctctgtatctatcccgttgcatttattgttggcgtc

SEQ ID NO: 414637 - DNA, 201 bp, Homo sapiens
aggacctgcctgaggatgtttcacagttaatttttttcataagtaggagtacactctaaaatcatgattaaaagtatagaatagaaattagtatagtatagtatagtatagtatagtatagtatagtatagtatagtaaatacatacgccagtaacatagtcattcattatcctcaagcattaggttctatacacaagtta

SEQ ID NO: 414638 - DNA, 201 bp, Homo sapiens
attacaattgtgtattctataaagatcagccttggttatgccttatttttattctaaaaatctgtcataaaaactagaatttcttttctctttcaagaaatttttttttttttttttttttgaggcagagtcttgctttgtcacccaggctagagtgcagtggcacgatctcagttcgttgctcaccgcaacctccgcctc

SEQ ID NO: 414639 - DNA, 201 bp, Homo sapiens
attttgtcgtttgttcctaagattcccttttacctagagcaatgcctagaaataagatacctttagcaattttttttttttttttttgagacatagtctcrctctgtcacccaggctggagtgcagtggcgcgatctcggcttactgtaagctccacctcctgagttcatgccattcttctgcctcagcctcccgagtagg

SEQ ID NO: 414640 - DNA, 201 bp, Homo sapiens
gacctgcctgaggatgtttcacagttaatttttttcataagtaggagtacactctaaaatcatgattaaaagtatagaatagaaattagtatagtatagtatagtatagtatagtatagtatagtatagtatagtaaatacatacgccagtaacatagtcattcattatcctcaagcattaggttctatacacaagttaga

SEQ ID NO: 414641 - DNA, 201 bp, Homo sapiens
actcctgatctcaagtgatccgcccacctcagcctcccaaagtgctgggattacaggcatgagccaccacatcgggcaaaaaaatctctttaaagtctaatttttcctaactcattttctatttctgggacctaatttacattttaatattgctgaattattgtgatatgctaatgaatagagcgtacaaattaagtctac

SEQ ID NO: 414642 - DNA, 201 bp, Homo sapiens
atggctagtttccaatcttcaactattacaaactatggtgtaatgaatagtagtgtacatttgtcatttgccacatgtacaaatgtgtatgtaggatagatgttgtttctaattggctatgtccaggttcataatttttctaaaagaaagtatccaggttcctttctgttcctaagtggtcattatgtattacttaaatga

SEQ ID NO: 414643 - DNA, 201 bp, Homo sapiens
tggctagtttccaatcttcaactattacaaactatggtgtaatgaatagtagtgtacatttgtcatttgccacatgtacaaatgtgtatgtaggatagatgttgtttctaattggctatgtccaggttcataatttttctaaaagaaagtatccaggttcctttctgttcctaagtggtcattatgtattacttaaatgaa

SEQ ID NO: 414644 - DNA, 201 bp, Homo sapiens
ggctagtttccaatcttcaactattacaaactatggtgtaatgaatagtagtgtacatttgtcatttgccacatgtacaaatgtgtatgtaggatagatgttgtttctaattggctatgtccaggttcataatttttctaaaagaaagtatccaggttcctttctgttcctaagtggtcattatgtattacttaaatgaac

SEQ ID NO: 414645 - DNA, 201 bp, Homo sapiens
catcatctcattaattttgcaccaaaggcagcgcaccacttattcctctaattctttttttcttcccttttcctttttcttttttttttcttttcttttcttttttttttttttttttttttttttttaagacagtctcactctgtcgcccaggctagagtgcattggtgtgatcttgactcataaaacctctgcctccca

SEQ ID NO: 414646 - DNA, 201 bp, Homo sapiens
tgcaggaatgactggactgtccaccccagccctgcctgcctgtggttttggccagggagcaagccatgaggtgccctggcacatgcacaaattgatccttygcgtgacagtcttgtatggaaaacagatgctgacagaattgtagactaccatgccacacaaaaaggctaaatatctactccaatgggtttccagttcagt

SEQ ID NO: 414647 - DNA, 201 bp, Homo sapiens
tttcctttttcttttttttttcttttcttttcttttttttttttttttttttttttttttaagacagtctcactctgtcgcccaggctagagtgcattggkgtgatcttgactcataaaacctctgcctcccaggttcaagtcattctcctgcctcagcctccttagtaaccaggaatacaggcatgtgccaccatgctta

SEQ ID NO: 414648 - DNA, 201 bp, Homo sapiens
cctatgttactgtcaaaggtacagtttcatttacagttttgttatgtcactgagtttgctttcattgtactattaaagtagttactgtctttttctttgcytctccttctagtattctgcagatgcagagaaggtagcaaacttgctacaaatcccacagtattttgatttagaaatctacagcacaggtagaatggaaaa

SEQ ID NO: 414649 - DNA, 201 bp, Homo sapiens
gatggcctccaggtgtggtggctcacatctgtaatcccagttactcaggagaccaaggaaggaggatcaggaaattaaggccagaaatttgagaccagccygggaaacatagcaagactcccatctctaagaaaaaaaaaattttaaatgggtggcatgcacctgtagtcccagctacttgggaagccgaggtgggagaat

SEQ ID NO: 414650 - DNA, 201 bp, Homo sapiens
gtggacagtttatgggagagctctcaagaactgttgaaagactgggaatgtatgacagagttgctattagaagaacctgttcaaggagaggaaggtatagyattttgacaagttaatttacatgattttgtatttccattgatagcaatacagttgtatatagatcgcttcttaaaaatgagcatatataagcatgttgtg

SEQ ID NO: 414651 - DNA, 201 bp, Homo sapiens
acctcccaggttcaagcaattctcctgcctcagcctcccaagtagctgggattacaggtgcccaccgccacgcccagctaatttttgtatttttagtagarataggggttcaccatgttggccaggctggtctcgaactcctgacctcaagtaggtccacccaccttggcttctcaaagtgctgggattatagacatgagc

SEQ ID NO: 414652 - DNA, 201 bp, Homo sapiens
ttagaagaacctgttcaaggagaggaaggtatagtattttgacaagttaatttacatgattttgtatttccattgatagcaatacagttgtatatagatcrcttcttaaaaatgagcatatataagcatgttgtgtctttttgccaagagaacaatttgttttctgtaacaagtaaggatgtgtcaatcgtttctaacatg

SEQ ID NO: 414653 - DNA, 201 bp, Homo sapiens
attctcctgcctcagcctcccaagtagctgggattacaggtgcccaccgccacgcccagctaatttttgtatttttagtagagataggggttcaccatgtwggccaggctggtctcgaactcctgacctcaagtaggtccacccaccttggcttctcaaagtgctgggattatagacatgagccactgcacctggcctttt

SEQ ID NO: 414654 - DNA, 201 bp, Homo sapiens
cctttaatttctgcactttgggagatgggtggatcgcttgagctcaggagtttgagatcagcctaggcaacatagcaaaaccccatctcaaaaaaaaaaamaaaaaaaaaaacaactaggtaatattttatcaggacagtttgtaaataatgctttaatctgctcaaatctttataaaccatcttagctggtggcttacac

SEQ ID NO: 414655 - DNA, 201 bp, Homo sapiens
caaatatgttcattgtagcatttatgaatatttaaaatttaaaacattctacatgttcatctacagagaaccagttaaatacagaaggataaaggatgatgagaagatttatatatacatacatttagttgaaatatatttttggatgtttcataagaaactatgaacagtggctttctcagtggaaaactagaggaagaa

SEQ ID NO: 414656 - DNA, 201 bp, Homo sapiens
aactaacatggtgaaaccccatgtctactaaaaatacaaaaaattagctgggtgtggtggtgcacgcctgtagtcccagctactcgggaggctgagacagmagaatcccttgaaccagggaggcggaggttgcagtgagccaagattgtgccactgcactccagcctggatgacagagcaagactccatctcaaaaaaaaa

SEQ ID NO: 414657 - DNA, 201 bp, Homo sapiens
aaatatgttcattgtagcatttatgaatatttaaaatttaaaacattctacatgttcatctacagagaaccagttaaatacagaaggataaaggatgatgagaagatttatatatacatacatttagttgaaatatatttttggatgtttcataagaaactatgaacagtggctttctcagtggaaaactagaggaagaaa

SEQ ID NO: 414658 - DNA, 201 bp, Homo sapiens
gtagtcccagctactcgggaggctgagacagaagaatcccttgaaccagggaggcggaggttgcagtgagccaagattgtgccactgcactccagcctggrtgacagagcaagactccatctcaaaaaaaaaaaaaaattccttagaggcatgtttacacacacttccatgtgccaataagtttagagtacaagtgcagat

SEQ ID NO: 414659 - DNA, 201 bp, Homo sapiens
atatgttcattgtagcatttatgaatatttaaaatttaaaacattctacatgttcatctacagagaaccagttaaatacagaaggataaaggatgatgagaagatttatatatacatacatttagttgaaatatatttttggatgtttcataagaaactatgaacagtggctttctcagtggaaaactagaggaagaaagt

SEQ ID NO: 414660 - DNA, 201 bp, Homo sapiens
atttgtcattgattaaaatggggaaaaataaatctcccatgaaagtttatgacttagcttttgcataggttttcacctgaattcatactattttgatggtaaaaaaaaaagaaagaaaaaaagttgagattttgattaagtgttctataatggtggtaatccccaaccacctaacagaatcaaatctaaatatcttctgaa

SEQ ID NO: 414661 - DNA, 201 bp, Homo sapiens
ttcttgccgtactcttttagccccactaccatatctttagtttaatcccttatgggttggtgcaaaagtaattgtggtttttgctgttacttttaatggcaaaaaaaaaacacagtaacttttttaccaacctaatactttcttttgtggatcacatcagaacctttctgttttagtaacttcagtttcaccctctctcca

SEQ ID NO: 414662 - DNA, 201 bp, Homo sapiens
agtgagccgagacagtgccattgcactcccgcctgggcaacaaagcgagacttcgtctcaaaaaaaaaaaaaagaaagaaaatttatgttgcggccgggcrtggtggctcacgcctatggtcctagcactttgggaggcagaggtgggcagattgcctgatctcagaagttcgagaccagcctgggcaacatggcaaaacc

SEQ ID NO: 414663 - DNA, 201 bp, Homo sapiens
tctggatgaataaccaatatatcagggtcagtatcatttattatataaataattttcccctctaaaattgaaacgtctcctttgtcatagtggaagttatrtatatctggatctatttcttctgcatttattttttcccttaatgcaaagggctattatttatttttatttctgtactttgttctcttacttgcttacttt

SEQ ID NO: 414664 - DNA, 201 bp, Homo sapiens
tcatctttcttcaggacattaaatatgttactgtattatccatgggtttgcattgtttttgatgggaagtgtgtcattattctatcctttgcttccctatrtgtgtaccctttggttgcttgaattttctttttgaaaattttcagcacaatttgattatatgccatatgtgatttctaaaacaaattcttaacttagtca

SEQ ID NO: 414665 - DNA, 201 bp, Homo sapiens
tttcaccgtgttgatcaggctggtcttgaactcctgacctcatgatccacccgccttggcctcctaaagtgctgggattacaggcatgagccaccgtgccyggcctttctctggatatgtttttagggcaaaatacaaattgcagaataatatctacagtatgcaactttgttgttgttgttttttttttttttttgtaag

SEQ ID NO: 414666 - DNA, 201 bp, Homo sapiens
ctttaatttctgcactttgggagatgggtggatcgcttgagctcaggagtttgagatcagcctaggcaacatagcaaaaccccatctcaaaaaaaaaaaamaaaaaaaaaacaactaggtaatattttatcaggacagtttgtaaataatgctttaatctgctcaaatctttataaaccatcttagctggtggcttacacc

SEQ ID NO: 414667 - DNA, 201 bp, Homo sapiens
acagcttttctggggggtcctggtgagaggttgtgcatcatcagataaaataaatggaacttcacagataactaattggataaatgaaatatttacgtccrtcagtgaactgtcaaaccagggcacatattttagaactgattaattaatttgatcctcagaaattttcagattttataacccatagtgtctccacaattg

SEQ ID NO: 414668 - DNA, 201 bp, Homo sapiens
agaaacttggtttaaatgcatgtatattgtgaaatataacttattttaagaagtttattacatttttttcttcaaaagactatatatgtcatttggttttstgggagttgaggaggttagctttattaaattgtattttataatattctaaaagatctgatgacaagaaccattgggtcccaagaatctagaacaatgtct

SEQ ID NO: 414669 - DNA, 201 bp, Homo sapiens
ttcacacttaacagattaacaattatttcagcttccataggtcagaagtttggggaggtatagctgagcatctcaggctaaaatcagggtgtcagctgtgrttgcagtgcatatctgaggcttagagttgtttttctttttttttttttttgagatggagtctcattctgtcaccaggctggagtgcagtggtgtgatctc

SEQ ID NO: 414670 - DNA, 201 bp, Homo sapiens
atttaaaacgttataaagaagggaggcaatgggagaagggagtttgtataattattttttctttcatttctgccactaagaacacctttttaaaaaatttwaaaaaattactattattggcctggtacagtggctgacacctgtaatcccagcactttgggaggccgaggtgggtggatcacctgaggtcaggagtttcag

SEQ ID NO: 414671 - DNA, 201 bp, Homo sapiens
tttcatttccaggctatttagcagacatgacccacaagcagaagaagcattagcaaagaggaggggaagaaacagcccgaatggaaacctcattaggatgytggttcttttctttcttgaaagtgaggtaaaaaatgttttaagataattccttatttcttttattatattacattttaaatgtcaattcattttaatttt

SEQ ID NO: 414672 - DNA, 201 bp, Homo sapiens
tcttcacattgcagggaatcgtgctccgggagtataagtcataggatagttttggacacttacagacaaaaaaaaaacaaaaaaaaaaaacgcaatttgtsataaaaaaaaattatttgctgttaaagttggtgttaagatggatagagtttattctcgtgattctgactagaaagacttgcatcttcgcaaaaatagtgt

SEQ ID NO: 414673 - DNA, 201 bp, Homo sapiens
cacatttgtttatccattcaaacgctggtgaacacttaggttgattccatgtatcactactatgaatagtgctgtagtaaacatggcagtgcagatatctstttgatatgctgatttttttcttgtagatatatacttagcagtggagttgcttgatcatatggtagatatttttagttttttgagtaacttccatactgt

SEQ ID NO: 414674 - DNA, 201 bp, Homo sapiens
ctcattaggatgctggttcttttctttcttgaaagtgaggtaaaaaatgttttaagataattccttatttcttttattatattacattttaaatgtcaatwcattttaatttttttcaatcaaataaaaacaagtctgtttcttataaagttaccttcatgaattgcatgatatagaatcagtcctttaccttttgtggaa

SEQ ID NO: 414675 - DNA, 201 bp, Homo sapiens
tgtcgtcccactgaaagagatttcagaagataatttaagagcgatcagccagaggtgtacaaaatttggctccagaagctgaaaaacagaattagaaaaaycatggctactggtttgatgataaaagaaaactatgatttggacctgataataaaccttttctcccaaattcaataaaatatccactgttaactatagtat

SEQ ID NO: 414676 - DNA, 201 bp, Homo sapiens
tctgttctaagctttgatggaagttatgtttgtctcagtactaaaatgctgggaatcaaaatgacagtagttgatttttcaggagttgtaatcatgtggamattttaagatgatgcagctgaataactatttacttgatgattgtgatgaaactggaagcatttgcccaggggtgaagaccctatcttgtttagttacaat

SEQ ID NO: 414677 - DNA, 201 bp, Homo sapiens
tgaggcaggagaatcacttgaacccaggaggtggaggttgcagtgagctgatatcatgccatggcaatctagcctgggcgacaaagggagactctgcctcaaaaaaaaaaaaaaaaattggtctcttcttagataccttcatttttctagaaagacaatgtataatccacgtttcccagtctcttgccaaaggggaaaaca

SEQ ID NO: 414678 - DNA, 201 bp, Homo sapiens
aatcagagcttaccaatacttgagaactctcactagcaccaatgagctttctattaaaacaatatacataacatttatctttcctacttaaaccccaatcttttctttattcttcagacatactaaagaccacctcagtctttgtgtttgttccaagttgcacttctggttttatatattcccagctgaaatattttgctt

SEQ ID NO: 414679 - DNA, 201 bp, Homo sapiens
atcagagcttaccaatacttgagaactctcactagcaccaatgagctttctattaaaacaatatacataacatttatctttcctacttaaaccccaatcttttctttattcttcagacatactaaagaccacctcagtctttgtgtttgttccaagttgcacttctggttttatatattcccagctgaaatattttgctta

SEQ ID NO: 414680 - DNA, 201 bp, Homo sapiens
tttgtttgtttgtttgtttgtttgtttgtttgtttttggagaggaagtctcattctgtcgcccaggctggaatgcaatggtgcgatcttggattactgcarcctctgcctcccgggttcaagcaattgtcatgcctcagcctcccgagtagctgggattacaggtgtgtgccaccacatccggctaattttttgtattttt

SEQ ID NO: 414681 - DNA, 201 bp, Homo sapiens
tgcacctgtggtcctagctacttgggaggctgaggcaggagaatcacttgaacccaggaggaaaaggtggcagtgaacctagatcatgccactgtactccrgcctgggagacagagccagactccatctcaaaaaaaaaaaaattgtgttgaaatacacataaaatttactatcttagttatttttaaatatacaattggt

SEQ ID NO: 414682 - DNA, 201 bp, Homo sapiens
aaaaattaaccgggcgtggtggcaggcgcctgtagttccagcttctcaggaggcttaggcaggagaatggccggagcccaggaagtggagctttaagtgarcggaaagatcgcgtggctgcacccccgcctgggggacaaagggagactttgtttcaaaaaaaaaaaaaaaaaaaaaaaaaactgttacactgggcctggc

SEQ ID NO: 414683 - DNA, 201 bp, Homo sapiens
tgaggcaggagaatcacttgaacccaggaggaaaaggtggcagtgaacctagatcatgccactgtactccagcctgggagacagagccagactccatctcaaaaaaaaaaaaattgtgttgaaatacacataaaatttactatcttagttatttttaaatatacaattggtaatatttaaatatattcccattgttgtgca

SEQ ID NO: 414684 - DNA, 201 bp, Homo sapiens
cattttcaaattgtttaaaagtgtatcaaaatgtaaatttttggtaatttttgtatcctgcaacttcactgaatttattggttataaaaagtgtttttttygtgtgacatatttagttctctttctcacctctctgtccatatgtgtatatatatatatatattttattttttttttaattttgtgaaacagagtcccact

SEQ ID NO: 414685 - DNA, 201 bp, Homo sapiens
atttttgtatcctgcaacttcactgaatttattggttataaaaagtgtttttttcgtgtgacatatttagttctctttctcacctctctgtccatatgtgwatatatatatatatattttattttttttttaattttgtgaaacagagtcccactctgttgcccaggctggaatgtagtggcatgatcttggctcactgca

SEQ ID NO: 414686 - DNA, 201 bp, Homo sapiens
atatcactgtttgtttatccattcatctgttgaaggacatttgagttgtttccaccttttgactattgtgaatatggcaactttgaacattcgtgaacaartacttgtttgagtgccgtttttgagtctttgaggtgtaaattcttaggagtagaattgctaggtcgtataataattccatttaaactttttgaggaacca

SEQ ID NO: 414687 - DNA, 201 bp, Homo sapiens
  misc_feature (1)...(201): n = A,T,C or G
taactaactttgttaagtatacaatatctgtgcttatttacccaaatctgtcagtatgtataattctctcagtggaatatagttacaattaaattaacttncttgagcactcaaataatatttagtttgcatccaaatctaggccaaactttattgctaaagaaggtctttagtccatccccattgggaaaaaataataac

SEQ ID NO: 414688 - DNA, 201 bp, Homo sapiens
tttgtctcagtactaaaatgctgggaatcaaaatgacagtagttgatttttcaggagttgtaatcatgtggaaattttaagatgatgcagctgaataactrtttacttgatgattgtgatgaaactggaagcatttgcccaggggtgaagaccctatcttgtttagttacaatattgtcttgaaccaagtttgacaacctg

SEQ ID NO: 414689 - DNA, 201 bp, Homo sapiens
tcccatctctaagaaaaaaaaaattttaaatgggtggcatgcacctgtagtcccagctacttgggaagccgaggtgggagaatcacttgagcccagaagtytgaggttgcagtgagctatgatcatgccactgcactccagcctgggcgacagaggaagactcccatcatttaattttttaaaaaggcagtaatggctaaa

SEQ ID NO: 414690 - DNA, 201 bp, Homo sapiens
gtagcaagaccccatctctataaaaaaattttaaaattagccaggtgtggtggtgtgtacctgtagtcccagctacttgggaggctgaggtcggagaatcrcttgagcccaggagtttgaggctgcacttagctatgattatgccactgcattccagcctgggtgacagcctggggagcctgtgtcaatcagtcgattttt

SEQ ID NO: 414691 - DNA, 201 bp, Homo sapiens
atctcaaactgctgtcctcaagtgatctgcccacctcggcctcccaaagtgctgggatttacaggcgtgagccacggtgcctggccagattttcttgaatraatttttctccatttgctgtatgcccttaagagaattggcaaatactttaaattacggtattttataatttttactagttaaaatgttgttttgctggaa

SEQ ID NO: 414692 - DNA, 201 bp, Homo sapiens
caaactgctgtcctcaagtgatctgcccacctcggcctcccaaagtgctgggatttacaggcgtgagccacggtgcctggccagattttcttgaataaatwtttctccatttgctgtatgcccttaagagaattggcaaatactttaaattacggtattttataatttttactagttaaaatgttgttttgctggaaagag

SEQ ID NO: 414693 - DNA, 201 bp, Homo sapiens
atgcccatcattttgtgaaatgacttgggtttctttgatgtttggtcttaggagttaaaattataattcgtgatatgctatgcagcataggaaaggagggygtgagttcttaacactttcagcatttaaatcctagctctgccacttggcagctgcatggccttggacaagctctaaaacatctgtgctggctaggcgcgg

SEQ ID NO: 414694 - DNA, 201 bp, Homo sapiens
tcagataatcatagatggagagactcctggctctgttggtttgaagaggtaggcagatctttctgcaaaaagcaagtataaaactggaatgtattgtcaaraacattacatcagggctctggaaattcaccaaagattaaaaaaaaaacacacattgggaaatattttttcctgaaaaattgatagagcttcaggtaaaag

SEQ ID NO: 414695 - DNA, 201 bp, Homo sapiens
gatgactggattgaatcatataaacaagacagggacatcgcacttctggatttaatcaacttttttatccagtgttcaggatgtcgaggtacagaatgttraaataaatgatgtacattgagcctgtcagtccagcagtgtgacttttacttcacctgccactagtcgtatataatttaccctaaaattaaagattatctg

SEQ ID NO: 414696 - DNA, 201 bp, Homo sapiens
acagcatgtggaggtgaaaggcagtgatattgatgatcctgaccctgtgtaggtctaggctaatgtgtatgcctgtgccttagtttttaaggcacagtttmaaaaagaaaaaactttaagtttttataacttaacttaaaaaaagtttaaaaaataaaaaaagtctaagaaataaaatcacaaaaaagcttagtaatagaa

SEQ ID NO: 414697 - DNA, 201 bp, Homo sapiens
gaacccagtagaggttgcagtgagctgagattgtgccactgcactccagcctgggcgacagagtgagattctgtccttctctgctccacccaccccccaaraaaggtataaaaccaaaatgaaaaatactagtttttttggttcttttcttataaaatgattgtactttctttctggtaaattaaattagggtcttgttgg

SEQ ID NO: 414698 - DNA, 201 bp, Homo sapiens
gattattttgctgcattgtgaaaggacctctccagcaatgattacttcagaattaccagtgttacagtaagtattgtaattttcttttttttatatttttwaaggaaaattttggacaacttatttctttatcaaaatgctctcttcgatgatacatttcaaatatgttctttgatattgggacaatatctttgcagtgta

SEQ ID NO: 414699 - DNA, 201 bp, Homo sapiens
tgttttttaaacacaaaattttgaaatggcgtctttttatttttatcaccgaagtcttgtaatgtcagttgtaaaatgtatagaaaatatgtcttgagtgtggtggctcatgcctgtaatcccagcactttgggaggctgaggcaggcaggtcacttgagtctaggagttggagaccagcctgagcaacatggtgagaccc

SEQ ID NO: 414700 - DNA, 201 bp, Homo sapiens
ttacttcagaattaccagtgttacagtaagtattgtaattttcttttttttatattttttaaggaaaattttggacaacttatttctttatcaaaatgctstcttcgatgatacatttcaaatatgttctttgatattgggacaatatctttgcagtgtaagtagtagtagggtgtgtaattaccgtatccattcatggct

SEQ ID NO: 414701 - DNA, 201 bp, Homo sapiens
catacggaatcatttgatatgtaacctttttagcctggcttcttttattaagcacagtgcatttgagattcatacatgttgtttgtttattaatacttcattccttttattaaaaagaagtttaagatttacagcaaaattgagcagtaagtatagagggttcacaaaaaacccctcttcactcccccaatatgcacaacc

SEQ ID NO: 414702 - DNA, 201 bp, Homo sapiens
ctgggcagaaatgatcctcccacctcagcttcccaagtagctgggaccacaagtgtgtgccaccacaccagctgatttttcttttttcttttttagagacraggttgctatgttgccctggctacttttgaactcctggactcaagcagtcctcccctctcaacctcacaatatgctgggattacaggcatgagccactgt

SEQ ID NO: 414703 - DNA, 201 bp, Homo sapiens
cagcatatgcttattataaaagaagaaatacaaaaatagtaatataaacaaaataaaactgactcttaccacttgtagataaccactgttaatattttggkgtattttcttttcttttttttttttttttttttgagacggagcctggctctgtcacccagggtggaatgcagttgcacaatctcggctcactgcaacctc

SEQ ID NO: 414704 - DNA, 201 bp, Homo sapiens
atacggaatcatttgatatgtaacctttttagcctggcttcttttattaagcacagtgcatttgagattcatacatgttgtttgtttattaatacttcattccttttattaaaaagaagtttaagatttacagcaaaattgagcagtaagtatagagggttcacaaaaaacccctcttcactcccccaatatgcacaacct

SEQ ID NO: 414705 - DNA, 201 bp, Homo sapiens
cacacccggcccaaaatttaatttttgctctttatttctggttttctgagtttcattatgttttgctgtaggcgtagaatatattttgacaggggcagggrgtattgtttttcattcattctaaaatttcttaattgttatctctttaaattttctttccattttatttatcttctccttcaggaactttgtgtaaatttg

SEQ ID NO: 414706 - DNA, 201 bp, Homo sapiens
tagcagaaaacatccttcttccttcagctccttctggacatacacaaagacatttaaagagccaggcaaataagagttagggctaaaatgggccgggcatsgtggcttacgcctgtaatcccagcactttgggaggccgaggcgggcagatcacaaggtcaagagatcaagaccatcctggccaacatggtgaaaccctgt

SEQ ID NO: 414707 - DNA, 201 bp, Homo sapiens
tacggaatcatttgatatgtaacctttttagcctggcttcttttattaagcacagtgcatttgagattcatacatgttgtttgtttattaatacttcattccttttattaaaaagaagtttaagatttacagcaaaattgagcagtaagtatagagggttcacaaaaaacccctcttcactcccccaatatgcacaacctc

SEQ ID NO: 414708 - DNA, 201 bp, Homo sapiens
catacacaaagacatttaaagagccaggcaaataagagttagggctaaaatgggccgggcatggtggcttacgcctgtaatcccagcactttgggaggccraggcgggcagatcacaaggtcaagagatcaagaccatcctggccaacatggtgaaaccctgtctctactaaaaatacaaaagttagctgggcatggtggc

SEQ ID NO: 414709 - DNA, 201 bp, Homo sapiens
acggaatcatttgatatgtaacctttttagcctggcttcttttattaagcacagtgcatttgagattcatacatgttgtttgtttattaatacttcattccttttattaaaaagaagtttaagatttacagcaaaattgagcagtaagtatagagggttcacaaaaaacccctcttcactcccccaatatgcacaacctcc

SEQ ID NO: 414710 - DNA, 201 bp, Homo sapiens
gtgtattgttcatttctgtaaattataactacttggtccatggaattgttcccctgtggatattcaaacttgtatttttattttttaacatggtaagtttrtttcttttctaatctctatctgataattctagtattttaagtctttgtgagcctgtttctgtggtcttgtttttgcttgttttttgcatgttgtctttct

SEQ ID NO: 414711 - DNA, 201 bp, Homo sapiens
ggagaatcgctttaacccaggaggcggaggttgcagtgagccaagattatgccactgcactccagcttggcgacagagtgagactctgtctcaaaaaaagaaaaaaaaaaaaaaaaaaagagggctaaagtaatgccctattactttctttggcctgcggatctagaatttatccttattttttttctctcctgggaggag

SEQ ID NO: 414712 - DNA, 201 bp, Homo sapiens
ataacagtttttgcattcttactaattccgtgggttttttatatctcattgatgagagtgagcttgtcagtgggaaacactagagaaataaagaggagaarcctgatcagaggcatccctggagtatatttaatcaagatgattgccttgggcagctggcaggcatggtgctccagtgagcagtgataaaagtgtatggtt

SEQ ID NO: 414713 - DNA, 201 bp, Homo sapiens
ggcgacagagtgagactctgtctcaaaaaaagaaaaaaaaaaaaaaaaaaagagggctaaagtaatgccctattactttctttggcctgcggatctagaatttatccttattttttttctctcctgggaggagctgtcctgctttctgtagtcttatatttgtgctactctctctgccttaccctgcatgtttctattcta

SEQ ID NO: 414714 - DNA, 201 bp, Homo sapiens
cctgtaatcttagcattttgggagcctgaggtgggaggatcaatggcttgagcctgggaatttgataccagcctggcaacataatgagaccccgtctcttaaaaaaaaaaaaataattagctgagtatgggggtgtgcacttgtggtcctagctgctgagaggctgagatggaaggattagttgagcccgggaggtcaagg

SEQ ID NO: 414715 - DNA, 201 bp, Homo sapiens
ctgagtagctgggattacaggcgtgcaccaccatgcccagctaattttttttgtatttttagtagagacggtgtttcaccatattgtccaggctggtctcwaactcctgaccttgtgatccgcctgcctcggcctcccaaagtgctgggattacaggcatgagccactgcgcccggccaagactgtattttaaaaacgtca

SEQ ID NO: 414716 - DNA, 201 bp, Homo sapiens
cattttgggagcctgaggtgggaggatcaatggcttgagcctgggaatttgataccagcctggcaacataatgagaccccgtctcttaaaaaaaaaaaaawaattagctgagtatgggggtgtgcacttgtggtcctagctgctgagaggctgagatggaaggattagttgagcccgggaggtcaaggcttcagtgagtgg

SEQ ID NO: 414717 - DNA, 201 bp, Homo sapiens
catgcccagctaattttttttgtatttttagtagagacggtgtttcaccatattgtccaggctggtctcaaactcctgaccttgtgatccgcctgcctcgrcctcccaaagtgctgggattacaggcatgagccactgcgcccggccaagactgtattttaaaaacgtcaacttaatttgttgaaagaggtttctcttctt

SEQ ID NO: 414718 - DNA, 201 bp, Homo sapiens
acggtgtttcaccatattgtccaggctggtctcaaactcctgaccttgtgatccgcctgcctcggcctcccaaagtgctgggattacaggcatgagccacygcgcccggccaagactgtattttaaaaacgtcaacttaatttgttgaaagaggtttctcttcttggctaagcatggtggctaatgcccgtaagcccagcg

SEQ ID NO: 414719 - DNA, 201 bp, Homo sapiens
agtttgaatatagcttttgcactaatcagtacttcaaaattcaaaagcagtttccaaaatctaagcctttatatacaagtaaattttttttagaattcccyagaaaagcaaacttttatttttttaaaaaactgtcatttgaaaacagaagttactagtgtcagaatgactatttttagtagtagagcccatgagaatata

SEQ ID NO: 414720 - DNA, 201 bp, Homo sapiens
ggcctgacgcggtggctcacacctataatcccagcactttgggacaccatggcgggtggatctcttgagtccaggagttcaagaccagcctggccaacatrgtgaaaccccatgtctacaaaaatacaaaaatcagccaggtgtcatggcgcacacctgtagtcccagctactcaggaggctgaggcatgagaatctcttg

SEQ ID NO: 414721 - DNA, 201 bp, Homo sapiens
gacggagcgagaccctgtcttttaaaaaaaaaaaatactattatatatacaataaagggattttatccatatatggaatagaatataagcttagcttgacyatgtggtagaaattttcaattaaatatgtcaggttttatttttttgttgatttctttaataaattcatagaatcatctctttctttccttttcctttcta

SEQ ID NO: 414722 - DNA, 201 bp, Homo sapiens
agtaagacagtgatggcctccaggtgtggtggctcacatctgtaatcccagttactcaggagaccaaggaaggaggatcaggaaattaaggccagaaattygagaccagcctgggaaacatagcaagactcccatctctaagaaaaaaaaaattttaaatgggtggcatgcacctgtagtcccagctacttgggaagccga

SEQ ID NO: 414723 - DNA, 201 bp, Homo sapiens
tttttttgtgtgtatttttaatagagacagggtttcaccatgttggccaggctggtctcgaactcctgacctcaagtgatttgccagccgcggccttccaragtgctgggattacaggcgtgagccagtgtgcccagccgaaatgaaattattttattcttccactcacctgaactgagctcaaatttaaatttccttcca

SEQ ID NO: 414724 - DNA, 201 bp, Homo sapiens
tctgcagcaaattgaatataccagaatagttgttttccagttctaccacttggttggaacagtaagacagtgatggcctccaggtgtggtggctcacatcygtaatcccagttactcaggagaccaaggaaggaggatcaggaaattaaggccagaaatttgagaccagcctgggaaacatagcaagactcccatctctaa

SEQ ID NO: 414725 - DNA, 201 bp, Homo sapiens
caagttgtaaatcagtactctttttttattttggttctcaaattgtagcagatttggccagtgggagttcctttcaatccagttcctatgtacgttagattttgtttgtttgtttgtttgttttttagacgaagtctcgttctgtcacccaggccaatatggcaaaatgctctctctactaaaaatacacaattagccggg

SEQ ID NO: 414726 - DNA, 201 bp, Homo sapiens
aagttgtaaatcagtactctttttttattttggttctcaaattgtagcagatttggccagtgggagttcctttcaatccagttcctatgtacgttagattttgtttgtttgtttgtttgttttttagacgaagtctcgttctgtcacccaggccaatatggcaaaatgctctctctactaaaaatacacaattagccgggc

SEQ ID NO: 414727 - DNA, 201 bp, Homo sapiens
agttgtaaatcagtactctttttttattttggttctcaaattgtagcagatttggccagtgggagttcctttcaatccagttcctatgtacgttagattttgtttgtttgtttgtttgttttttagacgaagtctcgttctgtcacccaggccaatatggcaaaatgctctctctactaaaaatacacaattagccgggcg

SEQ ID NO: 414728 - DNA, 201 bp, Homo sapiens
gttgtaaatcagtactctttttttattttggttctcaaattgtagcagatttggccagtgggagttcctttcaatccagttcctatgtacgttagattttgtttgtttgtttgtttgttttttagacgaagtctcgttctgtcacccaggccaatatggcaaaatgctctctctactaaaaatacacaattagccgggcgt

SEQ ID NO: 414729 - DNA, 201 bp, Homo sapiens
cctttcaaattacagctttgggacttaaagtcttttttaaaagtccagagaaagaaaatataaaatcttgtctttgtactgtaggatcctggacttttctytaaagaatgactacaggcatttcctttttttttttttttttttttttgagacaggatctccctctgtcacccaggctggagtgcagtggtgtgatcttgg

SEQ ID NO: 414730 - DNA, 201 bp, Homo sapiens; identical to SEQ ID NO: 103441

SEQ ID NO: 414731 - DNA, 201 bp, Homo sapiens; identical to SEQ ID NO: 103442

SEQ ID NO: 414732 - DNA, 201 bp, Homo sapiens; identical to SEQ ID NO: 103444

SEQ ID NO: 414733 - DNA, 201 bp, Homo sapiens; identical to SEQ ID NO: 103447

SEQ ID NO: 414734 - DNA, 201 bp, Homo sapiens; identical to SEQ ID NO: 103457

SEQ ID NO: 414735 - DNA, 201 bp, Homo sapiens
tttggaactaaaacttgttctaactcgtctcttggcattcagctactcctagatcttttggttttatcccctggcctcagagccatttatattcccagagkaggcagtacaggatctcgtgttgatttgctgtggttacccagtgtcttctctacatggcataaagcggcaaagcccaccattaggtgaggcggtcccgag

SEQ ID NO: 414736 - DNA, 201 bp, Homo sapiens; identical to SEQ ID NO: 103469

SEQ ID NO: 414737 - DNA, 201 bp, Homo sapiens
tttttttattttctgtagagacagggtcaccctatgttgtccaaggtggtcctgaactcctcacctccagagatcctcctgccttggcctcccaaagcacygagattacaggtgtgagctaccacacctggcccaagggtggcttttgggagaaagggctactcacggttcttctcctccttcagaggccggccattcttg

SEQ ID NO: 414738 - DNA, 201 bp, Homo sapiens
agagaaccgttagtccctactgcccccggtccctgaggatgtggcaggctctggccacaggaaccgcctcctacctggtctcccggagccctcttgtcacygctgctgccctgcaggaggcccatctcttctgggagcttatctgacttaacttcaactacaagttcgctcttacgagacgggggcagcgtgctgggagga

SEQ ID NO: 414739 - DNA, 201 bp, Homo sapiens; identical to SEQ ID NO: 16256

SEQ ID NO: 414740 - DNA, 201 bp, Homo sapiens; identical to SEQ ID NO: 103476

SEQ ID NO: 414741 - DNA, 201 bp, Homo sapiens
gatccatcaagagggctatgggagccaagtgaacacgggggattgaggctaattcacctgaactcgaaaacagcgcccagcttcctcaccgcaggcacgcrtcttttctttttttttcctcgagacggagtctcgctgtgttgcccaggctggagtgcagtggcacggtctcggctcactgcaagctccacctcctggatt

SEQ ID NO: 414742 - DNA, 201 bp, Homo sapiens; identical to SEQ ID NO: 103477

SEQ ID NO: 414743 - DNA, 201 bp, Homo sapiens
tgatccatcaagagggctatgggagccaagtgaacacgggggattgaggctaattcacctgaactcgaaaacagcgcccagcttcctcaccgcaggcacgyatcttttctttttttttcctcgagacggagtctcgctgtgttgcccaggctggagtgcagtggcacggtctcggctcactgcaagctccacctcctggat

SEQ ID NO: 414744 - DNA, 201 bp, Homo sapiens; identical to SEQ ID NO: 103478

SEQ ID NO: 414745 - DNA, 201 bp, Homo sapiens
gttttgttggaaatacatagaacggcttaatgcctagagggtggtggatagtgaaggacggtcaaggttatatttttgactgcttagggattctttggatmcaagaaacagaaatgttcaagcggaataaaggagggagtggagttgtggtaaggatgcagggtatttcgcagaacccaggacgggaagtgcctttggttc

SEQ ID NO: 414746 - DNA, 201 bp, Homo sapiens
gctaggctggtcttgaactcctgaccctcatgatccacccacctcggcctcccaaagtgctaagattacaggcgtgagccaccgcgcccggcccatacttygtattcttaaaaaaaactacactcagcccagcacattgatcaagtatctatctctgagcagttggccttgccagggagagcagagatgtggcaggctcct

SEQ ID NO: 414747 - DNA, 201 bp, Homo sapiens
agaccacgtgttgtcttccatggcctgtttctcctgctgtctgggtgagtgagcctgcaacgcaatgcccatgagagtaaatgcctcctgacctaccctgstcagcactgttctagtgtcttggccttgaaagaaaagcctgacttcctgctgacacatgtggtaggggcatggcagctatgaggcacctcctacgtctgt

SEQ ID NO: 414748 - DNA, 201 bp, Homo sapiens
tgagattttcgtggactattttaaaaatgtgtcattaatataaaaaatttatattagcagtatttaatcattctcacctgtaaagaataagaaaaacagarggtaaatattcttacagagaatagcagagctttaagattcattttcattttaagtccattttattttgccagtgtattaatgtttagaagtctgttttac

SEQ ID NO: 414749 - DNA, 201 bp, Homo sapiens; identical to SEQ ID NO: 103479

SEQ ID NO: 414750 - DNA, 201 bp, Homo sapiens
tttgccagagccagtaagaatatataatattggagcagttgccaggatagaaattaaatatagattccagtttaggatagagtttttaccgagagctcttyagacagtatacctgtgtcttctctggcaattgctttcattttagtcctatataaaagctttccttttctgtttttttttaaaactatgcttttgcttgcc

SEQ ID NO: 414751 - DNA, 201 bp, Homo sapiens
ttgtctcctgcaaaagacagaatgtttcacaattcccaggtaaactctggaccattccaagtgtcctagccttctgatgacattaattacctagttgtgtsgaggagtataggatggactctcctgagaaggggaggttggtggctttgtcttttctttttgctggatcctgaactggtctagacctcctgcccccacccc

SEQ ID NO: 414752 - DNA, 201 bp, Homo sapiens
agacagtatacctgtgtcttctctggcaattgctttcattttagtcctatataaaagctttccttttctgtttttttttaaaactatgcttttgcttgccyaaatcttttgatcttatatttctctcatctcagagcctgtcctgagttgtaaggtatttcatactgccttacttaaaagttttttaaactactagagtca

SEQ ID NO: 414753 - DNA, 201 bp, Homo sapiens
ccattaggtgaggcggtcccgagttgaggtagagtggggcagaggaagatggcagtgaatatcaaacagtagaccgccatcaacttctaacagccagtacrcacactgtttcattttgaggtaacgttcagttttgcattttgtttaaatattgaaggcctagacaaagaactagaaaaaaaaaagcagtttccaggccca

SEQ ID NO: 414754 - DNA, 201 bp, Homo sapiens
ccgtaggaccaaatgccaaggcccccttcctcatggcggtgagcctgagctgctgtctggagggcagttccaagtggcaggaaagcataggaaggggacayagctcctgctaacagcctgccaggcccttcgtgctgcgtcatcagggcagttttgctgctgaaaagtagggtgactgtctgctctggtagaacttgagcc

SEQ ID NO: 414755 - DNA, 201 bp, Homo sapiens
ctttggggcaggaaaccagctcagagaggctacccagctcagctgctggcaggagccaggtatttacagccataatgtgtgtaaagaaaaaacacgttctrcaagaaactctcctacccgctcgggagactggggctccttgcttgggatgagcttcactcaacgtggagatggtggtggactggtccctgaaaagcgggc

SEQ ID NO: 414756 - DNA, 201 bp, Homo sapiens
gcccctcacagttcaccagtagttcctgtggttcactcagcagcgatatcatggtgtccaagtccaggccctgacattcatagcgcccactgtgttccttycgggcaggctccagcaccaggaccccgttgtcgttggttgtctcttcctctgcctccctggtgctggggttctagggaggattggggaggtgagcagagt

SEQ ID NO: 414757 - DNA, 201 bp, Homo sapiens; identical to SEQ ID NO: 103482

SEQ ID NO: 414758 - DNA, 201 bp, Homo sapiens; identical to SEQ ID NO: 103484

SEQ ID NO: 414759 - DNA, 201 bp, Homo sapiens; identical to SEQ ID NO: 103483

SEQ ID NO: 414760 - DNA, 201 bp, Homo sapiens; identical to SEQ ID NO: 16261

SEQ ID NO: 414761 - DNA, 201 bp, Homo sapiens
ctcctgctaacagcctgccaggcccttcgtgctgcgtcatcagggcagttttgctgctgaaaagtagggtgactgtctgctctggtagaacttgagccatytgctcagaagcagaggtaacccctgatctctgctgccaactggaaacggttttgtgtgccttttggttgtagtttcacaggcccccaggttcctgtggta

SEQ ID NO: 414762 - DNA, 201 bp, Homo sapiens; identical to SEQ ID NO: 103486

SEQ ID NO: 414763 - DNA, 201 bp, Homo sapiens; identical to SEQ ID NO: 103487

SEQ ID NO: 414764 - DNA, 201 bp, Homo sapiens; identical to SEQ ID NO: 103490

SEQ ID NO: 414765 - DNA, 201 bp, Homo sapiens; identical to SEQ ID NO: 103493

SEQ ID NO: 414766 - DNA, 201 bp, Homo sapiens; identical to SEQ ID NO: 103495

SEQ ID NO: 414767 - DNA, 201 bp, Homo sapiens; identical to SEQ ID NO: 103498

SEQ ID NO: 414768 - DNA, 201 bp, Homo sapiens; identical to SEQ ID NO: 103500

SEQ ID NO: 414769 - DNA, 201 bp, Homo sapiens
ctcttcctctgcctccctggtgctggggttctagggaggattggggaggtgagcagagtgcacctcccgccactccacctgggtctctgcttgcatccccrcctgcacccagcacaaagcccccacacctgcttgctgatgctgaagtgtggtggagggttgccatcagccaaacacctgatttccacgcggtccccttcc

SEQ ID NO: 414770 - DNA, 201 bp, Homo sapiens
tccgggtgagctcagagtgtgggaatgcaaagcatgtgccaggctggggcacacaggcccttttgtgtcaccaccgccaggggaagacaccactgctctaycctctgccctccaaaatccctgccctcactccccagcgggctaactctggcggaagttccggtctcatgctccctcagcagcacctccatgaacactccg

SEQ ID NO: 414771 - DNA, 201 bp, Homo sapiens
ccgagggcgcttgccctggcacaagaagatgcgctcgtcttggggggtgacttgagtcagggccagagtagcccctctgtcctggaggctgagccgctgcycgtactccccaggttcgctctggccctggccctggcgcacacggaagatgagcgtccgcttctccttgtggacctaatgggaggagacacagaggaggag

SEQ ID NO: 414772 - DNA, 201 bp, Homo sapiens
tagaaaaaaaaaagcagtttccaggcccatccatattgtaatttttctttatctgcagatattgcctgtagtctaaagatctctttggaagacaaagcatkggctatatatcttttgccttttccatgcatctaaatcttctctggagattatctccctactgtgtaggttaagggcagtctcgacttttccttttttgag

SEQ ID NO: 414773 - DNA, 201 bp, Homo sapiens
cttgctccagggccagcccagggcagggaagcaggtcatgagaccatgtggctgatggaagctgggcagtgggtagtggagcaggcagcaccctgacccasggccccactcctgctgtcaaggggcaggcgggcgctgggcaggcagcaggctgggtggcaaaacgggcgggggcggaggggccggtgttgggcttacatc

SEQ ID NO: 414774 - DNA, 201 bp, Homo sapiens
ctagatcttttggttttatcccctggcctcagagccatttatattcccagagtaggcagtacaggatctcgtgttgatttgctgtggttacccagtgtctyctctacatggcataaagcggcaaagcccaccattaggtgaggcggtcccgagttgaggtagagtggggcagaggaagatggcagtgaatatcaaacagta

SEQ ID NO: 414775 - DNA, 201 bp, Homo sapiens; identical to SEQ ID NO: 103506

SEQ ID NO: 414776 - DNA, 201 bp, Homo sapiens; identical to SEQ ID NO: 103507

SEQ ID NO: 414777 - DNA, 201 bp, Homo sapiens; identical to SEQ ID NO: 103508

SEQ ID NO: 414778 - DNA, 201 bp, Homo sapiens
ctcaatttcccatacttaattttttttttttttgagatggagtctcgctgtgtcgcccaggctggagtgcagtggtgcagtctcaactcaccacaacctcygcctcccaggttcaagcagttctctgcctcaacctcccgagtagctgggattacaggcgcctgccaccatgcccagctaatgttcatatttttagtagag

SEQ ID NO: 414779 - DNA, 201 bp, Homo sapiens
tcctacccgctcgggagactggggctccttgcttgggatgagcttcactcaacgtggagatggtggtggactggtccctgaaaagcgggccttgcagggcmaagtgaggtcctcaggtcctaacccagtggccctctgaaagggggtgtgcaggcgaggggagcaggaggcttctctctagtccctttggaggctttggct

SEQ ID NO: 414780 - DNA, 201 bp, Homo sapiens
cccctctgtcctggaggctgagccgctgctcgtactccccaggttcgctctggccctggccctggcgcacacggaagatgagcgtccgcttctccttgtgracctaatgggaggagacacagaggaggagaagggtcctgggctacaagaggggcagagtctccctccccgggctgctcttgcaggagcccaagcactcac

SEQ ID NO: 414781 - DNA, 201 bp, Homo sapiens
ggcggaggggccggtgttgggcttacatctcctgcttccctgagcgcctgcacggcagcttgcccttcttatagaggaaatagaggacagcgcccagcacygccaggaccaggatgcacacaatcacagccacgatgaccacgccccggctctccggctccggcagctttctctctgcgccacaaagacactcctcgtcac

SEQ ID NO: 414782 - DNA, 201 bp, Homo sapiens
tagtggagcaggcagcaccctgacccagggccccactcctgctgtcaaggggcaggcgggcgctgggcaggcagcaggctgggtggcaaaacgggcggggkcggaggggccggtgttgggcttacatctcctgcttccctgagcgcctgcacggcagcttgcccttcttatagaggaaatagaggacagcgcccagcaccg

SEQ ID NO: 414783 - DNA, 201 bp, Homo sapiens; identical to SEQ ID NO: 103513

SEQ ID NO: 414784 - DNA, 201 bp, Homo sapiens
acagaagcctatatcattctagaaatatttctatatatgagcaaatacatagaaataggcttgaaagaacacaccctgatagcagagattatttctgggagggggggtctcaggcaagaagaaacttctagattttttgtcagtttaaattctcatgaaaatattttcaagtaccatttgtataatttttttaagttaaaa

SEQ ID NO: 414785 - DNA, 201 bp, Homo sapiens
gaggaatggggtacccgttcctccctacacaggtagcgacctaaagagcacagggtgtgagtctccctgcctccgagcccccttcaagccccatctcagcrgctgcgcaccagctgcccagcccacctgccacacatctcacctcctcaggctccttactgttcacagggatgcccagggggttgacctggatgtttggct

SEQ ID NO: 414786 - DNA, 201 bp, Homo sapiens
atgaccacgccccggctctccggctccggcagctttctctctgcgccacaaagacactcctcgtcactccctgccccaggccacttcgtcaccatcgttgscccagccagtccagggccgacaagatggggctgctactcacctttctggacagggctctctggggagggacagggcagaaaggatgccctggcacagccc

SEQ ID NO: 414787 - DNA, 201 bp, Homo sapiens; identical to SEQ ID NO: 103528

SEQ ID NO: 414788 - DNA, 201 bp, Homo sapiens
ccttctagggttggggccctgagcttggtttgtagaagtttggtgctaatataaccatagctttaatccccatgaaggacagtgtagacctcatctttgtmtgctccccgctgcctttcagttttacgtgatccatcaagagggctatgggagccaagtgaacacgggggattgaggctaattcacctgaactcgaaaaca

SEQ ID NO: 414789 - DNA, 201 bp, Homo sapiens
ccccatgaaggacagtgtagacctcatctttgtctgctccccgctgcctttcagttttacgtgatccatcaagagggctatgggagccaagtgaacacggsggattgaggctaattcacctgaactcgaaaacagcgcccagcttcctcaccgcaggcacgcatcttttctttttttttcctcgagacggagtctcgctgt

SEQ ID NO: 414790 - DNA, 201 bp, Homo sapiens; identical to SEQ ID NO: 103531

SEQ ID NO: 414791 - DNA, 201 bp, Homo sapiens
gagccctcttgtcaccgctgctgccctgcaggaggcccatctcttctgggagcttatctgacttaacttcaactacaagttcgctcttacgagacgggggyagcgtgctgggaggagggagggaggtgagaggttggtatctcagggccacaggaagagaagggcccgctgtgaaggatgtggaatggatgagggctcctt

SEQ ID NO: 414792 - DNA, 201 bp, Homo sapiens
ccctgcctttaactaataaagaattgggagacagaaattttaaagtcctccttattcaagattttgaaattcttagcctgggagtgctggagagaacctgrtgctttctccagaatgaagagtcccaatttgtatatcagtgttaagaagaaaacaaaacaaacacataggtgagattttcgtggactattttaaaaatgt

SEQ ID NO: 414793 - DNA, 201 bp, Homo sapiens
tctcctacccgctcgggagactggggctccttgcttgggatgagcttcactcaacgtggagatggtggtggactggtccctgaaaagcgggccttgcaggsccaagtgaggtcctcaggtcctaacccagtggccctctgaaagggggtgtgcaggcgaggggagcaggaggcttctctctagtccctttggaggctttgg

SEQ ID NO: 414794 - DNA, 201 bp, Homo sapiens
tgagggctccttgctccagggccagcccagggcagggaagcaggtcatgagaccatgtggctgatggaagctgggcagtgggtagtggagcaggcagcacmctgacccagggccccactcctgctgtcaaggggcaggcgggcgctgggcaggcagcaggctgggtggcaaaacgggcgggggcggaggggccggtgttgg

SEQ ID NO: 414795 - DNA, 201 bp, Homo sapiens
ctttgtctgctccccgctgcctttcagttttacgtgatccatcaagagggctatgggagccaagtgaacacgggggattgaggctaattcacctgaactcraaaacagcgcccagcttcctcaccgcaggcacgcatcttttctttttttttcctcgagacggagtctcgctgtgttgcccaggctggagtgcagtggcac

SEQ ID NO: 414796 - DNA, 201 bp, Homo sapiens
gctccccgctgcctttcagttttacgtgatccatcaagagggctatgggagccaagtgaacacgggggattgaggctaattcacctgaactcgaaaacagygcccagcttcctcaccgcaggcacgcatcttttctttttttttcctcgagacggagtctcgctgtgttgcccaggctggagtgcagtggcacggtctcgg

SEQ ID NO: 414797 - DNA, 201 bp, Homo sapiens
cagttttacgtgatccatcaagagggctatgggagccaagtgaacacgggggattgaggctaattcacctgaactcgaaaacagcgcccagcttcctcacygcaggcacgcatcttttctttttttttcctcgagacggagtctcgctgtgttgcccaggctggagtgcagtggcacggtctcggctcactgcaagctcca

SEQ ID NO: 414798 - DNA, 201 bp, Homo sapiens; identical to SEQ ID NO: 16257

SEQ ID NO: 414799 - DNA, 201 bp, Homo sapiens
gctatccaaaaatacagaaggccagaaggtggtgagaaaaatgtcagacaacagattgtggagaaaaataaacaagccaagaaaagtcctatttggccttaaaagaggcagatggtgacaggaagtgttcagtgaggagtgattgtgctgaaaatcacaaagtctataaaattatccatctgtagtttgaggtttttgggg

SEQ ID NO: 414800 - DNA, 201 bp, Homo sapiens
ttttacttttaaagatgtgattttccagacagagaaacaaactcatgtatcggtgtattttttaatgaattagaagcatgaaatctaggtactttatgtawgtcattttatttaatcctcaaaataatgttttaaaatagttattattttcattctcattttataattggggaaatgtaagatcatcaaaaccaagtttca

SEQ ID NO: 414801 - DNA, 201 bp, Homo sapiens
tgaactcaattccgtgtctttcaatggcagaaggggttttgcacattagattacataagccattgtccattgactccttgtcctttgcacttgtccaagastggtccccaggcacaaacatgcatgtgaagaaagctccagaggagattctgattcaaatctccagttgggaactactacatcaaacatttcaaaaatcaa

SEQ ID NO: 414802 - DNA, 201 bp, Homo sapiens
gaggagaccttgtggccaattatccatatgatgagacgcggagtggtaggtattctttctgcttctcttattggttcaaagtttataacactgtacaaggktttataagatgatttctgtaattttttttaaggaactgaacattaagtgatttttgcctgaagaaagaactatgtttaacaggaagctctcctaatcatt

SEQ ID NO: 414803 - DNA, 201 bp, Homo sapiens
caattactcaatactgaatcactctttagaaaacatgctgtgctgcttggtctgtgtctgtttctttaatcttgtggatttgttttctaggtagtgctcaygaatacagctcctccccagatgacgccattttccaaagcttggcccgggcatactcttctttcaacccggccatgtctgaccccaatcggccaccatgtc

SEQ ID NO: 414804 - DNA, 201 bp, Homo sapiens
ttttgctgaactctgaattctaatggctgtccagtttgtttatttatttctttattttatcatctccattttacaggtgatgtctagtttattttttctgttttttttctgagtgtactatataaattgtatacagtgttggtactttatatttttaagtttatatatcgtaatttattcctatgcataattgaatagtag

SEQ ID NO: 414805 - DNA, 201 bp, Homo sapiens
cattttttaaaaaaatccctactgtccttattatgtccacttgacctgttgtaagcaggtggaggtgggttgctttcttctgtaattgtgtttgattattgcctacttagacttctaaaggtttttgccatatataacttcttgctgcatttttttttagttatttactcactagatattttgccttttcaaattatgaag

SEQ ID NO: 414806 - DNA, 201 bp, Homo sapiens
tttaaggtataacaacccccgacctatgttgttcaatcccttacagcagatgatttcccttaagttttcccacaggcttcccaaatgccctggtttgtgtrccttttacttggttcttgattcagaagactagcctgtgtagagttttaggctccttgtgcatattttgactttccatttggtgttttggcagggatgcaa

SEQ ID NO: 414807 - DNA, 201 bp, Homo sapiens
aataaaaaaaatattttggcaaatttactagatattgacaataaagtcaaatcatccaaagattgatgaaaatcaaatgtttaaaagcaaatatttcctcaaaaaaaaaaaaacacttaattccaatagagtcctagaagaagttttagaagtagttctcaaatgggtgagatcttgctacctaggggacatttggcttgt

SEQ ID NO: 414808 - DNA, 201 bp, Homo sapiens
ctgaaaaatattctctaggggaatgtctttcaactctagaattttaagctctattcttagtggtttcatatctataaatactgttccttcaagaaggatawgaagcaagctttatttctgtatttctaaaaagtaaaattgaacgttagattattggaacaattatttttactgaattatagtttaaggttagcctttgtt

SEQ ID NO: 414809 - DNA, 201 bp, Homo sapiens
tagatttaggaaggcagaaagactgtgtgtgtgtgtgtgtgtgtttgtgtgtgtgcacttgcactttggggttccctttctatggatgtttcaggatctgwggataaaggatcacagtctagcagaaagctgggtttcaggggacgtcaaaggtaatttcatgactatattagtagataaatcgaagaccagagagcatgc

SEQ ID NO: 414810 - DNA, 201 bp, Homo sapiens
ttctaagttaaattattaatagcatttgacgagtattctattttgatatggacaagaaaaatcgttcactttgaaacatttattgagctcgcttatagcamactgggaaaaaaagtcttggttttgttatttttctcaaaagatttgtatgtattttcctgcaataataaaccaaaaataaaatccatgaaggatctagaa

SEQ ID NO: 414811 - DNA, 201 bp, Homo sapiens
attctgtaatgtataaataatgttgtttattacttatgagtgaaatggacactatctttaagttctatttcagattatgcatttttatgctgtattttcatctctctctctctctctttctttcctcttttatttcttttttatagacaagcttttgctctgtcacccagtctgcagtggagttgtgagagcatagctcac

SEQ ID NO: 414812 - DNA, 201 bp, Homo sapiens
tcctttcaagtacagaagttttacattttgatgtggtccaatttatgtattttttcttgtgtttcttgtcctctttgcgtcatatctaaaaaaccattgcstaatctaaggtcacaaagatttacacctacgttttcttctaagagtgttatagctttaactctcgcatttaaatcttgatccattttgagttaacttttt

SEQ ID NO: 414813 - DNA, 201 bp, Homo sapiens
agcccaggagttggaggctgcagtgggctatgattgcatcactgtacacagcttgagcgacagagcaagtcctcatttctaaaaaaaaaaaaaaaaaaaamaaaaccccactaaggttttaatgttatcttgtacattcatactaaataatttagaggctggtaacaaaaagaatattgttctggtctcaattaattaatt

SEQ ID NO: 414814 - DNA, 201 bp, Homo sapiens
cattttaaaatgggcaatttatcttattattgttgagttgtaagagctccctacgtatcctggaaccaagccccttatcagatatacaatttgcaaaaatsttctcccattctgtgtgttgtctccttactttcttgatagtgtcctttcaagtacagaagttttacattttgatgtggtccaatttatgtattttttctt

SEQ ID NO: 414815 - DNA, 201 bp, Homo sapiens
aggccacaattgtttctagtttctattaaaggctcaattttaaaggtactccaaagtcttctctgtggatcagttaaatatataattatagtacacagggrtctcaggatttagtcagactaaaagattctgttaatagtcaaagggaaatttagtttaatttatcaaattgtagaatttgcttgcttttgaacatactgg

SEQ ID NO: 414816 - DNA, 201 bp, Homo sapiens
atgtgtgtatcataaaggaaaccatcaccacctgtcattgaaaccaggaaaggctcatgtcaactaaatgtgaaaagaaaacagtgtaagaaattaaaaaraaaatcatattcttgaggccatgaaacacatgttccagaaaacagtttattagaattgcattaagtaaaaattaatgtctgcacactgatggggaagcag

SEQ ID NO: 414817 - DNA, 201 bp, Homo sapiens
gctcactgatgaaacttcttgttagggctgttagtgtggtcagctagcagctggcttggggtgaactcttttccataggcagcctcatacttcttgagccsgtccactatcttctgggcttcatacagatccacaaagcagaaaggccctccaagacaaggtgggaagctgagcccgaagacggctccaatgtctccctct

SEQ ID NO: 414818 - DNA, 201 bp, Homo sapiens
acgccaacttcatccaccagtgtggcggcacccacaggaaggccaaggcttgtggtcagggaatccagcttctttgggtcaactccttcctggaggattcrgatgacttcagacatcatgggtgcaagacacctggtggtatagaagccaggtccatccttaaccacaatgatgaccttcccctgcttgagaccgattgct

SEQ ID NO: 414819 - DNA, 201 bp, Homo sapiens
gaaggccaaggcttgtggtcagggaatccagcttctttgggtcaactccttcctggaggattcagatgacttcagacatcatgggtgcaagacacctggtrgtatagaagccaggtccatccttaaccacaatgatgaccttcccctgcttgagaccgattgctacagttgaagcactggtgtctttggaagtcttcttgg

SEQ ID NO: 414820 - DNA, 201 bp, Homo sapiens
ataactcaagtggattgctgggattacaagcatcatgccgggcttcaattttttctttttttttttttgagatggagtctcactctgttgcccaggctggmgtgcagtggtgtgatcttggctcactgcaacctccacctccgaggttcaagcaattctcctgcctcagcctccagagtagctgggattacaggcatccac

SEQ ID NO: 414821 - DNA, 201 bp, Homo sapiens
cagtcagcatcatgtcaaaagcagcaggcacacccaccattttgggcagcctttgtgtgcctcctgctcctggtaagatccccagcaagacttcaggagcrccgaatactgtttttctgtcttttgttgctattttatattggcataaaatggcaggatccactgatggcagtcacaacaggctttatggacttttcaagt

SEQ ID NO: 414822 - DNA, 201 bp, Homo sapiens
aagctccctcctaaaacttgtctcttttattaaatattttaatatttaatggctgaaaatctttgtggtcattattactttgttgcagctttattgagatrgaattcacataccaaatagttcacacaattaaaagtaaaattcaatggtttatagtagatccacagtgttgtgcagccatcaccacaattttagaacatt

SEQ ID NO: 414823 - DNA, 201 bp, Homo sapiens
atggcacttctgatttgatcactagcccagatttcattcataacttccgtgaactctgaatgcagctgtttgtttattcagcgtatttatctttgaatggrgagagttaatttaaataactatcacatcccctttgactccatagttaatatgggttctggtcagcaaagcaaaggaccctgtaaaattgcggcgtatata

SEQ ID NO: 414824 - DNA, 201 bp, Homo sapiens
tctggtcagcaaagcaaaggaccctgtaaaattgcggcgtatataaccttgggagcggaggatcctgaaggcagagaagtggctgaggctgccaatcgccsggtagaccaccatgttgagctgaagagaacagcagtggagagcgcttctctttaatttcattcttatcttttgtattagctttttaaatgtattataacc

SEQ ID NO: 414825 - DNA, 201 bp, Homo sapiens
aattctgtggagcatttattaaatgccagccactattctaaggtcctttaatagattatttcatcttcccagtgattctattgtattgctttgctaaggcyaccataacaaaataccacagactgggtagctttaaccacaaacatttattttttcacagttctggagactggaagtctgagatcaaaggcaggcaggttt

SEQ ID NO: 414826 - DNA, 201 bp, Homo sapiens
ggagagcgcttctctttaatttcattcttatcttttgtattagctttttaaatgtattataaccaaggagaatacaaatgaactgacttcacagtttttcyctcagatttcagaattgtactgttcttaagctccctcctaaaacttgtctcttttattaaatattttaatatttaatggctgaaaatctttgtggtcatt

SEQ ID NO: 414827 - DNA, 201 bp, Homo sapiens
tggccaggctggtcttgaactcctgacctcaggtgatctgcctgcctcggcctcccaaaatgttgggattataggcatgagccaccgcgcccgacccaactttttttttttttttaaagagacggagttccgctgtgtctcaaactcctgggctctggggatcctctcacctcagcctcccaattagctgagacaacaggc

SEQ ID NO: 414828 - DNA, 201 bp, Homo sapiens
cctgtaatcctaacactttgggaggccaaggcaggcgaattgcctgagctcaggcattcgagaccagcctgggcaacatgatgaaaccacatctctactgaaaaaaaaaaattaaaaaagaaaagaaaaagatatcaccatgagaggtagatcattgcagcattggaggtgatctgcctccccaggtggggagactgtgta

SEQ ID NO: 414829 - DNA, 201 bp, Homo sapiens
ccctttttttgttttttttttcttttaggcacagcagaatttattctactttattggtatttttttgttttattggtgttatttatccttcataccgcatmtttaattgttttttaaaatactaatttcgcttttagcttttaaaatttctactcctaccttcttttggctggttttggtattttctttgaatttgaaaaa

SEQ ID NO: 414830 - DNA, 201 bp, Homo sapiens
taaaaataatggcaataacaagttagatacagaagtagaaaaatgttcttttcacaattgtatagccaggaatagatttaacaaaaaaggtgcaactcccrcatgaagaaagatgtacttattgacaggacttgaataaatacaaattaaattcacaagaagatgtaaaatcatgaaaataacagttcttccaaaattaat

SEQ ID NO: 414831 - DNA, 201 bp, Homo sapiens
gggtttcaccatgttggccaggctggttttgaactcttgacctcaggtgatccacatgccttggcctcccaaagtgctgggattacaggtgtgagccaccrtgcctggccacatatcctcttttaaaggagttccctatatactagggaggataagacacatgcatatgttatgataagatagaaaatgacaagtacctta

SEQ ID NO: 414832 - DNA, 201 bp, Homo sapiens
gaggcaggagaatcacttgaatccaggaggcagaggttgaggtgagctgagatcacgccactgcactccagcctgggcgacagagggagactctgtctttaaaaaaaaaaaaagaaaagaaaagaaaagaaaagaaatatctttattttttcagtaacaaattaaccttagcttacagtaactttttttacattataaatt

SEQ ID NO: 414833 - DNA, 201 bp, Homo sapiens
ctggtcagcaaagcaaaggaccctgtaaaattgcggcgtatataaccttgggagcggaggatcctgaaggcagagaagtggctgaggctgccaatcgcccrgtagaccaccatgttgagctgaagagaacagcagtggagagcgcttctctttaatttcattcttatcttttgtattagctttttaaatgtattataacca

SEQ ID NO: 414834 - DNA, 201 bp, Homo sapiens
gaggggcctaattttttgtgtgactcctgttaattttcatgactgtccttgttgctctgttgtctgtgtcttttcctgtcttggatgttggggagatgagygatatgtagataggagaggtgagtgtgagggcagaagtgtggttggttgagtgttgaagagagagtaacagacccgtaaagaaaaccacagtatttccta

SEQ ID NO: 414835 - DNA, 201 bp, Homo sapiens
caggtgaaatactaatacaaacaaaaactgttacaaaatcagaaatgtcaagattttggggggctactgtgtatctgtttatctacttgatcttatatgcrattttgtctttcatttcattactcttcttcattgggaagaaaaaatcctctcaaggtcctatctcagtccctgaagaaataaataaaaaagagtagcaga

SEQ ID NO: 414836 - DNA, 201 bp, Homo sapiens
ttttagtacagacggggtttcaccatgttggtcaggctggtctcaaactcctgaccttgtgatccacccgcctcggcctcccaaagtgctgggattacagkcgtgagccactgtgctcggcccagaagaggttttaagaagacaatttacagaaaagaaaaccgaggctaggggttattgttcaaggttaaatatacaatg

SEQ ID NO: 414837 - DNA, 201 bp, Homo sapiens
cctgtgtaggcccagagagacaaatatggcttgttgtcacatgtgtgcaagagctaaagtggatctcacagaaggagagggcagaatgatagatactagasgttgggaagggaaggtgagaatgaggagaagttagttaatggacacagttagctagaagaaataagttctaatattcaacactaccgtcggtaaattata

SEQ ID NO: 414838 - DNA, 201 bp, Homo sapiens
cttaataatggggaagcattctgagaaatgcaatgttgggtgattttgtcattttgtgaacattctagagtgcacctacataaacctgcatggtgtagccyactacacacctaggctatgtgatatagcccatggttcctaggctacaagtctgtacagcatgttactgtactgaatactgtaggcaactgcaacacacta

SEQ ID NO: 414839 - DNA, 201 bp, Homo sapiens
tcatagaaaacatctccatgctatctattaatcttttaggtgagcctgaatttaaatacattgggaatatgcatgggaatgaggctgttggacgagaactrctcattttcttggcccagtacctatgcaacgaataccagaaggggaacgagacaattgtcaacctgatccacagtacccgcattcacatcatgccttccc

SEQ ID NO: 414840 - DNA, 201 bp, Homo sapiens
ttctgtaatgtataaataatgttgtttattacttatgagtgaaatggacactatctttaagttctatttcagattatgcatttttatgctgtattttcatctctctctctctctctttctttcctcttttatttcttttttatagacaagcttttgctctgtcacccagtctgcagtggagttgtgagagcatagctcact

SEQ ID NO: 414841 - DNA, 201 bp, Homo sapiens
tcctctcttctttgcatacatttattaggtttatgactttcaaacttattttgatccctacatataaaaaatatattttgcagcatttcccagcacacatacacacacacacacacacacacacgtgtgcacagaatccaagttctcttttctatatcattaaaaaatcctctttatacccactaaattgattttactacc

SEQ ID NO: 414842 - DNA, 201 bp, Homo sapiens
ttaatcttcgtactagccctatgaggtaggcaacattgttatctcaacttaacagatgagaaaactgaggcttagcaaagttaatatgaagctctattacyatttctcagtttttgaagagatttacaagaaaatgaaataaaactttaaaaaattaaatttttatttgctaaccttgatttccatctcaatgggattatg

SEQ ID NO: 414843 - DNA, 201 bp, Homo sapiens
tattctgccttcctacagcaaaggatggtgattactggagattgcttatacctggaaactataaacttacagcctcagctccaggctatctggcaataacmaagaaagtggcagttccttacagccctgctgctggggtaagtaatcataataatagccaaacgctataataataattaagcatttatcattgtcaggcat

SEQ ID NO: 414844 - DNA, 201 bp, Homo sapiens
gacctatgttgttcaatcccttacagcagatgatttcccttaagttttcccacaggcttcccaaatgccctggtttgtgtaccttttacttggttcttgaytcagaagactagcctgtgtagagttttaggctccttgtgcatattttgactttccatttggtgttttggcagggatgcaagacttcaattaccttagcag

SEQ ID NO: 414845 - DNA, 201 bp, Homo sapiens
cctctcttctttgcatacatttattaggtttatgactttcaaacttattttgatccctacatataaaaaatatattttgcagcatttcccagcacacatacacacacacacacacacacacacgtgtgcacagaatccaagttctcttttctatatcattaaaaaatcctctttatacccactaaattgattttactaccc

SEQ ID NO: 414846 - DNA, 201 bp, Homo sapiens
atcaatggaaatgcagatgtcactgggtggcaaatgcatcagtacaaaggcacatccaaagggaggcaaagtcggagacgtgcaggtgctgagttagatcytgactgcacacctggacctttacagcagtattcccagggggtgaccacatgtttgggtttgctcaggatggccccatttatgactgtttccctggcagaa

SEQ ID NO: 414847 - DNA, 201 bp, Homo sapiens
agtcggatagctttctctctagttactttgttttgtaatactaataagaataaaaattattttaacttcttccatatgtattattccattctctttcttcwtatttttttaaattttttttgagatggagtcttgctctgtcacctaagctggagtgcagtggcacgaacttggcttactgcaacctctgcctcctgggtt

SEQ ID NO: 414848 - DNA, 201 bp, Homo sapiens
tattgttcaaggttaaatatacaatgttagttctgaaatcaaacccaagtttgtctcccctaagccacgtaccgcccccccaacccccgttttttttttcrttttttttaaacaatactatattgctacatgccactttggtcctcttgcagtaaggaagggcatataaaagtgccctgtttgtctgggatcagaaaacaa

SEQ ID NO: 414849 - DNA, 201 bp, Homo sapiens
atgaaatgaaacaaaaagaaaagtaatagggtagacgctaatttcatctttctttctttgtttctctttgtttctctctttctttgtttctctctctctttctctctctctctctctctttctttgtttcgacggagtcttgctctgtcgcccaggctggagtgcagtggcgcgatctcggctcattgcaagctccgcctc

SEQ ID NO: 414850 - DNA, 201 bp, Homo sapiens
tgaaatgaaacaaaaagaaaagtaatagggtagacgctaatttcatctttctttctttgtttctctttgtttctctctttctttgtttctctctctctttctctctctctctctctctttctttgtttcgacggagtcttgctctgtcgcccaggctggagtgcagtggcgcgatctcggctcattgcaagctccgcctcc

SEQ ID NO: 414851 - DNA, 201 bp, Homo sapiens
tctttccccaatagcttcagaaatatgatctatgtcaaatttaggatttagagcatgtctagtacatcagatgggaagtaattttatactttagtttttawaaaaactttaatgacttcttggaattcctttttgaacaaatagtgtattgtcaacaaaatataaagtaatctatatcagttaaatactgataataacatt

SEQ ID NO: 414852 - DNA, 201 bp, Homo sapiens
ttagtcctggtcgcagagattccaccaattggtcaaccagtcccattttctttgccctgtctgcacggatgtttctgccagtcagcatcatgtcaaaagcmgcaggcacacccaccattttgggcagcctttgtgtgcctcctgctcctggtaagatccccagcaagacttcaggagcaccgaatactgtttttctgtctt

SEQ ID NO: 414853 - DNA, 201 bp, Homo sapiens
tgattgtccattcctctggaagttttagtcctggtcgcagagattccaccaattggtcaaccagtcccattttctttgccctgtctgcacggatgtttctrccagtcagcatcatgtcaaaagcagcaggcacacccaccattttgggcagcctttgtgtgcctcctgctcctggtaagatccccagcaagacttcaggag

SEQ ID NO: 414854 - DNA, 201 bp, Homo sapiens
gttctgggtttccacctccaaactgctccccaaaggctttgcccagatctttggccacatgtttcgctacatccacgccaacttcatccaccagtgtggcrgcacccacaggaaggccaaggcttgtggtcagggaatccagcttctttgggtcaactccttcctggaggattcagatgacttcagacatcatgggtgcaa

SEQ ID NO: 414855 - DNA, 201 bp, Homo sapiens
tgggcttcatacagatccacaaagcagaaaggccctccaagacaaggtgggaagctgagcccgaagacggctccaatgtctccctctgcaggtgtggccargatcccctcttgcgggcacgtgactgcctcattcacaaatcttgtcagcaggcggaactggatgtcttcatctgaggagacttcagacttaggaggcatc

SEQ ID NO: 414856 - DNA, 201 bp, Homo sapiens
cttaaatgaatgtacagaagagtgagacttgttaatattttttcaaaaattcattggacaaagctaatgcattcatgggctccataaagacagtagtacarggaaaacattcatacctctgccaacatttccaaaaggccaagaaggctctcattcatggaacatatttcattttccataatattctcagccctcagacca

SEQ ID NO: 414857 - DNA, 201 bp, Homo sapiens
aaacttatgtaagcaagctattaaaaaacaaaagctgaaggcgactgttttatgatgtgtgtatcataaaggaaaccatcaccacctgtcattgaaaccargaaaggctcatgtcaactaaatgtgaaaagaaaacagtgtaagaaattaaaaaaaaaatcatattcttgaggccatgaaacacatgttccagaaaacagt

SEQ ID NO: 414858 - DNA, 201 bp, Homo sapiens
tgtcagcagccctctattccttctctattgttctgggtatttctgctttcatatgtcccctacatgtagtgtctttcctaagtgagagctcgcaaagtacmatttctccatttcattctagttgctgggtcattccagcagctcttggcccctggaagctgccggctggtttattccttaagctggcttcgataccctata

SEQ ID NO: 414859 - DNA, 201 bp, Homo sapiens
atgatataccattaaaaaaagaaaataaacctgtgtataggcatatgctgatatttattgtgactcttatttctgttttctgattctgacttataaatgtstagaataaggttctttaaatttgtaaaatctttgtacatttttgtgatttgttttttgggttttttttgcaaatgtgggggaagatcattcatagttttg

SEQ ID NO: 414860 - DNA, 201 bp, Homo sapiens
ttttggaaagattgagtgatgccacaatatatgaggccctggaagctggacagaggaatttagacacaatggtgggttacaggggcttctgcagtcttgtragcatagaatgattctgtggaaagtggtgttgtaataaaattagttattttaatattaagccagatgtgtttaaagtaggggtcgggaggctgggcaaaa

SEQ ID NO: 414861 - DNA, 201 bp, Homo sapiens
ttttcagggtctcactctgtcacccaggctgagtgcagtagcatgatcatggctcactgcagtctcaacctcccaggctcaggtgatcctcccacctcagkctcctgagtagctggaaccacaggcttgcaccaccatgcccagctaatttttaaattttttgtagagacagggttttgccatgttgcccaggttggtctc

SEQ ID NO: 414862 - DNA, 201 bp, Homo sapiens
ttcttaaatgaatgtacagaagagtgagacttgttaatattttttcaaaaattcattggacaaagctaatgcattcatgggctccataaagacagtagtayagggaaaacattcatacctctgccaacatttccaaaaggccaagaaggctctcattcatggaacatatttcattttccataatattctcagccctcagac

SEQ ID NO: 414863 - DNA, 201 bp, Homo sapiens
caatcattttttgttcctttgccttttcttggtttcctttctccacttttttctttactttttcctcatttcttctgtaagtgagtaatctgtttttgtarccatcctaccccctcgtgttgtttattggacccctggtgacttgcatttcctttaggaatatgcccagcatttttaggctgctaaaatatgagccaatta

SEQ ID NO: 414864 - DNA, 201 bp, Homo sapiens
ccaggtttatcactgagggaggatcattgatgaagaggcccatctgttccaaagatgtttccaacttgcttgtatagcagtttgtaaatcaaatcagtgcrgtgattgtgaggcttatatagccacttgtttgtcaatttttaaaaatcactgcttttgtgcacatttcatcatgatatctttgaaaaatggggttttacc

SEQ ID NO: 414865 - DNA, 201 bp, Homo sapiens
tgcagtgagccgagattgtgccactgcactccagcctgggcaacagagtgagactctgtctcaaaaaaaaaaaaaaaaaaaaaggaaaatgaattagtgargaaagtaagatgatgtaaaaacaaccatccccagtgtcctgagggtagtgcttctagccgctttccccgctcccccaccccgttgctaggagagagatga

SEQ ID NO: 414866 - DNA, 201 bp, Homo sapiens
aaaatttcttcagaatctgttgtttagactttacaacaaaaatagctttggggagctgcttgcctggagaggttttgtggtgactatggaaattaatcttsttgatgggaaatcagctgttcaccatactgctgccttcattcccaaagaagagtttccattcctacctggaatggctagagcctgttggctagagcaatg

SEQ ID NO: 414867 - DNA, 201 bp, Homo sapiens
catggcatacgctgttaatttttccactaatcccttgtctctctttggagagatcttcttatcagctagtcctttgggaaagtaattgcaacttcttctargtatttgattgtccattcctctggaagttttagtcctggtcgcagagattccaccaattggtcaaccagtcccattttctttgccctgtctgcacggatg

SEQ ID NO: 414868 - DNA, 201 bp, Homo sapiens
ctcatgaaatggtattcaaatcgtgcactttgaaatgccacagaggaggaggtttatccgagctacgtgatgggtcaaatgaacttaaatttgaaacatgwttaaatttgcccttttgtttccttctcattaattactggaattgccgtgagtccgttgctctgtgaacgtttctctttctttgaacattcaggatatggt

SEQ ID NO: 414869 - DNA, 201 bp, Homo sapiens
attaggggttgtgggccaagctttattgagtgacatgaagcttcaaagttgttttggggaagggagcaggaccaaaatgccttcttagtgcaactttttcaaaaaaaacttgtgaagccagcttctaatattcccctggctacttgctctctctctctaatgggctgcagcagtttctcctgtgcctcaatcaaatgaata

SEQ ID NO: 414870 - DNA, 201 bp, Homo sapiens
gggagagaaattcctcaaatcataaagccctagaacttttgttctaggttcatattttttcatgaagactataagagggagacatgttattagtctataaygcatgttaaattcattttaagcttctaatctttagttattcttctaaatatttaaaaaataggttgctgtgatttacagaggcaatgaatattttactta

SEQ ID NO: 414871 - DNA, 201 bp, Homo sapiens
aaatttataaaaactatttttcttcctgcagtaataaattaaacttaccttactgtaactttcttttttttttgagatggagtctcactctgtcaccaggmtggagtgcaatggcatgatctcggctcactgcacactccgactccctggttcaagctattttcctgcctcagcctcccaagtagctgggattacaggcac

SEQ ID NO: 414872 - DNA, 201 bp, Homo sapiens
ccctggttcaagctattttcctgcctcagcctcccaagtagctgggattacaggcacgtgccatcatgcccagctaattttttatatttttattagagacggggtttcatcatgttggccaggatggtcttgatctcctgacctcatgatccacccaccttggcctctcaaagtgctgggattacaggcgtgagccactgc

SEQ ID NO: 414873 - DNA, 201 bp, Homo sapiens
ctctgcctgattattagttacttccttttaactgcctaaggctgatccaatagcaagacacaaacctactgagtgtgcagtagtaaatttctcattttctrtagtaggatttggagtcttcgttgctgtgctctataggttaaaaacaacacatgtattgaaaggtatacttttaggacctacgtgcctggccatagcctg

SEQ ID NO: 414874 - DNA, 201 bp, Homo sapiens
agatttttaaaacacacatttctactttctgacattttacttaggttttcatatgtatattcataaaggaaattggcccgtacttctctattttatataawttttatcacacttagaattagagttgtaatttattttcaggaaataatttcattatgatctacatatttgttaatgtcgtgagaaatagctcaatttggg

SEQ ID NO: 414875 - DNA, 201 bp, Homo sapiens
aggctttaagcaagttacttaacttttctgagcttactttctcaaataaaaagcaaggataactaaaatgctttggaaactttcctgtgagaaattgatgygtaaatagataattaagggacattctaggagttgtgttacaggcatgaacaggaacacagaggaggggacaaccaacacagctcaagaggtcacagaaga

SEQ ID NO: 414876 - DNA, 201 bp, Homo sapiens
aattagtttttattaaatgtcattttgatttaagataattttttatttataggatactaaaagtaaactttggagcagatttttaaaacacacatttctaytttctgacattttacttaggttttcatatgtatattcataaaggaaattggcccgtacttctctattttatataaattttatcacacttagaattagagt

SEQ ID NO: 414877 - DNA, 201 bp, Homo sapiens
ctgagttccagtactgctgtgaataagctctgtggtataggggaagatatttaaactcctgatgccctaggttttctcatctgtaaaacgcagatgaaaakagttcctacttcttagcgtgtgtttgtgtgcacacaggcacatgcacctgtgtgtatttgagtgtatattaaatgaattaatacacagcccttggaaaag

SEQ ID NO: 414878 - DNA, 201 bp, Homo sapiens
tttggaggcagaaattgggcataagacaatatgaggagtggtctcctcccttaatatgacactttttaaaatgatttggaaggtactaaaatctttttttkgggaagcaaacaagacattaattttcacttatctatttagggaaaagcagaataaaatgcacaaaaaattcagtggccttttgtgcatgtcttgattctt

SEQ ID NO: 414879 - DNA, 201 bp, Homo sapiens
gtagagaatttctagtatactgttacatagtatgtcttttccctgattttaatgggaatggcatttctgtgctcatatgcatagtcaagcattcaaataaycattcttctgaagttgcagattaggtactttaagcatttggaataattagtttttattaaatgtcattttgatttaagataattttttatttataggata

SEQ ID NO: 414880 - DNA, 201 bp, Homo sapiens
ctatgcataattgaatagtagagaatttctagtatactgttacatagtatgtcttttccctgattttaatgggaatggcatttctgtgctcatatgcataktcaagcattcaaataaccattcttctgaagttgcagattaggtactttaagcatttggaataattagtttttattaaatgtcattttgatttaagataat

SEQ ID NO: 414881 - DNA, 201 bp, Homo sapiens
gtttctattaaaggctcaattttaaaggtactccaaagtcttctctgtggatcagttaaatatataattatagtacacaggggtctcaggatttagtcagmctaaaagattctgttaatagtcaaagggaaatttagtttaatttatcaaattgtagaatttgcttgcttttgaacatactggtaacatgcatataagcaa

SEQ ID NO: 414882 - DNA, 201 bp, Homo sapiens
aaaacgtgttttgttttgcataaaagcagttgaacttgtattaaatctgttctttccacatttttgatgtaagaaagaattctcccaagaatgttaatagrttgctaaggtagcaatgataattttctaactgaaggaatgtactaaacatttttttccattagagagtttttttggaatgggatatagaaaatgacaaat

SEQ ID NO: 414883 - DNA, 201 bp, Homo sapiens
tgtaatcccagcactttgggaggctgaggcaggacaatcacttgagctggggagtttgagaccactcagactcacttgagaccagcctgagcaacatggcraaaccctgtcgccacaaaaaaaaaaaaaaattacaaaatgttagccaggtgtggtggtatgctcctgtagtcccagctactcaggaggctgaggcgggag

SEQ ID NO: 414884 - DNA, 201 bp, Homo sapiens
cattgggagtgggcctctgggaagggtgttgtggtgtgcaagggcaaccctcagttgtgtgcaccacgcagaatgaatcatgtgttgtgtcgctggaagtyaagggtgaataatataaataactaaaaatgggtgaggtttcctgttaaaaaaacatactcgtgttgatctgttcatgtgtctacattacatttcaatgtg

SEQ ID NO: 414885 - DNA, 201 bp, Homo sapiens
tccaagattgcccaaggaaggactgttccatataagttacaatacagttatgaaaacttattagcaaagatcagatacctactataccacagtgcttctgygaatagattcaagtaattttttgaatttaagcccggcatctcccacatgactgaccatttaggaatcctggtcctaagagaacatgaccattgggagtgg

SEQ ID NO: 414886 - DNA, 201 bp, Homo sapiens
acctgtgtgctgtaaatggctatgggtgtgccggaggtggatagacagggcctagggtggcaaaaaaccaggaaagcattgaaataaatcactccagcacrctgtaagtacctacagaaaatgttatttttcttggcagtagaatccactctctaagaagaaacaagcttttgttggaagactgctctgataaactttttg

SEQ ID NO: 414887 - DNA, 201 bp, Homo sapiens
taaatcaaacataatacagttatatagtatataattataagtagaattatattaagcatatactagattatattgtaattagcaacaattgattactaatrcttttcctccctaggtagctattattgagcactctctagtaagccatggaatataaagatgttatgtaattttgattttgttaggctaatttccagcagt

SEQ ID NO: 414888 - DNA, 201 bp, Homo sapiens
gaggtatttcaaaagggaacaagaaacaacagtattttaccaagtactttgtatgaaggtattgactctaattcttcagggagttataagagagtggtctrcagtggagggctttcagaaggaggtggagctttgagcaggacttaaaagatgcataaggtatggaaagtcaaagagaggactttattctaagctagtaaa

SEQ ID NO: 414889 - DNA, 201 bp, Homo sapiens
tatgtgttaatgcataggaagaattctataaactttcctcaaattagcctccttcaaattagaataacttttgggttgaatgttattaaatacttagaatkgtctccccattgtccataatgggttagtttcagtattccactggtcagtgtagcattgggattagtagcatttttatattttcatatgtatgagtaacac

SEQ ID NO: 414890 - DNA, 201 bp, Homo sapiens
ccatttcttgattccaaatgtatgagctgcagaaaactttagaggtgttgaacatgtgcaaaatacctgataaaaatgcttctatgtgttaatgcataggwagaattctataaactttcctcaaattagcctccttcaaattagaataacttttgggttgaatgttattaaatacttagaattgtctccccattgtccata

SEQ ID NO: 414891 - DNA, 201 bp, Homo sapiens
ctattccttctctattgttctgggtatttctgctttcatatgtcccctacatgtagtgtctttcctaagtgagagctcgcaaagtaccatttctccatttyattctagttgctgggtcattccagcagctcttggcccctggaagctgccggctggtttattccttaagctggcttcgataccctatagactcaactcata

SEQ ID NO: 414892 - DNA, 201 bp, Homo sapiens
cattgttcagcacagattttttttctttaagtttactagaggaaaccagtcttattcattgtgggaactcagtaaatgttaagccagattttcaacataaycagcatcaggggaattaatttaatgcacttttggaaactgcattaactccacaaaatcaacaagacctttatagagctcacacaaagagaaatcagctgc

SEQ ID NO: 414893 - DNA, 201 bp, Homo sapiens
ccatcttggaaagcatatttttgcccaaaagagtgtgaatcttttcttttggaaggaggaggtgccatttgccccattatgtggcagaatttggaggagakttcagagaaggagattagcacagagtaggcagctcttaaatcccaaagggaaatttataattttactcctccaggagtttctcttagctttgtcttgtca

SEQ ID NO: 414894 - DNA, 201 bp, Homo sapiens
ttgaaatctggaatgtaaaatgccagactcttcttctgtttttctggatttgaaacaatcgaacactgggaaatatctgatcctgaactaaaatgcaggcmcaccaaatttgaactcagattgaaaaagttaacactgggaatcaactagaaattaacggtgattatgaagaatattttgattgctatttgattctttcat

SEQ ID NO: 414895 - DNA, 201 bp, Homo sapiens
ttgggactctggaataaccgttcttactgtatacccctaacctttccttcatctgttttaatggtaatctgttaacctagaaccaaccttcatgtctgtcmtatgggtcttttgtgactgcaaccttgggctggcctatgtccttgtctccatgacattatggtgactctcactcagagcattgtagcaacaaaatgattg

SEQ ID NO: 414896 - DNA, 201 bp, Homo sapiens
ctgttttaatggtaatctgttaacctagaaccaaccttcatgtctgtcctatgggtcttttgtgactgcaaccttgggctggcctatgtccttgtctccawgacattatggtgactctcactcagagcattgtagcaacaaaatgattgtctcttttttcagatttccttcccatgttctttaagtagatgagaagcctgt

SEQ ID NO: 414897 - DNA, 201 bp, Homo sapiens
ttccacctatcatagaagaatggtgaaatcaactcaggttgacaggatatttgattgtcaactttgtgcaagcaccattatttctagccagcactaccttyttctccagctgaacctgaatatttgcataatctctagattagatgtttttgtatttctagcttaggcaatacttatttaaaagaggcatgttcatggtac

SEQ ID NO: 414898 - DNA, 201 bp, Homo sapiens
tcttccccttctcagcctaatatctgtatttgtatcccttatagaggttcttaaatgtcaagatttattcttctgtttggtggaacagggaatcaaatcakattaatagaaaatagaaatgcagattcctcctcctttgtatagctgtgagaaaaaaaaaaaagaaattcatattcccacataagctgatccaggcctggg

SEQ ID NO: 414899 - DNA, 201 bp, Homo sapiens
gagggggtggtgggaaggaagttcattcttgcaaagccctccagatgctggaggtagctgagacacatccactcgctcgagatccatgctctccttgttcktctgaacttctctgaataaaaagctctctcttgctctcccagacttccttctctaagtcgtttgtcatcggctcttgagctcttcagcctggtcacctcc

SEQ ID NO: 414900 - DNA, 201 bp, Homo sapiens
ttgtgtatttagggctgtatctttcaatttgtttcaagaacagtttcttttaaaagttttttattgcaaaattcatattttattacaaaaattaaaacatrcaaataaggagaaagaagaatccattaccctacaatcttcagtgaacaccattaacattttgatacgtacctttcaaaattattttttatggctgtatca

SEQ ID NO: 414901 - DNA, 201 bp, Homo sapiens
ctatggtctgaatgtttgtgttctcccaaaagtaatttgttgaaaacctaattgccaatgtgatggcatgaggggaagggcctttgggaggtgatttgtasatgatggctgaatccttatgaatgggattagtgcccttacaatgagaccccagagagttgccttttccatcacatgaggacacagccagaaggtaccatc

SEQ ID NO: 414902 - DNA, 201 bp, Homo sapiens
ccatcctggctaacacagtgaaaactcgtctctactaaaaatacaaaaaaattagccaggtgtggtggcaggcacctgtagtcccagctacgcgggaggckgaggcaggagaatggcgtgaacccgggaggcggagcttgcagtgaaccaagatcgctccactgcactctagcctgggtgacagagtgagactccgcctca

SEQ ID NO: 414903 - DNA, 201 bp, Homo sapiens
ccttgtggccaattatccatatgatgagacgcggagtggtaggtattctttctgcttctcttattggttcaaagtttataacactgtacaaggttttatargatgatttctgtaattttttttaaggaactgaacattaagtgatttttgcctgaagaaagaactatgtttaacaggaagctctcctaatcatttcatatg

SEQ ID NO: 414904 - DNA, 201 bp, Homo sapiens
ttacttagagattgtgaccaaaattataaaacgtgttttgttttgcataaaagcagttgaacttgtattaaatctgttctttccacatttttgatgtaagwaagaattctcccaagaatgttaatagattgctaaggtagcaatgataattttctaactgaaggaatgtactaaacatttttttccattagagagtttttt

SEQ ID NO: 414905 - DNA, 201 bp, Homo sapiens
ctatccaaaaatacagaaggccagaaggtggtgagaaaaatgtcagacaacagattgtggagaaaaataaacaagccaagaaaagtcctatttggccttaaaagaggcagatggtgacaggaagtgttcagtgaggagtgattgtgctgaaaatcacaaagtctataaaattatccatctgtagtttgaggtttttgggga

SEQ ID NO: 414906 - DNA, 201 bp, Homo sapiens
atttaataagggtgttgtttaaaacgcaaatatcaccaaccagtggtaaagcaaacacattctgtgtgaatgagtacagcccactgattgacattcaagayccattggaaaaatcaggagacacaagagtgggaagagtgcagattggagcagctatccaaaaatacagaaggccagaaggtggtgagaaaaatgtcagac

SEQ ID NO: 414907 - DNA, 201 bp, Homo sapiens
ccaatgtaggtagttattcagaataatagactcaggaatttaataagggtgttgtttaaaacgcaaatatcaccaaccagtggtaaagcaaacacattctrtgtgaatgagtacagcccactgattgacattcaagacccattggaaaaatcaggagacacaagagtgggaagagtgcagattggagcagctatccaaaaa

SEQ ID NO: 414908 - DNA, 201 bp, Homo sapiens
tcttggaattgaattctgacaggtggactgagagttttttgtcctctaagccttcattctaagacagatgacaccaatgtaggtagttattcagaataatrgactcaggaatttaataagggtgttgtttaaaacgcaaatatcaccaaccagtggtaaagcaaacacattctgtgtgaatgagtacagcccactgattga

SEQ ID NO: 414909 - DNA, 201 bp, Homo sapiens
agtgatgtagaaaaaagcactaagttaactagatcatatcagtataaatgtgaagcctcaccattttactcatccaaaagtgtctagggccttaagttcasttccttttattacaactttaatattttgtctgtcttaaaaaaaaaaaaaagacattaaatctccagcccctggtatcgtgcttggaacatggtgggtact

SEQ ID NO: 414910 - DNA, 201 bp, Homo sapiens
aggacagttttagaaacttgaataccagtagtttgtcaagcaagatacagcgcctgcttctctagaatcaggggatgtttaagaggttatctagtccagcytcacagcttgtctcttagatatctttctgcttctgtgggaattaatgacttctactgactgtagatttgtctggagttttgcagaacaaaccaaatcctt

SEQ ID NO: 414911 - DNA, 201 bp, Homo sapiens
tagaaacttgaataccagtagtttgtcaagcaagatacagcgcctgcttctctagaatcaggggatgtttaagaggttatctagtccagcctcacagcttrtctcttagatatctttctgcttctgtgggaattaatgacttctactgactgtagatttgtctggagttttgcagaacaaaccaaatccttccccacataa

SEQ ID NO: 414912 - DNA, 201 bp, Homo sapiens
ctgagcccgaagacggctccaatgtctccctctgcaggtgtggccaagatcccctcttgcgggcacgtgactgcctcattcacaaatcttgtcagcaggcrgaactggatgtcttcatctgaggagacttcagacttaggaggcatcttcagacttgctaaaataccgttcatgtcagaattcaaattcttattcttcaca

SEQ ID NO: 414913 - DNA, 201 bp, Homo sapiens
agtgcccttacaatgagaccccagagagttgccttttccatcacatgaggacacagccagaaggtaccatctacgaaccataaagggggcctttagcaaaygccggctctgccagtgccttgaccttggccatcctagcattctgaactgtgagaaattcatttctcttatttatcagttacgcagtttatggtgtttgtt

SEQ ID NO: 414914 - DNA, 201 bp, Homo sapiens
cactcttggacactgataaagtggagagattacagaagttgtgtaggttcatgtagaagatggcttaaacatgggggcagcctcttggtgcttgatcaggrtccctgtggatctctacatgtgtcttattgtgttgacacagttttgcatttggaactgtttctggtggtgtcagggaggggaagtggtgctttggctttc

SEQ ID NO: 414915 - DNA, 201 bp, Homo sapiens
gtacttgtaatttattaagggattactttttaggacaaaccctgtagggaagtgagggaagcagggcaaggaaggggatagagctaaacagggttgtggtstcaggcaaagtccagccttggcctgagccattggaagaagcctggagcataaattaggggcaggtttgtctccccttgagagaaagggaccagcctttgg

SEQ ID NO: 414916 - DNA, 201 bp, Homo sapiens
ctttttaggacaaaccctgtagggaagtgagggaagcagggcaaggaaggggatagagctaaacagggttgtggtctcaggcaaagtccagccttggcctragccattggaagaagcctggagcataaattaggggcaggtttgtctccccttgagagaaagggaccagcctttggtggctccatatctgtcagccattgg

SEQ ID NO: 414917 - DNA, 201 bp, Homo sapiens
gaaatctggaatgtaaaatgccagactcttcttctgtttttctggatttgaaacaatcgaacactgggaaatatctgatcctgaactaaaatgcaggcacmccaaatttgaactcagattgaaaaagttaacactgggaatcaactagaaattaacggtgattatgaagaatattttgattgctatttgattctttcatag

SEQ ID NO: 414918 - DNA, 201 bp, Homo sapiens
acagcagctttgtagatggaaccaccaacggtggtgcttggtacagcgtacctggaggtgagtttccattgtgctctctgattatgtgattgtagcttatytacaatgaccatttaggtttagagagtgatttagatttagagaatcttcaatcgtcctccatcattaaaaagtagactgaatctatagttcttccattaa

SEQ ID NO: 414919 - DNA, 201 bp, Homo sapiens
tcagcaattctctggaaaaggggtgggggggtagctgtgagctctaacagccaacacctgcagcagtttgggtctggatgccctgcctccataaaagcaayctggtgggcactaacagcatcctctgctaatttgagtcagatttaaattaaaattgttctgaatgcagaatattctctttggtgctatttgaagtattgt

SEQ ID NO: 414920 - DNA, 201 bp, Homo sapiens
atacatatgcatacacacacatttaaatggagtatgtttatctagaaatcaggaaagttagaaactgagagtaaataaacatttaaaaatggagaggcaartggcttttcaagatagccctgattttaggtcaatggaaaaaatctaagcagttattttaactaaagtatctggtgatcatagtttggaagatctggaatt

SEQ ID NO: 414921 - DNA, 201 bp, Homo sapiens
acctactgggaggataacaaaaactccctcattagctaccttgagcaggtaaacacagtccccagcataaaaatgcaaggtttacaagcattcaaacctgkcctacaatggtcttgtaagaggagtccaggagaatccgtctggtgcagaatgaggatgccatatttggaaggcaggtgtcagcagtgtttcagttaggct

SEQ ID NO: 414922 - DNA, 201 bp, Homo sapiens
gaggcaatgccattgcgttccttgaaatgtgttatttcatttttttgctttggattcactctttcacacacgttgagcttatattgcatactgtataaccrgtggatacattacttgattctgcgtaatgcctgctgcatatgatgcaggggttgaaggcttctctatcttattcttaatgtagcaaacacaaagacaata

SEQ ID NO: 414923 - DNA, 201 bp, Homo sapiens
gagggcattactggaatgtaacttatcagttatgttttcaaatccttagagcagaacttcttgacctgtgtgctgtaaatggctatgggtgtgccggaggyggatagacagggcctagggtggcaaaaaaccaggaaagcattgaaataaatcactccagcacactgtaagtacctacagaaaatgttatttttcttggca

SEQ ID NO: 414924 - DNA, 201 bp, Homo sapiens
aggagaatccgtctggtgcagaatgaggatgccatatttggaaggcaggtgtcagcagtgtttcagttaggcttttatttgtcataggttttgtggctcakgactattcaccaagaactgactaaactggagagtatacagaaaagacgtagactctcgtttctgtttgtattattctaagcaagggcaatcctaggactc

SEQ ID NO: 414925 - DNA, 201 bp, Homo sapiens
ttagaaggaacaataattatcgcatttatttgctcaatgtaggcaactcctcatatgttcagatcccaaagtgatgctgactgattggacctatccaattyctcttcctatacaggcgaaagtatttaaaatcataaaatctttccttcactatgcagctgctagtcactgccattgtgtaatgttttctccaagaaatag

SEQ ID NO: 414926 - DNA, 201 bp, Homo sapiens
tgtttcagttaggcttttatttgtcataggttttgtggctcaggactattcaccaagaactgactaaactggagagtatacagaaaagacgtagactctcrtttctgtttgtattattctaagcaagggcaatcctaggactctctcccaccctgatcaccgtgaggcatcccaggcagagccagaacaaaagtaaggcaa

SEQ ID NO: 414927 - DNA, 201 bp, Homo sapiens
ctgtccctagatgagtaatctttgaagggtagggtggcacatgtggagtattaaagagatggctgttaagcaaagataaatgaattacttatgataatacrccgtggaacaactttccactactggtaaatattttgttttctacagaaatctctttactatcaaatcattgctaaacatcatagttctataataatcccc

SEQ ID NO: 414928 - DNA, 201 bp, Homo sapiens
aaaccaggagttgaatccagtttctttctccaccattgcaaggctctgttgcagtggtccctatagcttgctatggcctcctttgaataaaggctgctctaaaaaaaaaaagaagaagaagaagcaaaatcagcataggaattcttttacacatgtcaaatatccatatactgtaataccttaccagggactgtcgtggaa

SEQ ID NO: 414929 - DNA, 201 bp, Homo sapiens
atcctgaggcttcttatttttagctgagtgtccctgggcaagtcaattaacttctctctacctcccaaattcatcacctatgaaatgacaataatgtgatrattaaatgaggtggtaaatataaagttcttaattcaatatgtggcaacaattattattacctcattatggtatttcccactgttggtctacagataaatc

SEQ ID NO: 414930 - DNA, 201 bp, Homo sapiens
catattggagcaggacgagctgcagacaaaacccctcagacaccgagttaaagaaggaagggctttattattcagccgggagcatcgtcaagactcatgtygcaaaaacccagctccctgagtgagcaattcctgtccttcttaagggcttacaactctaagggggaccgcatgagagggtcgtgatcaattgagcaagca

SEQ ID NO: 414931 - DNA, 201 bp, Homo sapiens
attacagtgtggactttgatgtcaggggacttgagctcaaatcctgaggcttcttatttttagctgagtgtccctgggcaagtcaattaacttctctctayctcccaaattcatcacctatgaaatgacaataatgtgatgattaaatgaggtggtaaatataaagttcttaattcaatatgtggcaacaattattattac

SEQ ID NO: 414932 - DNA, 201 bp, Homo sapiens
tggtattattgaattgcctttgacttggagacagagctattcattatagagcagtttctaagagcctgggcttcacagagattatctcttttcattcaacratgtaatgaagtaggaattatacttctattttacagatgaagaaatagactcagagagtttaattgactttaggattgtaaaactacaaacagtagaact

SEQ ID NO: 414933 - DNA, 201 bp, Homo sapiens
tacttattctgaggtacaagtgggctcattcagtgttttttttgagcacctgtatactcaaggtggaccaggcgtctgtgagttgtgcctctgcacaaccsatagaagataacacagaagatagtcgcttgccctgagggcaatagagaattgggagcttgaagaacagcataaagggatgtgaggctgcaagatcggctt

SEQ ID NO: 414934 - DNA, 201 bp, Homo sapiens
gactcagaaaatattttcgaatgtgtcaatgagtccatgaatgaatggaatttggtaaaaaagagaattctgacctccagcttctctttatcttatgagakgctttcttcactgtaatcttgcaggactggagttaggttttatttagaaagctggcaggtttatttacaaaagatgcaaataaaccactgggcttagggg

SEQ ID NO: 414935 - DNA, 201 bp, Homo sapiens
acagtggggactcagaaaatattttcgaatgtgtcaatgagtccatgaatgaatggaatttggtaaaaaagagaattctgacctccagcttctctttatcytatgagatgctttcttcactgtaatcttgcaggactggagttaggttttatttagaaagctggcaggtttatttacaaaagatgcaaataaaccactggg

SEQ ID NO: 414936 - DNA, 201 bp, Homo sapiens
cagctaaatccaataaccaaagccaagatatcctaggcacagttaaagctaatgtaagtatttgtgagtctcctgctgcttacttaatgagaaccctttgktactctattttgtagattgatcccagagttttttgcgttgttacttcaagagattatatgaaagctaatgtttaactttttgttgtttcaaatttggaaa

SEQ ID NO: 414937 - DNA, 201 bp, Homo sapiens
tgacaaagcaagcaagaaaagtaggctaaaaattctcagtgcagggccagtatagttttataatgatacgtaagaaccaaactgagaagagattaaaatargtgatcaatagacattttgatcttcaaatatatagtaggtgggttgatcaagaataaatcttcaggaaatatttcttaccttcaaataatataagaaaaa

SEQ ID NO: 414938 - DNA, 201 bp, Homo sapiens
ttggtctgtgtctgtttctttaatcttgtggatttgttttctaggtagtgctcacgaatacagctcctccccagatgacgccattttccaaagcttggccygggcatactcttctttcaacccggccatgtctgaccccaatcggccaccatgtcgcaagaatgatgatgacagcagctttgtagatggaaccaccaacgg

SEQ ID NO: 414939 - DNA, 201 bp, Homo sapiens
tcgtttttaggaatagaatgggaggcaggtttgccctaagcagtttccaggttgacttttccttttagcttagtgattttggggtcctttcacactatttyataaataaactatttttaattttcttctttgatctcatttattttttaaaaaagttttatgcctcttttcaaagttttattaatttccagtttcatcata

SEQ ID NO: 414940 - DNA, 201 bp, Homo sapiens
tctctcagcactgtattctcatcagcttggacagtgcctggcacacagtggggactcagaaaatattttcgaatgtgtcaatgagtccatgaatgaatggmatttggtaaaaaagagaattctgacctccagcttctctttatcttatgagatgctttcttcactgtaatcttgcaggactggagttaggttttatttaga

SEQ ID NO: 414941 - DNA, 201 bp, Homo sapiens
ctccatttgctacagagtggagccatcatttgaatttccatcacggcctgtctctggagcagaccactgtggtactggggttttgggggctctctcaagcyagcttcatagactcgctaaccttattttacaagtagcattctagaaccagtcattataactttcagggtgggcattttccacgagatcctggttccaatt

SEQ ID NO: 414942 - DNA, 201 bp, Homo sapiens
tcagccaatctgggagcaatctgggagcagagtgtggggtgtggagagaattcagggaaggtgttctagaggagctaacatctgagctgaatcttgaagtwtgagtaagagtttctggatgtagaaggggaggcatctaggcagaaggaacagaatgaacgcacatatggagaggagacagagcatggtgtgtgacgagct

SEQ ID NO: 414943 - DNA, 201 bp, Homo sapiens
caaattcaggacaatataatatttgctatgatatcctcatgcattgggtatgatgggaggaaagacagtcagccaatctgggagcaatctgggagcagagygtggggtgtggagagaattcagggaaggtgttctagaggagctaacatctgagctgaatcttgaagtttgagtaagagtttctggatgtagaaggggagg

SEQ ID NO: 414944 - DNA, 201 bp, Homo sapiens
atattggagcaggacgagctgcagacaaaacccctcagacaccgagttaaagaaggaagggctttattattcagccgggagcatcgtcaagactcatgttkcaaaaacccagctccctgagtgagcaattcctgtccttcttaagggcttacaactctaagggggaccgcatgagagggtcgtgatcaattgagcaagcag

SEQ ID NO: 414945 - DNA, 201 bp, Homo sapiens
acctggcaagaatcaaaacatgatggctgtatgttctgaccctgctgcttggggaattcatctgtctttttacctgtgttgctcctgatgtgattagaagrtctatgatcgtacgaggtttattagacaatttaacattgatatctataaagtagctataagaaatgaagcctgtaaagagagtttcacaccctattcaat

SEQ ID NO: 414946 - DNA, 201 bp, Homo sapiens
ctgcccacctcgacctcccaaagtgctgggattacagacgtgagccaccgcgcctggccagttacatctttttatgaggagaagagactggggcaagaatkttgttgaattatatctgtcttcaaagctattaaatcaaaggacatttcaaacataaggcttttgaattttgcttttgaattttttccccctgaaaatatc

SEQ ID NO: 414947 - DNA, 201 bp, Homo sapiens
tacagctaaagtaatctgtgctaataatatcagcatgggatggatgcttaatttttgtttaatgacaaagcaagcaagaaaagtaggctaaaaattctcartgcagggccagtatagttttataatgatacgtaagaaccaaactgagaagagattaaaataagtgatcaatagacattttgatcttcaaatatatagtag

SEQ ID NO: 414948 - DNA, 201 bp, Homo sapiens
tgttgccttcagtctactcagtgagatgcaggtcctcattctgttcttgcatttaacattaatttctccatacaatgggtcagactcagtacttaaaatayggagacttcctcctctggaagaatttttgccgccatttcttgattccaaatgtatgagctgcagaaaactttagaggtgttgaacatgtgcaaaatacct

SEQ ID NO: 414949 - DNA, 201 bp, Homo sapiens
tagaatttcaattagatttaggacatattttatattgtcagtgctttattttcacagttgccaaattataaagtgaaatgtcttctcatttcttaaggagwctttttcaaacttgtctgtcttctcctggaatcaagatagtgactgcacatttcagagtgaaccatctggtgcaggtctatagtaggttcttgatgtgtt

SEQ ID NO: 414950 - DNA, 201 bp, Homo sapiens
acttgcttgatctccagaggccccaaactctgctcatgccaggctttgcacatgccgtttcctctgcttggactggtcttccccatcattgcctggctatyttcttctcaattactagatttcacagtaggggttccgccttcttgattcccccggcctgggttatataggtttgtcctagatagtgcggtggccccacat

SEQ ID NO: 414951 - DNA, 201 bp, Homo sapiens
cacgatcttctaagcttggcgatggagggagaaggcacatgggagggtcttcaccgatcctctggccctgactctgcctacccttcattcattcacctgcmcctctgggggctctgggcggtgaccactgccactattgggctagctagtggtgggggcactgctccccttaatgctctggcccctaggggagacacaaaa

SEQ ID NO: 414952 - DNA, 201 bp, Homo sapiens
tttttgttttcggtccaagaatgacacagatttttttgtttgtttagttagttttctttaggatctagatcccccagaggtaaacactaaatataaaaccrggaattagaagctggccttgggttctgcagttctaggcatggcgttaacgtttttcttaaaacttaaggcccagactacacaaggaatcttcccgcctgc

SEQ ID NO: 414953 - DNA, 201 bp, Homo sapiens
acatacatatagtacatatttgtgtagtacacaggtatagtgcatatatatatatatttgtcacatatatagaagtcctgtgtcttccttttaggtaacaygggagaatgtaagtttttgttttcggtccaagaatgacacagatttttttgtttgtttagttagttttctttaggatctagatcccccagaggtaaacac

SEQ ID NO: 414954 - DNA, 201 bp, Homo sapiens
ttactgaattatagtttaaggttagcctttgttatatataatgatttattctgtttaaacaggaaaaatgttaagtccagcctccagctatggtgattaartcatctcagttgctgtgtgacatctacttcttgtttctttccttgctatttaatacttaaagtgtggtgccccacttgtttgccaggagcagtatcacat

SEQ ID NO: 414955 - DNA, 201 bp, Homo sapiens
catatgcacattaaagttcattttgcacctcttttggcattgactttactttcagtggcctattttatgtaatgtaaaattgtgtaggctgcctccaattmttttagaagtaggaaaaggcaaatgtcttttgtgtctgtttgaagtaggctatttctggattaaagaaatacacatgcacactcaccggtttgagaaaat

SEQ ID NO: 414956 - DNA, 201 bp, Homo sapiens
gtttattacttatgagtgaaatggacactatctttaagttctatttcagattatgcatttttatgctgtattttcatctctctctctctctctttctttcytcttttatttcttttttatagacaagcttttgctctgtcacccagtctgcagtggagttgtgagagcatagctcactgcagcctcaaacttctaggctca

SEQ ID NO: 414957 - DNA, 201 bp, Homo sapiens
cctgatattagagaatgagaaaattttgctgaaaattaattttattttcttttaatttatggtgttactataccttttagatttaggaaggcagaaagactgtgtgtgtgtgtgtgtgtgtttgtgtgtgtgcacttgcactttggggttccctttctatggatgtttcaggatctgaggataaaggatcacagtctagca

SEQ ID NO: 414958 - DNA, 201 bp, Homo sapiens
ttatgcatttttatgctgtattttcatctctctctctctctctttctttcctcttttatttcttttttatagacaagcttttgctctgtcacccagtctgsagtggagttgtgagagcatagctcactgcagcctcaaacttctaggctcaagacatcctcctgccttagcctcctgagtagctgggactatatagacaca

SEQ ID NO: 414959 - DNA, 201 bp, Homo sapiens
ctgatattagagaatgagaaaattttgctgaaaattaattttattttcttttaatttatggtgttactataccttttagatttaggaaggcagaaagactgtgtgtgtgtgtgtgtgtgtttgtgtgtgtgcacttgcactttggggttccctttctatggatgtttcaggatctgaggataaaggatcacagtctagcag

SEQ ID NO: 414960 - DNA, 201 bp, Homo sapiens
gacatataaatatgcaaattcaggacaatataatatttgctatgatatcctcatgcattgggtatgatgggaggaaagacagtcagccaatctgggagcartctgggagcagagtgtggggtgtggagagaattcagggaaggtgttctagaggagctaacatctgagctgaatcttgaagtttgagtaagagtttctgga

SEQ ID NO: 414961 - DNA, 201 bp, Homo sapiens
ctttctttcctcttttatttcttttttatagacaagcttttgctctgtcacccagtctgcagtggagttgtgagagcatagctcactgcagcctcaaactyctaggctcaagacatcctcctgccttagcctcctgagtagctgggactatatagacacatgctgctatgcctgactaattttaattttttaaatgttaat

SEQ ID NO: 414962 - DNA, 201 bp, Homo sapiens
tgatattagagaatgagaaaattttgctgaaaattaattttattttcttttaatttatggtgttactataccttttagatttaggaaggcagaaagactgtgtgtgtgtgtgtgtgtgtttgtgtgtgtgcacttgcactttggggttccctttctatggatgtttcaggatctgaggataaaggatcacagtctagcaga

SEQ ID NO: 414963 - DNA, 201 bp, Homo sapiens
catatgatctctgcacatgctggctcccctcaccttctgccatgagtggaagcagcctgaagccctcaccagaagcagatgctggtggcatgcttcttgtrcagcctgcaaaaccatgagctgaataaacctcttgtctttatgaattacccagcctcgagtattcctttatagcaacacaaatggactaagataacatct

SEQ ID NO: 414964 - DNA, 201 bp, Homo sapiens
tctgcagtggagttgtgagagcatagctcactgcagcctcaaacttctaggctcaagacatcctcctgccttagcctcctgagtagctgggactatatagrcacatgctgctatgcctgactaattttaattttttaaatgttaatttttaaacttttttcattttttgtaggggtctcactttgttgactcatctcaaac

SEQ ID NO: 414965 - DNA, 201 bp, Homo sapiens
gatattagagaatgagaaaattttgctgaaaattaattttattttcttttaatttatggtgttactataccttttagatttaggaaggcagaaagactgtgtgtgtgtgtgtgtgtgtttgtgtgtgtgcacttgcactttggggttccctttctatggatgtttcaggatctgaggataaaggatcacagtctagcagaa

SEQ ID NO: 414966 - DNA, 201 bp, Homo sapiens
gtgataacacaacatctgccatagcttggtttgtttgacccctccaaatctcatgttgaaatttgacccttagtgttggagatggggcctaatgggaggtrtttatgtcatgggggcagatccctggtgaatgtcttagtgccatccttactgtaatgagtgagttttgctcttagtcccctcaaaacctgttgttaaaaa

SEQ ID NO: 414967 - DNA, 201 bp, Homo sapiens
ctactgttattctctggagagctattgtgtcagaacggatttggattattttttaaaactactgctacctagagggtaattttattaaattcctttatcayttggattaaatacagcaaaatgaaaccagctcctcctgctcagaggagctgtcaccacaatctttaatattttcttagcattatttcctttaaagtatgc

SEQ ID NO: 414968 - DNA, 201 bp, Homo sapiens
tcagaacggatttggattattttttaaaactactgctacctagagggtaattttattaaattcctttatcatttggattaaatacagcaaaatgaaaccarctcctcctgctcagaggagctgtcaccacaatctttaatattttcttagcattatttcctttaaagtatgctttgggacaattaataatgactaatactt

SEQ ID NO: 414969 - DNA, 201 bp, Homo sapiens
atctatttttctctacatgggggcagcagacgaggtgagtttcttcctctgtcatttgtaggatctactgttattctctggagagctattgtgtcagaacrgatttggattattttttaaaactactgctacctagagggtaattttattaaattcctttatcatttggattaaatacagcaaaatgaaaccagctcctcc

SEQ ID NO: 414970 - DNA, 201 bp, Homo sapiens
gcttgatttctcaggctgttcttttgattgaaagaattcaactgagaacccatcctaactggctgcctgatcagtttcttcctttctcttctctcactttrgcaattacctttttgtttttttttcctgtgcatatgtctttgtataaattataattttgtccaacctttttttaaacattttgtcataaacatttcctga

SEQ ID NO: 414971 - DNA, 201 bp, Homo sapiens
gaatatctctagatcactgaccttctgattggtggaaaaacctttggagaatgatctttacaggattccatggcagtgagttaatctatttttctctacaygggggcagcagacgaggtgagtttcttcctctgtcatttgtaggatctactgttattctctggagagctattgtgtcagaacggatttggattatttttt

SEQ ID NO: 414972 - DNA, 201 bp, Homo sapiens
tgtgttagaggacggaattttccattgtgggcatatctgggaagtcagctgtgtaacctttcttatatgtgtggctgcaggcatgtcttaggcaagccccytgtgcaaaattatctgtgcctgcagcttgatttctcaggctgttcttttgattgaaagaattcaactgagaacccatcctaactggctgcctgatcagtt

SEQ ID NO: 414973 - DNA, 201 bp, Homo sapiens
atttctgctcttgtcttttccaataaactcgtctcacctggatggagactttgtgatcatacctaagacagttcttcagcagcctgagccccattcctagrgactttccaatgtgtcctctgccttttgcctttcttatcatagatctcctgatactgacctataagctgcattttactaaggttcaggagctgtgtggtt

SEQ ID NO: 414974 - DNA, 201 bp, Homo sapiens
ttccactgtccacacgtacgtgatgccacctgggttagcctggcatttgtttttacatctgctttctcccactccagctataggttaggtgtgttagtacwacaaaattgatcttgcgaaaaaggcgaaaggaccggcagaactgacgtccttttgtacatgagaggaaaggagaaagggagagagggcagaaattatgtt

SEQ ID NO: 414975 - DNA, 201 bp, Homo sapiens
acgtgatgccacctgggttagcctggcatttgtttttacatctgctttctcccactccagctataggttaggtgtgttagtactacaaaattgatcttgcraaaaaggcgaaaggaccggcagaactgacgtccttttgtacatgagaggaaaggagaaagggagagagggcagaaattatgtttagggcacaaactatgt

SEQ ID NO: 414976 - DNA, 201 bp, Homo sapiens
gttttttctgtatatattatataatcatggtaattgaaattaagtactgaagaacttttggaactttttggcagagatatctgaaagctgatttgattttygttgaagtatgaagacagtaaaatatggtaaagtgtgataaggagccacagagtaataaaaatagctaaatgtatgagaaaagatctgaagggaaggaag

SEQ ID NO: 414977 - DNA, 201 bp, Homo sapiens
tttaaaatcatttttgtgtgtgtgtgtgagacagggtcttgctctgttgcccaggctggagtgcagtggcacaatctcagctcaccgtagcctccacctcycaggctcaaataatcctcccacctcagcctccccattagctgggactacaggtgtgtgccaccatgcctggctaagttttttaatttttttgtagagatg

SEQ ID NO: 414978 - DNA, 201 bp, Homo sapiens
cttcatagactcgctaaccttattttacaagtagcattctagaaccagtcattataactttcagggtgggcattttccacgagatcctggttccaattackcctaattatttgttatgtcctatttgggttttctttttacagatctttaagaaattttcctttggctctgagttgagtcaaaatgttgagttcaactttc

SEQ ID NO: 414979 - DNA, 201 bp, Homo sapiens
gaagccctcaccagaagcagatgctggtggcatgcttcttgtacagcctgcaaaaccatgagctgaataaacctcttgtctttatgaattacccagcctcragtattcctttatagcaacacaaatggactaagataacatctttgaagctagtttgccaaagttataggaaaaaagatggaaaagcaagagtctcaaata

SEQ ID NO: 414980 - DNA, 201 bp, Homo sapiens
ttgcttgtacatataggagcaatactattatattatgtagtccgttaacactacttaaaagtttagggttttctcttggttgtagagtggcccagaattgyattctgaatgaataaaggttaaaaaaaaatccccagtgcatgtatttcagttctctaagatttttggtctggcattgtggtcttatgatgaaaacatgta

SEQ ID NO: 414981 - DNA, 201 bp, Homo sapiens
tcatttaaatattaatcaactttccttaaaataaatagcctcttaggtaaaaatataagaacttgatatatttcattctcttatatagtattcattttccyacctatattacacaaaaaagtatagaaaagatttaagtaattttgccatcctaggcttaaatgcaatattcctggtattatttacaatgcagaatttttt

SEQ ID NO: 414982 - DNA, 201 bp, Homo sapiens
ttggtgcatgttaagaagggcatggaagtgattagagaaatggaggctatgggaggaagtgagataaatactcatggaaagctttcatatgcgagtgaaayggcaacatttatttgccctcttaacataaagtagtaacctccggaggacttgaggcttgaggtaagaactcacaagtggcaaaggaagaattttccctcc

SEQ ID NO: 414983 - DNA, 201 bp, Homo sapiens
ttcattaggagtgatgccatatttgaggcagaaacatagtatgatggagaattcaagaggctttggactcatagctcttagttgaattctggctttatcaggtactacctttgaggctttaagcaagttacttaacttttctgagcttactttctcaaataaaaagcaaggataactaaaatgctttggaaactttcctgt

SEQ ID NO: 414984 - DNA, 201 bp, Homo sapiens
ccttagcagtattctcttgtaggccacttggctccatctttaaggtagtttgatgaatattgactggtctgcaaaatttgacttaagaaatgttgagccaragtatcctggataacgtagatatagagataaagtaatatatatatatacacacacacacacatacacacacacacatatttacatatatacacatatgta

SEQ ID NO: 414985 - DNA, 201 bp, Homo sapiens
tttgatgaatattgactggtctgcaaaatttgacttaagaaatgttgagccaaagtatcctggataacgtagatatagagataaagtaatatatatatatacacacacacacacatacacacacacacatatttacatatatacacatatgtacttatttacagtgtatataaaaaataatttagaagaatgcatccagaa

SEQ ID NO: 414986 - DNA, 201 bp, Homo sapiens
ttgatgaatattgactggtctgcaaaatttgacttaagaaatgttgagccaaagtatcctggataacgtagatatagagataaagtaatatatatatatacacacacacacacatacacacacacacatatttacatatatacacatatgtacttatttacagtgtatataaaaaataatttagaagaatgcatccagaaa

SEQ ID NO: 414987 - DNA, 201 bp, Homo sapiens
tgatgaatattgactggtctgcaaaatttgacttaagaaatgttgagccaaagtatcctggataacgtagatatagagataaagtaatatatatatatacacacacacacacatacacacacacacatatttacatatatacacatatgtacttatttacagtgtatataaaaaataatttagaagaatgcatccagaaac

SEQ ID NO: 414988 - DNA, 201 bp, Homo sapiens
aaagggctagtgctatcctcacccttattcttagattttatctctttaattattttctttgctttgttattcccaccagtttgtcttctagaaggtcttcrtatcatgttatcacttaataaacattctcttttttattctgagtgaaaatgcaccaaagtataaatctgagaaaaagtgaatgttttataacttttgttt

SEQ ID NO: 414989 - DNA, 201 bp, Homo sapiens
gatgaatattgactggtctgcaaaatttgacttaagaaatgttgagccaaagtatcctggataacgtagatatagagataaagtaatatatatatatacacacacacacacatacacacacacacatatttacatatatacacatatgtacttatttacagtgtatataaaaaataatttagaagaatgcatccagaaacc

SEQ ID NO: 414990 - DNA, 201 bp, Homo sapiens
aggagattctgattcaaatctccagttgggaactactacatcaaacatttcaaaaatcaatcaaccaaccaatcaacccagcctttattgtatggtggtakttaaaaatctaaactctattttctgcaagttgctagccaattgaaccaaacttcttcactggataatatttttaaacatagatttagaatgccttttttt

SEQ ID NO: 414991 - DNA, 201 bp, Homo sapiens
taatatatatatatacacacacacacacatacacacacacacatatttacatatatacacatatgtacttatttacagtgtatataaaaaataatttagargaatgcatccagaaaccaaattgagcttgaaaagtaccacctcacatgaccgcagggacagctggttattgtcttaggatatatttgcattttgaagtga

SEQ ID NO: 414992 - DNA, 201 bp, Homo sapiens
atttggctctgtatgtcatagaaaacatctccatgctatctattaatcttttaggtgagcctgaatttaaatacattgggaatatgcatgggaatgaggcygttggacgagaactgctcattttcttggcccagtacctatgcaacgaataccagaaggggaacgagacaattgtcaacctgatccacagtacccgcattc

SEQ ID NO: 414993 - DNA, 201 bp, Homo sapiens
cttgtcctttgcacttgtccaagagtggtccccaggcacaaacatgcatgtgaagaaagctccagaggagattctgattcaaatctccagttgggaactamtacatcaaacatttcaaaaatcaatcaaccaaccaatcaacccagcctttattgtatggtggtagttaaaaatctaaactctattttctgcaagttgcta

SEQ ID NO: 414994 - DNA, 201 bp, Homo sapiens
aaatacatttatatagtgatgtgttacatgttatatttgtcacaaatatagcatatatttgtttgtctagtacatatatagtatatacagtacatatatattacatacatacatatagtacatatttgtgtagtacacaggtatagtgcatatatatatatatttgtcacatatatagaagtcctgtgtcttccttttagg

SEQ ID NO: 414995 - DNA, 201 bp, Homo sapiens
acattagattacataagccattgtccattgactccttgtcctttgcacttgtccaagagtggtccccaggcacaaacatgcatgtgaagaaagctccagargagattctgattcaaatctccagttgggaactactacatcaaacatttcaaaaatcaatcaaccaaccaatcaacccagcctttattgtatggtggtagt

SEQ ID NO: 414996 - DNA, 201 bp, Homo sapiens
acctggataggatagtgtacgtgaatgagaaagaaggtggtccaaataatcatctgttgaaaaatatgaagaaaattgtggatcaaaacacaaaggtagtraccacgggatagtcttcttgggttcgtctctagcctaaggaaatatgttccaatatcttcatcatcatgaaggacagaggagtaacatcacagcttgtat

SEQ ID NO: 414997 - DNA, 201 bp, Homo sapiens
aggcatgaacaggaacacagaggaggggacaaccaacacagctcaagaggtcacagaagatgtcatgtaagccttttctttttctcagagcctctggcatygacgtgcttggagatacctgaaaattgggcagctgtttatctttctggaaatgtttagtcaaaggtcttctgagcatagagatacaggaagtgatcttcc

SEQ ID NO: 414998 - DNA, 201 bp, Homo sapiens
tacatttatatagtgatgtgttacatgttatatttgtcacaaatatagcatatatttgtttgtctagtacatatatagtatatacagtacatatatattayatacatacatatagtacatatttgtgtagtacacaggtatagtgcatatatatatatatttgtcacatatatagaagtcctgtgtcttccttttaggtaa

SEQ ID NO: 414999 - DNA, 201 bp, Homo sapiens
acaggccagattaatagcacttggtggaccttggctttcctgtgacatagtacgtcccagtgactccatttgctacagagtggagccatcatttgaatttycatcacggcctgtctctggagcagaccactgtggtactggggttttgggggctctctcaagccagcttcatagactcgctaaccttattttacaagtagc

SEQ ID NO: 415000 - DNA, 201 bp, Homo sapiens
atttaaaaaaaaaaacaaaatataattagcaccagatgaatgagttgtctcataatcacctcattattacaaattaattccaaatgaatatgtttgaacarggcattggttttgaatctttaatttatctcctccttagccttgctgctgacaaatcataaatagatataattaatgaaaatgttaatagtgccggtctcc

SEQ ID NO: 415001 - DNA, 201 bp, Homo sapiens
tttctgagcttactttctcaaataaaaagcaaggataactaaaatgctttggaaactttcctgtgagaaattgatgcgtaaatagataattaagggacatkctaggagttgtgttacaggcatgaacaggaacacagaggaggggacaaccaacacagctcaagaggtcacagaagatgtcatgtaagccttttctttttc

SEQ ID NO: 415002 - DNA, 201 bp, Homo sapiens
acatttatatagtgatgtgttacatgttatatttgtcacaaatatagcatatatttgtttgtctagtacatatatagtatatacagtacatatatattacatacatacatatagtacatatttgtgtagtacacaggtatagtgcatatatatatatatttgtcacatatatagaagtcctgtgtcttccttttaggtaac

SEQ ID NO: 415003 - DNA, 201 bp, Homo sapiens
gaatctgcattttaataggatcttccgttgcttcacgtgacatccaaatttgaggagccctgccatatgggataggtctgaatcaggccgatgttattgtytatattcctggaaggattgcttaattttccaaacttgtttgggttctgtagctttttgaatgatcccagggacgcctgatattcctgttggaagtttcta

SEQ ID NO: 415004 - DNA, 201 bp, Homo sapiens
tttgaagtgaactttagtgacattacaaaatgccagattggaaaaacagccattatttaaaaaaaaaaacaaaatataattagcaccagatgaatgagttktctcataatcacctcattattacaaattaattccaaatgaatatgtttgaacagggcattggttttgaatctttaatttatctcctccttagccttgctg

SEQ ID NO: 415005 - DNA, 201 bp, Homo sapiens
gcatgttttgaacaccagcttcattaggagtgatgccatatttgaggcagaaacatagtatgatggagaattcaagaggctttggactcatagctcttagytgaattctggctttatcaggtactacctttgaggctttaagcaagttacttaacttttctgagcttactttctcaaataaaaagcaaggataactaaaat

SEQ ID NO: 415006 - DNA, 201 bp, Homo sapiens
ttttttcacatgttcttcatctatacttccagtatgggcttactgttacatccagctttatgtatgttatttgtttatacacctgttttcccctttgattmtagaatttgatcacttgattgtaagaattacgattaatatttgattatgacaggcagtaggctgagggcctgttatgaataaacacaatccagctcagca

SEQ ID NO: 415007 - DNA, 201 bp, Homo sapiens
aattgggggatagagaacgggaatcttgttcacacagttctctccagtacccagcatggtgacccagaacatgtacatgtaaggcatttgtacatgtaatyaattagcaggcatgttttgaacaccagcttcattaggagtgatgccatatttgaggcagaaacatagtatgatggagaattcaagaggctttggactcat

SEQ ID NO: 415008 - DNA, 201 bp, Homo sapiens
aaagctttttttatggcaaataaaagcaaaggtatacatttttaataatcttatgataaataggatgatctgctttaaagaagagtaagtttatagagtcrgagtatacttgtacacacctcaaagtcaaacgtttgaaaaatgaagtttgttatgattctaagtgtagtttcgaatgtaagaaaaagttaaaagtgtgat

SEQ ID NO: 415009 - DNA, 201 bp, Homo sapiens
tgagagttggcctctttctcctctccagatgaaatattttttcctttttttctcctccgtggaaagaaattattaattaaaacaaaaagacattgttggaragggaggttttttagtcgcctaagagaggtgctattagtacttgtttatttaaaaattgacttttggtcaaactaaactatacaactttttctttttcaa

SEQ ID NO: 415010 - DNA, 201 bp, Homo sapiens
ggatgtttcaggatctgaggataaaggatcacagtctagcagaaagctgggtttcaggggacgtcaaaggtaatttcatgactatattagtagataaatcsaagaccagagagcatgctgaatggaggacatttacatagtctttccaatgctaaaggaaatagggaagtgattatttcaaaattacctagaggatcttga

SEQ ID NO: 415011 - DNA, 201 bp, Homo sapiens
gtcttttctgtcaagtgatcataccaatgattattaaatttataatccttttaatctctcatctgaacagcttgctcctgagaccaaggctgtcattcatyggattatggatattccttttgtgctttctgccaatctccatggaggagaccttgtggccaattatccatatgatgagacgcggagtggtaggtattcttt

SEQ ID NO: 415012 - DNA, 201 bp, Homo sapiens
ttagccaggatatgaggactatgacctcttatgtgcttttgtagttctgtgattccataaaagatgtagaagggaagtaaaaaataacattacacataaayttgaacatgttttgtttatcgtatataataatacgtgtgctgacatttatttactttatgtttcttgtacattttaaatatcaatccatgccattttata

SEQ ID NO: 415013 - DNA, 201 bp, Homo sapiens
gaaaaaacaaatcctgacgcacgcaaccccagcggtcgctctcactttgctgtgtgaaaaacccaaaggaatgattgcgagtcccccgcaaggggggttgktcttccttgctgacaagagtagaaagataaggtgcagaaggcagtgattgagaggaaaggagaacgagggagaaagagtcatttatcatgttttctctaa

SEQ ID NO: 415014 - DNA, 201 bp, Homo sapiens
tctgaaacagttgctgaggtcagagatgaagaatagtgattctaagccctgggtcagatggactgagagtgaagaagaaaatcatgatgccgtgcctcaaygcaggagaaattaattctggtccagcaaaagcttcacatgtcccctctggacaccatttaagtaatattttcagcatattttttcagagcctgcatcctg

SEQ ID NO: 415015 - DNA, 201 bp, Homo sapiens
gagatgaagaatagtgattctaagccctgggtcagatggactgagagtgaagaagaaaatcatgatgccgtgcctcaatgcaggagaaattaattctggtycagcaaaagcttcacatgtcccctctggacaccatttaagtaatattttcagcatattttttcagagcctgcatcctgtattaaatcagctctgttctgt

SEQ ID NO: 415016 - DNA, 201 bp, Homo sapiens
gccaaacatgctaaaactgttagaaggttgaggtgacttaacggccatttataaattaagctctgtaaaattatttggcaaataaatattattaaatgccmctagcataataaatgaacaagtccaaacatctagtgaaaattagaatttcaattagatttaggacatattttatattgtcagtgctttattttcacagtt

SEQ ID NO: 415017 - DNA, 201 bp, Homo sapiens
ctcaatgcaggagaaattaattctggtccagcaaaagcttcacatgtcccctctggacaccatttaagtaatattttcagcatattttttcagagcctgcrtcctgtattaaatcagctctgttctgtcattgtcccagatcctgtatctgcaactgagtttcttgttgtcaaagggaatggaagttgaaaggggattaaa

SEQ ID NO: 415018 - DNA, 201 bp, Homo sapiens
ttctggtccagcaaaagcttcacatgtcccctctggacaccatttaagtaatattttcagcatattttttcagagcctgcatcctgtattaaatcagctcygttctgtcattgtcccagatcctgtatctgcaactgagtttcttgttgtcaaagggaatggaagttgaaaggggattaaagtgaaaccctttgggtcaaa

SEQ ID NO: 415019 - DNA, 201 bp, Homo sapiens
aacatttcccccctcaagaatccaagacctcaattctttgggaaaaatggataaaggtcagtcttctgtaactgcttcctactgatagaggggtggtggtkgttgttttgtgggtcttcacctcttgctagctgtcagggtaggatggctccatgggttggtaaaaacagtatccagccaggctggagggagaaaggggtg

SEQ ID NO: 415020 - DNA, 201 bp, Homo sapiens
ggaggacagacagtttaggagactattttaacagacccagtgggagatgatgagggtagtggatgggagaatgttcagaagggaatgagtatgagcaataytggcgaagtttgataaatggagttatgtgagggagttgttttgcagcacggggctttcctggatatgagtcctcaggttaggaaggccattttggtctag

SEQ ID NO: 415021 - DNA, 201 bp, Homo sapiens
gacaggtatatttggtagtacaaaaaagcctttgaggaaagagtaggggaaacaattggtcatctatccttctttatttgaggcacaatttccccctccaytggtgtattttatcaacatgtattcattgagaatctcctatatgattgtcactgtgctgagattctaactatgaacaaagcgatcataacccttgctcct

SEQ ID NO: 415022 - DNA, 201 bp, Homo sapiens
aaagagtaggggaaacaattggtcatctatccttctttatttgaggcacaatttccccctccattggtgtattttatcaacatgtattcattgagaatctyctatatgattgtcactgtgctgagattctaactatgaacaaagcgatcataacccttgctcctgggtcctacagtttagtgggaaagacaaatggataat

SEQ ID NO: 415023 - DNA, 201 bp, Homo sapiens
ttgggggctctctcaagccagcttcatagactcgctaaccttattttacaagtagcattctagaaccagtcattataactttcagggtgggcattttccaygagatcctggttccaattacgcctaattatttgttatgtcctatttgggttttctttttacagatctttaagaaattttcctttggctctgagttgagtc

SEQ ID NO: 415024 - DNA, 201 bp, Homo sapiens
ttttgtaaattcttgctatttaaataactttttgggtttgtcaaaaccttttcaaatttttccagttaaagtttcttcctacagcaagacggtgagtttgttttttttttttgttttttttttgtttttttttttttgagacagggtctagctctgtcacccaggctggagtgcaggagtgtgatcatggctgactgcagc

SEQ ID NO: 415025 - DNA, 201 bp, Homo sapiens
tttctcaagaatgtttttttcaggaagttttcttgggctattattgttctctgggtttttaaacagttgggctaactttgcctttgctttcaacagaatgytaaccggataccttctgagataggttacaacttcatggcttaaagtattggttgtgctggagttgtcttcctccctggagaacagtccttgagaactaat

SEQ ID NO: 415026 - DNA, 201 bp, Homo sapiens
aattttttggtactctctgttatgtagctcagggctaggtggacacatttacatatccactaaacatttggtgcatctttgaaccaatattgtcatcagtyacttggaggacaaattgagcccatcttggaggaaaggtgaagaactgctgtcagcagccctctattccttctctattgttctgggtatttctgctttcat

SEQ ID NO: 415027 - DNA, 201 bp, Homo sapiens
acctctctgtgcttcaggttcttcatctgtaatatggaagtgataatatctacctcataggataaggattgaatgagttaatacatataaagtacttgaarccaggacctggaacttttattaccatttcagtgtaattttttggtactctctgttatgtagctcagggctaggtggacacatttacatatccactaaaca

SEQ ID NO: 415028 - DNA, 201 bp, Homo sapiens
gccattttcagggtctcatctgataccgttatttgcttccctgggcttccctccttacctgtactttcagtgttgtctgttacacaaggtctcccagatcygtgcctctaactccagaccttccacagagatttatgtctctgttttactagctaacttgggttcctttaactggtggaacttgatatctcaagctcaggt

SEQ ID NO: 415029 - DNA, 201 bp, Homo sapiens
atagtgatgtgttacatgttatatttgtcacaaatatagcatatatttgtttgtctagtacatatatagtatatacagtacatatatattacatacatacrtatagtacatatttgtgtagtacacaggtatagtgcatatatatatatatttgtcacatatatagaagtcctgtgtcttccttttaggtaacatgggaga

SEQ ID NO: 415030 - DNA, 201 bp, Homo sapiens
catatagtacatatttgtgtagtacacaggtatagtgcatatatatatatatttgtcacatatatagaagtcctgtgtcttccttttaggtaacatgggadaatgtaagtttttgttttcggtccaagaatgacacagatttttttgtttgtttagttagttttctttaggatctagatcccccagaggtaaacactaaat

SEQ ID NO: 415031 - DNA, 201 bp, Homo sapiens
tcatccacctcattttacagatgggaaaactgacccttaaagagaaaaagggagtagcataagccacatgctgagtcagcgatgatcctgaatttgaagcycctgaacctgaccccagagctccagctgctagccagtccagtctctttctgatgggacaagttcttcctaggataaaaggtgccctgcaaactaacaagg

SEQ ID NO: 415032 - DNA, 201 bp, Homo sapiens
cccagagctccagctgctagccagtccagtctctttctgatgggacaagttcttcctaggataaaaggtgccctgcaaactaacaaggaatgggcaaggcrgaagggcgtcctgagcatgggaaggaaagggccttggctgaggtgttcctcggagccaccagaagtgagcgacacccagctctttgaaatgaatagcctg

SEQ ID NO: 415033 - DNA, 201 bp, Homo sapiens
tttgggaggtcgaggtgggtggatcacctgaggtgaggagtttgaggccagactgaccaacatggcagaaccccatctctactaaatacaaaaaattagcygggcatggtggctcatgcctttgatcccagctactagggaggctgcctcagccaaggcagaagaatcgcttgaacctgggaggcggaggtagcagtgaga

SEQ ID NO: 415034 - DNA, 201 bp, Homo sapiens
ggagactggcttgaacccgggaggcagaggttgtagtgagccgagattgcaccattgcactccagcctggggacaacagtgaaaccccgtctcaaaaaaawaaagtcctaacatttattctagagatggcaggatcttggataagatttataatcttcatgagcctcacttttctcatctgtttaattgggatacatgact

SEQ ID NO: 415035 - DNA, 201 bp, Homo sapiens
gcataatgacaaatattgcttttaatggcaaaatcacaattacttttgcatcaatctaataactatgggcaaaagacgtgaacagccatctctctaaagargacaaatgggcaaaagacgtgaacagccatctctctaaagaagacaaatgggcaaaagacgtgaacagctatctctctaaagaagacagacaaatggcaa

SEQ ID NO: 415036 - DNA, 201 bp, Homo sapiens
gcccccatcctggcaaagataccgctctgggtctcaccccatgcacagcgccgcatgccaatgccctccctcccgcctgccctccctctctgctttaaggsgatctggggcttttgggctttggttctccacaagcgcttgctccatgttgaccaggtggagagggtctggagcttccaggacctcctcagcgagacatca

SEQ ID NO: 415037 - DNA, 201 bp, Homo sapiens
taagatttataatcttcatgagcctcacttttctcatctgtttaattgggatacatgactgcttgcttactcctaatgtgtttgtgtgcgtgtttttgtttttgtttgtttgtttttttgaggattaaatcagataaagtatacagaggcattgatccattgcaggtgtttggaatacgttatttttcttccctatttatt

SEQ ID NO: 415038 - DNA, 201 bp, Homo sapiens
ccttccaccttgtccttccaaagtgctaggcttacagtcctgagccaaagtgcccagcgatacatttaaaacttactttttaggtgatttttgaaacatayattattatttactatagttatcctgctgtgcaatagatctcaaaagttattcctcctgtctaaccaaaactttgtaccctttgacaagcaactgtccatt

SEQ ID NO: 415039 - DNA, 201 bp, Homo sapiens
ttccatttctccatctatgaaatgggaatcagatctctgtggcaagttacttaaccctgtgcctcagtttctcatctgtcaagttggcatgtttaatagakctacctcatgaggttgagataaaattggcttacaggctgggctcggtggctcacgcctgtaatcccagaactttgggaggccgaggtgggcagatcgctt

SEQ ID NO: 415040 - DNA, 201 bp, Homo sapiens
tccctaaccccggccatccctcccattccctggactcacagttcatgcggatttgctggccgagctcaatcagttccatctccgtgggcatgtaacccatmgtcctcatgagattccccagatccttacaagagatgaacccatctcggtccttatcgaactcaagaaatgcttcccgcagctctgaaagttaagagagaa

SEQ ID NO: 415041 - DNA, 201 bp, Homo sapiens
aagatttataatcttcatgagcctcacttttctcatctgtttaattgggatacatgactgcttgcttactcctaatgtgtttgtgtgcgtgtttttgtttttgtttgtttgtttttttgaggattaaatcagataaagtatacagaggcattgatccattgcaggtgtttggaatacgttatttttcttccctatttattg

SEQ ID NO: 415042 - DNA, 201 bp, Homo sapiens
ctcagaacgagaaggtattttatcaggggatataagcaagtctgttattctcactgggtctgatattttttagtatgtctgcagcaagtggttcgtaccakatgaccactttgcattcccttctgggatctcaaattcttggattcttcctgttacaggcactaagaatagaggccctggccaggcacggtggctcatgcc

SEQ ID NO: 415043 - DNA, 201 bp, Homo sapiens
atcttggccttaagcaacccttccaccttgtccttccaaagtgctaggcttacagtcctgagccaaagtgcccagcgatacatttaaaacttactttttargtgatttttgaaacatacattattatttactatagttatcctgctgtgcaatagatctcaaaagttattcctcctgtctaaccaaaactttgtacccttt

SEQ ID NO: 415044 - DNA, 201 bp, Homo sapiens
tttgtatttttagtagagacagggtttcaccatgttggccaggctgatcttgaactcctgacctcagttgatccacctgcctcagcctcctaaagtgctgrgattacaggcttgagccactgtgcccggccgaaacttttttttaatgagacggggtctcactattttggccaggttggtcttaaaatcttggccttaagc

SEQ ID NO: 415045 - DNA, 201 bp, Homo sapiens
agatttataatcttcatgagcctcacttttctcatctgtttaattgggatacatgactgcttgcttactcctaatgtgtttgtgtgcgtgtttttgtttttgtttgtttgtttttttgaggattaaatcagataaagtatacagaggcattgatccattgcaggtgtttggaatacgttatttttcttccctatttattga

SEQ ID NO: 415046 - DNA, 201 bp, Homo sapiens
tctcgtccctcagcctcccgagtagctgggattacaggcgcgcaccaccaaacctgtttaatatttgtatttttagtagagacagggtttcaccatgttgrccaggctgatcttgaactcctgacctcagttgatccacctgcctcagcctcctaaagtgctgagattacaggcttgagccactgtgcccggccgaaactt

SEQ ID NO: 415047 - DNA, 201 bp, Homo sapiens
gatttataatcttcatgagcctcacttttctcatctgtttaattgggatacatgactgcttgcttactcctaatgtgtttgtgtgcgtgtttttgtttttgtttgtttgtttttttgaggattaaatcagataaagtatacagaggcattgatccattgcaggtgtttggaatacgttatttttcttccctatttattgat

SEQ ID NO: 415048 - DNA, 201 bp, Homo sapiens
tttgtttgtttgtttttttgaggattaaatcagataaagtatacagaggcattgatccattgcaggtgtttggaatacgttatttttcttccctatttatygatcccaccatggctggaaaaaaaaaggtgggggcctggttggtgggtgctgtccatggcattggctaattacaggcagacctcagagggtctgcctcta

SEQ ID NO: 415049 - DNA, 201 bp, Homo sapiens
tttctttttttttttttttttatttgagacagtctcaccctgtcacccaggctgaagtgcagtggtgcaatctcagctcactgcagccttcacctcctggrttcaagcgattctcgtccctcagcctcccgagtagctgggattacaggcgcgcaccaccaaacctgtttaatatttgtatttttagtagagacagggttt

SEQ ID NO: 415050 - DNA, 201 bp, Homo sapiens
gtgtttgtgtgcgtgtttttgtttttgtttgtttgtttttttgaggattaaatcagataaagtatacagaggcattgatccattgcaggtgtttggaataygttatttttcttccctatttattgatcccaccatggctggaaaaaaaaaggtgggggcctggttggtgggtgctgtccatggcattggctaattacaggc

SEQ ID NO: 415051 - DNA, 201 bp, Homo sapiens
tgaggattaaatcagataaagtatacagaggcattgatccattgcaggtgtttggaatacgttatttttcttccctatttattgatcccaccatggctggaaaaaaaaaggtgggggcctggttggtgggtgctgtccatggcattggctaattacaggcagacctcagagggtctgcctctaccatcaccagcaccatga

SEQ ID NO: 415052 - DNA, 201 bp, Homo sapiens
caggatcttggataagatttataatcttcatgagcctcacttttctcatctgtttaattgggatacatgactgcttgcttactcctaatgtgtttgtgtgygtgtttttgtttttgtttgtttgtttttttgaggattaaatcagataaagtatacagaggcattgatccattgcaggtgtttggaatacgttatttttct

SEQ ID NO: 415053 - DNA, 201 bp, Homo sapiens
ggaaggaaagggccttggctgaggtgttcctcggagccaccagaagtgagcgacacccagctctttgaaatgaatagcctgggaagaaagggacagaacaratgcttccaaaacctgccacccgcttccattctcaaacttggagaggagtgagaaggagtggccaacttggaaaatctgacagtgagttggaagtggatt

SEQ ID NO: 415054 - DNA, 201 bp, Homo sapiens
tgtgccgtctccattaacatcagcctcccggacaacctcagagatctcccggggggtgagccgctcccccaggagtctctgcatggcctgctgtagctccrccagggtgatctccccatctccattcgtgtcaaactgaatagaagcagaaatagattatatcagcaatgacaatgatgatagccacgagatgatggagtt

SEQ ID NO: 415055 - DNA, 201 bp, Homo sapiens
gctgtccatggcattggctaattacaggcagacctcagagggtctgcctctaccatcaccagcaccatgacactgttaactcacctccttgaaggcatccygcatctcctggacaccgatcatcccagctgtttctgcaagcaatttgggggtcatcagctccacaaagtcatcaaagtctacacggccacccactgagga

SEQ ID NO: 415056 - DNA, 201 bp, Homo sapiens
gcatctcctggacaccgatcatcccagctgtttctgcaagcaatttgggggtcatcagctccacaaagtcatcaaagtctacacggccacccactgaggargatggcacaggattagcgagaccccacaagccctggccttccattacctcactttgtgcttcgagtcagttagatcagctcccttctccctgccctataa

SEQ ID NO: 415057 - DNA, 201 bp, Homo sapiens
attctgccctgatcccttccctaaccccggccatccctcccattccctggactcacagttcatgcggatttgctggccgagctcaatcagttccatctccstgggcatgtaacccatcgtcctcatgagattccccagatccttacaagagatgaacccatctcggtccttatcgaactcaagaaatgcttcccgcagctc

SEQ ID NO: 415058 - DNA, 201 bp, Homo sapiens
aggaattggtccatggtctcagaaggaaataggcaataaactctagagatgccacgaatccgtattactgcagaagcaagcgggaggtattactggggagmcagcagagggacacggagcccagtaagagaggtgggaggtaccttccaggaacataactaggagttagccaggggagaggggaaagggtattccagacgg

SEQ ID NO: 415059 - DNA, 201 bp, Homo sapiens
cccctggttctgtggcaccatcatgtccccttctttgtcccacacccctgctccctttgccccgcccaccgcccttccccctcactccccacctcacccgstgtttctcagcaatgcctttcctcaagaagatgcaggcggggcccatggggaactgcatggaggggtggggtggagctcgcagggcaccagtctcaagat

SEQ ID NO: 415060 - DNA, 201 bp, Homo sapiens
attggtccatggtctcagaaggaaataggcaataaactctagagatgccacgaatccgtattactgcagaagcaagcgggaggtattactggggagccagmagagggacacggagcccagtaagagaggtgggaggtaccttccaggaacataactaggagttagccaggggagaggggaaagggtattccagacggaagg

SEQ ID NO: 415061 - DNA, 201 bp, Homo sapiens
ctagctctaaaccttgataatccagatttgtggtttaattcagtcccctgagtatcttacacaaaggaagggatgtgggaggggagacagagacagacagsgagagagagagagagagagagagagagagagagagagaaaccagacagtgcttccaggaaatcaggaaaaggaaggagttgactttgaatgccacttgca

SEQ ID NO: 415062 - DNA, 201 bp, Homo sapiens
ttactgcagaagcaagcgggaggtattactggggagccagcagagggacacggagcccagtaagagaggtgggaggtaccttccaggaacataactaggarttagccaggggagaggggaaagggtattccagacggaaggacaacttgagcaaagacagggaaggaaaatttaaaaatacagtggtgctttgtgcatgat

SEQ ID NO: 415063 - DNA, 201 bp, Homo sapiens
acacggagcccagtaagagaggtgggaggtaccttccaggaacataactaggagttagccaggggagaggggaaagggtattccagacggaaggacaactygagcaaagacagggaaggaaaatttaaaaatacagtggtgctttgtgcatgatttcttttagttttctccaaaaggtgtcatcatccacctcattttaca

SEQ ID NO: 415064 - DNA, 201 bp, Homo sapiens
ggtgggaggtaccttccaggaacataactaggagttagccaggggagaggggaaagggtattccagacggaaggacaacttgagcaaagacagggaaggawaatttaaaaatacagtggtgctttgtgcatgatttcttttagttttctccaaaaggtgtcatcatccacctcattttacagatgggaaaactgaccctta

SEQ ID NO: 415065 - DNA, 201 bp, Homo sapiens
atggagtttacctatcgcttactgtgggtcaagcactgagataaaagctttgggaatgtgagccactagaacgtcagctccaaaagacagttttgttctgtttttttttttctttttttctttctttttttttttttttttatttgagacagtctcaccctgtcacccaggctgaagtgcagtggtgcaatctcagctcac

SEQ ID NO: 415066 - DNA, 201 bp, Homo sapiens
tatcgcttactgtgggtcaagcactgagataaaagctttgggaatgtgagccactagaacgtcagctccaaaagacagttttgttctgtttttttttttctttttttctttctttttttttttttttttatttgagacagtctcaccctgtcacccaggctgaagtgcagtggtgcaatctcagctcactgcagccttcac

SEQ ID NO: 415067 - DNA, 201 bp, Homo sapiens
gattgcaccattgcactccagcctggggacaacagtgaaaccccgtctcaaaaaaaaaaagtcctaacatttattctagagatggcaggatcttggataaratttataatcttcatgagcctcacttttctcatctgtttaattgggatacatgactgcttgcttactcctaatgtgtttgtgtgcgtgtttttgtttttg

SEQ ID NO: 415068 - DNA, 201 bp, Homo sapiens
tagcaggtgtccaaccagcctctactgtgtttccatactgggacatacagcatatatggtttagagaatggcccttcctcctctctatctaggatggaggycttggaagctaatacaactcaacacagcaaggtctgctgtgataacttccatggagaggaacagaaaaacttctgtaagacttcacagctgggaggaaga

SEQ ID NO: 415069 - DNA, 201 bp, Homo sapiens
atcatctcccacccccaccccaccttctccagatgtcacttgatgtccactgcacacctaatcctggctagatctagcaggtgtccaaccagcctctactrtgtttccatactgggacatacagcatatatggtttagagaatggcccttcctcctctctatctaggatggaggccttggaagctaatacaactcaacaca

SEQ ID NO: 415070 - DNA, 201 bp, Homo sapiens
tttttcttccctatttattgatcccaccatggctggaaaaaaaaaggtgggggcctggttggtgggtgctgtccatggcattggctaattacaggcagacmtcagagggtctgcctctaccatcaccagcaccatgacactgttaactcacctccttgaaggcatcccgcatctcctggacaccgatcatcccagctgttt

SEQ ID NO: 415071 - DNA, 201 bp, Homo sapiens
aacatacctgaggccacgtggatagtgaatggtgaaccctggaaggaatgcaggttgcacctgactttgctgtggctcaagacgatcttgctgcccacccrggtcttgaggtcatcctgaccttcccttgcctttggttggcctgaggatcatctcccacccccaccccaccttctccagatgtcacttgatgtccactgc

SEQ ID NO: 415072 - DNA, 201 bp, Homo sapiens
agggataagtgtcactttacagataaggaaacttacgccagcgagggtcaccaacatacctgaggccacgtggatagtgaatggtgaaccctggaaggaaygcaggttgcacctgactttgctgtggctcaagacgatcttgctgcccacccgggtcttgaggtcatcctgaccttcccttgcctttggttggcctgagga

SEQ ID NO: 415073 - DNA, 201 bp, Homo sapiens
ctgtgattgtcactatgagatttcatcatctcaaccatcctggagggataagtgtcactttacagataaggaaacttacgccagcgagggtcaccaacatrcctgaggccacgtggatagtgaatggtgaaccctggaaggaatgcaggttgcacctgactttgctgtggctcaagacgatcttgctgcccacccgggtct

SEQ ID NO: 415074 - DNA, 201 bp, Homo sapiens
ttggaagtggattcctgcggtggctgcccccgctccccaccacgccccgtcaatgtcaccttcaaagtcaactgtgccgtctccattaacatcagcctccyggacaacctcagagatctcccggggggtgagccgctcccccaggagtctctgcatggcctgctgtagctccaccagggtgatctccccatctccattcgt

SEQ ID NO: 415075 - DNA, 201 bp, Homo sapiens
caccacgccccgtcaatgtcaccttcaaagtcaactgtgccgtctccattaacatcagcctcccggacaacctcagagatctcccggggggtgagccgctyccccaggagtctctgcatggcctgctgtagctccaccagggtgatctccccatctccattcgtgtcaaactgaatagaagcagaaatagattatatcagc

SEQ ID NO: 415076 - DNA, 201 bp, Homo sapiens
gttgcagtgagccaaggttgcaccactgtagtgcagcctgggtgacggagtgagactccatctaaaaaacaaaacccaaaaaacctgtgattgtcactatsagatttcatcatctcaaccatcctggagggataagtgtcactttacagataaggaaacttacgccagcgagggtcaccaacatacctgaggccacgtgga

SEQ ID NO: 415077 - DNA, 201 bp, Homo sapiens
tgccctgcaaactaacaaggaatgggcaaggcggaagggcgtcctgagcatgggaaggaaagggccttggctgaggtgttcctcggagccaccagaagtgrgcgacacccagctctttgaaatgaatagcctgggaagaaagggacagaacaaatgcttccaaaacctgccacccgcttccattctcaaacttggagagga

SEQ ID NO: 415078 - DNA, 201 bp, Homo sapiens
ccctgcaaactaacaaggaatgggcaaggcggaagggcgtcctgagcatgggaaggaaagggccttggctgaggtgttcctcggagccaccagaagtgagsgacacccagctctttgaaatgaatagcctgggaagaaagggacagaacaaatgcttccaaaacctgccacccgcttccattctcaaacttggagaggagt

SEQ ID NO: 415079 - DNA, 201 bp, Homo sapiens
aaagataccgctctgggtctcaccccatgcacagcgccgcatgccaatgccctccctcccgcctgccctccctctctgctttaaggggatctggggctttkgggctttggttctccacaagcgcttgctccatgttgaccaggtggagagggtctggagcttccaggacctcctcagcgagacatcatcttcacaaactct

SEQ ID NO: 415080 - DNA, 201 bp, Homo sapiens
acgtgaagtgaaaagatgtcaagaatcattggaatttttgggggtggcaactggaccctcccacgcttcctatttccatccacagactcttccttcttaayctagttctgcagacgcccccatcctggcaaagataccgctctgggtctcaccccatgcacagcgccgcatgccaatgccctccctcccgcctgccctccc

SEQ ID NO: 415081 - DNA, 201 bp, Homo sapiens
cctctccaccccgaactctactcttaacctctacatccttcccaattctgccctgatcccttccctaaccccggccatccctcccattccctggactcacrgttcatgcggatttgctggccgagctcaatcagttccatctccgtgggcatgtaacccatcgtcctcatgagattccccagatccttacaagagatgaac

SEQ ID NO: 415082 - DNA, 201 bp, Homo sapiens
cacaagcgcttgctccatgttgaccaggtggagagggtctggagcttccaggacctcctcagcgagacatcatcttcacaaactctgcaaagaaaaaaaaraatccccagtaaggcatctcgttgtaaaagcccccaacattattttttgagcccttcctatgtggcaggcactgctggtgatccctgggaaattacttaa

SEQ ID NO: 415083 - DNA, 201 bp, Homo sapiens
tctctaaaagcttttaaccacttcaaatgctgccttcctgagtcgaatctgacctgttttcttccagacttctagtccctctcatcctcctctccaccccsaactctactcttaacctctacatccttcccaattctgccctgatcccttccctaaccccggccatccctcccattccctggactcacagttcatgcggat

SEQ ID NO: 415084 - DNA, 201 bp, Homo sapiens
gtaatggaatttatacagaaatgcacaaagggactgagggcaggtcaggtgggtggatggcaacgtggaagcaactggggaagacggtgttaccttcaatytcatcttgtcccagtggtctttcctggaaaggaatgcagatgagagggaatttggagagagggtcacccattctccaaagggtctccttgttctcccaag

SEQ ID NO: 415085 - DNA, 201 bp, Homo sapiens
ttgggaagtccttcaactgccacgagaaagagttctacaaaattacagttgagtgggaagagagagggattgtaaaaattccatgtaatggaatttatacrgaaatgcacaaagggactgagggcaggtcaggtgggtggatggcaacgtggaagcaactggggaagacggtgttaccttcaatctcatcttgtcccagtg

SEQ ID NO: 415086 - DNA, 201 bp, Homo sapiens
tggaagtaactgcctgtgtgactttcagacagttggttaagatgtttctcctcctctgtagacctgtacaaagaggagcatgaattaaatgagcatacaawtttttttcagatatgaatactatcattaccttgaattcaaccttgtttagttcgttacatgcccagaagcaaacccaatagctttttttttttttttttt

SEQ ID NO: 415087 - DNA, 201 bp, Homo sapiens
tgagtcccagaggccgaagttgcagtgagctgatattgcgccactgcactccagcctgggcaacagagcaagacttcgtcttttaaaaaaagaaaaaaaaagccgggcgtggtggctcactcctgtactcctagcactttgggaggctgaggcaggtggatcacgaggtcaggagatcgagaccatcctggctaacacggt

SEQ ID NO: 415088 - DNA, 201 bp, Homo sapiens
ggagagggtcagttcgtcgtgctcttggccgggggcaggcaggcaacctgtcgtgcctttaaggacctttgggtgattagagacaggcaggcagcttgccrcctggaaatgatcaagtggtcagcctgaccaaattcaggacagctgaagggtctgactgggcactgtgtgactggtgggttggaggctgtcgtgtggctg

SEQ ID NO: 415089 - DNA, 201 bp, Homo sapiens
tcagtcctcccacccgagtgaccccgatggcggcctcccagctggcggcgctggaaggagtggactccggtcccagggtgcccggggccagccccggcttyctatattccgagggccagcggctggcactggaggctctgttgagcaagggcgcggaggcgttccagacctgcgtgcagcgcgaggagctgtggcccttcc

SEQ ID NO: 415090 - DNA, 201 bp, Homo sapiens
agcggctggcactggaggctctgttgagcaagggcgcggaggcgttccagacctgcgtgcagcgcgaggagctgtggcccttcctcagtgcggatgaggtycagggcttggcagcggcagctgaagactggacagtggccaagcaggagcccagcgggatggcagagggagccaccaccaccgatgtggacgcgggcagcc

SEQ ID NO: 415091 - DNA, 201 bp, Homo sapiens
ttgtgtgacttcaggcaacttacttcacctctctgtgcctcagtttccccctctatgtcatgggctgatagggttagagcctctagaaccaggtccctcarcaggggtggcacccacgctcgggctgggtaagtctttgttttaggagctgttgggtgcattgtgggaggctcctcggcatcttcagcctccacccagcag

SEQ ID NO: 415092 - DNA, 201 bp, Homo sapiens
cttcctcagtgcggatgaggttcagggcttggcagcggcagctgaagactggacagtggccaagcaggagcccagcgggatggcagagggagccaccaccrccgatgtggacgcgggcagcctgagctactggcctgggcagtcggagcagccggcgcccgtcctgcggctgggctggccagtggactctgcgtggaaagg

SEQ ID NO: 415093 - DNA, 201 bp, Homo sapiens
ccagcctcctggagagggtcagccgcccctcaaggagctggtgcggctggagatccaggctgcccacaaggtgggtgtcgcgggggccctgtgtccattcmccagactgggacggggacccaggcattctctcccttgtcctcctgggacttgcaagcccacacccctaccctaaaggacctatacccctgggacccagga

SEQ ID NO: 415094 - DNA, 201 bp, Homo sapiens
ttcatcgtgcctggaacaggacctgagaatctgcattttcaggaagttcccacttgctgctgctgctgtttctggtccagggaccacactttgagaatgaytggagttgagaccaggatgtttgaaatgtttgaaagagtgtttaccttcccagcttggtgtgaggattcagtggcacgtaacgtaagacaggcttggcca

SEQ ID NO: 415095 - DNA, 201 bp, Homo sapiens
ggcctgacacattggatggtcgcttatttgggcagcgtgattgtcagaacagtgtggcaggggctgctgcagggagccatttggacatctgcagggccccsccggaggcctcggatggccacgtagggtctgcctatcaggagaacccccagatgatcacagtccccagagacagccagacccccggggacccagcctctc

SEQ ID NO: 415096 - DNA, 201 bp, Homo sapiens
gctgcccacaaggtgggtgtcgcgggggccctgtgtccattccccagactgggacggggacccaggcattctctcccttgtcctcctgggacttgcaagcscacacccctaccctaaaggacctatacccctgggacccaggagtgcacaccttccagccccaggactcaggtgcctacaaccccagacctcatccttact

SEQ ID NO: 415097 - DNA, 201 bp, Homo sapiens
gtcagactgggccccccgggcaggacttggggggcaaccctgaacaggagcccaagccaaatctgctggcccacccaaggagcagtgccggacaactgtcrgctcagagccctctgcctcaatgccctgccttggacaaggcttctggcctcggcgtctgtcaagcagaagggatgtttgtcacttgttctgcaacttggg

SEQ ID NO: 415098 - DNA, 201 bp, Homo sapiens
gggtttccactctccctccaaggaaggcccagatgtccacactgcagcccttggaaagcctgctgtgtacttcacagccttagcgtccgccagctcccacrtgaagggtttctcagggactaatgtgcatcatcgtcccggaaccctgtaccgccagagggactattgtgcccacggaggcacgggggcggttaaatctct

SEQ ID NO: 415099 - DNA, 201 bp, Homo sapiens
cagccccaggactcaggtgcctacaaccccagacctcatccttactctcagaaaggggggcccggccgggcgcggtggctcacgcctgtaattccagcactgggaggccgaggtggacggatcacgaggtcaggagtttgagaccagcctggccaacatagtgaaaccccgtctgtactaaaaatacaaaaattagccggg

SEQ ID NO: 415100 - DNA, 201 bp, Homo sapiens
aaacagtgatttatgattacagttttccagcatttaggggccgggaatctcgaggaggggctggggatctcatggaggggcagcgttttgctcattcacamgtaggtgctgtttgagcagcagtgtatgtctgggggtctcccctttagcccccctgaactttaaactcccagcccccagagcactttactcccagattcc

SEQ ID NO: 415101 - DNA, 201 bp, Homo sapiens
aggaggggctggggatctcatggaggggcagcgttttgctcattcacacgtaggtgctgtttgagcagcagtgtatgtctgggggtctcccctttagcccmcctgaactttaaactcccagcccccagagcactttactcccagattccagatgtcaggtttcccacaccctctgagtgtcccctgagccagcttccgttc

SEQ ID NO: 415102 - DNA, 201 bp, Homo sapiens
atgttggccaggctggtcttgaactcctgacctcaggtgatccacccacctcggcctcccaaagtgctgggattacaggcgtgagccaccgtgcctggccrtctgtcactttcgctgcttctctcttgcctcacctcctgccttccctggatctgggatgcccccagggccccaccccagcctcctctcacctccctctct

SEQ ID NO: 415103 - DNA, 201 bp, Homo sapiens
aggattacaggcgcccaccaccacctcaggctaatttttgtatttttagtagagatagggtttcaccatgttggccaggctggtcttgaactcctgacctsaggtgatccacccacctcggcctcccaaagtgctgggattacaggcgtgagccaccgtgcctggccgtctgtcactttcgctgcttctctcttgcctcac

SEQ ID NO: 415104 - DNA, 201 bp, Homo sapiens
gaaggagtggactccggtcccagggtgcccggggccagccccggctttctatattccgagggccagcggctggcactggaggctctgttgagcaagggcgyggaggcgttccagacctgcgtgcagcgcgaggagctgtggcccttcctcagtgcggatgaggttcagggcttggcagcggcagctgaagactggacagtg

SEQ ID NO: 415105 - DNA, 201 bp, Homo sapiens
aagactggacagtggccaagcaggagcccagcgggatggcagagggagccaccaccaccgatgtggacgcgggcagcctgagctactggcctgggcagtcrgagcagccggcgcccgtcctgcggctgggctggccagtggactctgcgtggaaaggcatcacccgggcgcagctgtacacccagcctcctggagagggtc

SEQ ID NO: 415106 - DNA, 201 bp, Homo sapiens
tctacctgctcctggaccgccagcagctgcctgccttcctggaactggcccagcagctgggggtgaacccctggaacacggaggtaggggccgggccaggkggtcctgtgagtccccattcccctggcatgggggcagtgggggcagacccttccatggagctccgggtcattgagatggatgctagcagggatggtcccc

SEQ ID NO: 415107 - DNA, 201 bp, Homo sapiens
tttgggaggctgaggtgggaggatcacttgagcccaagaatccgagaccaccctgggcaacatagctggaccttatctctacaaaaagaaaaaaaaaaaaaggaaaagaaaaagaaaagaaaacaaagaatgctccatgaacatcagctgtcatttattatgatatatatatattttttaccatatttcatggactctaaa

SEQ ID NO: 415108 - DNA, 201 bp, Homo sapiens
ccgagggccagcggctggcactggaggctctgttgagcaagggcgcggaggcgttccagacctgcgtgcagcgcgaggagctgtggcccttcctcagtgcrgatgaggttcagggcttggcagcggcagctgaagactggacagtggccaagcaggagcccagcgggatggcagagggagccaccaccaccgatgtggacg

SEQ ID NO: 415109 - DNA, 201 bp, Homo sapiens
ccgcattctctgtgctgtacacccgccaagggcttgacttcagcctcacacctcccatagtgaccccatattccagatgggtaaactaaggctggggaaartgatgtatccagggtccccgagccaggatgagagccaggttcattgaattccaaagaggctgggaaagaagagggtgtattaactgagcacttgctgtgt

SEQ ID NO: 415110 - DNA, 201 bp, Homo sapiens
gtggtgggcgcctgtagtcccagctacttgggaggctgaggcaggagaattgcttgaacccgggaggtggagtttgcagtgagctgagattgcgcccctgmgctgcagcctgggagacagagtgagactccgtctcaaaaaaaaaaaaacaacaaaaaacaacaacaacaacaaaaacacaaaaaaacaagcaaacagtga

SEQ ID NO: 415111 - DNA, 201 bp, Homo sapiens
catctgcagggccccgccggaggcctcggatggccacgtagggtctgcctatcaggagaacccccagatgatcacagtccccagagacagccagacccccrgggacccagcctctcacagtcagtcctcccacccgagtgaccccgatggcggcctcccagctggcggcgctggaaggagtggactccggtcccagggtgc

SEQ ID NO: 415112 - DNA, 201 bp, Homo sapiens
aggaagcagaattgcttgaacccgggaggcggaggttgcagtgagccaagatcaagccactgcacttcagcctgggcgacagagcgagactccatctcaawaaaaaaaaaaaaagaaagaaatgggggcccctaccctcccccaagacctggatgcccttaggtatcgatgccccttgaacctaattatgacacccccagt

SEQ ID NO: 415113 - DNA, 201 bp, Homo sapiens
tccctcagtgtgctcagagaacagctggcatccccttgcccaggcctctcttttctcatctgtgtaatgggggcaaaacactcttccctgcggaggaggtkggtgccgcggccggacctggtgctggcctgtttagtggtcttgggtaagtctgcttctctttgacctggtgttttcttatctggaaaactgggcaaacag

SEQ ID NO: 415114 - DNA, 201 bp, Homo sapiens
tagcccccgccccgccccccacctcccggcgtcctataccccactttccctcagtgtgctcagagaacagctggcatccccttgcccaggcctctcttttstcatctgtgtaatgggggcaaaacactcttccctgcggaggaggttggtgccgcggccggacctggtgctggcctgtttagtggtcttgggtaagtctgc

SEQ ID NO: 415115 - DNA, 201 bp, Homo sapiens
atgggctgatagggttagagcctctagaaccaggtccctcaacaggggtggcacccacgctcgggctgggtaagtctttgttttaggagctgttgggtgcrttgtgggaggctcctcggcatcttcagcctccacccagcagaggtcagtagcatcacacgccccatacccccgactttccctgccaattagagaaccgaa

SEQ ID NO: 415116 - DNA, 201 bp, Homo sapiens
gtgagaccccatctctacaattaaaaaaacaaattagttgggtgtggtggcgcacgcctgtggtcccagctacgcaggaggctgaggtgggaggatccctygagctcaggaggtggaggcagcagtgagccaagatcatgcccttgcactccagcctgggcaacacagtgagaggccatctctttaaaaaaaaaaaaaaaa

SEQ ID NO: 415117 - DNA, 201 bp, Homo sapiens
gccttccactttctcatcttaaatgggaaggagtgttggattccaaaccccttcctgatctagaaattgatggggcagaagacaaatggggaggggagtgrggagggggcattcactaccttcctgtgtctcctctttccccatgttcttcggcttacagagtttcatcatctccttcagcctgacatctctgagggatgg

SEQ ID NO: 415118 - DNA, 201 bp, Homo sapiens
agcatggctggactctttcttaaagaggggtatgggctctctgtgggccacgactggtttctggatcccccaggaacactagggaactcacagcctggttsctcaaggtgctaagggccagagggtgccaccccctgaactatccagcaactatccagagagaaaggggacatgggggactggcccttaacaggatgctgc

SEQ ID NO: 415119 - DNA, 201 bp, Homo sapiens
ctggccttccactttctcatcttaaatgggaaggagtgttggattccaaaccccttcctgatctagaaattgatggggcagaagacaaatggggaggggastggggagggggcattcactaccttcctgtgtctcctctttccccatgttcttcggcttacagagtttcatcatctccttcagcctgacatctctgaggga

SEQ ID NO: 415120 - DNA, 201 bp, Homo sapiens
cgcggcgtgcgggcacccacacccagccccaggccggagcactagacgtgagatggggctgcctcgagcaccaacaaagtaatttgggagcgactaggagmtgagccttctacctcgacggtgcactgcagagagccaatcagacgtcgcagagccccgacgacactatgcttgcgcccacgccgagcaggcgtgcggaac

SEQ ID NO: 415121 - DNA, 201 bp, Homo sapiens
cctagggtctgggcttctgcccccacgggcgccctggcatctggcaccccaccctgtcccagctcctgccttcctgcctctctcctcctcattacccaccrcccccaacatctgttcccccatctgctctggggaactctggatgggtggagaatgtggggactctggtctccaggccctgaggcccagaatagagggcag

SEQ ID NO: 415122 - DNA, 201 bp, Homo sapiens
tctcagagaccctttctgcttcccttcatggtcccagatatttgagccttagccccacttcccataaagacttgtcccacggttccctaatccccagtccrcacctgctccatgaccttggggtctatgacctcaggctattcagctctcttaagacactcaggagttcggcccagccaacaaatctagaccaacgccagc

SEQ ID NO: 415123 - DNA, 201 bp, Homo sapiens
atgaggatgggctgactgggtccccagatggggatacatgggtcacccattgagcccagtcccaaaggtttgggtaccccagctggccatcaagatggaayggagggatgggcaggggcagaaggctgtggtctaggccccaggagcccactgcagacagcctgaccctccccagaccctcagtgtcaaaactactgcaat

SEQ ID NO: 415124 - DNA, 201 bp, Homo sapiens
cccagctcctgccttcctgcctctctcctcctcattacccaccgcccccaacatctgttcccccatctgctctggggaactctggatgggtggagaatgtrgggactctggtctccaggccctgaggcccagaatagagggcagggttgaggtgagcagaaagtcccagaacgctaacttccggtccccacaccctgagtt

SEQ ID NO: 415125 - DNA, 201 bp, Homo sapiens
gagctccctgattatcccacaactcttccgggctctcagggacctgccagtccagggctctcaaacctcttagtgtcaaaacaccctgcagtccaagtctyttcaaagagtgtccatgagcctgggagacataatgagtccccgtctttaaaaaaaaaattttaaagtagcctggtgtggtggtgcatgcctgtggaccca

SEQ ID NO: 415126 - DNA, 201 bp, Homo sapiens
cagtccgagcctcagtctcccagctccctgtggcctctgggtgcctggcctctgtctcagcctctcagcctcctgtctgttcctctgtctttgcagcaacytctctgtgccgagcgcctcccctaggctgactgtcctctctctgcctctgtcctgtcctctatttctttgtgactgagtcttcatctgtccctaagcccc

SEQ ID NO: 415127 - DNA, 201 bp, Homo sapiens
ccacaaaaaccctgggagagagggatctggattctctctggacagggagaaaacagaggctgggagagggggagttgtttttccaagaacatgcagccgtytgagctccctgattatcccacaactcttccgggctctcagggacctgccagtccagggctctcaaacctcttagtgtcaaaacaccctgcagtccaagtc

SEQ ID NO: 415128 - DNA, 201 bp, Homo sapiens
atctcctctccctcatctgagttctccacaggggaagtgaggcaaaacgattacccttgggtcagaaagaatccaaaacctgactcaactcactgatcatytgaatagctttgccactttgaatgcccacaaaaaccctgggagagagggatctggattctctctggacagggagaaaacagaggctgggagagggggagt

SEQ ID NO: 415129 - DNA, 201 bp, Homo sapiens
ccagctcccagcatccctttcctcagctcagctctctgggctttgcactcgggtgggaaagggttaagggtggggcgctgggggtgggtgggcgggtggcmgggaggctgggttgtttggtgataatccccttccgtgcccagggtgtggagaacaaggttagggccccatgtgggaaaggcaatggctctgatccctgca

SEQ ID NO: 415130 - DNA, 201 bp, Homo sapiens
tcaccacgctggccaggctggttttgaactcctaacctcaggtgatctgcccaccttggcctcccaaagtgctaggattacaggcacgagccatcgtgccyggatgcagcctactctttagaggcccagtttcacagatgttcaggaggttcatgagtccccccggacttaccagctccagtccaatgtaccttttttttt

SEQ ID NO: 415131 - DNA, 201 bp, Homo sapiens
tctatttcttttttttttcttttgagatggagtcttgctctgtcacccaggctggagtgcagtggcgccatctcggctcactgtagcctctgcctctgggsttcaagccattctcttatctcagcctcccgagtagctgggattacaggtgtgtgccaccacgcccggctaattttgtatttctagtagagatgaggtttc

SEQ ID NO: 415132 - DNA, 201 bp, Homo sapiens
ctgagctccctgattatcccacaactcttccgggctctcagggacctgccagtccagggctctcaaacctcttagtgtcaaaacaccctgcagtccaagtytcttcaaagagtgtccatgagcctgggagacataatgagtccccgtctttaaaaaaaaaattttaaagtagcctggtgtggtggtgcatgcctgtggacc

SEQ ID NO: 415133 - DNA, 201 bp, Homo sapiens
ctgagagcccaccgcgccacagcttggaggaagagcctgcggggaactggctgcaggacgctctcttcttgagtgcaggtttggccaatgtcggggcctcrgggctcgggttggggggtgcatgccaagagccagggaaaggaagcctgggtcccagatggaccccaggccgcccaggcaggcctcctatgagtctgctgg

SEQ ID NO: 415134 - DNA, 201 bp, Homo sapiens
atcagacgtcgcagagccccgacgacactatgcttgcgcccacgccgagcaggcgtgcggaacttttagcaaaaggcggcaagcgggacttctggtcccarcatttcctcctttggcctgtggcttattccccgccagtgatctgtttcccccaataaagtctcaaatctttgggaatttttgtctacagacccctgatcg

SEQ ID NO: 415135 - DNA, 201 bp, Homo sapiens
tcgcgctgccatggaggccgcgctgggcccggcccctgaagcggctgcagcaggaggagcgcgccggaggctgccgcggcgtgcgggcacccacacccagycccaggccggagcactagacgtgagatggggctgcctcgagcaccaacaaagtaatttgggagcgactaggagctgagccttctacctcgacggtgcact

SEQ ID NO: 415136 - DNA, 201 bp, Homo sapiens
ggcagggccatgggaagaaagctgaggactggggagcagcacactcggccctgatgcgcccccaccccattttgctcctagcctgctcctgcaaccagcaygcccgacgctgccggttcaactctgagctgttcagactgtcgggcggccggagtgggggtgtttgtgagcggtgccgccaccacacagctgggcggcact

SEQ ID NO: 415137 - DNA, 201 bp, Homo sapiens
caaagagatcttattttaaaagcagctgatggtttggaaatgagagaactacagtggtgaagagaccaggaggcagctctcagtgaaaccaacattgcggrtgcccttcgtgagccttctcagtcccagcaggaagcccacaacactggcctccccagcctgcctgctgacaacacctaggcttactttatctaaaatcag

SEQ ID NO: 415138 - DNA, 201 bp, Homo sapiens
ttaattagattgtttacaaatttaacaggatggctacaaagagatcttattttaaaagcagctgatggtttggaaatgagagaactacagtggtgaagagmccaggaggcagctctcagtgaaaccaacattgcggatgcccttcgtgagccttctcagtcccagcaggaagcccacaacactggcctccccagcctgcct

SEQ ID NO: 415139 - DNA, 201 bp, Homo sapiens
tctgcgagaaacacccaagaatgatcaataaaaataaataaataaataaacaaaaataagaactactcttggcccataggccatagctcgccatcccctgycctaaggcagagaagacacacagcggcggcccacagcaggttgtgcacacggaccttggtttacacacggctgccatgtgacaatgaggagtttctgtca

SEQ ID NO: 415140 - DNA, 201 bp, Homo sapiens
cttttgcagcaacttggacggagctggaggccattatcctaagtaaagtaattcaggaatggataccaaatatcatatgttctcacttatgagtagatgcyaagctatgatgatgcaaagacataagaatgatatagctttccctctccctctttctccacggtctccctctgatgccgagccaaagctggactgtactgc

SEQ ID NO: 415141 - DNA, 201 bp, Homo sapiens
tgcccagtctggaaagtgaggagcgtctctgcccggccacccatcgtctgagatgtggggagcgcctctgccccgccgccctgtctgggatgtgaggagcrcctctgcctggccgtgaccccatccgggaggtgaggagcgtctctgcccggccgccccgtctgagaagtgaggagaccctccgcccggcagccaccccgt

SEQ ID NO: 415142 - DNA, 201 bp, Homo sapiens
cccagcctgacagcttccagcagaaagtgtcagaaccagaggcccagccaaggcccaggcagggcaggcggtcctcctgggccctggcattgttcttacamatggagggcatggccatcttctctttcagggacaggctggcctgacatggaaggtgaaacaaggcagcagcccctgcctccaggagaactctgcagactg

SEQ ID NO: 415143 - DNA, 201 bp, Homo sapiens
gagaactctgcagactgcagtgccggggagctgaggggtcctgggaaggagctatggagtcccatccagcaggttacagccacatcctctaaatgggcgcratttgtcctgccacctagaaaaagttcacatgtggacagtgagcagccaaggtctcttcagagggaccccaggccagctggtccagcacaggctaagcaa

SEQ ID NO: 415144 - DNA, 201 bp, Homo sapiens
attcttggtgggcccatgatactggacctttctctttctccaattcagtaaaacattaacctcagctagcatctaaagtcagcttctgagccagaaagtcraaagagacctttttcctaaccatgcaggacacgggccacacggcaggtggggccaggccctaagtacagggagagccaataccacatgtggcaggcgctt

SEQ ID NO: 415145 - DNA, 201 bp, Homo sapiens
caagtaactacaaagttctagcaggttcccagcgtgactttaatggcacagacatcactgcagcagcagcagctccctcgggtttgtaagtggggctgcasaggtgctgaggatgaggcggaggtgcaggccacagatcactaggctggccgtggtcccaggtggcgggaggggcacaggcttgcctcagggcgcccctcg

SEQ ID NO: 415146 - DNA, 201 bp, Homo sapiens
acacacacagggaccctcccttcatgtcacttgttttgctgccctaaatggcttcttgcaccctaacccctgatcctggaagaaggcagagaaactggccygtacagagacctgcaattctacgcaagcttaacacaactatgagacagaagaggggcacgcagaagaggtgggcaaaagtggtcacaacggcgggggatg

SEQ ID NO: 415147 - DNA, 201 bp, Homo sapiens
ttgagtgtgagtagtagggacacacccagtgctgccccctctctgtgtcacacctgccttaattcctggtctgcatgttaagttttagaaactcctacaaytaatattcctggctctggagtttgcttaaagaaaaacattttcagaactgcattagcagagcttactcgctattgctcagggtacacataataggacaaa

SEQ ID NO: 415148 - DNA, 201 bp, Homo sapiens
atttaattagattgtttacaaatttaacaggatggctacaaagagatcttattttaaaagcagctgatggtttggaaatgagagaactacagtggtgaagrgaccaggaggcagctctcagtgaaaccaacattgcggatgcccttcgtgagccttctcagtcccagcaggaagcccacaacactggcctccccagcctgc

SEQ ID NO: 415149 - DNA, 201 bp, Homo sapiens
cagtgctgccccctctctgtgtcacacctgccttaattcctggtctgcatgttaagttttagaaactcctacaattaatattcctggctctggagtttgcytaaagaaaaacattttcagaactgcattagcagagcttactcgctattgctcagggtacacataataggacaaaaccaactcctaacctcccacacctac

SEQ ID NO: 415150 - DNA, 201 bp, Homo sapiens
tggttaaagtgctgatgccatttaattagattgtttacaaatttaacaggatggctacaaagagatcttattttaaaagcagctgatggtttggaaatgaragaactacagtggtgaagagaccaggaggcagctctcagtgaaaccaacattgcggatgcccttcgtgagccttctcagtcccagcaggaagcccacaac

SEQ ID NO: 415151 - DNA, 201 bp, Homo sapiens
gtcaattcctcgtcactggaaaaggcaaccaagtccccgtcctcatctagattgtttaaaagacagcacgtgagcacccaggggttctcagctggacatawgctgctggaatgggctgaggcaagtatgaaagggacactcacagggctataaacaaacacacctacttgagccacagagggcaggagtgagaggcaagac

SEQ ID NO: 415152 - DNA, 201 bp, Homo sapiens
aaaaacattttcagaactgcattagcagagcttactcgctattgctcagggtacacataataggacaaaaccaactcctaacctcccacacctacagacakccctgcagtggagaacatctcatccttctgtttgtgtcgctgaaatcagaggagggcaggatgctctaaagggaaaggtaggaatatgtacaaaacctct

SEQ ID NO: 415153 - DNA, 201 bp, Homo sapiens
gtcatcatctcctcctgaacagttatccgactccatctgttcctggaacaaaactcaccatgagcacacaggagacacgcgcaacaggccaagcctgaccrtggccctggctcctggcagacagtcggggagcatgcatgcacacgtgcagttaaggctgcaggggtctagggggaacagtggccactcacaaagaccaag

SEQ ID NO: 415154 - DNA, 201 bp, Homo sapiens; identical to SEQ ID NO: 104211

SEQ ID NO: 415155 - DNA, 201 bp, Homo sapiens
atctgttcctggaacaaaactcaccatgagcacacaggagacacgcgcaacaggccaagcctgaccgtggccctggctcctggcagacagtcggggagcaygcatgcacacgtgcagttaaggctgcaggggtctagggggaacagtggccactcacaaagaccaagtaactacaaagttctagcaggttcccagcgtgac

SEQ ID NO: 415156 - DNA, 201 bp, Homo sapiens
taatttctcacagagaggagggtctcgctgtgttaaccacgctggtctgaagctcctggctttgtgtggcaaatgctcattttaaaatacaaatacaaccycagcctccactcctcttcttgttttagactttatgcacagcttcaaaggtcaaaacccaaattcaattcccaacactgtgtactaggtcctgcaagctgt

SEQ ID NO: 415157 - DNA, 201 bp, Homo sapiens
cctggcctatgtctctgtcttaaacagccctcaaattgctgaccccttcattggtggaacatcgagccctgttttttactcagcagggaactgagtacaarctgagctggcttcaggcagcccccagagcagccccttacctttaatgtagattcggaagatgtcatccttcacgtaggacatggccattgtcaattcctc

SEQ ID NO: 415158 - DNA, 201 bp, Homo sapiens
tgagaaaaggtctcactctgtggcccaggctgaagtgcagtggcaattagagctcactgtaacccaggagtcaagtgatcctcccgcctcaccccctgagsagctaggactacaggtacatgccaacatgcctggcttttattattgttttttttttaatttctcacagagaggagggtctcgctgtgttaaccacgctgg

SEQ ID NO: 415159 - DNA, 201 bp, Homo sapiens
aagtgtccgcgtgggtgctggggcagccagagacaaggccactgagggattcaggccgcactgctctgggccatctttagggagattgacaatcacagggracacaggggatgagttcctctacagaggtcctggtctgtgcgggggcctccaggccttctgcgctgcagccactcccttccactcacatgggagggccac

SEQ ID NO: 415160 - DNA, 201 bp, Homo sapiens
cccaggggttctcagctggacataagctgctggaatgggctgaggcaagtatgaaagggacactcacagggctataaacaaacacacctacttgagccacrgagggcaggagtgagaggcaagactacccccttgctctggcacctcctggaaggtgagtgctccgacctgggccctggaccacagccacatgcagggggc

SEQ ID NO: 415161 - DNA, 201 bp, Homo sapiens
cttattctctccagcccctttccatgcctgcccaaaaggttatattttattttattttgagaaaaggtctcactctgtggcccaggctgaagtgcagtggyaattagagctcactgtaacccaggagtcaagtgatcctcccgcctcaccccctgagcagctaggactacaggtacatgccaacatgcctggcttttatta

SEQ ID NO: 415162 - DNA, 201 bp, Homo sapiens
acccatctcagtgacctcttacctggaggctgggctggggagtggctccggggtcaccgtgagtcccctgagcaggaagagcgtgcagcggctggagccaracagacactctcccccttctcgcctctgactccttcccctttcccgatgcagtcccaccccgcaggctccccgcgtccactggccccttcccaccctcca

SEQ ID NO: 415163 - DNA, 201 bp, Homo sapiens
gcccggtctgagcagggtgagggacacaaggaaggcctgtggctctgggaacatagctttgaggaagcgctcaaggcgccccactcacccccaagaaggarctcctttgctttctcgccatttggcccgtttgggatcgcgggaagtttccgcgggggctaggggcatgtgaagagactgggggggggcggggaggggaga

SEQ ID NO: 415164 - DNA, 201 bp, Homo sapiens
tttttattcgtgtactaggaggttagaattgagagctcgtaaaccaacaaaaggttgggggaaagggcacttggggaaaacaaaggacttctaggaaagakaatatgctagttttgtgacagtgtctgtttgcctgtggtgccatgtctggggatgagtcccttgtgctcccagggagggggcttatctctgtttcctctt

SEQ ID NO: 415165 - DNA, 201 bp, Homo sapiens
cggccttggccacctcccgccctcctggccacaaccacctccctaaccccacccccagcagccactggtcacaccagcgcagcaggaaacagggcttctgkgccaacaccaacacttctgaagaacgttctcgtccacttgccaatgggaaaacatctgtactcgacctggctcggagcgttccgccggcgatccgtgccc

SEQ ID NO: 415166 - DNA, 201 bp, Homo sapiens
ctttctctttgccaagaaagcctttgatttccacatggttatgcctgtagccagggcaggaactacaatgagcagagaccccaggggacccttgaagggtrtacagctttgagtatacttttattagatcagagaaatttggggttgttagagcagcataatccagcctatcctgactgattatccccacaggcatagaag

SEQ ID NO: 415167 - DNA, 201 bp, Homo sapiens
ctacattgtctgattctatttacatgaaatgtccaggattgcaagatgaatagatacagaaaggaggttgctgggggcatgtggataagagggtgataaawggtatgtatggcgtttataaggtgatgaaaagctctcacactgaatatggtccacaaacctatgaaaatagtgaaaaccactgacttgtacactaaatgg

SEQ ID NO: 415168 - DNA, 201 bp, Homo sapiens
tccagctcggggcgcaagggatgtgggggtcactggaagacggggcgcgggccgcccgtggggaggagactggacccgaacccggcccaccccacccgagyggcgacgccagcgctgaccccaggcgtgtcccggcccccggcgcggctccggcccaaccgtgcacgcccgcggaaggcctcgcacccgcgtcagaagtgg

SEQ ID NO: 415169 - DNA, 201 bp, Homo sapiens
gagaggggcggagtctctcgcgccctccccgcccccgccaccgtcgtcgcggcgcgagagccgccctgcagaggccccttcactactctccccttccccgytacccctcgctccaggtctcccggccccctcattgctgacccctctcttcattgccccggtgcaccaaggaccccaggaaaccggccctggcactcatac

SEQ ID NO: 415170 - DNA, 201 bp, Homo sapiens
atggctttaaagcacagctgtgcagaccaaaccacgccatccaccgagggcacaggtgaggcacccaaagatgcaaacaacccaaatgtctgtcaactaakgaacaggtaaacaaaacatggcctgtccacacaacagaatattattcctccaaaaaaaactagttctgatatgtgccacaacactgaacacattacacta

SEQ ID NO: 415171 - DNA, 201 bp, Homo sapiens
gcagcgggtcccggccttggtcaccactccagtcaccaggccggctcccatggccgaactggggacccatgcaggccaccgccatccagggagcagccagygcagaccccctcacggcccgccaggcgtcgccgagaagggagggggcagccaccccgcggcaggaggccgtgtccggcctgcgtcaccgcccccgccgct

SEQ ID NO: 415172 - DNA, 201 bp, Homo sapiens
ccaccctgagcccaccccaggcctgcacagagggcctgctcacctcagacaggtgcccgaaggggctggggaatgcgagcttggtgtgcccccggtgcaarccctttccctcgcagacgctacacaagtcgtagtctgggcagacgctgcacttgtagcgggttcctaccacaggcccattgcagccatcgcagatcacat

SEQ ID NO: 415173 - DNA, 201 bp, Homo sapiens
ttgggagtaaaggagaagacaagggcatctgcctgcttccttccctaacaaagctgaaagacacgtatttgtatgtagtctccatttgtgacagatacatrtgagctgaaatggctttaaagcacagctgtgcagaccaaaccacgccatccaccgagggcacaggtgaggcacccaaagatgcaaacaacccaaatgtct

SEQ ID NO: 415174 - DNA, 201 bp, Homo sapiens
agaaggaaaagataaatagcatgtcaactaactactacccaggtcctcaaaagtccaaatcccaaggcctggcttaggggaaattgcagactattgttcayccaaaggagggcagtcagaggtgacaggcaagacctgcaaccacagtctggtcaccctccctcactgggattatcccaaccaaatgccagctgattcgac

SEQ ID NO: 415175 - DNA, 201 bp, Homo sapiens
aaactcaccatgagcacacaggagacacgcgcaacaggccaagcctgaccgtggccctggctcctggcagacagtcggggagcatgcatgcacacgtgcasttaaggctgcaggggtctagggggaacagtggccactcacaaagaccaagtaactacaaagttctagcaggttcccagcgtgactttaatggcacagaca

SEQ ID NO: 415176 - DNA, 201 bp, Homo sapiens; identical to SEQ ID NO: 104233

SEQ ID NO: 415177 - DNA, 201 bp, Homo sapiens; identical to SEQ ID NO: 104234

SEQ ID NO: 415178 - DNA, 201 bp, Homo sapiens; identical to SEQ ID NO: 104235

SEQ ID NO: 415179 - DNA, 201 bp, Homo sapiens
tttgtggcctcaggcacttaggcacctcagtttccccatttgggaaatggagagaatacaccccactttgcagggttcttgtgtgattgtagggcaccagraaggtggggggtatcctgaattcttgccttgcacacacgctttgcacaagggccctgcacacaggctgcctgactactgtcaccaatcagaagcaggttc

SEQ ID NO: 415180 - DNA, 201 bp, Homo sapiens
gagtcccttgtgctcccagggagggggcttatctctgtttcctcttattctctccagcccctttccatgcctgcccaaaaggttatattttattttatttwgagaaaaggtctcactctgtggcccaggctgaagtgcagtggcaattagagctcactgtaacccaggagtcaagtgatcctcccgcctcaccccctgagc

SEQ ID NO: 415181 - DNA, 201 bp, Homo sapiens
tcatatctccaaattcaccggcaatctctcagacctttactacgtccagagtgagtggcaggatttaggcacagccgatctctcaatcatgacctcggtgytccactgtttaccctccttggaaagcattaagaatactgattcttggccgggctcggtggctcacacctgtaatcccagcactttgggaggccgaggcag

SEQ ID NO: 415182 - DNA, 201 bp, Homo sapiens
cccagcagggcccgcaccccaggacgggtacttaccgcagtcccccacctccagctctgcacactcgcagcccagtgcccgctcttccccctcagcctccygacgagactcagctcttcgacctccctgcgagtccctgtgcacccactttgttctgtgcctgtccctgccctgactatgtgggctcaggtagttttgtgg

SEQ ID NO: 415183 - DNA, 201 bp, Homo sapiens
actacaggtgcctgccaccaagccttgctaatttttgtatttttagtagagatgggtttcactatgttggccaggatggtcttgaactcctgacttcaggkgatccgcccacctcggcctcccaaagtgctgggactgcaggcgtgagccacccgcccggccaggcatcacccccttttagccctttcagacaagcccaaa

SEQ ID NO: 415184 - DNA, 201 bp, Homo sapiens
actaccctggctaatatggtgaaaccccgtctctactaaaaatacaaaaaatcagctgggcgtggtggcaatcgcctgtagtctcagttactcgggaggcygaggcagaagaatcgcttgaacctgggaggcggaggttgcagtgagccaagttggcgccactgcactccagcctggtgacagagcaagactccatctcaa

SEQ ID NO: 415185 - DNA, 201 bp, Homo sapiens
ctccctaggaaaaatccccaggcactggacatcacttttttttttttttttttttttttttttgagacagtctctctctgtcacccaggctgaagtgcagkggcacgatctcagctcactgcaacctctgcctcccaggttcaagcaattctcctgctcctgcctcagcctcccaagtagctgggactacaggtgcctgcc

SEQ ID NO: 415186 - DNA, 201 bp, Homo sapiens
atggactcctctttctcaggtcaggcacagcacttaaaatgtcctttttttttttttttttttttttttttgtcgcctaggctggagtacagtcatgtgayttcggctcatggcaacctccgctctccaggtttaagtgattctcgtctcagcctcctgagtagctgggactagaagcatgtaccaccacacccggctaat

SEQ ID NO: 415187 - DNA, 201 bp, Homo sapiens
cctcacctgattctgccgtggggccagggcgggcctcccctgcacgaggaggacgtgggctccagtttcctggtggacccatttcccatcctggccacccraagtgtccgtgtttcaccttccggagccagcggctgtgcgagaagccctgggggaggaattagcagagcggcaggcagtgagcgggtcaaggttcctgcc

SEQ ID NO: 415188 - DNA, 201 bp, Homo sapiens
ttcctctacagaggtcctggtctgtgcgggggcctccaggccttctgcgctgcagccactcccttccactcacatgggagggccacagccctcccttgccrtcttcctaatcatgccagctcattctacctggtgacttttccctggctctccctctggtccaaaaccctttccactcctgccctacatggcaacttccca

SEQ ID NO: 415189 - DNA, 201 bp, Homo sapiens
aaatgtccaggattgcaagatgaatagatacagaaaggaggttgctgggggcatgtggataagagggtgataaatggtatgtatggcgtttataaggtgakgaaaagctctcacactgaatatggtccacaaacctatgaaaatagtgaaaaccactgacttgtacactaaatgggtgaacccttatttcagttacagctc

SEQ ID NO: 415190 - DNA, 201 bp, Homo sapiens
tggtggacccatttcccatcctggccacccgaagtgtccgtgtttcaccttccggagccagcggctgtgcgagaagccctgggggaggaattagcagagcrgcaggcagtgagcgggtcaaggttcctgccaccctgagcccaccccaggcctgcacagagggcctgctcacctcagacaggtgcccgaaggggctgggga

SEQ ID NO: 415191 - DNA, 201 bp, Homo sapiens
gtcctgggaaggagctatggagtcccatccagcaggttacagccacatcctctaaatgggcgcgatttgtcctgccacctagaaaaagttcacatgtggayagtgagcagccaaggtctcttcagagggaccccaggccagctggtccagcacaggctaagcaagggacccccagagcacaggcctcaagagaaggcctca

SEQ ID NO: 415192 - DNA, 201 bp, Homo sapiens
gactagcgattcttctttcctattctctgacttcacctctaaactctagtacagaagccatgcgtgtttgggctgtttagttcagaagcaatgccaagatrtcactgccgcctcaaagtggaatgagcaaggccaggcgcagtggttcacacctgtaatcccagcactttgggaggccaagacgggtggatcacctgaggt

SEQ ID NO: 415193 - DNA, 201 bp, Homo sapiens
caaccaaatgccagctgattcgacttcactccatgtagaaagctcgagaattttgtcagggaattcaaccttgagttgcccgtggtccagcactactaaargttgatttgaggcaacaaatcctcaccagtgtcaagggcatgtcaattacccattcctttgcagtattccaggtgaaagttacataaagtgcaggctgag

SEQ ID NO: 415194 - DNA, 201 bp, Homo sapiens
caccactgcactccagcctaggcgacaagggtgaaagtctgtctcaaagaaaaaaaaaaaaaaacagactagcgattcttctttcctattctctgacttcrcctctaaactctagtacagaagccatgcgtgtttgggctgtttagttcagaagcaatgccaagatgtcactgccgcctcaaagtggaatgagcaaggcca

SEQ ID NO: 415195 - DNA, 201 bp, Homo sapiens
acacagtgaaaccccgtctctactaaaaatacaaaaaatagctaggcgttgtggtgggcacctataatcccagctacttgggaggctgaggcaggagaatygcttgaacctggaaggcagaggttgcagtgagccgagatcacaccactgcactccagcctaggcgacaagggtgaaagtctgtctcaaagaaaaaaaaaa

SEQ ID NO: 415196 - DNA, 201 bp, Homo sapiens
aatcccagcactttgggaggccgaggcaggtgtcgagatcagcctggccaacacagtgaaaccccgtctctactaaaaatacaaaaaatagctaggcgttrtggtgggcacctataatcccagctacttgggaggctgaggcaggagaatcgcttgaacctggaaggcagaggttgcagtgagccgagatcacaccactgc

SEQ ID NO: 415197 - DNA, 201 bp, Homo sapiens
catccaaaggagggcagtcagaggtgacaggcaagacctgcaaccacagtctggtcaccctccctcactgggattatcccaaccaaatgccagctgattckacttcactccatgtagaaagctcgagaattttgtcagggaattcaaccttgagttgcccgtggtccagcactactaaaggttgatttgaggcaacaaatc

SEQ ID NO: 415198 - DNA, 201 bp, Homo sapiens
tgagtggcaggatttaggcacagccgatctctcaatcatgacctcggtgctccactgtttaccctccttggaaagcattaagaatactgattcttggccgrgctcggtggctcacacctgtaatcccagcactttgggaggccgaggcaggtgtcgagatcagcctggccaacacagtgaaaccccgtctctactaaaaat

SEQ ID NO: 415199 - DNA, 201 bp, Homo sapiens
gaggcggaggaggaaagagcaagccgtgaagttcccccaaggatgcacctgcaagcaggagcttggcctgtggagactacagactcacgaagatctcaacrttcagtccccacaagcagctaagtgtctggatggtggcactcagcgtgtggatgcaggtgctaggttctacccagctcgaccccggaatcacacagccag

SEQ ID NO: 415200 - DNA, 201 bp, Homo sapiens
ccagagactgcgtggcgccctcaacattcccacccggcttgctgggatcagagcagcagctgcttggctgtgagctgctcttctcctctgtgctggaactstctggagagacgggggtcaggcggcttcttttccctccgtgctccacatcgatatcaacttcaatgcctagaggcggaggaggaaagagcaagccgtgaa

SEQ ID NO: 415201 - DNA, 201 bp, Homo sapiens
tcagccccccaaccaaaaggccttggcacttcacatgaaagctgccgcttaccctacacacactgccaccgggaggcagctgttgactcgttcgttccccyttgggccctgctctgggaacagtcccttctaggcagttaacctgtgagtcatccagcttatagttcctcataaagaaagaaactagccctaacttccaca

SEQ ID NO: 415202 - DNA, 201 bp, Homo sapiens
gtgatggtgcatgcctgtaatcccagctactgggaaaggctgaggcaggagaatcgcttgaacccgggaggcagaggttgtagtgagccaagatcacaccrttgcactccagcctggacaacaagagcaaaagtctgtctcaaaaaaaaaaaaaaaaaaaaagataagaaaaaaaaaaggttgaaacaaacagaaaagttg

SEQ ID NO: 415203 - DNA, 201 bp, Homo sapiens
cggaggtgcaggccacagatcactaggctggccgtggtcccaggtggcgggaggggcacaggcttgcctcagggcgcccctcggactccaaggcgatcttyctcatctgctccgccagagactgcgtggcgccctcaacattcccacccggcttgctgggatcagagcagcagctgcttggctgtgagctgctcttctcct

SEQ ID NO: 415204 - DNA, 201 bp, Homo sapiens
tccgatgtcatagttcttggtctgcaggagcctggtgagccagccgccttcatcagagaagcccatggacagcatctgggagagggactcaatcagccgcrggtcagcctctgccgaaacagtaaggaagccatgaggagtggtgctgagccctgtgagtgacccgaaacacataccctgctgccttggccagccaggacc

SEQ ID NO: 415205 - DNA, 201 bp, Homo sapiens
ggcttgcctcagggcgcccctcggactccaaggcgatctttctcatctgctccgccagagactgcgtggcgccctcaacattcccacccggcttgctgggrtcagagcagcagctgcttggctgtgagctgctcttctcctctgtgctggaactctctggagagacgggggtcaggcggcttcttttccctccgtgctcca

SEQ ID NO: 415206 - DNA, 201 bp, Homo sapiens
tgctggaactctctggagagacgggggtcaggcggcttcttttccctccgtgctccacatcgatatcaacttcaatgcctagaggcggaggaggaaagagyaagccgtgaagttcccccaaggatgcacctgcaagcaggagcttggcctgtggagactacagactcacgaagatctcaacgttcagtccccacaagcagc

SEQ ID NO: 415207 - DNA, 201 bp, Homo sapiens
ccagaagctttgatttttacaaagataagataaagatatctttaatgccttggatacctgtcacagtcctgtcaccttcttgccaaggtccctgtgttccygggtgacctttaacccggacatcttgtccagtgacccactcagcatccccctctccttcctcccactctgcaccccctggccctgcacagagagcatctc

SEQ ID NO: 415208 - DNA, 201 bp, Homo sapiens
ggcccctggtcctggaggcacagaatcctcgacccacacgactatgtgacctctttataactggggaagacttcgatgatgatgtgtgatctgggactggyaggttattaatcgagatacacttgttaggagggacagggttcccctaaggcacttttaaagatactctgtaagaaccattaacaataaacttactgtcaa

SEQ ID NO: 415209 - DNA, 201 bp, Homo sapiens
tcacactcggatcctccgatggaccagaagctttgatttttacaaagataagataaagatatctttaatgccttggatacctgtcacagtcctgtcacctycttgccaaggtccctgtgttcccgggtgacctttaacccggacatcttgtccagtgacccactcagcatccccctctccttcctcccactctgcaccccc

SEQ ID NO: 415210 - DNA, 201 bp, Homo sapiens
gaacctggaaggcagaggttgcagtgagccgagatcacaccactgcactccagcctaggcgacaagggtgaaagtctgtctcaaagaaaaaaaaaaaaaaacagactagcgattcttctttcctattctctgacttcacctctaaactctagtacagaagccatgcgtgtttgggctgtttagttcagaagcaatgccaag

SEQ ID NO: 415211 - DNA, 201 bp, Homo sapiens
tcagcaggttgccaccctccctccatgtccatcttccaaaatctgatcacatctttgtcttttcctctattactttctttgtctatggtgttttcttttttgtgtaagccctttcctgttatttcaatagagtttaaggggggagcagaggtaaaagcaggcttaactacaagtacctccatctgtaatatttaaattatt

SEQ ID NO: 415212 - DNA, 201 bp, Homo sapiens
acgaagatctcaacgttcagtccccacaagcagctaagtgtctggatggtggcactcagcgtgtggatgcaggtgctaggttctacccagctcgaccccgsaatcacacagccagtatgggaccagacgatacaaacccatgagtcagaggcttctccccatatcccagctacaaatctctgtggcttctggaaacattct

SEQ ID NO: 415213 - DNA, 201 bp, Homo sapiens
ccctgccctaaggcagagaagacacacagcggcggcccacagcaggttgtgcacacggaccttggtttacacacggctgccatgtgacaatgaggagtttstgtcagctgtccccaccccccacccccccactgctgcctgccacaccatccacttcaacggtggcttctgcctggctcctacagggatcttggctatgac

SEQ ID NO: 415214 - DNA, 201 bp, Homo sapiens
ttgaacccaggaggtggaaactgcagtgagctgagatcacgccgctgcactccagcctgggcgacagcgagactctgactcgggggtggggaaagaaaaagaaaaaaaaaaatatctaggcacagtggcacatgcctgtagtcccagctactggggaggctgaagcagaaggatcacttgagcccacgagatgaagacaac

SEQ ID NO: 415215 - DNA, 201 bp, Homo sapiens
ctaaggcagagaagacacacagcggcggcccacagcaggttgtgcacacggaccttggtttacacacggctgccatgtgacaatgaggagtttctgtcagstgtccccaccccccacccccccactgctgcctgccacaccatccacttcaacggtggcttctgcctggctcctacagggatcttggctatgacccccccc

SEQ ID NO: 415216 - DNA, 201 bp, Homo sapiens
aatcgcttgaacctgggaggcggaggttgcagtgagccaagttggcgccactgcactccagcctggtgacagagcaagactccatctcaaaaaaaaaaaaagaacattcaatgtttcagctaggacctctatctaaatgttctttgctgggtcaagtagcagactatttctttgtatcgctttttgttttcctaccactga

SEQ ID NO: 415217 - DNA, 201 bp, Homo sapiens
cccaccccccacccccccactgctgcctgccacaccatccacttcaacggtggcttctgcctggctcctacagggatcttggctatgaccccccccccccyctcagaccagcactccctgaggcggcacttgagtgtgagtagtagggacacacccagtgctgccccctctctgtgtcacacctgccttaattcctggtct

SEQ ID NO: 415218 - DNA, 201 bp, Homo sapiens
ccactaccctttccaagacgcaattttttgttaaaagaacattcagtaggccgagcgcagtggctcacgcctgtaatcccagcactttgggaggccgaggygggcggatcacgagatcaggagatcgagactaccctggctaatatggtgaaaccccgtctctactaaaaatacaaaaaatcagctgggcgtggtggcaat

SEQ ID NO: 415219 - DNA, 201 bp, Homo sapiens
atctgctgaccttccctccactattgtcctatgaccctgccaaatccccctctgcgagaaacacccaagaatgatcaataaaaataaataaataaataaayaaaaataagaactactcttggcccataggccatagctcgccatcccctgccctaaggcagagaagacacacagcggcggcccacagcaggttgtgcacac

SEQ ID NO: 415220 - DNA, 201 bp, Homo sapiens
aagagtcatcaccactccctaatctcaagtacccagggacacaaacgctgcggaaggccgcagggtcctctgcctaggaaaaccagagacctttgttcacwtgtttatctgctgaccttccctccactattgtcctatgaccctgccaaatccccctctgcgagaaacacccaagaatgatcaataaaaataaataaataa

SEQ ID NO: 415221 - DNA, 201 bp, Homo sapiens
attctcattaagagtcatcaccactccctaatctcaagtacccagggacacaaacgctgcggaaggccgcagggtcctctgcctaggaaaaccagagaccyttgttcacttgtttatctgctgaccttccctccactattgtcctatgaccctgccaaatccccctctgcgagaaacacccaagaatgatcaataaaaata

SEQ ID NO: 415222 - DNA, 201 bp, Homo sapiens
actcagggttcaatggattaagggcggtgcaagatgtgctttgttaaacagatgcttgaaggcagcattctcattaagagtcatcaccactccctaatctyaagtacccagggacacaaacgctgcggaaggccgcagggtcctctgcctaggaaaaccagagacctttgttcacttgtttatctgctgaccttccctcca

SEQ ID NO: 415223 - DNA, 201 bp, Homo sapiens
ctgtgcgagaagccctgggggaggaattagcagagcggcaggcagtgagcgggtcaaggttcctgccaccctgagcccaccccaggcctgcacagagggcstgctcacctcagacaggtgcccgaaggggctggggaatgcgagcttggtgtgcccccggtgcaagccctttccctcgcagacgctacacaagtcgtagtc

SEQ ID NO: 415224 - DNA, 201 bp, Homo sapiens
ccggagccagcggctgtgcgagaagccctgggggaggaattagcagagcggcaggcagtgagcgggtcaaggttcctgccaccctgagcccaccccaggcstgcacagagggcctgctcacctcagacaggtgcccgaaggggctggggaatgcgagcttggtgtgcccccggtgcaagccctttccctcgcagacgctac

SEQ ID NO: 415225 - DNA, 201 bp, Homo sapiens
ctagctgacactccctagaggttttcaaccctccccccttgttcctgtcccccgatcactcccacctcttgcctttcctggtacctgaacagatggtcttscttctcaccaggatgccctgttctggcacagagatttctgaagcttccctcagcaggttgccaccctccctccatgtccatcttccaaaatctgatcaca

SEQ ID NO: 415226 - DNA, 201 bp, Homo sapiens
gccgtggtcccaggtggcgggaggggcacaggcttgcctcagggcgcccctcggactccaaggcgatctttctcatctgctccgccagagactgcgtggcrccctcaacattcccacccggcttgctgggatcagagcagcagctgcttggctgtgagctgctcttctcctctgtgctggaactctctggagagacggggg

SEQ ID NO: 415227 - DNA, 201 bp, Homo sapiens
ctttctttatcctcagggttctgacacttgacaatgataagctttgctgtggggtctttctcagtcattgtcagggccgctttcaatctagaagataatgkcctcattgccaagaaactatcttgcatttttgtttgttttttgttttgttttgttttgttttgtttgagacaaggtctgtttctgtctcccaggatggag

SEQ ID NO: 415228 - DNA, 201 bp, Homo sapiens
aagcaggagccttggggaggggggaatcctgagcagatcaaagcttgatctcagtatctgacccctggatccaggctggcctaatgctgggttataaaacsgcttaagccagttgattgtggttttcgtcaattgtatccaagagtagtgacccatgacgtataccccatgcctgctccaggttttcttttcttttttttt

SEQ ID NO: 415229 - DNA, 201 bp, Homo sapiens
gaggtgctgaggatgaggcggaggtgcaggccacagatcactaggctggccgtggtcccaggtggcgggaggggcacaggcttgcctcagggcgcccctcrgactccaaggcgatctttctcatctgctccgccagagactgcgtggcgccctcaacattcccacccggcttgctgggatcagagcagcagctgcttggct

SEQ ID NO: 415230 - DNA, 201 bp, Homo sapiens
agaggtgctgaggatgaggcggaggtgcaggccacagatcactaggctggccgtggtcccaggtggcgggaggggcacaggcttgcctcagggcgcccctyggactccaaggcgatctttctcatctgctccgccagagactgcgtggcgccctcaacattcccacccggcttgctgggatcagagcagcagctgcttggc

SEQ ID NO: 415231 - DNA, 201 bp, Homo sapiens
gacatcactgcagcagcagcagctccctcgggtttgtaagtggggctgcagaggtgctgaggatgaggcggaggtgcaggccacagatcactaggctggcygtggtcccaggtggcgggaggggcacaggcttgcctcagggcgcccctcggactccaaggcgatctttctcatctgctccgccagagactgcgtggcgcc

SEQ ID NO: 415232 - DNA, 201 bp, Homo sapiens
cagttatccgactccatctgttcctggaacaaaactcaccatgagcacacaggagacacgcgcaacaggccaagcctgaccgtggccctggctcctggcaracagtcggggagcatgcatgcacacgtgcagttaaggctgcaggggtctagggggaacagtggccactcacaaagaccaagtaactacaaagttctagca

SEQ ID NO: 415233 - DNA, 201 bp, Homo sapiens
cacaggcatagaagggactaagttgctgttaaccgacggaagcagaattgtgaacccagaagggccattccctaggacatcttgacctcagtgatgtacawtctccaaagactgtcctgaatctatctacttctcctaactccattccctacccctctgaccctccattccagactttctcctggatggttatgtcaggga

SEQ ID NO: 415234 - DNA, 201 bp, Homo sapiens
gtgcatgcccagggaaggctcggcacctgagccgcgagacccactatggaccagcctctcatttcctcatctttcaaatggggctgaagtggaaggatttsggctgccctcccaggcgatgccccgtgggtgtgcgagttgtttagctgcttttggggctgtaagctggggggtcagggcaggacagagactgcagggggg

SEQ ID NO: 415235 - DNA, 201 bp, Homo sapiens
ctctcctgagcgtcctaaacatttttcatttagaaaaactttcttcatggaggggtgggcgcggtggctcacgcctgtaatcccagcactttgggaggccraggcgggcggatcatgaagtcaggagatcgagaccatcctggctaacacggtgaaaccccgtctctactaaaaatacaaaaaatcagccgggcgtggtgg

SEQ ID NO: 415236 - DNA, 201 bp, Homo sapiens; identical to SEQ ID NO: 104229

SEQ ID NO: 415237 - DNA, 201 bp, Homo sapiens; identical to SEQ ID NO: 104231

SEQ ID NO: 415238 - DNA, 201 bp, Homo sapiens
actaagaaaaattcttatcctgttgatctgtgaccttacccccaaccccgtgctctctgaaacatgtgctgtgtccactcagggttcaatggattaagggyggtgcaagatgtgctttgttaaacagatgcttgaaggcagcattctcattaagagtcatcaccactccctaatctcaagtacccagggacacaaacgctg

SEQ ID NO: 415239 - DNA, 201 bp, Homo sapiens
ccagcaggttacagccacatcctctaaatgggcgcgatttgtcctgccacctagaaaaagttcacatgtggacagtgagcagccaaggtctcttcagaggraccccaggccagctggtccagcacaggctaagcaagggacccccagagcacaggcctcaagagaaggcctcagcaggcccactgccgctgtccagcttcc

SEQ ID NO: 415240 - DNA, 201 bp, Homo sapiens
tcattttgttctgtactaagaaaaattcttatcctgttgatctgtgaccttacccccaaccccgtgctctctgaaacatgtgctgtgtccactcagggttmaatggattaagggcggtgcaagatgtgctttgttaaacagatgcttgaaggcagcattctcattaagagtcatcaccactccctaatctcaagtacccag

SEQ ID NO: 415241 - DNA, 201 bp, Homo sapiens
gtgaggagcgtctctgcccggccacccatcgtctgagatgtggggagcgcctctgccccgccgccctgtctgggatgtgaggagcacctctgcctggccgygaccccatccgggaggtgaggagcgtctctgcccggccgccccgtctgagaagtgaggagaccctccgcccggcagccaccccgtccgggatgtgagggg

SEQ ID NO: 415242 - DNA, 201 bp, Homo sapiens
cctgccttagcctcccaaagtgccgagattgcagcctctgcccggccgccaccccgtctgggaagtgaggagcgtctctgcctggccgcccatcgtctggratgtgaggagcccctctgcctggctgcccagtctggaaagtgaggagcgtctctgcccggccacccatcgtctgagatgtggggagcgcctctgccccgc

SEQ ID NO: 415243 - DNA, 201 bp, Homo sapiens
tggcaggcaggagctgtaggacacttctctgggggcattcaacctccctcagcagggactccccacctcctgcctggccagggaactgactgctgggcccwttgctcattcgggatgcccagtttcaggctggtgcctcaccctggcctgtctctagtatcccatgctgaagcttccctgggtcaggtgctcctggaatta

SEQ ID NO: 415244 - DNA, 201 bp, Homo sapiens
cccaggctggagtgcagtggcgtgatctcggctcgctacaacctccacctcccagccgcctgccttagcctcccaaagtgccgagattgcagcctctgccyggccgccaccccgtctgggaagtgaggagcgtctctgcctggccgcccatcgtctgggatgtgaggagcccctctgcctggctgcccagtctggaaagtg

SEQ ID NO: 415245 - DNA, 201 bp, Homo sapiens
ccgggattgcagacggagtctggttcactcagtgctcaatggtgcccaggctggagtgcagtggcgtgatctcggctcgctacaacctccacctcccagcygcctgccttagcctcccaaagtgccgagattgcagcctctgcccggccgccaccccgtctgggaagtgaggagcgtctctgcctggccgcccatcgtctg

SEQ ID NO: 415246 - DNA, 201 bp, Homo sapiens
ttgcctcagcctgccgagtgcctgcgattgcaggtgcgcgccgccacgactgactggttttcgtgtttttttggtggagacggggtttcgctgtgttggcygggctggtctccagctcctaaccacgagtgatccgccagcctcggcctcccgaggtgccgggattgcagacggagtctggttcactcagtgctcaatggt

SEQ ID NO: 415247 - DNA, 201 bp, Homo sapiens
ctggtcagggatggacatgtgacccacgctggcggacgaaatgcacactggggtcatctggaagcaggagccttggggaggggggaatcctgagcagatcmaagcttgatctcagtatctgacccctggatccaggctggcctaatgctgggttataaaacggcttaagccagttgattgtggttttcgtcaattgtatcc

SEQ ID NO: 415248 - DNA, 201 bp, Homo sapiens
ccctccctccgtcacagggtggccggagacccgggggcactgctggggtaccccaaagcatagggccagcctgagtgcgcaaggtcctgaaaagacggggrggcggcgacaaggagtagggaggggggctggaggaagacggcaaagtgaccccggaagggtccaggcgccccaagcccatcgaagacgggaggctctcag

SEQ ID NO: 415249 - DNA, 201 bp, Homo sapiens
cccgtcccgcgcggctgtagccggcgggaggggctgagaggcgggtcgcgctgggacctaaggcgccgccccctcgccagcctctccctccctccgtcacmgggtggccggagacccgggggcactgctggggtaccccaaagcatagggccagcctgagtgcgcaaggtcctgaaaagacggggaggcggcgacaaggag

SEQ ID NO: 415250 - DNA, 201 bp, Homo sapiens
cttgttaggagggacagggttcccctaaggcacttttaaagatactctgtaagaaccattaacaataaacttactgtcaatcatttctctctatgcaaacrtcattggttaaagtgctgatgccatttaattagattgtttacaaatttaacaggatggctacaaagagatcttattttaaaagcagctgatggtttggaa

SEQ ID NO: 415251 - DNA, 201 bp, Homo sapiens
acagggttcccctaaggcacttttaaagatactctgtaagaaccattaacaataaacttactgtcaatcatttctctctatgcaaacgtcattggttaaartgctgatgccatttaattagattgtttacaaatttaacaggatggctacaaagagatcttattttaaaagcagctgatggtttggaaatgagagaactac

SEQ ID NO: 415252 - DNA, 201 bp, Homo sapiens
cttttaaagatactctgtaagaaccattaacaataaacttactgtcaatcatttctctctatgcaaacgtcattggttaaagtgctgatgccatttaattrgattgtttacaaatttaacaggatggctacaaagagatcttattttaaaagcagctgatggtttggaaatgagagaactacagtggtgaagagaccagga

SEQ ID NO: 415253 - DNA, 201 bp, Homo sapiens
tctagacctggtttaggcagacaggggagtcctagaccttctcatccattcatcttttgttcatcatcttagagtagtagaacatcagggtaggaaagggrgggggcccatgacattccttaatccactccccttgttttcagggaagttagattgctctgtcgtttgaccccagcctagaatggcttctgtagagatata

SEQ ID NO: 415254 - DNA, 201 bp, Homo sapiens
cactgtcccccatcatcgtctgtcccccctggctgggcgcctgtgaccggtgacccctctaccacccaccccgcctccctccggcccccgctccgacacckggcttgctccgaccccccctgccccccgacagcagcacagcagccggagagccaagagtgtagaggacgacgctgagggccacctcatctaccacgtcgg

SEQ ID NO: 415255 - DNA, 201 bp, Homo sapiens
agatctatatcttagatcctgaacggggatacactgtggcagtctccatcggtcgtcatacactttgctctgtagtgaactgtgtcctagacctgaaggtyttcatggagctgtgtttgaagaaaataaggatagaacacttgaactggctgggtgcggtggctcacgcctgtaatcccagcactttgggaggccgaggca

SEQ ID NO: 415256 - DNA, 201 bp, Homo sapiens
ccactgtcccccatcatcgtctgtcccccctggctgggcgcctgtgaccggtgacccctctaccacccaccccgcctccctccggcccccgctccgacacytggcttgctccgaccccccctgccccccgacagcagcacagcagccggagagccaagagtgtagaggacgacgctgagggccacctcatctaccacgtcg

SEQ ID NO: 415257 - DNA, 201 bp, Homo sapiens
ctctactaaaaatataaaaattagccaggagtggtggtgcgtgcctgtaatcccagctacacaggaggctgaggcaggagagttgcttgaacctgggaagyggaggttgcagtgagccgagattgtgccactgcactccagcctggccacacagcgagactctgtctcaagaataaaataagaacacttgaactgaggggt

SEQ ID NO: 415258 - DNA, 201 bp, Homo sapiens
ctcgggataaatagtgcccaccgtccagaagtcacttccttcttagggtggtttgccccctggaatgctcttcacaagcagagggttaggaaaggaggggwggaaagctgaaagaagacatctttggtcaacagaggaaacataagagggagtggttttgtggagggaaggaggttagacagcctaaccttgagacaacca

SEQ ID NO: 415259 - DNA, 201 bp, Homo sapiens
catgttacattttttcagaaaaacccatttgctacatgttacattttttcagaaaaacccatttgctacatgttacatgttttcagaataactatatatcyggcacttgagtgtagtcttcagatgcttacagatgtgcacgctgttctataatcatttcttaatccttttgctcccctacttctaaaagtattatgctgg

SEQ ID NO: 415260 - DNA, 201 bp, Homo sapiens
aaatcgttagcaccttaggagaggggaccttcggccgagttgtacaatgtgttgaccatcgcaggtaactgtcagtccctccctactatgtggggctaaasagatggttggggttatatggggcttttttgctaattaacctgaggtagaatttcttagtccccctacagccctgttcattttgagacattcttgagaacc

SEQ ID NO: 415261 - DNA, 201 bp, Homo sapiens
aacactatcggagccgaaagcataagcgacgaagaagtcgctcctggtcaagtagtagtgaccggacacgacggcgtcggcgagaggacagctaccatgtycgttctcgaaggtgaggcctcaggaagagatactcaaacacagggtcactcgctcattcctttgttcaacaaatacttattggttatatgctaaaaccat

SEQ ID NO: 415262 - DNA, 201 bp, Homo sapiens
gtcactcgctcattcctttgttcaacaaatacttattggttatatgctaaaaccattgccttaagtagctggctgaaggtaatgtcgggatagataaccamagaagccatttgggctgcagtgttaagtgttagaatacataatgaggaactgaggacgtacccagtgcgtttggttggagtggggcaggatgtgtaattc

SEQ ID NO: 415263 - DNA, 201 bp, Homo sapiens
tacgggtgtgagccacagtgcctggcccggacttcttttttgagatgtgtatttctgtgaggtaggaaagctcggctcctttgactaactggagataatgragatctcagacctaaagaagctctccctcctttgacccctttgctacatgttacatatttttagagaaactcctttgctacatgttacattttttcagaa

SEQ ID NO: 415264 - DNA, 201 bp, Homo sapiens
agcaaactttttttttttttacatcagttgagctacatatgtatcttacattagaaagagcagagcttcttagaccaggcattccatttagacgtagagcrgaaagcagccctagtgattctggacctgtctcctcactggctttgccctaggtaaccaggcctggggtcagctgataccagttagctctggccacctgca

SEQ ID NO: 415265 - DNA, 201 bp, Homo sapiens
gacttaaattgggagataacttgtacaggggacttcagataactttccagtagagtgaaagtttttaaggttcttggtttggactttatttatttatatatttatttatttatttatttatttatttatttatttatttatttatttgagacagagtctcactctgttgcccagactgatgtgcagtggcataatctcggc

SEQ ID NO: 415266 - DNA, 201 bp, Homo sapiens
acttaaattgggagataacttgtacaggggacttcagataactttccagtagagtgaaagtttttaaggttcttggtttggactttatttatttatatatttatttatttatttatttatttatttatttatttatttatttatttgagacagagtctcactctgttgcccagactgatgtgcagtggcataatctcggct

SEQ ID NO: 415267 - DNA, 201 bp, Homo sapiens
aagagcttacattttaatgaggaactaaagaagattcatgaagttgacaaggatatacaagtagaaagaactttcaaagattatggagtaattgtgctagwgggaaggtaggttgagctataatatcagaaacgttggtcctggtgtggtcgtggttaggtagccttcaaattggttgcaagcagagccttggttctccaa

SEQ ID NO: 415268 - DNA, 201 bp, Homo sapiens
ctttttcctgccctcctccaccagcggtatctgacctcagaggcagaggaacaccaccagctcttcgatctgattgaaagcatgctagagtatgaaccagytaagcggctgaccttgggtgaagcccttcagcatcctttcttcgcccgccttcgggctgagccgcccaacaagttgtgggactccagtcgggatatcagt

SEQ ID NO: 415269 - DNA, 201 bp, Homo sapiens
gaggcaggagaatcgcttgaaccctgcaggcggaggttatggtgagccgagattgcgccattgcactccagcctgggcaacaagagcaaaactccgtttcaaaaaaaaaaaaaaaaacacaagaaacagttgttatctacgtcttaagcacaagagtggaggggccagatgggatgctgactgtattttgtggcctactac

SEQ ID NO: 415270 - DNA, 201 bp, Homo sapiens
tttgtggagggaaggaggttagacagcctaaccttgagacaaccagagatcaaagcaatgtcctggattctttaggtcagacagaaaagaataaactaccyttgaagagcttacattttaatgaggaactaaagaagattcatgaagttgacaaggatatacaagtagaaagaactttcaaagattatggagtaattgtgc

SEQ ID NO: 415271 - DNA, 201 bp, Homo sapiens
gtgtaaatatgaaagaacttgtacctatcacttcaacccctgccttgtacataatactattccatccacacagtttccaccctcacctgccccctcatacrgagttggatgggggccgagtgaggtaaccaggtggcatctaccccatgttttataaggaattttgtacagtctttgtgaaataaaataacgtgcttcatt

SEQ ID NO: 415272 - DNA, 201 bp, Homo sapiens
ctgaaaactcgaaactttcctatttccgctttcccttgccttccagatgccgcatcctcgaaggtaccactcctcagagcgaggcagccgggggagttacmgtgaacactatcggagccgaaagcataagcgacgaagaagtcgctcctggtcaagtagtagtgaccggacacgacggcgtcggcgagaggacagctacca

SEQ ID NO: 415273 - DNA, 201 bp, Homo sapiens
tggaatgctcttcacaagcagagggttaggaaaggaggggaggaaagctgaaagaagacatctttggtcaacagaggaaacataagagggagtggttttgyggagggaaggaggttagacagcctaaccttgagacaaccagagatcaaagcaatgtcctggattctttaggtcagacagaaaagaataaactacctttga

SEQ ID NO: 415274 - DNA, 201 bp, Homo sapiens
atcatcgtctgtcccccctggctgggcgcctgtgaccggtgacccctctaccacccaccccgcctccctccggcccccgctccgacacctggcttgctccraccccccctgccccccgacagcagcacagcagccggagagccaagagtgtagaggacgacgctgagggccacctcatctaccacgtcggggactggctac

SEQ ID NO: 415275 - DNA, 201 bp, Homo sapiens
agtactagctggcatggttttacacaagtatgtggaatcaacagctatgaagtacctccttgttggatggctgatgggcagatgggagctcatcagacaaycccccttcccccatctctcttctcagcctctgtgtccagatgtttgactggtttgactaccatggccacatgtgtatctcctttgagcttctgggcctta

SEQ ID NO: 415276 - DNA, 201 bp, Homo sapiens
gaacaggaggcagaggttgcagtgagccaagatcgcgccactgcactccagcctgggtgacagagtgagacgccatctcaaaaacaaaaaagaaaaaaacmtggcagatagtaccattcttcttgggtctggtagaggctactccttagctgaactgaattttggtgttagtactagctggcatggttttacacaagtatg

SEQ ID NO: 415277 - DNA, 201 bp, Homo sapiens
aagacttaaattgggagataacttgtacaggggacttcagataactttccagtagagtgaaagtttttaaggttcttggtttggactttatttatttatatatttatttatttatttatttatttatttatttatttatttatttatttgagacagagtctcactctgttgcccagactgatgtgcagtggcataatctcg

SEQ ID NO: 415278 - DNA, 201 bp, Homo sapiens
agacttaaattgggagataacttgtacaggggacttcagataactttccagtagagtgaaagtttttaaggttcttggtttggactttatttatttatatatttatttatttatttatttatttatttatttatttatttatttatttgagacagagtctcactctgttgcccagactgatgtgcagtggcataatctcgg

SEQ ID NO: 415279 - DNA, 201 bp, Homo sapiens
atgtggagaagtacaaggaagcagctcgacttgagatcaacgtgctagagaaaatcaatgagaaagaccctgacaacaagaagtaagcaagcaaggaagtrtgtagggaggctgagagccccaacccctacacgggagagacttctagacctggtttaggcagacaggggagtcctagaccttctcatccattcatctttt

SEQ ID NO: 415280 - DNA, 201 bp, Homo sapiens
gctagagaaaatcaatgagaaagaccctgacaacaagaagtaagcaagcaaggaagtatgtagggaggctgagagccccaacccctacacgggagagactyctagacctggtttaggcagacaggggagtcctagaccttctcatccattcatcttttgttcatcatcttagagtagtagaacatcagggtaggaaagggg

SEQ ID NO: 415281 - DNA, 201 bp, Homo sapiens
ccatcatcgtctgtcccccctggctgggcgcctgtgaccggtgacccctctaccacccaccccgcctccctccggcccccgctccgacacctggcttgctycgaccccccctgccccccgacagcagcacagcagccggagagccaagagtgtagaggacgacgctgagggccacctcatctaccacgtcggggactggct

SEQ ID NO: 415282 - DNA, 201 bp, Homo sapiens
tctgcccttggttactgggggcaggcagctgcaccactttgccttctgccgagccctttgttttctcccttttatttcgtcctcccacattttctccctgwctggctccaactgggtaaaactaaataggttgaaagggagagatctcttaagaagacttaaattgggagataacttgtacaggggacttcagataacttt

SEQ ID NO: 415283 - DNA, 201 bp, Homo sapiens
gtgctagagaaaatcaatgagaaagaccctgacaacaagaagtaagcaagcaaggaagtatgtagggaggctgagagccccaacccctacacgggagagayttctagacctggtttaggcagacaggggagtcctagaccttctcatccattcatcttttgttcatcatcttagagtagtagaacatcagggtaggaaagg

SEQ ID NO: 415284 - DNA, 201 bp, Homo sapiens
ggttctgcagatgccttttcagaggttttggtgacatggcagatgtgcttgttacctcacttctctggtcccttggtcctctcagtgactcaacaagtgtytgagaacagttttctagcattactctttgtcctcactaaggcaggaccttgtcacagggtatggtagggaatgtgatctgaacagatacacctcattggt

SEQ ID NO: 415285 - DNA, 201 bp, Homo sapiens
ccccatcatcgtctgtcccccctggctgggcgcctgtgaccggtgacccctctaccacccaccccgcctccctccggcccccgctccgacacctggcttgstccgaccccccctgccccccgacagcagcacagcagccggagagccaagagtgtagaggacgacgctgagggccacctcatctaccacgtcggggactgg

SEQ ID NO: 415286 - DNA, 201 bp, Homo sapiens
tgactttttctaagggcttgcttttggtggagggctttccctcgttgattagggtcaaaaaatctctctgcaggttgagctttatgaagattataatggargcatactttccaatatgccttacatccatcatctttctttcttacatagcttctattttgaccaagaaagtttaaatgatgttttgaacacctttcccat

SEQ ID NO: 415287 - DNA, 201 bp, Homo sapiens
gcttttggtggagggctttccctcgttgattagggtcaaaaaatctctctgcaggttgagctttatgaagattataatggaggcatactttccaatatgcyttacatccatcatctttctttcttacatagcttctattttgaccaagaaagtttaaatgatgttttgaacacctttcccatgaataatatttagggagtc

SEQ ID NO: 415288 - DNA, 201 bp, Homo sapiens
acctggggaggagataagaggaataggcctcaggaggggaaaaatgggacttcaactttatttgtaaacctctgtttcttttcttttctttttattttttwaattttatttatttatttatttattttgagatggagtctccctctgtcgcccaggctggagtgcagtggtgggatctcggctcactgcaacctccgcctc

SEQ ID NO: 415289 - DNA, 201 bp, Homo sapiens
aaagtagtttttttccaattctgtgaagaaagtcattggtagcttgatggggatggcattgaatctataaattaccttgggcagtatggccattttcacgwtattgattcttcctacccatgagcatggaatgttcttccatttgtttgtatcctcttttatctcattgagcagtggtttgtagttctccttgaagaggtc

SEQ ID NO: 415290 - DNA, 201 bp, Homo sapiens
aaataataagatattgtcttttatccataagagtcactgctgatgaagagtattagaaattaaatactctcatataaaggctgattgatacataatttggytatacctattaaaggtatttgtttcttactttaaccagcagttgcatttacaggactctattctagtgaaatatttatgtgtacataaggatgtccaagg

SEQ ID NO: 415291 - DNA, 201 bp, Homo sapiens
tcgcttgagcccgggaggtggaggttgctcaggaggtggaggttgcagtgagccaagatcacaccactgcactccagcctgggtgacaaagcaagactctrtctcaaaaaaaaaaaaaaaaaaagacaatctaacaaagggacagtatgcttgcaataaagcattgattaatatgtactctaccgaaaatagtgccactag

SEQ ID NO: 415292 - DNA, 201 bp, Homo sapiens
acccgtctctactaaaaacacaaaaaattagccgggcatggtggcaggcacctgtaatcttagctactcgggagactgaggcaggagaattgcttgaaccygggaggcagaggttacagattgcagtgagctgagattgtgccactgcactccagcctgggcaacagagtgaaactctgtctcaaaaaaaaaaaaagaaaa

SEQ ID NO: 415293 - DNA, 201 bp, Homo sapiens
caccactgcactccagcctgggcaacagagcgagacaccatctcagatagattatagatagatagatagatagatagatagatagatagatagatagatarataaagatagatgatagatagatagatagatagatagatagatagatagatagatagatagataggccaggtgtggtggctcatgcctggaatcccagca

SEQ ID NO: 415294 - DNA, 201 bp, Homo sapiens
ccactgcactccagcctgggcaacagagcgagacaccatctcagatagattatagatagatagatagatagatagatagatagatagatagatagatagakaaagatagatgatagatagatagatagatagatagatagatagatagatagatagatagataggccaggtgtggtggctcatgcctggaatcccagcact

SEQ ID NO: 415295 - DNA, 201 bp, Homo sapiens
ttcctgtaacggcacattcctctttagcaccccaggaccagcctggggcactgggacatggcacctcacacacacggagggcttactctgtgccctttgargtcctttacatgtactaaagatttcagtcttcgccgccaccctagaaggaacttgacagatgaagagtgtgaggcacacagagcctaaataaccagtcca

SEQ ID NO: 415296 - DNA, 201 bp, Homo sapiens; identical to SEQ ID NO: 117559

SEQ ID NO: 415297 - DNA, 201 bp, Homo sapiens
ttcctctttagcaccccaggaccagcctggggcactgggacatggcacctcacacacacggagggcttactctgtgccctttgaggtcctttacatgtackaaagatttcagtcttcgccgccaccctagaaggaacttgacagatgaagagtgtgaggcacacagagcctaaataaccagtccaggtcacacagccagga

SEQ ID NO: 415298 - DNA, 201 bp, Homo sapiens
atgacataaaaggataactgagtaagagttcactgaaaggaaaattcaatagtataaagatgccaattcccaacccactcccaactcatttctaaacacakgcaattgcaattggaatcccagagttttccttggaactcaacaaacgaatcctaaaattcctatgggagaccaaaggatcaaaagagataaggggactaa

SEQ ID NO: 415299 - DNA, 201 bp, Homo sapiens
aaattttatgtttatcatgcccttcactttctttacagtttcaccacatttattttattctttaaacctcaggcatgacctacgttaataaaactaagagtttttttttttaaatcaagagaatactgccttaggttggtaaatcggacatctcagatgaaacataatggtctagaaaaatgaccagaattgacagaaaat

SEQ ID NO: 415300 - DNA, 201 bp, Homo sapiens
aaaataaacagcaaatatttaaatttttaaaaaattatataaaaatatttttatgtgctcagccccccaaaaaaaatacttaaaattacacaaaaagggtygggcatggtggctcatgcctgtaatcccagcactttgggaggccgaggcaggaggataacctgaggtcaggagttcgagttcagcctggccaacatggtg

SEQ ID NO: 415301 - DNA, 201 bp, Homo sapiens
tgtgatcttattatcttgattgtggtgatgtgatcctgggtatatacatgtcaacacttaccaaactgtttgctttattttttattttttggagacagggycttgctctatcacccaggctagagtagaacaatcatagctcactgtaacctcaaactcctaggctcaagtgatcctcccaccttagcttcctgagtagct

SEQ ID NO: 415302 - DNA, 201 bp, Homo sapiens
aaataaaataaaataaattaaaaaaaataaaacatatgtatgtggccaggcgcggtggctcacgcctgtgatcccagcactttgggaagccgaggcaggcraatcacgaggtcaggagttcgagaccagcctggccaacatgatgaaactccgtctttactaaaaatacaaaaattagccaggcgtggtggcgggcgcctg

SEQ ID NO: 415303 - DNA, 201 bp, Homo sapiens
gcgattctcctgcctcagcatcccaagtagctggaattataggcatgcaccaacatgcccagctaattatttttgtatttttagtagagacggggtttcaycatgttggtcaggctggcctcaaactcctgacctcaggtgatccatccgcctcagcctcccaaagtgctgggattacaggcatgagccaccgcgcctgac

SEQ ID NO: 415304 - DNA, 201 bp, Homo sapiens
tcctgtgatcccagcactaagggtggctgagaagggaggatcacttgaggccaggaggttgggcctgcagtgagccaagactgcaccactgttctccagcmtgggggacagagcaagaccttgtttctcaaaaacaacaacaaggacaacaaccaaagggctgggtgggttcagacagcttccacacagctgaacacttgg

SEQ ID NO: 415305 - DNA, 201 bp, Homo sapiens; identical to SEQ ID NO: 117576

SEQ ID NO: 415306 - DNA, 201 bp, Homo sapiens
actgcactccagcctgggcaacagagcgagacaccatctcagatagattatagatagatagatagatagatagatagatagatagatagatagatagatawagatagatgatagatagatagatagatagatagatagatagatagatagatagatagataggccaggtgtggtggctcatgcctggaatcccagcacttt

SEQ ID NO: 415307 - DNA, 201 bp, Homo sapiens
ggagaatcgcttgaaccaggatggtggagcttgcagtgagccaagattgtgccactgcactccagcctgggcgacagagcgagactcgctctcaaaaaaawaaaaaataaataaataaaaataaatacatacatacataaaaatttaatttaaaaacaaggagacagtgacaaacagtaaagaggtatgtttaaaatataa

SEQ ID NO: 415308 - DNA, 201 bp, Homo sapiens
tggcgtaggagaatcgtttgaacccaggaggcggaggatgcagtgagccaagatcacgccattgcactccagcctgggcaacagggcgagactccatctcaaaaaaaaaaaaaaaaagacacctcttaaactcaaggagcttcagtttagtggagggagaaaagcgacacttagacactcatagaagaaacagaggcagcg

SEQ ID NO: 415309 - DNA, 201 bp, Homo sapiens
tcaagccactcgctgcacccataaggcccaaatcagccacagtggcaccagtttacccagctgtgcaggagaggggcaggaaagccagtgtgccagagggyggggacaggcaggtttctccagcaggagggcttctcagagcaatccaggagctgttagcccaatctgcccctccctcgtgatagctccggtgctggggaa

SEQ ID NO: 415310 - DNA, 201 bp, Homo sapiens
cttgaggccaggaggttgggcctgcagtgagccaagactgcaccactgttctccagcctgggggacagagcaagaccttgtttctcaaaaacaacaacaasgacaacaaccaaagggctgggtgggttcagacagcttccacacagctgaacacttggtggttcccggatggtagtgagtccagagagggcatgaaaggtc

SEQ ID NO: 415311 - DNA, 201 bp, Homo sapiens
tcaatggagtttaaaccctttgtctcgttaagtcgcaaaaaaaattattggactaaataaaccacgcagtgtcaagttcaaaaaagaatgatactgccttyacaaaaattgtaagagtgagaaaattatgacattgaaagagatctgatctaaccaacccctatcttgcctttaacctccaaattacccttaatcattcct

SEQ ID NO: 415312 - DNA, 201 bp, Homo sapiens
ggaatgagggattcgaatccacgcagtctggctcccgcatccacgctggcctttctttatataactgttcttatgccagtcactagtcagtttggcatagyatattacatagagtatatgactaaaatcattttgaactttataggagaaagagatagagtatgagaaatatcttaccctggaaattcattcattcaacac

SEQ ID NO: 415313 - DNA, 201 bp, Homo sapiens
gatcatgccactgcactccagtcctccagcctgggtgatagagtgagaccctgtctcaaaaaaaaaaaaaaaaaaatatatatatatatatatatatatayacacacacacacataaaatctatgcagaaaagatgacattaggaaaatctggtggattagtccgttctcatgctgttgataaagacatacctgagactgg

SEQ ID NO: 415314 - DNA, 201 bp, Homo sapiens
aaaacccgacttccaggtataacctccataaacactggtactacagagcaagtagatacagagaaaattgttcatgaggtactgtatacaatagtaaaaaraaattaggccaggtgcagtggctcatgcctgtaatcccagcactttgggaggacgaggtgggtagatcacctgaggtcaggagttcgagaccagcctggc

SEQ ID NO: 415315 - DNA, 201 bp, Homo sapiens
ccttttgaattatttgacatacagttcttcactcctgggtgaagaattctgggtgaaaaaactgatcacatttattgacacctctggaattatacttttgkactttgtattaagttaaatgaacattaacatatgaagaatttccaatattctggacatttataagattactcgccatgattatttgacaaataatgagac

SEQ ID NO: 415316 - DNA, 201 bp, Homo sapiens
ccaatgtttagtgggactgggcttctcatcagaggctttcccatgttcactgcactgaggtttctcacttgtgtgaattctttgatatataaggctggacrtagtacatttaatacctttataaaatgcttgtctaatgtgtgttttttcatgtctaataagatgatatgaactcttaaaggcttttggacatttgtcaca

SEQ ID NO: 415317 - DNA, 201 bp, Homo sapiens; identical to SEQ ID NO: 117583

SEQ ID NO: 415318 - DNA, 201 bp, Homo sapiens
tccaggactcgtcacctggtcccaacctgaagatcacatctggcttcccaactagatgccctgtttaggggacatgacataggactttgttattaatgctraggaattccagaacctaggcccacccctgcaggctgaaggtggcacggcctcggtgatggccccatgcacacagctatctgcccctcagtacagaacatt

SEQ ID NO: 415319 - DNA, 201 bp, Homo sapiens
gccccgcaaagtgctgggattacaggcgtgagctaccgtgcctggccaagattcctataatttgagtgtaacaatctggtaattttacaaaaagaattctrtattgattacaggtacaaatatatgtagcaaaagtataaaaacatagtttagaaggatactcacaaaattcatgatactgtttacctggggaggagataa

SEQ ID NO: 415320 - DNA, 201 bp, Homo sapiens
caggagttcctccttggccgcggctgtagctgagagaagggacaggaggtaggatgccacctcctccagaaggcaagccagccaccagcttcccagcccgmcagaactgaggcccaacgggagagtgcagcaatgtctggggaggggttctgacatttcagggatggggcatcccttctcctctgagcagtcgggcctggt

SEQ ID NO: 415321 - DNA, 201 bp, Homo sapiens
tccctttccctttgggctcccgcagcaggccccccagtcctgggtgcaggcttgtgacagctgctcagggatccaaacgtggcgcttgagctctctgcgaygtgttccacagttccctggaggcggacactgcgtgagggtcagtttttgcccctgcttccctgtggtgtctggctcccagcagcgtcagggagggtccgt

SEQ ID NO: 415322 - DNA, 201 bp, Homo sapiens
ccatgggacctgagtcaaaccgatccagggctgctgctgtccctcccggctgtgtggtgttgagtggcgtcctgagttaggcttctccctacttcatctcrtacccccatcaccagccctgcgcaggtgccaagtgatgcccacccagctgccccactttgcagattcggaaactgagcccagagatgggaaaggacttac

SEQ ID NO: 415323 - DNA, 201 bp, Homo sapiens
cccgggctgtgtggaaattcactgggcctgatggagctggatgcagccttggaaattctccctttccctttgggctcccgcagcaggccccccagtcctgkgtgcaggcttgtgacagctgctcagggatccaaacgtggcgcttgagctctctgcgatgtgttccacagttccctggaggcggacactgcgtgagggtca

SEQ ID NO: 415324 - DNA, 201 bp, Homo sapiens
gcaggccccccagtcctgggtgcaggcttgtgacagctgctcagggatccaaacgtggcgcttgagctctctgcgatgtgttccacagttccctggaggcrgacactgcgtgagggtcagtttttgcccctgcttccctgtggtgtctggctcccagcagcgtcagggagggtccgtggagtggctgagtttggatctagg

SEQ ID NO: 415325 - DNA, 201 bp, Homo sapiens
ctctacggagctgtgttgggggatgtgaggctgggggcgacacggtacttgtgattgtccctgggtgtgtctttgtgaatgggtgtgtaaggttttgtgtrtgctgggcgtggtggctcacgcctgtaatcccagcactttgggaggccgaggtgggtggatcacgaggtcaggagatccagaccattctggctaatggtg

SEQ ID NO: 415326 - DNA, 201 bp, Homo sapiens
gtgcagtggtgcgatctcagctcactggaacctccgcctcccaggttcaagcaattctcatgcctcagccttcaagtagatgggattacaggtgcctgccrccatgcccagctaatttttgtattcgtattagagactgggtttccccatgttggccaggctagtctcgaactcctgacattaagtgatccgcctgcctcg

SEQ ID NO: 415327 - DNA, 201 bp, Homo sapiens
ggggcaacgtggtcccaagcccactgcccactcgccggacgaggaccttctcggcgtgagtctggagcaggctggggacgcgttctcagatggatctcttkcctgaggccagagattcactgtgtctctggccatttttgggcctatgtcccggactgccaaataggcagacctggggctgggccgtgggctgagggtgag

SEQ ID NO: 415328 - DNA, 201 bp, Homo sapiens
cagaaaggattttgaatcagtaaggaaaacatagaggttggggcaaagaaatatttaggaagatggaaatattgtgatgtctggttctgctgctggaagtrggctgcagatttatttctgagctccctcgtgaccagatcaaagagggaaacactcttcaccatacgattctccaatcaaaacaaaccagttactagggga

SEQ ID NO: 415329 - DNA, 201 bp, Homo sapiens
attacaggcatgcgccaccacacccggttaatttttgtatttttagtagagaccaggtttcatcatgttgggcaggatggtcttgaacccctgacctcagrtgatctgcccatctcggcctctcaaagtgctgggattacaagtgtgagccatcgcgcccggcctgcaaacttttttgtaggtatttctggtaaacaaatc

SEQ ID NO: 415330 - DNA, 201 bp, Homo sapiens
agcaaatacgcatgttgattgcgagtgtgtggagacaaaggcagttcccaccacagttaggtcctggccattgtttcctcgcctgcgatgctccttgtacrtcctcaccctcctctcccgcctctgccttctgctgggtcaaaggtggccttttctctccagccttgaattgttccctgttggcttcccaagggcccatct

SEQ ID NO: 415331 - DNA, 201 bp, Homo sapiens
ggtgcctgctttggtggctgtgtgaccagaagggtggctggtgtcttggggaagggagctgtgtcccggtgtgagccctgactgctttatttatgcccccrtagtgtggaaggggagtatgtcccagtggaaggcgacgaggtcacctataaaatgtgctccatcccacccaagaatgagaagctgcaggccgtggaggtc

SEQ ID NO: 415332 - DNA, 201 bp, Homo sapiens
ctaagggggtggaagggagttgtttgagaatagcaaatacgcatgttgattgcgagtgtgtggagacaaaggcagttcccaccacagttaggtcctggccrttgtttcctcgcctgcgatgctccttgtacatcctcaccctcctctcccgcctctgccttctgctgggtcaaaggtggccttttctctccagccttgaat

SEQ ID NO: 415333 - DNA, 201 bp, Homo sapiens
ctttggaaagaggttcccggtggttggtcagatggtgcctgctttggtggctgtgtgaccagaagggtggctggtgtcttggggaagggagctgtgtcccrgtgtgagccctgactgctttatttatgcccccgtagtgtggaaggggagtatgtcccagtggaaggcgacgaggtcacctataaaatgtgctccatccca

SEQ ID NO: 415334 - DNA, 201 bp, Homo sapiens
ctcccccgcactgaggccattcactcctctctgctgggcctactggggagtgagtggcccttggccaggcctactctggccaccccagcttggcttcagcycagatgggccatgagaggctggataaagctcctgggtctcccagttggcactgcccccgcccctagtcacgtctgctccgtgcctcagtttcttccacta

SEQ ID NO: 415335 - DNA, 201 bp, Homo sapiens
ggggcaggtgtggggtgtggggtgttcccggccatcagcacagcctatgaccattgcaacaacctctcaccatctgaagagcattaaaagcatttaaaaargagaggtgcccactggtggctgagtggaggttccaaccccatcccagggagtggatcaagggtggtatttctccagctgctcagacacatgggctcaacc

SEQ ID NO: 415336 - DNA, 201 bp, Homo sapiens
atagtaaatcattagtttctggagggatgttcagtgatgttttagttcaactccctctttccaggagggaaaacaggcccgagaaaattggccagggtcayccaaagagtcctttcccccagcgtctttgtgagcggctcccagggttgagggttgtgcagtcctcagcctgtgtgactgtacatggcggtcctggccagg

SEQ ID NO: 415337 - DNA, 201 bp, Homo sapiens
ggccatggcttcattaccccagctgatggcggccccgacatcttcctgcacatctctgagtgagtcagcggcaggtctgggtggcctggctggggtgggcrcttccttggccctgtggaggtggggatggtgtgtgactctgatgggcgctgggtgtgaggacgaatggctgggcctgtgtgactctgcctgtggctggtg

SEQ ID NO: 415338 - DNA, 201 bp, Homo sapiens
ttgatttcataacagcgtggtgacccgggctgtgtggaaattcactgggcctgatggagctggatgcagccttggaaattctccctttccctttgggctcycgcagcaggccccccagtcctgggtgcaggcttgtgacagctgctcagggatccaaacgtggcgcttgagctctctgcgatgtgttccacagttccctgg

SEQ ID NO: 415339 - DNA, 201 bp, Homo sapiens
actgagcccagagatgggaaaggacttacccaagggcctctgactgctggactgtttctctttcccctgaacctcgagctgaggccacgttagagccgacmccttcatattcaatgttcagtgattattgtgtacagcgagtgtcctgctcttgaaaaattgtcaaaagcacagcagcagctagggaattcccgccctcca

SEQ ID NO: 415340 - DNA, 201 bp, Homo sapiens
gtgcggtgggatttttgggtgatgtaggttgaagactcctataaatgaggggactgggggggcaaactgaggttgaaggttgtgagagcttcatttctttscatgagcagctggaaacctggattttgaggaaaccccctgggatgtttaagatagttcaggccgggcatggtggttcatgcctgtaatcctagcactttg

SEQ ID NO: 415341 - DNA, 201 bp, Homo sapiens
tgcttccctgtggtgtctggctcccagcagcgtcagggagggtccgtggagtggctgagtttggatctaggtggttggcattaaaatctccctggctttgrgttttcttttttgagacagagtcttgctctgtagcccaggctggagtgcagtggtgcgatctcagctcactggaacctccgcctcccaggttcaagcaat

SEQ ID NO: 415342 - DNA, 201 bp, Homo sapiens
ttgtggtttggctttagtcatgatttcaaagtagaaatagctaggcattattttttgaaatatatgacctatatgtagtcaagaatccactgaacagaggsaagcaaaccttttggaaactggcttttgggcagacagtaaacgtccagtttgatgctggaagcatgaacagcttcatcaggtaggtactcctcaactctg

SEQ ID NO: 415343 - DNA, 201 bp, Homo sapiens
ttttgttttcagttcagcctgatggtgtgaaatcgggactattataattcccattttccagatgtggaaactgaggcccagagagattaagtaacttgtasaagaccacacagcaggcaaggggtaggattagaagtcagctatgcttcattagccgggcgtgatggcgggcacctgtaacccctgctacttgggaggctg

SEQ ID NO: 415344 - DNA, 201 bp, Homo sapiens
gagccgtcctggcgccgcgcgattagccgcatctgggggaggaggagccgccgggcgcgctgggcccgggtgtttgcgcccggatgggggtgggggtgccytaggcgctggagaaaaacttcacccgcgcccacaggccccctttccgcaggctgcgctggcggttcaggtttgcaggccggaagtgaaatgttctttttt

SEQ ID NO: 415345 - DNA, 201 bp, Homo sapiens
aaccagttactaggggagctggctggcccttgcatttagcatctgaagggggttttcctctgggggggtttcatcaaggggacatcaagatgccagtctcmtgtgagagggtgactcatgtcccctagaaagtaagggaaccttcctgggggtggtcacagggagaggcccctccaggaactagcttcatgcaccaaaggg

SEQ ID NO: 415346 - DNA, 201 bp, Homo sapiens
gaggcccctccaggaactagcttcatgcaccaaagggaccttcttgaaggctcactgggagtccaggcgtggtggctcacgcttgtaatcccagcactttyggaggctgaggcaggtggctcacttaaggtcaggagtttgagaccagcctggctaacatggtgaaaccctgactttgctaaaaatacaaaaattagctgg

SEQ ID NO: 415347 - DNA, 201 bp, Homo sapiens
accaaagggaccttcttgaaggctcactgggagtccaggcgtggtggctcacgcttgtaatcccagcactttcggaggctgaggcaggtggctcacttaasgtcaggagtttgagaccagcctggctaacatggtgaaaccctgactttgctaaaaatacaaaaattagctggctgtggtgcctatagtcccagatacttg

SEQ ID NO: 415348 - DNA, 201 bp, Homo sapiens
atgatggccttgtttctctctggctctctggcttggactggctgtctttactcttcagtcacaagcccaggctccctcccacatttcatgtcaccatgtgwgcacccacaggtggctgaactctttcagttccagcatcaaaagtcccagggaaggagctgattgggccagggcctccttgcctaggacagaggctggggg

SEQ ID NO: 415349 - DNA, 201 bp, Homo sapiens
tcctgtgcttgtgggagactttgcggggaggaggcagcagacactggagatgacattcttccacacgagacggggcttcagccgggcatggtccctctcamgtatctcctggaggaaggggtatggggggcaggtgtggggtgtggggtgttcccggccatcagcacagcctatgaccattgcaacaacctctcaccatct

SEQ ID NO: 415350 - DNA, 201 bp, Homo sapiens
ctgccttctgctgggtcaaaggtggccttttctctccagccttgaattgttccctgttggcttcccaagggcccatctgctggtacagtccacacttccamagccaagacccgagagggctttcactgccccaagcctctctcctgtgaccttgggattctgtcttggcagaatcctttgtcagcggctcttactctgtcc

SEQ ID NO: 415351 - DNA, 201 bp, Homo sapiens
cagaggctgggggcagtgtggcagctccctctggtggaggggcagttctttggaaagaggttcccggtggttggtcagatggtgcctgctttggtggctgwgtgaccagaagggtggctggtgtcttggggaagggagctgtgtcccggtgtgagccctgactgctttatttatgcccccgtagtgtggaaggggagtatg

SEQ ID NO: 415352 - DNA, 201 bp, Homo sapiens
ccctgttggcttcccaagggcccatctgctggtacagtccacacttccacagccaagacccgagagggctttcactgccccaagcctctctcctgtgaccytgggattctgtcttggcagaatcctttgtcagcggctcttactctgtccttcctgtttggccacagctctttcaatcaatgggtattctagaaccgcagg

SEQ ID NO: 415353 - DNA, 201 bp, Homo sapiens
ggctgctggacacccctcggagccgtgagcgctcaccatcccctctgcggggcaacgtggtcccaagcccactgcccactcgccggacgaggaccttctcrgcgtgagtctggagcaggctggggacgcgttctcagatggatctcttgcctgaggccagagattcactgtgtctctggccatttttgggcctatgtcccg

SEQ ID NO: 415354 - DNA, 201 bp, Homo sapiens
cacttccacagccaagacccgagagggctttcactgccccaagcctctctcctgtgaccttgggattctgtcttggcagaatcctttgtcagcggctcttrctctgtccttcctgtttggccacagctctttcaatcaatgggtattctagaaccgcaggatgtcagagctggaagggacgcgataccggtttacacaagg

SEQ ID NO: 415355 - DNA, 201 bp, Homo sapiens
atctgagcctcccccaccaccacagccccccacccatcaagcttcagtcgggctgctggacacccctcggagccgtgagcgctcaccatcccctctgcggrgcaacgtggtcccaagcccactgcccactcgccggacgaggaccttctcggcgtgagtctggagcaggctggggacgcgttctcagatggatctcttgcc

SEQ ID NO: 415356 - DNA, 201 bp, Homo sapiens
gttgtttgagaatagcaaatacgcatgttgattgcgagtgtgtggagacaaaggcagttcccaccacagttaggtcctggccattgtttcctcgcctgcgrtgctccttgtacatcctcaccctcctctcccgcctctgccttctgctgggtcaaaggtggccttttctctccagccttgaattgttccctgttggcttcc

SEQ ID NO: 415357 - DNA, 201 bp, Homo sapiens
ttctttggaaagaggttcccggtggttggtcagatggtgcctgctttggtggctgtgtgaccagaagggtggctggtgtcttggggaagggagctgtgtcycggtgtgagccctgactgctttatttatgcccccgtagtgtggaaggggagtatgtcccagtggaaggcgacgaggtcacctataaaatgtgctccatcc

SEQ ID NO: 415358 - DNA, 201 bp, Homo sapiens
aggagctgattgggccagggcctccttgcctaggacagaggctgggggcagtgtggcagctccctctggtggaggggcagttctttggaaagaggttcccrgtggttggtcagatggtgcctgctttggtggctgtgtgaccagaagggtggctggtgtcttggggaagggagctgtgtcccggtgtgagccctgactgct

SEQ ID NO: 415359 - DNA, 201 bp, Homo sapiens
ccaggaaggaagtttggggtgggtctttctcctcctgcatgcttactgacgtccttccttcctgagtgtctgaaaacccttggggagccgggggtggggcrcacacatcctagggctgggctggaaggcacccagccccccatgcttcacctctgatcctctgggcagcctttagacaggggaggaccctcgatctgcacc

SEQ ID NO: 415360 - DNA, 201 bp, Homo sapiens
ctgcaatgggggagttacccctcctttgcccacccccgccccatgcttacctatcagatcggcaggcaggagaataccaaggtgacgcatttcacatatgmatgcatacatggatgtgtaagggtatttccatactgccttgtcccagaaaggattttgaatcagtaaggaaaacatagaggttggggcaaagaaatattt

SEQ ID NO: 415361 - DNA, 201 bp, Homo sapiens
atccatgccttgtgctggggacacagaggggaccgatgccatcctggtcatgggggaggatgtggcattttcatgaagagctatgatcgagggggccccayggttgcttcaggagcccagagtaggcatctgaccctgccaggcgtgctcccagacaaggtgacaatggtgctgaggtgcccgagaggaatgagcctcaga

SEQ ID NO: 415362 - DNA, 201 bp, Homo sapiens
ctggaacctccgcctcccaggttcaagcaattctcatgcctcagccttcaagtagatgggattacaggtgcctgccgccatgcccagctaatttttgtatwcgtattagagactgggtttccccatgttggccaggctagtctcgaactcctgacattaagtgatccgcctgcctcggcctcccagagtgctgggattgca

SEQ ID NO: 415363 - DNA, 201 bp, Homo sapiens
atttccccctctctgtcaggacggtgcgggcttcacagggccccgtctacaaaggagtctgcaaatgcttctgccggtccaagggccatggcttcattacyccagctgatggcggccccgacatcttcctgcacatctctgagtgagtcagcggcaggtctgggtggcctggctggggtgggcgcttccttggccctgtgg

SEQ ID NO: 415364 - DNA, 201 bp, Homo sapiens
gtcccaggtgggtggtggcggtggggtgaccgtctccctgctgggtggggtcgcccgtccggtcgaggccgtccaggggtgctaatgggggcacaggcaayggcaatgttggaggcccccttgggttcccggtacactcctcgggtttccggcctcttcccagcactcaggggctcctgagggcggaagagctattcccag

SEQ ID NO: 415365 - DNA, 201 bp, Homo sapiens
ggtcccaggtgggtggtggcggtggggtgaccgtctccctgctgggtggggtcgcccgtccggtcgaggccgtccaggggtgctaatgggggcacaggcartggcaatgttggaggcccccttgggttcccggtacactcctcgggtttccggcctcttcccagcactcaggggctcctgagggcggaagagctattccca

SEQ ID NO: 415366 - DNA, 201 bp, Homo sapiens
ggctagtctcgaactcctgacattaagtgatccgcctgcctcggcctcccagagtgctgggattgcaggtgtgagccactgcgcccggcccctggctttgkgttttctgctcaccttcctccttccctcccacaaatactatgtgtcccaaatgtgccgggatccatgccttgtgctggggacacagaggggaccgatgcc

SEQ ID NO: 415367 - DNA, 201 bp, Homo sapiens
cttctctttccaggtcagccatgtcatctgagcctcccccaccaccacagccccccacccatcaagcttcagtcgggctgctggacacccctcggagccgygagcgctcaccatcccctctgcggggcaacgtggtcccaagcccactgcccactcgccggacgaggaccttctcggcgtgagtctggagcaggctgggga

SEQ ID NO: 415368 - DNA, 201 bp, Homo sapiens
ggtgggcggatcacctgagcccaggaggttgagaggcttcagtgagccatgatcgcgccactgcattccagcctaggtgaccaagtgagatcctatctgaraaaaaaaaaaaaaaaaaaaaaaaagccatccttgtggccattcctggaccgtctggagaccctgctctgtgccagtgcctgtgctgggcccttgggacac

SEQ ID NO: 415369 - DNA, 201 bp, Homo sapiens
gggtgggcggatcacctgagcccaggaggttgagaggcttcagtgagccatgatcgcgccactgcattccagcctaggtgaccaagtgagatcctatctgraaaaaaaaaaaaaaaaaaaaaaaaagccatccttgtggccattcctggaccgtctggagaccctgctctgtgccagtgcctgtgctgggcccttgggaca

SEQ ID NO: 415370 - DNA, 201 bp, Homo sapiens
gggattgcaggtgtgagccactgcgcccggcccctggctttgggttttctgctcaccttcctccttccctcccacaaatactatgtgtcccaaatgtgccdggatccatgccttgtgctggggacacagaggggaccgatgccatcctggtcatgggggaggatgtggcattttcatgaagagctatgatcgagggggccc

SEQ ID NO: 415371 - DNA, 201 bp, Homo sapiens
ggtttccccatgttggccaggctagtctcgaactcctgacattaagtgatccgcctgcctcggcctcccagagtgctgggattgcaggtgtgagccactgygcccggcccctggctttgggttttctgctcaccttcctccttccctcccacaaatactatgtgtcccaaatgtgccgggatccatgccttgtgctgggga

SEQ ID NO: 415372 - DNA, 201 bp, Homo sapiens
ttttgagacagagtcttgctctgtagcccaggctggagtgcagtggtgcgatctcagctcactggaacctccgcctcccaggttcaagcaattctcatgcytcagccttcaagtagatgggattacaggtgcctgccgccatgcccagctaatttttgtattcgtattagagactgggtttccccatgttggccaggctag

SEQ ID NO: 415373 - DNA, 201 bp, Homo sapiens
gggcaacagagggagattctgtctcacaaaaacaaaaatgaatggagtctccttcaatgagctccctcttactagagtgtaaatggctgatagcactgctraagccctccttgcagtaagcacagggctgcttggctcccattgatgtgggtggtgggttttcaggccaggagggcaggaagttggggagtgggtaatggg

SEQ ID NO: 415374 - DNA, 201 bp, Homo sapiens
gcatcccatggaaggctcaagacaccctcattttgcagagcaggcttggagaggttctcgctttgccaagaatgaggtgtctgacttgaactcttatcccyctgccttctatcatcctgtcttcaataaaggggctgaagctattaagaatggaatctctggctgggcacggtggctcatgcctgtaatccgaggactttg

SEQ ID NO: 415375 - DNA, 201 bp, Homo sapiens
caattctcatgcctcagccttcaagtagatgggattacaggtgcctgccgccatgcccagctaatttttgtattcgtattagagactgggtttccccatgktggccaggctagtctcgaactcctgacattaagtgatccgcctgcctcggcctcccagagtgctgggattgcaggtgtgagccactgcgcccggcccctg

SEQ ID NO: 415376 - DNA, 201 bp, Homo sapiens
gctaaagccctccttgcagtaagcacagggctgcttggctcccattgatgtgggtggtgggttttcaggccaggagggcaggaagttggggagtgggtaaygggggctgcatgattgggccgtaagtctccagacatgcgggcaggctgagcaggggctgggaaagccagagtcttggtacccagctgaactccagaacct

SEQ ID NO: 415377 - DNA, 201 bp, Homo sapiens
acagctgctcagggatccaaacgtggcgcttgagctctctgcgatgtgttccacagttccctggaggcggacactgcgtgagggtcagtttttgcccctgsttccctgtggtgtctggctcccagcagcgtcagggagggtccgtggagtggctgagtttggatctaggtggttggcattaaaatctccctggctttgggt

SEQ ID NO: 415378 - DNA, 201 bp, Homo sapiens
tgacagctgctcagggatccaaacgtggcgcttgagctctctgcgatgtgttccacagttccctggaggcggacactgcgtgagggtcagtttttgccccygcttccctgtggtgtctggctcccagcagcgtcagggagggtccgtggagtggctgagtttggatctaggtggttggcattaaaatctccctggctttgg

SEQ ID NO: 415379 - DNA, 201 bp, Homo sapiens
cacatctctgagtgagtcagcggcaggtctgggtggcctggctggggtgggcgcttccttggccctgtggaggtggggatggtgtgtgactctgatgggcrctgggtgtgaggacgaatggctgggcctgtgtgactctgcctgtggctggtgctccagctgtgctcctgtgtgtgtgttgggttggggttgtgagactct

SEQ ID NO: 415380 - DNA, 201 bp, Homo sapiens
caatcaatgggtattctagaaccgcaggatgtcagagctggaagggacgcgataccggtttacacaaggggaaactcctcgaggctctgggagggacggakggttttggtgacagagcgagagctaaaattgaggattcctgaatccagatcttgcctcccatcagccatctttctcccaataaatttttgttttgtgcaa

SEQ ID NO: 415381 - DNA, 201 bp, Homo sapiens
gtcccctagaaagtaagggaaccttcctgggggtggtcacagggagaggcccctccaggaactagcttcatgcaccaaagggaccttcttgaaggctcacygggagtccaggcgtggtggctcacgcttgtaatcccagcactttcggaggctgaggcaggtggctcacttaaggtcaggagtttgagaccagcctggcta

SEQ ID NO: 415382 - DNA, 201 bp, Homo sapiens
ggcaaagcagttttctaattcttggcttggttggttctaggggagctggcttgaagtggggggggaaaggcgggggtggcggtctttggattggacggatrttgccttttggtgcctttgcagtgggaggcggcatagctgcctgtctggggaagacagttctcccagcactcccacccctgggcacagcaggctggtact

SEQ ID NO: 415383 - DNA, 201 bp, Homo sapiens
gctgtggtggtggtagtcatggtctgtcccactcccttatctgttggttcaataggaagtggcagagttcatcaaggtcccctgtggcagcacaggtgcccagcgtgctgtgcggtgaggtgaggctccccgctccatggacgtgtgcatacagacggcaacaagttcacgcatgcatacacgtgtatgcgctcagatgca

SEQ ID NO: 415384 - DNA, 201 bp, Homo sapiens
atttccacctaagtgccccttgcgcctctcctggggcctgggcaaagcagttttctaattcttggcttggttggttctaggggagctggcttgaagtgggkggggaaaggcgggggtggcggtctttggattggacggatgttgccttttggtgcctttgcagtgggaggcggcatagctgcctgtctggggaagacagtt

SEQ ID NO: 415385 - DNA, 201 bp, Homo sapiens
ctggcaccaggcaccaagcatgagacctggtctggacatgtcatcagctcctaggagatggtggaagcaccccttgtcctgtgcttgtgggagactttgcrgggaggaggcagcagacactggagatgacattcttccacacgagacggggcttcagccgggcatggtccctctcaagtatctcctggaggaaggggtatg

SEQ ID NO: 415386 - DNA, 201 bp, Homo sapiens
aagtatctcctggaggaaggggtatggggggcaggtgtggggtgtggggtgttcccggccatcagcacagcctatgaccattgcaacaacctctcaccatytgaagagcattaaaagcatttaaaaaggagaggtgcccactggtggctgagtggaggttccaaccccatcccagggagtggatcaagggtggtatttctc

SEQ ID NO: 415387 - DNA, 201 bp, Homo sapiens
tgctggggacacagaggggaccgatgccatcctggtcatgggggaggatgtggcattttcatgaagagctatgatcgagggggccccacggttgcttcagkagcccagagtaggcatctgaccctgccaggcgtgctcccagacaaggtgacaatggtgctgaggtgcccgagaggaatgagcctcagatactggactgtc

SEQ ID NO: 415388 - DNA, 201 bp, Homo sapiens
ccctgtgagactgtgaattctgcagctgcaaaatgggcacagcaccagggctgcaaaggacccacataatgcctggcagatgcaggtctcaggccttgcgmgtggaggatgcttgtgttattaatagtaaatcattagtttctggagggatgttcagtgatgttttagttcaactccctctttccaggagggaaaacaggc

SEQ ID NO: 415389 - DNA, 201 bp, Homo sapiens
catctgagcctcccccaccaccacagccccccacccatcaagcttcagtcgggctgctggacacccctcggagccgtgagcgctcaccatcccctctgcgsggcaacgtggtcccaagcccactgcccactcgccggacgaggaccttctcggcgtgagtctggagcaggctggggacgcgttctcagatggatctcttgc

SEQ ID NO: 415390 - DNA, 201 bp, Homo sapiens
cagagtaggcatctgaccctgccaggcgtgctcccagacaaggtgacaatggtgctgaggtgcccgagaggaatgagcctcagatactggactgtcagacrtggacatgggggtaagcacagggtccctaccttgcaaggcacgagcccctgacagcctcttctctttccaggtcagccatgtcatctgagcctcccccac

SEQ ID NO: 415391 - DNA, 201 bp, Homo sapiens
gcactcatcagagcctgggggctgactggggaagggggtgcatggccagctgggcacctcctggtgcagcctctcccccttaccctgctggctttttctcygtagcatttctgctgtctgacttactccgtatttcaccagggtctttgttagccgggcgaccctgggcaagttacttgactctttgtgtctccgttctcc

SEQ ID NO: 415392 - DNA, 201 bp, Homo sapiens
catacagacggcaacaagttcacgcatgcatacacgtgtatgcgctcagatgcagagacagccatgtgtgggcacatatgtatgtgtacacatgcgtatayacacagcacacacatacacatgtgcatacacctacatacctgtgcacaaacgagcacacatgtacatgcagcctggcagtcatgacaccttgggcgtgac

SEQ ID NO: 415393 - DNA, 201 bp, Homo sapiens
caacccccatcccttcgtgtccctccccctcctctctctctgctcctccctcgccagaccccccgctctccccggaacaatggaggggaatgtggctaggscagcctgacgctgctgcgtcaacctctggctcgttctcggcctctatcgcttccagggacccttctatctgggctcagctgacccgccccgcctctcggc

SEQ ID NO: 415394 - DNA, 201 bp, Homo sapiens
cgtatacacacagcacacacatacacatgtgcatacacctacatacctgtgcacaaacgagcacacatgtacatgcagcctggcagtcatgacaccttggkcgtgacatttggtcgaagtttgttgcaggccagaagctcatctgagtggcggatctgtttgcagccttcctccctcccccagctgtggggagctgaaggc

SEQ ID NO: 415395 - DNA, 201 bp, Homo sapiens
cccacacctgctgaatggcaatctgcatttgaacaagatccccagagattcctgactgcattaaagtaggaagtagaatcactggcttaactctgtgcctyagtttcctcatctgtaaaacagggctgctaaaagtgcctcccctgttgggtcgatgtttacgtgcatgtagttgatgtttgtaatcccccaacagggcct

SEQ ID NO: 415396 - DNA, 201 bp, Homo sapiens
ttgagggggcttgggtggagaaagaagggggcccccattttgggtctgtgccattcacccaggggaaaatgggtgtgacaaatggaagatgcaaggaggaygacgatggtgacaatgacagtgatgatgatgatgacgcggcatgattcctgagcgggccctaccctttccaccgcctttcctgcctcccattcctagtcc

SEQ ID NO: 415397 - DNA, 201 bp, Homo sapiens
ccatgcccaaccctggccttccccagccagcatcccatggaaggctcaagacaccctcattttgcagagcaggcttggagaggttctcgctttgccaagartgaggtgtctgacttgaactcttatccccctgccttctatcatcctgtcttcaataaaggggctgaagctattaagaatggaatctctggctgggcacgg

SEQ ID NO: 415398 - DNA, 201 bp, Homo sapiens
caggaggagctgcagagcctacggaaaattcccaggctattttcggccgaggcccccttctcccagccgacacacccatccctggggcagtcagggtgggygtggcttcctgcccccaccaccctgggctccctcccttggccgggcactcatcagagcctgggggctgactggggaagggggtgcatggccagctgggca

SEQ ID NO: 415399 - DNA, 201 bp, Homo sapiens
cctggacagggccctcccctcccagggccagcctctttcctggaactctgggcgttgaacattctaggactctatgacctgtgctggtaggtcatgcgggkgccctggcccccaggccagcagctggggcctttttgaggtgggggctccccggactcaggagttcctccttggccgcggctgtagctgagagaagggaca

SEQ ID NO: 415400 - DNA, 201 bp, Homo sapiens
cgtgctgtgcggtgaggtgaggctccccgctccatggacgtgtgcatacagacggcaacaagttcacgcatgcatacacgtgtatgcgctcagatgcagaracagccatgtgtgggcacatatgtatgtgtacacatgcgtatacacacagcacacacatacacatgtgcatacacctacatacctgtgcacaaacgagca

SEQ ID NO: 415401 - DNA, 201 bp, Homo sapiens
tgttaatcttttatcctgcaactgtcctgaaatcacttattagtgccagagtctttctgcatgtgtgtgtgtgtgtggattctttggaaatttctacgtasacttatcatgttatctgtgaacagaaacatatttattcctttccataatttcttcaaatttttttctgcaccactctttctcctctctttttgagacttc

SEQ ID NO: 415402 - DNA, 201 bp, Homo sapiens
gactcttctgtcttctccattctgctattgagcccacccaattaatttttcatttaggttgtcatattttgcagtaaataaatttctgattttctgttcatttcaagagcattcacccttacttgttatagcaaggttttaattaatactttaattatactttggcttttaattttttgataatttcaacatctgtgtcat

SEQ ID NO: 415403 - DNA, 201 bp, Homo sapiens
caaaggtcccctttatgagccccaatgctgactatttttcaattataaaagtaaaaatatacatgtttatattcaaatattcaaacagtcctggaatgcctttttttttttttttttttttgagacagggtctcactctgtcacccaggctggagtgcagtggcacgatcatggctcactgcagcctccacctcccaggct

SEQ ID NO: 415404 - DNA, 201 bp, Homo sapiens
aagaaaacataggtatacaactggaaaggaaaaagttaaattatcattatttgcaaatgatattatgtacaaaatccaaatatatatacaaaaaaattacatatatatatatatatatatatatatatatataatcaactgaaaaccttttacagttgataaaagaatcaccataaggtagtgaaaactaatatatatcaa

SEQ ID NO: 415405 - DNA, 201 bp, Homo sapiens
tcctccaaagttcctcatcctcaggcccccaggttacctctgggactgggctgtcatggacaacctctgctggacctccacgctcaggtgactcgcctggygacgtctggttctcaggtagcttaggggcatcaggtgggaagatggagaaggcagggtccgggtggctggggggcagcatgccactaggcacgggcatgg

SEQ ID NO: 415406 - DNA, 201 bp, Homo sapiens
agaaaacataggtatacaactggaaaggaaaaagttaaattatcattatttgcaaatgatattatgtacaaaatccaaatatatatacaaaaaaattacatatatatatatatatatatatatatatatataatcaactgaaaaccttttacagttgataaaagaatcaccataaggtagtgaaaactaatatatatcaat

SEQ ID NO: 415407 - DNA, 201 bp, Homo sapiens
tgggattacaggtgtgagccaccgtacccagccaagaatctgttttaaagctagaaacaacttgagagcccatgggggcagccttgtcatttcacacaatrtcttggcccatggacagagtgtcctcagcctccactccagcaggtacttgtaggagcacagccaggaccagcctcctgccaccagctacacatgagcata

SEQ ID NO: 415408 - DNA, 201 bp, Homo sapiens
gaaaacataggtatacaactggaaaggaaaaagttaaattatcattatttgcaaatgatattatgtacaaaatccaaatatatatacaaaaaaattacatatatatatatatatatatatatatatatataatcaactgaaaaccttttacagttgataaaagaatcaccataaggtagtgaaaactaatatatatcaatg

SEQ ID NO: 415409 - DNA, 201 bp, Homo sapiens
ttaaagcctaaaaacacacatattcaagaagatgagtactggcacattttagagtaactgttgggatggcacagcaacacccaaattgaagtaagaccaawttatattagttggttgtaatggttgtcacaaataaccacgtgcataatgtcaaccctctttacaatagaacaccaacaaacctattaaagattttcttcc

SEQ ID NO: 415410 - DNA, 201 bp, Homo sapiens
gtactaaaacgaaaccactactattgagaaagaaaactgaagtatcatatctttcaattatttcagtgtcttagaagtatctaaacattattttgagatasagtaccagtgatatgaataaatctggtgaatcagtaggtcagggccagccaggactattttattatattagctaaccaggccaggactagagttctccac

SEQ ID NO: 415411 - DNA, 201 bp, Homo sapiens
aaaacataggtatacaactggaaaggaaaaagttaaattatcattatttgcaaatgatattatgtacaaaatccaaatatatatacaaaaaaattacatatatatatatatatatatatatatatatataatcaactgaaaaccttttacagttgataaaagaatcaccataaggtagtgaaaactaatatatatcaatgc

SEQ ID NO: 415412 - DNA, 201 bp, Homo sapiens
ctaggtgacagagcaagactccgtctcaaaaaaaaaaaaagaatattgtcttccaatccatgaacgtgggatttctttccatttacttgtttaaaaaaacaaaaaaaaaaaagctgggtgcagtggcccacgcctgtaatcccaccactttgggaggccaaggcaggtgggtcatgaggtcaagagatcgagaccatcttg

SEQ ID NO: 415413 - DNA, 201 bp, Homo sapiens
taggcctgcagagggcagcaacagggcacagggcaacacatggccactctgcgacatgactcacacaacctcatgggcctcggagtggcagaggcatggcraggccccccagccctttgaaggagccattccaccaaagcaccccaaccctcagggtcctgctaatgcccagactttaaggggccatcaccaccacacagc

SEQ ID NO: 415414 - DNA, 201 bp, Homo sapiens
gctcacgccttaatcctagcactttgggaagccaaggcaagcggactgcttgagctcagaagtttgagaccagcctggacaacatggcaagaccccatatyttaaaaaaaaataaatacaaaaaaaattagccaggcatggtggtgtgcacctgtagtttcagctacttgagaggctgaggtgggaggactgcttgagtcc

SEQ ID NO: 415415 - DNA, 201 bp, Homo sapiens
caccagccccacgacagcaaagagacagaactcctggaatcagagcacatggggatgggggggtgccgtgacctcactgtcccagcccaagaggagcagtrcccggactgcagccacctcataaccggcagggcagcagcaggcagggcacagcagagatgagagatgctggttggtcctcagctcacataccagcagcag

SEQ ID NO: 415416 - DNA, 201 bp, Homo sapiens
acctgtagtttcagctacttgagaggctgaggtgggaggactgcttgagtccaggaagtggaggctgcaatgagccaacactgtagcactgcactccaccmtgggtgactgagggagactctgtcttaaaaaagaaaaaaaaaaaaaagttaaaaattgtgcaaatcacacaataaagagagtgaaatgctaaccaacaga

SEQ ID NO: 415417 - DNA, 201 bp, Homo sapiens
tcttggggagccgcaggtttcggaaggaagacggctgcaacgtgatggtgtggggtgtggacggcctcacagccagctgccgctcgtagcgcgttggctgycccactggcttggctgagggcaggcaggcctcagggggcagtcgcttgttcaggtctgctagctgttgggggcacagtggtcagggcctgagtccaccat

SEQ ID NO: 415418 - DNA, 201 bp, Homo sapiens
aaaagagagagcattcaagccaggcgcggtggctcacgcctgtaatcccagcactttgggaggccgaagcggacggatcatgaggtcaggagatagagacratcctggctaacacggtgaaaccccgtctctactaaaaatacaaaaaagtagccgggcatggtggcgggcgcctgtagtcccagctacttgggaggctga

SEQ ID NO: 415419 - DNA, 201 bp, Homo sapiens
tatgtggctggggaatggtttcagaatgcctatatgcaaggtctagtgacctcaatcccaaaatacacacacacacacacacacacacacacacacacacwcactctctctctctctctctctctctctctctctctccctccccgcccaactccctccctcctatattaggcaatgctaaaaggccactccccaaagggc

SEQ ID NO: 415420 - DNA, 201 bp, Homo sapiens
tatatgcaaggtctagtgacctcaatcccaaaatacacacacacacacacacacacacacacacacacacacactctctctctctctctctctctctctctctctctccctccccgcccaactccctccctcctatattaggcaatgctaaaaggccactccccaaagggcatttttctcatgtgtggcacacgaaaccat

SEQ ID NO: 415421 - DNA, 201 bp, Homo sapiens
atgcaaggtctagtgacctcaatcccaaaatacacacacacacacacacacacacacacacacacacacactctctctctctctctctctctctctctctytctccctccccgcccaactccctccctcctatattaggcaatgctaaaaggccactccccaaagggcatttttctcatgtgtggcacacgaaaccatgcc

SEQ ID NO: 415422 - DNA, 201 bp, Homo sapiens
cactgactcttctgtcttctccattctgctattgagcccacccaattaatttttcatttaggttgtcatattttgcagtaaataaatttctgattttctgttcatttcaagagcattcacccttacttgttatagcaaggttttaattaatactttaattatactttggcttttaattttttgataatttcaacatctgtg

SEQ ID NO: 415423 - DNA, 201 bp, Homo sapiens
actgactcttctgtcttctccattctgctattgagcccacccaattaatttttcatttaggttgtcatattttgcagtaaataaatttctgattttctgttcatttcaagagcattcacccttacttgttatagcaaggttttaattaatactttaattatactttggcttttaattttttgataatttcaacatctgtgt

SEQ ID NO: 415424 - DNA, 201 bp, Homo sapiens
ctgactcttctgtcttctccattctgctattgagcccacccaattaatttttcatttaggttgtcatattttgcagtaaataaatttctgattttctgttcatttcaagagcattcacccttacttgttatagcaaggttttaattaatactttaattatactttggcttttaattttttgataatttcaacatctgtgtc

SEQ ID NO: 415425 - DNA, 201 bp, Homo sapiens
tttttagcaactatgttttcaattttgattttcacatgttcattgctagtacattgatttttttatgttaatcttttatcctgcaactgtcctgaaatcayttattagtgccagagtctttctgcatgtgtgtgtgtgtgtggattctttggaaatttctacgtagacttatcatgttatctgtgaacagaaacatattta

SEQ ID NO: 415426 - DNA, 201 bp, Homo sapiens
gttctccactcacagttataaggagcccaagctcccattgtgtaaaaagcatacagaggccaagggctccatagtggttagggttagaaaacctactgtcytaagacactggcccaccatatccaaggcaacccaaaaacataccagcaggctaagatgcagaaccctgtgaagaggatgatggggatgggataggatgca

SEQ ID NO: 415427 - DNA, 201 bp, Homo sapiens
gattacaggcatgaggcaccgagcccagccacttcattactttttatggctgaatatttcatcaaatgggtatgccacattttgtttgtccattcatcagytgataaacatttgggcagtttctatgttttgcctattgtgaatagtgctgtgatgaacattctaacattcctgtatttgtttgaatacctgttttcaatt

SEQ ID NO: 415428 - DNA, 201 bp, Homo sapiens
aggcctcagctccaccggccagactctcccagcatggggggttggggacagaggtaggtccctccccagcccagcttagcagccaacttgctgtcccagawaccagcacccaaacagccctggtggccgtgtggggtatctccctccccactcctggcacaggtgggtgggtctcattctggtgagggctggcagccacca

SEQ ID NO: 415429 - DNA, 201 bp, Homo sapiens; identical to SEQ ID NO: 104813

SEQ ID NO: 415430 - DNA, 201 bp, Homo sapiens
agagcttgagatcattagcaactgaactgaacagggagttccctcctgacttctcatcctcccttcagcatagcactgaaaacatctataaatgttttagmcaatgaatctgaagaacagaattctttccagagaaaagaataagatgggctcttttcacagctgtcagcattttagagttaaaagggtcatcagatgtca

SEQ ID NO: 415431 - DNA, 201 bp, Homo sapiens
gaggccgaggtgggtgggtcacgtgaggtcaggagttcaagaccagcctggccaacatggtgaaaccccgtctttactaaaaaaacaaaaattggccggaygcggtggcacacgcctgtaatcctagctactcgggcagctgaggcaggagaatcgcttgaacccgggaggtggaggttgcagtgagccaagatcatgcca

SEQ ID NO: 415432 - DNA, 201 bp, Homo sapiens
taaccagctggggatgcctgccctaggctcaagagagaccagaggaggcaccaggacactgagaccgccagccctaccttagtcccctatgcttaaccagmtgtcaggtcatccccattaaaatgtggtagacagcatcatctagtctgagggatgtaaacattcaacaggaggcctggaaactctcccaagtttccaggg

SEQ ID NO: 415433 - DNA, 201 bp, Homo sapiens
gaccagcctgaccaacagggagaaaccctgtctctactaaaaattcaaaattagccgggcgtggtggcgtatgcctgtaatcccagctactcagaaggctraggcaggaaaatcacttgaaccggtgagctgagatggcgccactgcactctagcctgggcaacaagagtgaaactcaatctcaaaaaaaaaaaaaaaaaa

SEQ ID NO: 415434 - DNA, 201 bp, Homo sapiens
agcttagcagccaacttgctgtcccagataccagcacccaaacagccctggtggccgtgtggggtatctccctccccactcctggcacaggtgggtgggtytcattctggtgagggctggcagccaccagtgactcctcagagcaacctgggactcctctcttgggttatagctgcctaaaccaccagttcccacctcaca

SEQ ID NO: 415435 - DNA, 201 bp, Homo sapiens
gccgaggcgagtggatcatgaggtcaggagatcgagaccatcctggctaacaaggtgaaaccccgtctctactaaaaatacaaaaaaattagccgggcgcggtggcgggcgcctgtagtcccagctactcgggaggctgaggcaggagaatggcgtaaacccgggaagcggagcttgcagtgagccgagattgcgccactg

SEQ ID NO: 415436 - DNA, 201 bp, Homo sapiens
tataacattatatataacattaacatatataatataaacatacacacacacacacacacacacacacacacacacacacacacacacacagatagataggygcctgccactacatccaggtaatttttgtatttttagtggagacggggtttcatcatgttgaccaggctggtcttaaaactcctgacctcaggtgatcca

SEQ ID NO: 415437 - DNA, 201 bp, Homo sapiens
agtaggttgccctgacagtcgaggaagggaaaactcctggtttcaccaaaggaaagggacaggcacaagcacttcccagtgtcatggacacagtacacctyttaggaaccctaacccaggaaggggctgaaagtgggaagagccccggccccacccaagctcctaagaccctgctgggggacaaagccctagctctgatga

SEQ ID NO: 415438 - DNA, 201 bp, Homo sapiens
atggaccagctctcgctgcttaggcctgcagagggcagcaacagggcacagggcaacacatggccactctgcgacatgactcacacaacctcatgggcctyggagtggcagaggcatggcgaggccccccagccctttgaaggagccattccaccaaagcaccccaaccctcagggtcctgctaatgcccagactttaagg

SEQ ID NO: 415439 - DNA, 201 bp, Homo sapiens
tataaattcctttttttcccctttggtctaaagatagccaattgttccagcaccatttggtgaaaagactatccttcctccattgaattgcttggcatctytgtcaaaaagcagttgtctggaccaggcacagtggctcacgcctatagtcccagcactttgggagaccgaggtgggcggatcgcttgaggccaggagtgt

SEQ ID NO: 415440 - DNA, 201 bp, Homo sapiens
gtactggtcaggcattttgtagggtgttcctcaactaggatttgtctgatgttttacttctaattatactgcggttatgggtttgggagaggaagatcagyggtaaaatgtcctcctcctcctcacatatcaagggcacaatcaatcaatgtgatttatcactgctgctttaaccccaatcacttactgtaggaggtgtct

SEQ ID NO: 415441 - DNA, 201 bp, Homo sapiens
tacctttgagtgtggctgaagtctgcagggttttaggctcgtgctggtggatggtcccaatgatgtcaggatcagcatggaagcgttcccagtcattctgycagaagttcccaggggacagcagcaggcatccatgctcagggagtaggttcctgagcttcctaaggcctggcagcaggtcggtcacttgcagacacaact

SEQ ID NO: 415442 - DNA, 201 bp, Homo sapiens
ccaaggaaaaagactccagctctaggtcagatggtgctgccaccaacagtcaaggagccttggaggaggagccagtgtgggacaggcaggcaaaggcgtcyggcagaaggcacctggccactgggtggagacccaggttcaccagcttggaggtggggccagaacccaggtggctgagactccccaaggagtgtgcatgca

SEQ ID NO: 415443 - DNA, 201 bp, Homo sapiens
gtcctccagacggaacacctgggacagggatgggcctcaggttctggtctctgggattttccaagttatactttggctgggaaatgccctctgttcttcaycaggactcttccagcctctccctgacgaatgcatcaggctcccaccccgtgccgggccactccagcacccaagagacaagacaatactcactctcagtgt

SEQ ID NO: 415444 - DNA, 201 bp, Homo sapiens
tcacagacatggggtgacgaggaagaagaggctcaagtgaccaggcctccaaggccaggctctcccttttctcattttccctagaaccccagatccccagyttctaccagcagggccagagggagcttttctggcagccgtgaaggcagcgtctctgaaatggccagcccccggggcttgggcctagtgtgctggagtgag

SEQ ID NO: 415445 - DNA, 201 bp, Homo sapiens; identical to SEQ ID NO: 104825

SEQ ID NO: 415446 - DNA, 201 bp, Homo sapiens
ttctggctgtgaaggtagaagactaggaagacagtgaataataacaatgaaaaactcatacatgatatttaatatgtgccaggcactattctaagcacttsacatgtacagatacatcttgacttacgatggggttatgtcctgataacgctgtcgtaaattgaaaatatcctaagtcaaaaatgcatgactaggctgagc

SEQ ID NO: 415447 - DNA, 201 bp, Homo sapiens
ctggctgtgaaggtagaagactaggaagacagtgaataataacaatgaaaaactcatacatgatatttaatatgtgccaggcactattctaagcacttgayatgtacagatacatcttgacttacgatggggttatgtcctgataacgctgtcgtaaattgaaaatatcctaagtcaaaaatgcatgactaggctgagcaa

SEQ ID NO: 415448 - DNA, 201 bp, Homo sapiens
caggcaaggccatgcgtctggcgactgcggcacaggccagggccaagggaggagaccggaggaagggtctaggaaccccacggtgcttctccctcaaaaaygggaaacaggtgtgacaaactgcacagccagtccccagctcctgccatgcccttgcagcctcctcctgccacttggctgaaagggaagcaggcagggagg

SEQ ID NO: 415449 - DNA, 201 bp, Homo sapiens
gaaactgaggcaggagaatcacttgaacctgggaggtggaggttgcagtgagccgggattgcaccactgcactccagcctgggtgacagagcaagactccmcctcaaaaaaaaaaaaaaaaaaaaaagaaaccaaaagaaatctctgaaactccgaaagacagaaaagatgacttcaacaaaaagaaaaacatgccacatt

SEQ ID NO: 415450 - DNA, 201 bp, Homo sapiens
actggacgagcagggcaggcatcgtagctaactaatgtctgtaatcccagcagtttgggacactgaggcaggaagactgcttgaggccaggaaagttcaasaccagcctgggcaacatacagagatcctgtctctacaaaaaaaaaaaaatttaaattagccaattgtggtggctcatgactgtagtcctggctacttgga

SEQ ID NO: 415451 - DNA, 201 bp, Homo sapiens; identical to SEQ ID NO: 104830

SEQ ID NO: 415452 - DNA, 201 bp, Homo sapiens
cactgccctaccaaacctggagcccaagagttgcctaagtcaactctatggtgcccacatcttgaacatatgtctaaactggacgagcagggcaggcatcrtagctaactaatgtctgtaatcccagcagtttgggacactgaggcaggaagactgcttgaggccaggaaagttcaagaccagcctgggcaacatacagag

SEQ ID NO: 415453 - DNA, 201 bp, Homo sapiens; identical to SEQ ID NO: 104832

SEQ ID NO: 415454 - DNA, 201 bp, Homo sapiens
ggacatggccaagaggaaagcacatggtgccagaacagatgctggagccagagggcaactccaaatattaaccaccttgtgcctcagtttcttcatccgtraaatggggataagagtacccacctcacagggtggtcatgagaatcaagtgagctaacgtgtaaggtggtacctggtgaatatcacgtaagtttgtaaatt

SEQ ID NO: 415455 - DNA, 201 bp, Homo sapiens
catgtcacccagcagaccagtcaagagcccagggtactgtcaatcttacttggcatggtagtgctggaagaccagggtgatggtgtaggagaccatcctcytcctggtgtagaggctcaccccgctgtacttcccaggaacaccaaataacaagtctgcaagcagaaaccagcaggtactgacacagaaatgacagctact

SEQ ID NO: 415456 - DNA, 201 bp, Homo sapiens
caaatgtcccaatctaaatccttgttagaaatgcaaattattgggcctatcccagacctggtgaatcagaaaatctggcggtgaggcccagaaatctctayttaacacaccctccagctgacagtgatatgctcaaatttgagaaacactgccctaccaaacctggagcccaagagttgcctaagtcaactctatggtgcc

SEQ ID NO: 415457 - DNA, 201 bp, Homo sapiens
acctctccctgttctggtttcttccaatgccttatgtgtgccaacctcattcccatctcaggggcctggcacatactgttccatcctctattccctcttcyctttataggctggttccttttcattcttcaagtctcagctgaaatatcacttctacaaaaagacctcccttgaccatatattttccagtagttctcttta

SEQ ID NO: 415458 - DNA, 201 bp, Homo sapiens
tcatgatccgcctgcctcggcctcccaaagtctgggattacaggcgtgagccaccgcgcccggcctccaacactcttgattgccagaggcctaggagagcygatcagaagcacctcgagtgcccttgccaattggggagctgcctgcagtgccccactgggaaggacacaggccatatagggtgctcagtagtaaccagct

SEQ ID NO: 415459 - DNA, 201 bp, Homo sapiens
agggctctgcacaacccaccccggtcctctgcaacttcacttcgtgtcacctctccctgttctggtttcttccaatgccttatgtgtgccaacctcattcmcatctcaggggcctggcacatactgttccatcctctattccctcttctctttataggctggttccttttcattcttcaagtctcagctgaaatatcactt

SEQ ID NO: 415460 - DNA, 201 bp, Homo sapiens; identical to SEQ ID NO: 104834

SEQ ID NO: 415461 - DNA, 201 bp, Homo sapiens
aattactggacattttgaatattatgctatgtgactctagctcttgtttaagtcccacgtaaaattttgaatttgtctttgcagcaatcaacctaattagrtccagtccacaagttcctacccaccttctgtgggctgtggtaccaatatgatatcagttttcaaagccttttaagtattattttgatttttcccaagcat

SEQ ID NO: 415462 - DNA, 201 bp, Homo sapiens
tgactcttctgtcttctccattctgctattgagcccacccaattaatttttcatttaggttgtcatattttgcagtaaataaatttctgattttctgttcatttcaagagcattcacccttacttgttatagcaaggttttaattaatactttaattatactttggcttttaattttttgataatttcaacatctgtgtca

SEQ ID NO: 415463 - DNA, 201 bp, Homo sapiens
gtaaattcacgattatcagtgtaagcagttaaaaaacaccatcacaaaaaccaaagaaattaataaagaaactccatgtcctagccagaaagtaaaaaatsaatctctgcaagactggaataaaatgatctttgatttaagtgcctcatggaaagacagaaaaacttctctcccagcatggctcccacgcattggaaccgg

SEQ ID NO: 415464 - DNA, 201 bp, Homo sapiens
ggggcctgcattctccctgggcacgctcagtccagagggtctgtctgtccaactcatgactttacctgtcgaactgaagttaaggggctgcattttttcaygaagagagattccagtctctgccatttcttccctgttcagtccataggctttcaggagatttaataaaatgaggttggcccctggcaccatgaaggaaac

SEQ ID NO: 415465 - DNA, 201 bp, Homo sapiens
ccaaaccaaatgctctttgcaatctagagggctcacagggaccaggaaggagactcacagtgatcactctctgcccagagcaggggacatttggaatcccratgctgacttggcccctgttggggaagtgtgtgctactccaggaggcaggtgttggcggggatggagggaggcaggacagtgggagaagagaggaggcga

SEQ ID NO: 415466 - DNA, 201 bp, Homo sapiens
agtgatcactctctgcccagagcaggggacatttggaatcccgatgctgacttggcccctgttggggaagtgtgtgctactccaggaggcaggtgttggcrgggatggagggaggcaggacagtgggagaagagaggaggcgagccccagtgagtgtacctgcagtggtgggctcggtcgggcttgatgctgcagcatttg

SEQ ID NO: 415467 - DNA, 201 bp, Homo sapiens
tgggccgcactcctggtgtgatctgctatggctgccccaaggctggaggacttgtgtgtggatgaagatgacccaagtgtaactgcaaacaaagaactgtkccctgcacaccaggggcctgaccactgggctccagtctgactgtgagcagctctcccagcaacactgaccctgggtcctccccatccccaggtgtggaaa

SEQ ID NO: 415468 - DNA, 201 bp, Homo sapiens
gtgtcctgaggccaaaccaaatgctctttgcaatctagagggctcacagggaccaggaaggagactcacagtgatcactctctgcccagagcaggggacayttggaatcccgatgctgacttggcccctgttggggaagtgtgtgctactccaggaggcaggtgttggcggggatggagggaggcaggacagtgggagaag

SEQ ID NO: 415469 - DNA, 201 bp, Homo sapiens
ctgtcgaactgaagttaaggggctgcattttttcatgaagagagattccagtctctgccatttcttccctgttcagtccataggctttcaggagatttaayaaaatgaggttggcccctggcaccatgaaggaaacaaagagcctccccgccccccactcaggtcacacacccaccctggagcagggaggaaagcctcagc

SEQ ID NO: 415470 - DNA, 201 bp, Homo sapiens
atctcactcaaaggcattgcatctccactgaccttgaataggaaatacatattcatatcttgccaagagttcaagtgccaagtcaatacatactacgaagkctatggtttggaggagactatgaaatgatgacatttcccatgcattccaaatgtattaggatgtatgactgaattaagtgggacatgcacctggagcctt

SEQ ID NO: 415471 - DNA, 201 bp, Homo sapiens
atgatctccccttggcttagagataaggataatctatatacttaaaacaaaaattgagggattaaactttctggctccctacaagtaggaactataaaatygaaactcaatttcatcagcctcttagcagatgtcatgaacatcagcaaaatagtagaaactctaaaataggatgcttttggcttaagccaaaatttgttt

SEQ ID NO: 415472 - DNA, 201 bp, Homo sapiens
cttaactcctacccccaccccaagcaaaagctaaaaaagggggtttctggcaattgcttaaaaaacaaatcaatgtgtgagaattccccgatggtcaatawtcatatttgttatttttgcacttggagggcactccctacctccttcacctctatccaccatcaccacctccttcaaacaagactgacacaggaagtgcct

SEQ ID NO: 415473 - DNA, 201 bp, Homo sapiens
aaaggcaaaggaactaagcctggggaggggcgggggtaaggaagtcacaggggaaacggatccacaggcccagaggtgttctggagctccctagtgccagyaatcctgataagatgtggtgtcaaaatgatgatctgagctctgtgaggggcagtgtgtgggaagtcaaaggaaatcagctagtattccttcatagagttc

SEQ ID NO: 415474 - DNA, 201 bp, Homo sapiens
agagcagaagcaggtgacacagcctgccaatttgtttttttctttttttgagaccaggtggggtctcactctgtcattcaggctggagtgcagtggcaccrtcttaggtcaatgcagcctcgacctcccacctcgggctcaagggatcctcccacctcaacctcccaagtacctagaactacaggcacgcaccaccacacc

SEQ ID NO: 415475 - DNA, 201 bp, Homo sapiens
gtaaactctcgatgaattctttagtggcatttcctttgggcactgccccctgtaggaaagatgaaaggtatcagggttgggctgggggttctatcagctcyaacattctacagtggggatagttatttgaaagcagcaaccacacacacacatggacaggacactttgataccaacaacatgtggactctgtgttcagaat

SEQ ID NO: 415476 - DNA, 201 bp, Homo sapiens
ctcacagggaccaggaaggagactcacagtgatcactctctgcccagagcaggggacatttggaatcccgatgctgacttggcccctgttggggaagtgtrtgctactccaggaggcaggtgttggcggggatggagggaggcaggacagtgggagaagagaggaggcgagccccagtgagtgtacctgcagtggtgggct

SEQ ID NO: 415477 - DNA, 201 bp, Homo sapiens
aatcccgatgctgacttggcccctgttggggaagtgtgtgctactccaggaggcaggtgttggcggggatggagggaggcaggacagtgggagaagagagraggcgagccccagtgagtgtacctgcagtggtgggctcggtcgggcttgatgctgcagcatttggggcacttgtacaccacctgcccaggcttcaactgt

SEQ ID NO: 415478 - DNA, 201 bp, Homo sapiens
ttccagcaatccttccacctcagcctcccgaacagctgggaccacaggtgcacgccaccacacccagctaatttttttgtatttttgatggagatggggtwgcccaggtgggtctcaaactcctgagctcgagcaatccacctgctttggcctcccaaagtgctgggatgacaggcaggagccattgtgcccagcaaataa

SEQ ID NO: 415479 - DNA, 201 bp, Homo sapiens
actcatacttaatcctcacaacaaactacaaagaaacaaccctttttacagaggagaaagctgaggctcagaaagatgcagcacctggccgaaggtccacmgtgtagcaagcgacacagctgaacttccaacaccaaccactccaacttcaaggccagagtctgctccaccataccgggctatcctgagaaaccacataag

SEQ ID NO: 415480 - DNA, 201 bp, Homo sapiens
ccacctagctccagcactgtcttcactgggaagcccaatcctgacccaaccctccagcatgctttctgctctgatcatctggccccagtcttcaaggttayctgtgtctttttaaccagaggccaggtttcccccagaccaaacccctcccagagcaggcccaatgaatgtatatatccatgtacttatagtatcatttaa

SEQ ID NO: 415481 - DNA, 201 bp, Homo sapiens
cctgggtgatgaaataatatgtacaacaaacccccaacacacgagtttatctatgtaacaaaccttcacatgtacccccgaacataaaataaaagttaaamcccccccccaaaacctgcttgaacgaaggcaacttggaagtgtgtttcaggctgcagtcctcaatgttggcccaaataaactctctcaattttgcctgct

SEQ ID NO: 415482 - DNA, 201 bp, Homo sapiens
gggcactcttccctccatgacccctgtgtcaggtctacttcacagcaagctccactcctcagtaggcacccatgagataccacaatcagggaagtcagtgyaacatcagaaggacagaaactaagactgtccccacattctgcatgtgcccagagtgaaagtacagtttattagggtgggcaaattgggagtttcagatag

SEQ ID NO: 415483 - DNA, 201 bp, Homo sapiens
cagctggtgggtggacaggtgcagatgcagtgaggctgctgaggcagagcacctagagaaaggcatggccaccagtgcgtcaggagctaaagggaggcaasaggactgaaagtggggatcctaggaaggccaggaggatcctggtggatactaagcaggagaggagcacctgggaggaaaatcagttcaagcacggtccta

SEQ ID NO: 415484 - DNA, 201 bp, Homo sapiens
aagaaatcactcaaaagcagcactggccatgtgtgcttcctgaagactatggctctgaagggcaaaggcaggctttcggtattgttatgaacagtaaggayatgtccaaaaagctaggagggcagaccagtaactactattcaaaatgacagacattctagagtcgaaagttgcacagactaataatgaagaataaggaca

SEQ ID NO: 415485 - DNA, 201 bp, Homo sapiens
agtctctgccatttcttccctgttcagtccataggctttcaggagatttaataaaatgaggttggcccctggcaccatgaaggaaacaaagagcctccccrccccccactcaggtcacacacccaccctggagcagggaggaaagcctcagcacatactcacttgtccaatcttcttcaaagcaatgcaggaagtggaatc

SEQ ID NO: 415486 - DNA, 201 bp, Homo sapiens
tggggcctgcattctccctgggcacgctcagtccagagggtctgtctgtccaactcatgactttacctgtcgaactgaagttaaggggctgcattttttcmtgaagagagattccagtctctgccatttcttccctgttcagtccataggctttcaggagatttaataaaatgaggttggcccctggcaccatgaaggaaa

SEQ ID NO: 415487 - DNA, 201 bp, Homo sapiens
gagaaggagctgcactctgaaagagaagcagcacacagggattggtactgtcacccactgcctgctgcccaggctcactgccccactaggcgcccactctrcctcctgcttgcaggccttcattcctcctgggtgccataggtctctggcctccaggctacggtgagaatcatcctggcccacactggctatctctcaatc

SEQ ID NO: 415488 - DNA, 201 bp, Homo sapiens
acaccaggggcctgaccactgggctccagtctgactgtgagcagctctcccagcaacactgaccctgggtcctccccatccccaggtgtggaaatggtggrcagagccacctgcttaccgtctcatctgtgcagatggagtgcacctgggtcccaaacatcactgatgtgaaaatgaggaagagcaggccctcaaagcaca

SEQ ID NO: 415489 - DNA, 201 bp, Homo sapiens
atactggcatctgaaagagagaggaaagaatccagaaacttggtgttgtcttgtcatcaaggaggtttgacaaaattgctcccatagtgagttgtgattayttatctgcaacccctgtgtgcaaagccacctaatcaccttgttcatttaaaacatgagttctcttccctgattctgagagtcaatttagccttcttgaaa

SEQ ID NO: 415490 - DNA, 201 bp, Homo sapiens
cacccactgcctgctgcccaggctcactgccccactaggcgcccactctgcctcctgcttgcaggccttcattcctcctgggtgccataggtctctggcckccaggctacggtgagaatcatcctggcccacactggctatctctcaatccctcagggaggcctcctcaacaggccaggccccagccagggcttcccttcc

SEQ ID NO: 415491 - DNA, 201 bp, Homo sapiens
tcctcaggtttccctgggaacttatcgatgcctcagaatgatttctcttcttggctccttgtggggcagggcttggttggggtggccaccagcctgatggsctggccgtgggtggctacaagtatgggtggccttgggctgggcagggtattggggagaatgagaggctctgacatctggcagacaccacgaggtacaaat

SEQ ID NO: 415492 - DNA, 201 bp, Homo sapiens
ggccctcaaagcacagcaggataaggagaatcactgtggtgggtggagagaaggagctgcactctgaaagagaagcagcacacagggattggtactgtcayccactgcctgctgcccaggctcactgccccactaggcgcccactctgcctcctgcttgcaggccttcattcctcctgggtgccataggtctctggcctcc

SEQ ID NO: 415493 - DNA, 201 bp, Homo sapiens
gcacagcgcgagacagcgccctctacattagtcatgccagacagacagcagagagaaaccagaggccagagaagtgattttaaaaggaaaagagagcagcwtcggtcaccaaaagaaatcgaaaggatggtttttaaaaaataaaatgtggggacttttttttttctctgcaatgctcagccattttacttgagacataaa

SEQ ID NO: 415494 - DNA, 201 bp, Homo sapiens
aagttcccaaggtccagggggaacatgcaggctgtggccatgccagagccagaggaggagagtgtgggctggtcaaaacaagcccagacatactcacgggrtccgtcagcatggcccggcagtgggaggccagggccaagaaggccagcaggttgaacacaattccgttgatgatgctatacacgtagtctcgagatggaa

SEQ ID NO: 415495 - DNA, 201 bp, Homo sapiens
aacaaagaactgtgccctgcacaccaggggcctgaccactgggctccagtctgactgtgagcagctctcccagcaacactgaccctgggtcctccccatcyccaggtgtggaaatggtgggcagagccacctgcttaccgtctcatctgtgcagatggagtgcacctgggtcccaaacatcactgatgtgaaaatgaggaa

SEQ ID NO: 415496 - DNA, 201 bp, Homo sapiens
agcctggggtggggagaggagacggcagtgagctgtgattgtgccaaagttccttagttctgctgggcatggtggctcatgcctataagcccagcacttarggaggccaaggtgggaggattgcttgagcccaggagtttgagaccagcatgggcaacatagtgagatcctgtctctaaaaataagttttttttttttttt

SEQ ID NO: 415497 - DNA, 201 bp, Homo sapiens
gaaggctatagtggttgcaattgttcagatattacacttggaataattattccaaagctgaaagtggtaaagtaactgcttgagggagaccacaaggtttwtatatatatatatatatatgtatatatatatattttaaactagtaatgataacaaaccaaagtgatacacaatgcatacattgcttataacctttggata

SEQ ID NO: 415498 - DNA, 201 bp, Homo sapiens
gtgggtggagagaaggagctgcactctgaaagagaagcagcacacagggattggtactgtcacccactgcctgctgcccaggctcactgccccactaggcrcccactctgcctcctgcttgcaggccttcattcctcctgggtgccataggtctctggcctccaggctacggtgagaatcatcctggcccacactggctat

SEQ ID NO: 415499 - DNA, 201 bp, Homo sapiens
atgctgctgaagttcgacctcaatgagatcaaagttgtatagctgaggaacaccaggagtgaagtcagtgccatcctgtgtgggcccccaagattgcaccygccgcatgggtctgtccccaaaaaaggttggtgatgacattgccaaagcaattggtgactggaagggtctgaggcttacagtgaaagtgactattcagaa

SEQ ID NO: 415500 - DNA, 201 bp, Homo sapiens
gagcccagagatagtgggtaaaagcatcataaggactagaaatggggtcttcttgttgctaattagtaggggtgaggggtaagtggcagatgtgactgccrtccatgcccagacagggaattgtccttgaacctactcatgcggtgtcttctggggtacagtgagtccacagggcaggacggccttggagtcaagagccca

SEQ ID NO: 415501 - DNA, 201 bp, Homo sapiens
ctagaactaagtcaaaaggaaaaccccaactttccacgctcaagtaacaaaaggaccagaggctactccctttgcaacctccccacccccagccccttttstgcatggcaggtgaaaaattgaaagtatcgctaattgatcccctcccacaaccaatcagactggtcttaggccaagtcttcatttgcctaggagtataac

SEQ ID NO: 415502 - DNA, 201 bp, Homo sapiens
tgtgctggcaaaccagccctctggggcaaaaaattaaaaagccttgatatggagtgtttgctgatacctatgatgtaaatattcccgccatggccactttscagctaccagcaaggcatcctggcaccagggattgggaggagatggcatagtcctaagagtcagccttgggcattgggccatgtgggactgggcagtggg

SEQ ID NO: 415503 - DNA, 201 bp, Homo sapiens
tgtgtgctttgtatcctaagataaatttgcttagaaaaccagagtcaagatttgaaataggtgaggcagggtttcctccttagacactgacagcattctcygtaccccttcaaatccttactctcctaaaggcagctgagtccgcgacagaaatttgccctatgtgagtaaaacatactttgggagaagaacttggtgcag

SEQ ID NO: 415504 - DNA, 201 bp, Homo sapiens
attgcttccagaggtgctatagggtgctgcccattccttgccccttttccgcttctagaggctgcccattttccttggcttgtggctgcatcattctggcygcttctattgtcacacctcctctctgaccctccctgcctccttgtaaggacacttgggattacgcccatccagataatctagaataatctcccattttgt

SEQ ID NO: 415505 - DNA, 201 bp, Homo sapiens
accgcaggttttcttcgctgctggttagatccaaagcccatcccatcctagtaaactgggacagcgccgcttctcacatcactatgggggcttctgctccrtggcggggaaaggccagaactgctgccttaaatacgcttttgcatcatccggttgctaacctccggccacagcattccccactccaaaatgccacttttc

SEQ ID NO: 415506 - DNA, 201 bp, Homo sapiens; identical to SEQ ID NO: 104993

SEQ ID NO: 415507 - DNA, 201 bp, Homo sapiens
atgcagatagggttttttacttggccagagccttgacacctgcacacatggcaacaaacagaagggaggcgaaatcttccatattggatgcacctgtcttmcaggtgcagctgccggcatttatctgtgcaagcttctagcttgcttatttatgcttgcagcttgacttttcaggctgctttctgttggaaaagaaatggt

SEQ ID NO: 415508 - DNA, 201 bp, Homo sapiens
gagtgatcgtaactaaaggtcagtggggaatagatccgattcagtgcttttgccttatgcatttcagcatcctggctccccagggtggcaggagctgaggragggccacacactggcaagatttcaagaccactctctgcactgaagaggtaaaatttgcactgcaagtcacatccctgaggccagaggtcagtacccttt

SEQ ID NO: 415509 - DNA, 201 bp, Homo sapiens
ttttttacttggccagagccttgacacctgcacacatggcaacaaacagaagggaggcgaaatcttccatattggatgcacctgtcttccaggtgcagctrccggcatttatctgtgcaagcttctagcttgcttatttatgcttgcagcttgacttttcaggctgctttctgttggaaaagaaatggttttgggggctgc

SEQ ID NO: 415510 - DNA, 201 bp, Homo sapiens; identical to SEQ ID NO: 104943

SEQ ID NO: 415511 - DNA, 201 bp, Homo sapiens
ttacagatgtccacctggtcgttccacctctagaaatttgtaagacaaataattcggccgggcacagtggctcacatctaaccccagcactttgggaggcygaggtgggcggatcacgagatcagtagatcaagaccatccttgctaacacggtgaaaccccgtctctactaaaaaatacaaaaaattagtcgggcgtggt

SEQ ID NO: 415512 - DNA, 201 bp, Homo sapiens
ggccaggaagaaaagattttaaaatttagaatgaatagcccttctgggttttctttttgacaattcttggacttgaggtaaaacaaggaggattgtggccrgatttcagatcccaaagccagcctccatcttaggcctttgcctcattgtgccttttaggttttcttacccaccgtctcctgttttgtcttttttttcttt

SEQ ID NO: 415513 - DNA, 201 bp, Homo sapiens
atacgtccaggtgtgtaaggcagcctcagggactgccaccacttggtcacatacatgtccctccaactaatcctagctctcaaggacaggtggttctgggscctgtgttgcccatgagacttggtccacggcaagcctgtgacggagtgaaagtgaggggacacccaatttgaaaactcggcaggaagccagactccatga

SEQ ID NO: 415514 - DNA, 201 bp, Homo sapiens; identical to SEQ ID NO: 105107

SEQ ID NO: 415515 - DNA, 201 bp, Homo sapiens
ccaaggactgtatgttctttatcatccctcatttgatagacaagacaactgagacacaaaagggtgaaataaacagtaagtactccatcccaggccatctmatccagagggtgctgtcttgaccactctactactctggttgatgggaggcagtaaattgtccatcagtatacttcttcatcaaagctacatagtcaaaaa

SEQ ID NO: 415516 - DNA, 201 bp, Homo sapiens
tctgtaaccgggttcttgagctgcttgggctgctcccaccctgtggagcgtactttcgtttttcaataaatctcttttgttgcttcattctttacttgctwtgtgcgttttgtccatttctttatcaagacgccaagaacctggacaccctccaccggtaacaggaggagcattagtcagcctaccacagactccaacgaa

SEQ ID NO: 415517 - DNA, 201 bp, Homo sapiens
ggctggagaagagaccctcatctacagcccttcaccagcaccacttctagccagagccacttgcagacatcacggcaggggatgaggagccggggttgctrctgctgcttccggtggcccctggggtggaagtggggtaggggaagaggaggggcaggagggagagttcctgtgagcatgtggggggtgcctttcctttaa

SEQ ID NO: 415518 - DNA, 201 bp, Homo sapiens
ttatccttttaactttttgcctactttatttctgtaaaattgttttaactagacccccccctcccctttctaaaccaaagtataaaagaaaatctagcccyttcctcggggctgagaaaattttgagtgttagccgtctctcggtcgctggctaataaaggactcttaattcgtcttaaagtgtggcgtttttctaactcg

SEQ ID NO: 415519 - DNA, 201 bp, Homo sapiens
gggcttttgggaagagctgcccgcatactgagagacagcttcttataaacaaggagagtttttgtgtgtgcgagatctctaagccagcgtgggagggagcrcctcaggataagttattatattcatttcgttggtttctctcctgcccaattcttggcacaggcattatgtttgaagaaaccaggataaggtacactgctt

SEQ ID NO: 415520 - DNA, 201 bp, Homo sapiens
gcccattttccttggcttgtggctgcatcattctggctgcttctattgtcacacctcctctctgaccctccctgcctccttgtaaggacacttgggattaygcccatccagataatctagaataatctcccattttgtgattcttaataacatctgcaaagcctcttttaccttgcagaataagatattcacaggttctgg

SEQ ID NO: 415521 - DNA, 201 bp, Homo sapiens
tccagagggtgctgtcttgaccactctactactctggttgatgggaggcagtaaattgtccatcagtatacttcttcatcaaagctacatagtcaaaaagycacaggaggctgtgaggagaagctcactgctgctctgttgaagtctgtattggtttcctatggccactcttaacaaattaccacaacctcagtggcttaa

SEQ ID NO: 415522 - DNA, 201 bp, Homo sapiens
gcgccttctcgggtgtccaagtcgcgcatccatacaatgaggggtaatatactagattacctgaggtcttcttacggtaaaaacaccggtgtcttaaggtktcccagtggaatttgggggccgggttgacttcggagctggagctcgcaaaggccggggctgctgcagattctgacgctttgtggacccctactaccgagc

SEQ ID NO: 415523 - DNA, 201 bp, Homo sapiens
cccggtattttaaatgttctgtaaattattagccaaatagaactgtaatggggttgtatttatgggcgcctagaaagaaaacacaaggacttggtaggccrggaagaaaagattttaaaatttagaatgaatagcccttctgggttttctttttgacaattcttggacttgaggtaaaacaaggaggattgtggccggatt

SEQ ID NO: 415524 - DNA, 201 bp, Homo sapiens
cacatggcaacaaacagaagggaggcgaaatcttccatattggatgcacctgtcttccaggtgcagctgccggcatttatctgtgcaagcttctagcttgmttatttatgcttgcagcttgacttttcaggctgctttctgttggaaaagaaatggttttgggggctgctttttattaaaagaaaagccttaccaaggact

SEQ ID NO: 415525 - DNA, 201 bp, Homo sapiens
aattactattatttttcacacaccatctcatttgctctctgacataaccatcctcgaagcatcatatgttcttccaatgagacacacagaggttactggtrttattctggagttagatcccaaactcttagtttagaggttgatttttcactttatatgatcatttgtccatcaaatagtgatatatgtcagataagtcag

SEQ ID NO: 415526 - DNA, 201 bp, Homo sapiens
caaacaggccccagtgtatgttgttccccccatgtgtccctgtgttcattcagctcccacttataagtgagaacatgtggtgtctggttttctgttcctgygttagtttgctgatgataacaggttccaactccatccatgtccctgcaaaggacatgatctcattcctttttatggctgcatagtattcaatggtatata

SEQ ID NO: 415527 - DNA, 201 bp, Homo sapiens
gtccctgtgttcattcagctcccacttataagtgagaacatgtggtgtctggttttctgttcctgcgttagtttgctgatgataacaggttccaactccawccatgtccctgcaaaggacatgatctcattcctttttatggctgcatagtattcaatggtatatatgtaccacattttctttatccagtctatcattgat

SEQ ID NO: 415528 - DNA, 201 bp, Homo sapiens
gtgctttgggatattactcaataaatgtatgccagcccaacgtcctggagagtttctctgatgttttgttttagtagtttcatagtctttaatcaactttsatttgatttttgtatattgcaagagataagggtctggtttaattcttctgcatatggatatctggtttccccagcaccattcactgacgagagtgttcgt

SEQ ID NO: 415529 - DNA, 201 bp, Homo sapiens
ccatgtccctgcaaaggacatgatctcattcctttttatggctgcatagtattcaatggtatatatgtaccacattttctttatccagtctatcattgatrggcatttgggttgattccatgtctttgacattgtgaatagtgctgcaatgaacatacacacgcatgtatctttgaaatagaatgatttatattcctttgg

SEQ ID NO: 415530 - DNA, 201 bp, Homo sapiens
gatttgatttttgtatattgcaagagataagggtctggtttaattcttctgcatatggatatctggtttccccagcaccattcactgacgagagtgttcgytccccagtgtatattcgtggcacctttgtcaaaaatgagttcactgtagatgtatgaatttatttctgggttcttcattcagttttgtttgtctgtatgt

SEQ ID NO: 415531 - DNA, 201 bp, Homo sapiens
ggttcaaggatggtcattttggcatataggtattcaattactcttacaccatttgttgaaaagactttcccccattgagctaccttcctccattgaattayttttatactgtttttgaaaaatcatttttcacatcttggcctgttcctagagtttctgttctcttctattcatctattagtctgtctttaatgctaatgt

SEQ ID NO: 415532 - DNA, 201 bp, Homo sapiens
tttttttttgagaccgagtctcactctgtaacccaggctagggtgcagtggcacgatctcagctcactgcaacctctgcctcctaggttcaagcaattctyttgcctcagcctcccaagtagctggaattacaggcatgcgccaacatgcctggctaagttttgtatttttagtagagacagggtttcacaatgatgatca

SEQ ID NO: 415533 - DNA, 201 bp, Homo sapiens
agtgctgggattacaggcatgagctaccaagcccagcagatgataatctttttaatacatcatgaagtcaagtaacataactcctccaactttattttttycacattgaattggcaattctagattacgtgcatttccatgtaaattgatttattcaaatgttctttcttcttaaatcacttttgaaaatttgtgtacctc

SEQ ID NO: 415534 - DNA, 201 bp, Homo sapiens
agaggatcaaaatcctaaatgcttaaaaacaaggacttcatatattgtaatcaattacatctttttttttacagcagaagagtatatcatacccattactrtgtcataactggaccccattaatgaacttttgaacaactatatacattaaataaacaaatgcaatcttgacaacatccggggcttttttagttcattaaa

SEQ ID NO: 415535 - DNA, 201 bp, Homo sapiens
gtctaaatcaggatctgattttgccagtgaaaatttggcaataagcacacagcactatacagcagtagagaaaccaggcagtgggttgtagcgcattcggwgttagcaggtacaggacagggtctggagccaggcaagcatgggtttgaacccagcttcactcttattggctgattgttttttggcaaattattaaactcc

SEQ ID NO: 415536 - DNA, 201 bp, Homo sapiens
tttttttaaatttccatttgaatttctcaagttcatgttccactttacttatttggtttttgtaatacacaatctccatattccctccatcccactccatrtggtgggcacactgtccatcttcgtcaccccctacacttgttttgtgagcctaatagctgcttaagtcttgtttgaatacaatttagagatcatcctccg

SEQ ID NO: 415537 - DNA, 201 bp, Homo sapiens
catgttgatccttcaggtatttttatgcctgtcttgggtcttccaggttttacaaaactttctgaatcattgtcaccactatctctggaacagttggaaaytcattctgaatattctttggccttcggaagagttttttagtggacacactgccttataggagacgtatatttatttcttaaaattaaattctgatatctc

SEQ ID NO: 415538 - DNA, 201 bp, Homo sapiens
tgagattctcatcaaaatccataattctaacatttgggaggggaggaattcataaacactgaggctgtgtctgttgcataacactgcatcagagaataaarggcatgttcagataaccgaattttaatatggattacttgcatggattccaacttacttttcaatttaggcaattttcaattaggcaaaacaatttacata

SEQ ID NO: 415539 - DNA, 201 bp, Homo sapiens
aaacaaatgcaatcttgacaacatccggggcttttttagttcattaaattcaacatccattattgaaacttgctagatagaatgtaccatgtaagggattrttggaaatcaaatgggaataaagcaaaatacctgctctgcaagatatccctgggcagagagagaaaaaagaaagaaatgtaacaaactgtcatacatcag

SEQ ID NO: 415540 - DNA, 201 bp, Homo sapiens
gataacgtcacccaaaacttagtcaaagtggggtaaagaatatatgagttgaattacttttcgctcattccccctaaatctctgtacctttaagcatgccaaaaaatatctaaaattgttgcagtttagcaaatgattgtcatatttatactcacatgtttactgcttctatttggagtttgaggaatttacccagagtaa

SEQ ID NO: 415541 - DNA, 201 bp, Homo sapiens
agaaagaaatgtaacaaactgtcatacatcagagatgttggtaatactatagaggaaaatggtagtactcgtgggagcacaaggagagtgtttaattttgkcatggggatggtggtaggtgagtggtgttttaaagtgtttcttatagaaataatcttatttgggtatttaataatggtaacctacataacccccaaaatc

SEQ ID NO: 415542 - DNA, 201 bp, Homo sapiens
tatcaagcttcatccatgttatggtatgtttcaggacttcattccttttgtatgactgaatactatttatttgtatgaatgtaccatattttatttatctrttgctccattgagggtcatttaagttatttctgccttgtgaccactatgaatagcattgctatgaacatccatgtacaagtttttgtttgagtaccagtt

SEQ ID NO: 415543 - DNA, 201 bp, Homo sapiens
ttgaattgctcggccatatggaacttctacgtttagctaattaaggaactgccaaattgtttttcacagcaaacgccccagtttacatacccaccagcaawgtttgagggctctagtttctctacatcctcaccattacttgtcattttttaaaatgatgtccatcctagtgggtgtgaaatagtatctctagtgatgttg

SEQ ID NO: 415544 - DNA, 201 bp, Homo sapiens
ttcctaagtgaaaactggatatcccaaccttctggcccagtaggtttcatggttaagacctggtagtgagaacattttaggaactatttgcttgggcaggyaatttttcactctgatcacagctacttaatcagagcttgacaaactttctcaattgcttctggggctggtctgctcaggtcctttggccaaaaaagatgc

SEQ ID NO: 415545 - DNA, 201 bp, Homo sapiens
ttagcaatagaaagtatattaagttatcatagttgtcctatgaaagatgctacataaaatgcagtcattatagaaaaggtgtgagtgtctgcctgtgtgtstgcgtgtgcttatataaatgatgttatgggaaagagaagtagttttgaccactggaagacagtacagcatttgaagcaaaactaagatgtaacatcatct

SEQ ID NO: 415546 - DNA, 201 bp, Homo sapiens
actggaagacagtacagcatttgaagcaaaactaagatgtaacatcatctaaggaaatatgggatgaacacctcttggcgtgggcaactactggaagtaawtgtttacaagccaaaaccacaaattcccaatcatgaacagaggtcgttttgacttcactgcaaattgaagatcaccataatacccccaaagcctggcttt

SEQ ID NO: 415547 - DNA, 201 bp, Homo sapiens
cagaataaaatattttaaaagaaaaaaaaagttaggcacatttaacttgtaaaagttagtgtccctcaaattctagaacattcatagacatgaaaatcacsctgcaaaacaaaatccccttcgttcaaagagagctgctcttgcagtctctgctctctcatttctttattcactctataatattcagtgtggggttactgt

SEQ ID NO: 415548 - DNA, 201 bp, Homo sapiens
gcgtggtagctcaagcctgtaatcccagcactttgggaggccaaggtgggcggatcacaaggtcaggagatcgagaccatcctggctaacacggtgaaacyccagtctctactaaaaatacagaaaaattagcctggcgtggtggcgggcgcctgtaatcccagctactcgggaggctgaggcaggagaatggcgtgaacc

SEQ ID NO: 415549 - DNA, 201 bp, Homo sapiens
tatgagaaaagcctcagaagaaaaataggtcaccaggagttgccactgctaagagtgggagcagaggaggaggaagaagcaggcatgagaatgtcgaagawggaaaaaacatggtttttgcacagattacgtctggatgcatctaatcaggtccagttttctcagcctctcatttcattagatctcattgtcttcgtcttc

SEQ ID NO: 415550 - DNA, 201 bp, Homo sapiens
aagactgtaaactttattataattataggacaacatgaaaagctttagagctaaagaataaaactttctcactttacatgttttccaaataaacacccatyatgtgtgtgtgtgtgtgtgtgtgtgtgtgaatttgagacacatggaacttagcagggagtgtgcttcagaggtaataaatgctcccatcaacaaccacac

SEQ ID NO: 415551 - DNA, 201 bp, Homo sapiens
taaactttattataattataggacaacatgaaaagctttagagctaaagaataaaactttctcactttacatgttttccaaataaacacccatcatgtgtrtgtgtgtgtgtgtgtgtgtgtgaatttgagacacatggaacttagcagggagtgtgcttcagaggtaataaatgctcccatcaacaaccacactattgtg

SEQ ID NO: 415552 - DNA, 201 bp, Homo sapiens
agcagtgtggaggagaagatgttgtggtggagagaagtggtggtagacaggagccctcggaatcactgggcttcttttaaatcctagtgaggtgccaggcrcggtggctcatgcctctaatcccagcactttgggaggctgagcaggcggatcacttgaggtcaggagttcgagaccagcctggccaacatggtgaaaccc

SEQ ID NO: 415553 - DNA, 201 bp, Homo sapiens
ccaccagctctggagctggggtaccagagttcaaatccagttccatctctcacttgttccatggccttgggcaagttacttagcctctcatgcctgtttcrtaatctgtaataacactaatgtcttggtatcctcctagcatttttggaaaattaaatgagctaatatatggaaagcgtttcgaaagtactgggcatagag

SEQ ID NO: 415554 - DNA, 201 bp, Homo sapiens
tccttcattgccctcactgatgagctatgaaattataatttcaggcttatctctagctattaataacaaacaataagaataaattaaatttatatcagatyttataattactattatttttcacacaccatctcatttgctctctgacataaccatcctcgaagcatcatatgttcttccaatgagacacacagaggttac

SEQ ID NO: 415555 - DNA, 201 bp, Homo sapiens
tgactggactgaagagcaaagcttgcaagatctgggaagaagagcttcctgggcagagggagcagcgagtacagagatgggaaagagcctgacctgttcartgaagatcacagaggccagtatggctcaactacagacagggagggggcagtcaagttcaagaagagattggagagatagacaacaccaaagtcatatggg

SEQ ID NO: 415556 - DNA, 201 bp, Homo sapiens
ccctcccggcttcgctcgggacctggctctcaagccagcttggctggtggacagaccggtgcgctctgcacacccgagtgcgaattccaccggcgtgagartgagcgtgctcgtggtcctggccctgaggtccctgggtcgcagctgttccctctcccaggccgccccctccaggtgactgcgaggcaacctgttctaacg

SEQ ID NO: 415557 - DNA, 201 bp, Homo sapiens
ctgcccgctggcatgccggcttaatgtttacgcctgcaaaatccgcagtgactgtcgcttgcaaagctccctctgcagagggacgtcctccccaccccgtyccccgccagtcccgctacggctggcagctggagcccctcgggtggccaacagtgaggcttggaaaggcgtcatggacagacctgggtcgctttctgtctt

SEQ ID NO: 415558 - DNA, 201 bp, Homo sapiens
ataccaaatataatttataaagatgggaaatgccagaatcaagcagactagcatgtgtcattttgaacacattaaccctgaggtttctgtgagacatttayatgaagaggcatgtatgaatcatgagctgaaataagcaaggactgaagccattcgcttgatggctgaatgctagctgcagatactcagcttgaatgtatt

SEQ ID NO: 415559 - DNA, 201 bp, Homo sapiens
ttacgcagatggtggcccccagcccagaaaatcgaaggcggcccctgcccgctggcatgccggcttaatgtttacgcctgcaaaatccgcagtgactgtcrcttgcaaagctccctctgcagagggacgtcctccccaccccgtcccccgccagtcccgctacggctggcagctggagcccctcgggtggccaacagtgag

SEQ ID NO: 415560 - DNA, 201 bp, Homo sapiens
tccaacttgcgattttaacaagagtctttgcccgaggtcccacctcagggcccaaccccagaaggcaaggtgggcacttcctcacgccgcgctgtcctgcygagtccctgcggtaggttcgcagttgtggaaacccaggtttcttacgcagatggtggcccccagcccagaaaatcgaaggcggcccctgcccgctggcat

SEQ ID NO: 415561 - DNA, 201 bp, Homo sapiens
cgggtgcaaaaggacaaggatttggtgcctcggagacacggtcccctctccgcctccagagaagagcaggcaggcagctcccgggaccgaagccgggtccrcatcccccgcgcgcgagctggtggctcagcagcggcgcttcaggtgagtgcgccggggccggcgtcccgcagggccgagtgggtgagggcagacctcccc

SEQ ID NO: 415562 - DNA, 201 bp, Homo sapiens
tacccaccctccccattttttgtcaaacaaccaaactctcccacttgagtgtttcatggaagaatggttaaaggcaggaagaagagagaagaaaagaaaargagctgagctacaatcagaaagaagaaaacaagctagagagtgaagatatctctatgacccccattccctaaagaaggaactgtctcctctctcccaaca

SEQ ID NO: 415563 - DNA, 201 bp, Homo sapiens
gagcttctactcattgagccttctccaaacatgtcagctcactcaggtgtgtgtcagaatagcccttgcaaaattctctcataaagcaaagcttttttccytgtgctataacacatccccactgtgggcaccggttaggcctcaggctatctagcccaatggctactgtacactttttttttttttttgagacagagtctc

SEQ ID NO: 415564 - DNA, 201 bp, Homo sapiens
gtatgtagtataattcaagtctggtatttctttattgatttttcatctgtatgatctatccattcttgacagtggggtactgaagttcactactattattrtattgctctctatttctcttttcagttttggtaatatttgcttcatatatttgggtgctgtagtgttgggtgcacttacagttatatcttcatggttaat

SEQ ID NO: 415565 - DNA, 201 bp, Homo sapiens
ttttccactctgtctaggtgttctctggcaaaatagttttcagtattctagaatgccctatttccagaaaaggaaatctgcatgtgatttcaagtatctayttaagactgttatcctattatagtttaccacaagatttaacccagtaagtcttggtgaggatttggtagtggaaatttttgatactttggcccatgcgtc

SEQ ID NO: 415566 - DNA, 201 bp, Homo sapiens
tgaaaggaatcacttggccaggcacagtggcacatagctgtaatccttggcctttgggaggccaaggtgataggattccttgaggccaggagtttaagacmagcctgggcaacatagcaagaccccatctctacaaatactttttaaaattaggcaggtgtggtggctcacacctgaagtctcagctattctgcagtccct

SEQ ID NO: 415567 - DNA, 201 bp, Homo sapiens
taatcccagctactcgggaggctgaggcaggagaatggcgtgaacccgggaggcggagcttgcagtgagccgagaccgcgccactgcactccagcctgggygacagagtgagaccccatctcaaaaaaataataataataaagaaaataaataaataaataaataaataaataaaaataaaaaggcaactcccttttttgg

SEQ ID NO: 415568 - DNA, 201 bp, Homo sapiens
gctactcgggaggctgaggcaggagaatggcgtgaacccgggaggcggagcttgcagtgagccgagaccgcgccactgcactccagcctgggtgacagagygagaccccatctcaaaaaaataataataataaagaaaataaataaataaataaataaataaataaaaataaaaaggcaactcccttttttggatgtatta

SEQ ID NO: 415569 - DNA, 201 bp, Homo sapiens
cccgggaggcggagcttgcagtgagccgagaccgcgccactgcactccagcctgggtgacagagtgagaccccatctcaaaaaaataataataataaagaaaataaataaataaataaataaataaataaaaataaaaaggcaactcccttttttggatgtattaagaactggcttcacaagaaagatgctcatttatgat

SEQ ID NO: 415570 - DNA, 201 bp, Homo sapiens
ccgggaggcggagcttgcagtgagccgagaccgcgccactgcactccagcctgggtgacagagtgagaccccatctcaaaaaaataataataataaagaaaataaataaataaataaataaataaataaaaataaaaaggcaactcccttttttggatgtattaagaactggcttcacaagaaagatgctcatttatgatt

SEQ ID NO: 415571 - DNA, 201 bp, Homo sapiens
cgggaggcggagcttgcagtgagccgagaccgcgccactgcactccagcctgggtgacagagtgagaccccatctcaaaaaaataataataataaagaaaataaataaataaataaataaataaataaaaataaaaaggcaactcccttttttggatgtattaagaactggcttcacaagaaagatgctcatttatgattt

SEQ ID NO: 415572 - DNA, 201 bp, Homo sapiens
aatataggattatgatttcatcatgaatattttgagcacacactctaagtttggagctatttcttgatggaagtgaggggattttattttcaggctcaacstactgacagccacatttgacatttatggggagagggcctagagaggaagagcattaagatggtggccgagatccagacacattatttttagagcaagtcc

SEQ ID NO: 415573 - DNA, 201 bp, Homo sapiens
aagcagactagcatgtgtcattttgaacacattaaccctgaggtttctgtgagacatttacatgaagaggcatgtatgaatcatgagctgaaataagcaargactgaagccattcgcttgatggctgaatgctagctgcagatactcagcttgaatgtattcatgtttttttagagtagggtttctgagagcccccaaata

SEQ ID NO: 415574 - DNA, 201 bp, Homo sapiens
gcctgtcttgggtcttccaggttttacaaaactttctgaatcattgtcaccactatctctggaacagttggaaactcattctgaatattctttggccttcrgaagagttttttagtggacacactgccttataggagacgtatatttatttcttaaaattaaattctgatatctcaaccactataaccctaacctacatcc

SEQ ID NO: 415575 - DNA, 201 bp, Homo sapiens
tacttttattgggaagtaattgaataaaaactgaggtcccttgcttgctttcatctccattcccagcagcttatctggccccgtcttcctcttctgaatamcatatgcaaccctgatacctaaacttcaacaagtgagagctgacatttgtgcaacagaaattctgcctcagtatttaaagctgaatcaaaaacacatgct

SEQ ID NO: 415576 - DNA, 201 bp, Homo sapiens
gctagctgcagatactcagcttgaatgtattcatgtttttttagagtagggtttctgagagcccccaaataattggaggatatttctactcttgcaattgaaaaaaaaatcaatgtgtcaattaaaagaaagatttctaaactggaaatctgaagaacagagtttttaacctagtcgttttgctcactggctgtgtaaccc

SEQ ID NO: 415577 - DNA, 201 bp, Homo sapiens
tttccaacaacaacaacaacaacaaaaagaaaaaacagaaaataactgaatcactataatatccccaaaggctggctttcacaccatccaagggtcacagstcacgctacattgaagcgtatgaaagagtgtctgcttgtgttacaaacctgatggagcagaggtggggcaggggggaaatgaaagcaaaagggacagact

SEQ ID NO: 415578 - DNA, 201 bp, Homo sapiens
ctgaggcaggagaatcacttgagcctgggaggcggaggttgcagtgagcagagatggtgccactgaactccagcctgggtgacaagtgagattccatcccaaaaaaaaaagactaacttactgtcgatgcagatgagaatttgtatctgaatcaaacagacctccaccttgaccacctgaagacaccttgtgtccttctac

SEQ ID NO: 415579 - DNA, 201 bp, Homo sapiens
agcgtttcgaaagtactgggcatagagtggacacgcagtaagtattcagtcttgtattacccagagtcttggtctcccttctctaagacaatgttgtagcrtagtagacaagtgatttgcttcatctttaaagtgggaataattcccaccttgtagatccaaaccagaaatattaattcaatgttaacttactgtctagct

SEQ ID NO: 415580 - DNA, 201 bp, Homo sapiens
agagccaaagccaagccactttggcccttggtaaagacccagcttatcagagtttgggtccagctccctctaggcatcttctctcattatcacagatgccrgccccctccccacccactctgggaagctgagggtgtggctggttctccttttctaggatgttccatgaggccacttctagcagcagccactgcacgtgct

SEQ ID NO: 415581 - DNA, 201 bp, Homo sapiens
cagtttataagattttgtgcttttataaatgattactaattccatcattccatgggatcctccctattatccaataaagttgtaagacaagtatcattctrgcctccaaggcaggatgtcatggctcactgggaaatagaatgtgcagttctggatcttagagtctctactctttctaggctcatgagagctgagaaatca

SEQ ID NO: 415582 - DNA, 201 bp, Homo sapiens
gggaggcggagcttgcagtgagccgagaccgcgccactgcactccagcctgggtgacagagtgagaccccatctcaaaaaaataataataataaagaaaataaataaataaataaataaataaataaaaataaaaaggcaactcccttttttggatgtattaagaactggcttcacaagaaagatgctcatttatgatttt

SEQ ID NO: 415583 - DNA, 201 bp, Homo sapiens
ctgctttgggaattcagaaatgcagcatgaaattaacccaacgtggaatttgccctaaattactagaaattgaatggtgacccttttgtaaaaatttactktggtacttgtgttgaccacaattggtcaaaaatcttggctttattgattcgacctctgagtttattaaagcattcatggttaacaaaaattatgtgtctg

SEQ ID NO: 415584 - DNA, 201 bp, Homo sapiens
aggcaggagaatggcgtgagcctggaaggcagagcttgcagcgagccgagatcgcgccactgcactccagcctgtgcgacagagcgagactccgtctcaamaaaaaaaaaaaaaaaagaaagaaagctagacagtgagacccaaatggacagaatccagccttcatttctatttctcaccctagggcctcacacaaaaatg

SEQ ID NO: 415585 - DNA, 201 bp, Homo sapiens
agctggttgaacacaggagcacaaatgtgggaaatgatgaaagactaaaaagtcatgcgaagtgaatcttggatttttttttgtcaggtaattgatttttyaactaattgattaatcatagttgaaattagggcaattctctttattttacttacaaactatttcgggtcagttgagtaggaagcatgctcattaagaata

SEQ ID NO: 415586 - DNA, 201 bp, Homo sapiens
ctattaatttacttccaaagctggttgaacacaggagcacaaatgtgggaaatgatgaaagactaaaaagtcatgcgaagtgaatcttggatttttttttktcaggtaattgatttttcaactaattgattaatcatagttgaaattagggcaattctctttattttacttacaaactatttcgggtcagttgagtaggaa

SEQ ID NO: 415587 - DNA, 201 bp, Homo sapiens
aagctggttgaacacaggagcacaaatgtgggaaatgatgaaagactaaaaagtcatgcgaagtgaatcttggatttttttttgtcaggtaattgattttwcaactaattgattaatcatagttgaaattagggcaattctctttattttacttacaaactatttcgggtcagttgagtaggaagcatgctcattaagaat

SEQ ID NO: 415588 - DNA, 201 bp, Homo sapiens
aatcattgtcaccactatctctggaacagttggaaactcattctgaatattctttggccttcggaagagttttttagtggacacactgccttataggagaygtatatttatttcttaaaattaaattctgatatctcaaccactataaccctaacctacatcctagtgaacaaaagatgccacatcgctcagctgagttaa

SEQ ID NO: 415589 - DNA, 201 bp, Homo sapiens
tcttcatatctaactatatttttagattaaccatccccatttcccatcttcaccctcccactacgcttcccagtcactgctaaccatcattctactctctrtctccatgagtcagattgttttaattttgagctccccaaaatagatgacaacatgagaagtttgtctttccttgcctggcttatttcacttaacaaaatg

SEQ ID NO: 415590 - DNA, 201 bp, Homo sapiens
ctgcaaggatgaacggattggtgttggcccaaattaaaaagaagagtattcagttctttcagtgtttggagaaagaagaccaaaagcatcatctcacaggsagcagaatgtgaccagcctggctaatgaggaaatgagagggatcctcaacttgagaacccgctctactgaagtctgaacttggaaaaatggacacattgg

SEQ ID NO: 415591 - DNA, 201 bp, Homo sapiens
ggatacttagattgctttcaaatcttggctattgtgaatagtgttgccaaaaacatgggaatgcagatgtctcctcaatatattgatttcctttattttargtatatacctagcagtaggatcgctggatcatatggtagctctatttttagctttttgaggagcccccattctgttctccatagtggctgtagtaattca

SEQ ID NO: 415592 - DNA, 201 bp, Homo sapiens
ggcctgagagtttggagcttgcagtggtggctgagctatgcatagagatgagaaacaatggcctgggtcctggagtcatctaggggaggtggatgctctgwctagtcatagcccgctcttggatttgctctcccagggagtcagcagtgtggaggagaagatgttgtggtggagagaagtggtggtagacaggagccctcg

SEQ ID NO: 415593 - DNA, 201 bp, Homo sapiens
ataaacacagtctatggctatttcagtcttctggattttgagaagcagctgcaaggatgaacggattggtgttggcccaaattaaaaagaagagtattcarttctttcagtgtttggagaaagaagaccaaaagcatcatctcacagggagcagaatgtgaccagcctggctaatgaggaaatgagagggatcctcaactt

SEQ ID NO: 415594 - DNA, 201 bp, Homo sapiens
caaatcttggctattgtgaatagtgttgccaaaaacatgggaatgcagatgtctcctcaatatattgatttcctttattttaggtatatacctagcagtargatcgctggatcatatggtagctctatttttagctttttgaggagcccccattctgttctccatagtggctgtagtaattcacactcccaccaacggtgt

SEQ ID NO: 415595 - DNA, 201 bp, Homo sapiens
ggggtgagataactcattgtagttttgatttgcatttctctgatgataaataatgttaagcacattttcatatgcctgtttgccatttgtatgtcttcttytgagaaatgtctattcatatctttcacccatttttaatcagattattgtatgttttcttattgagttgtttgagctccttataaatttcggttattagtt

SEQ ID NO: 415596 - DNA, 201 bp, Homo sapiens
tcatatctttcacccatttttaatcagattattgtatgttttcttattgagttgtttgagctccttataaatttcggttattagtttctttttagatggayagtttgcaaagattttctcacattctgtggattgtgtcttcactttgtagattgtttcctttgctgtgcaaaagcttgttaacttgatgtgatcccattt

SEQ ID NO: 415597 - DNA, 201 bp, Homo sapiens
gggcacaacttctctgtgccacaatttagaaaatgccctgaaggagaaagagtaacattgagctcatctcatgtgtttacttctccagaggatcaaaatcytaaatgcttaaaaacaaggacttcatatattgtaatcaattacatctttttttttacagcagaagagtatatcatacccattactgtgtcataactggac

SEQ ID NO: 415598 - DNA, 201 bp, Homo sapiens
ggtctctctggagcatgcaggcattgttttatgccatgcttgaattctgaacaaccaaacgctgtcagaaggaagctggcatgttgctccactggtaactcaattccacactgcagatctgccggctagttcaagaagaactacgatgccatcaaaatccaatgttcaatcagagaaggaagctgccttctctttctgcag

SEQ ID NO: 415599 - DNA, 201 bp, Homo sapiens
tcaagagagaccttctacaggatctccaagacggatggcgtttgtgaatggaaatttttctcttccatgccccgtggatctgccaggattacagtgtccaragaccaatcctcctgtaccacagcccgggtgagaagtaaaagctttttgcaggtctgctgctgtgtagggccctcaacccccagccttgacaagaaccat

SEQ ID NO: 415600 - DNA, 201 bp, Homo sapiens
gtgtcacagacaagagcacactttgcagaaaggctagccacatattttgcttcatgacactgccctcccccattttttgttcatttcttgctggtgtttgytcttctgttaatgcctataacaaaaaattacagttcacagttggaaaggagagaaaaactttcttggcctgtgatatggtttggatctgtgtccccaccc

SEQ ID NO: 415601 - DNA, 201 bp, Homo sapiens
gtttcctgagatctccccagaagcggaagtcaccatgcttcctgcatggcctgcagaaccatgagccagttaaacttcttttctttataaattacccagtytcaggcattcctttgtagcaatgtgagaacagactaatacagcctgtatctaaaccatccttgagtaagttattgtctataaatagcaccttaggttgta

SEQ ID NO: 415602 - DNA, 201 bp, Homo sapiens
tttagaaaagacatatcagcccaaagatatttgtaagaatgtttttggctgctttatttgtaatatttacctattccagtgcccatcacctgtggaatagstaaataaattgtgttatattcctactataaataaaaaggaacaaagcactgatgcatataacaatgtgaatgaatcacgcagaggtaatgctgagtaaac

SEQ ID NO: 415603 - DNA, 201 bp, Homo sapiens
ccagtctctactaaaaatacagaaaaattagcctggcgtggtggcgggcgcctgtaatcccagctactcgggaggctgaggcaggagaatggcgtgaaccygggaggcggagcttgcagtgagccgagaccgcgccactgcactccagcctgggtgacagagtgagaccccatctcaaaaaaataataataataaagaaaa

SEQ ID NO: 415604 - DNA, 201 bp, Homo sapiens
tctcagctacacagaataaaaaagatgaataaaacacagtgccctcaagggcctcacagtctagttaaggagacaaattgtcaacaattattgcaagtctrtgacataggtgctcagagtgatattattacatggtgctcaggatggtgctcagaatgatattattacagtgtgctaaggaatatagcagttcattgtgcc

SEQ ID NO: 415605 - DNA, 201 bp, Homo sapiens
gaccactgttacttgttactcaatgtatgctacactggttccaggggcagcacatgggtgggctctgatgctctggttaagtctctgtccttggcaggcaytgcatccttgggtctcaggagaggagtccctcagtgatttgctttgatcccaatcaataggtctgaacccagcaagtttatcccaccttcatggaatacg

SEQ ID NO: 415606 - DNA, 201 bp, Homo sapiens
taaacgtgaccttcccaactccaccccaatgcccatgctaggaagggcactggaaggacctggaaaatggtgttgagagaagaccgatgatggactgggarccacgggcctgggcttcattgcagttcccatctctgtacctatttaagtggccctgaacaaatcacgtgacctctcttgagccattttcctcacctgtga

SEQ ID NO: 415607 - DNA, 201 bp, Homo sapiens
acattaattcatttgatgcttacaaagtaaacatttactacataaagaacctaaggcaaagcatgagtgagaaagtactgagttaaatgtctatgtttttrgtagttctttgtgaaatattgtgatggaacttacaggtcttctttgtgctactaagagaatgtccttccagtctatatgcattaaaatgattttatccag

SEQ ID NO: 415608 - DNA, 201 bp, Homo sapiens
tagggactgacccaggaaaatcaggtgagtaggctatttgactgcaaaggtccttcctgtatattgtgagaagtctcacgttcccttttcccaagcttctytccactaaggctgggttgcttgctgcattgaatagcatgactgttgggaggaatctgacttgcctgcttccaagtctaaatcttgctaatcttgttccat

SEQ ID NO: 415609 - DNA, 201 bp, Homo sapiens
ttcggctaactgaagtctcaagggatgggagggctgtggcccattaatcaaaagctgagcatcgggcagagtacttcgtgccccacagtgcctccccgagycagtcctggagtcataacagaggtgacagtggttgtaaagagcagagaaggaggagaccttgatgaatgtggtgctgaatgacagcttgaatctacaaat

SEQ ID NO: 415610 - DNA, 201 bp, Homo sapiens
aacctcactgaacacatgggaaaattagatcagctgctgcatgtgaagctctaggagtttagcacccagtgggcactcataatttactgccatcatcatcrccatactgtcattacttttcactgctggataagtataagtaggtatagcctctccagagagcaatttggcaatacggatcaaaaaccttatgaaatttat

SEQ ID NO: 415611 - DNA, 201 bp, Homo sapiens
ggtatgggccacagtgcccggctcgtatgtttaactttataagaaatcaccaagctgttttccaaagtggttgtatcattttgcattcttttaagcaatayatgaacaatccagtacacaaaattgtcaggatgttcttgttttcgttttggttttagccatcctaatacatgtaaaatggtatctcattgttgctttagt

SEQ ID NO: 415612 - DNA, 201 bp, Homo sapiens
atacagcacagctccatgcatttgtagccctgccatattagtgtcctagccaatcataacaaatggggtggcttcaaaaagagaaatgcattgcctcaccrttctggaggttggaaaatccaagattaaggcgttggctggttgtttcctgtgaggtatctctccttgacttgtagatagatatcttctccctgtgtcttc

SEQ ID NO: 415613 - DNA, 201 bp, Homo sapiens
ctctaggagtttagcacccagtgggcactcataatttactgccatcatcatcgccatactgtcattacttttcactgctggataagtataagtaggtatakcctctccagagagcaatttggcaatacggatcaaaaaccttatgaaatttatattatatgacccagaattctttctctagaaatgtaacttaagaaaata

SEQ ID NO: 415614 - DNA, 201 bp, Homo sapiens
gaatgtttggtaaaactcatctgtaaagttttctgggtctattgttcacgtgtaggaagcagcaagtgcagttttttaaaaatgatttcagaaaattttayaaacaaaaaaatgttaataaggttgtctttggatagtgacataccatggaattctttttgacttaatattatttcatttttaatattaagatttcattta

SEQ ID NO: 415615 - DNA, 201 bp, Homo sapiens
gatacagcacagctccatgcatttgtagccctgccatattagtgtcctagccaatcataacaaatggggtggcttcaaaaagagaaatgcattgcctcacyattctggaggttggaaaatccaagattaaggcgttggctggttgtttcctgtgaggtatctctccttgacttgtagatagatatcttctccctgtgtctt

SEQ ID NO: 415616 - DNA, 201 bp, Homo sapiens
aaaaagcatgtgctctaaatacaatcatagttgtttaaaatctggtcttatttctagattgtagcatcatggttgatttttgtattgtgtgtgtgtgagtrtgtgtatgtgtgtgtacacatgcacctatatgtgcatgggaggcataccaattgtggataccacagattgtaaaaatttagcatatattaattttgtatc

SEQ ID NO: 415617 - DNA, 201 bp, Homo sapiens
atcttttggtggaagtctgaacatcaaaagtctggatgtccacatcctttctaagttttggaaagttttcaaccattctttcttgaaacaagctttctgcygctttctctctctctctcttttcctcttaaattcttcattatgcatgtattattttacctgataacatttcataaatcctggagtctttcttcacttttt

SEQ ID NO: 415618 - DNA, 201 bp, Homo sapiens
gatgaggacattctgaaggcccccaatgacttttaccctctgcttgcagtgctgccttcctgttcttacacaattacttccaagtgaaaggtacaaacaasgtgcagccacattttggaaaagagctggtggtcagagtgggtggctgcagtatttctatgagcctccctggtgtgcacctcttaccactctctgatggtt

SEQ ID NO: 415619 - DNA, 201 bp, Homo sapiens
ttagccatttgtatgtcttcttttgagaaatatctgttcagattattttccctttttaattggattatcacatttttcactgtttaatagtttaaattccrtttatattctggatattaatctgttgtcagatgcatagcttgtttcctttgctgtgcagaaggtttttagtttgatataatcccgtttgtctatttttgc

SEQ ID NO: 415620 - DNA, 201 bp, Homo sapiens
tattcatttcaaaagacaaaataattgcctttccttttcgtgtggctcaggagttattactttactttttctctctctgtatcatattcagtgcagccacrttataaactggaaatgattattactaaactataaaaactacagacttaattaggcagaaaatctaagagcaaatgtacactgtattttgagaaaaaaatg

SEQ ID NO: 415621 - DNA, 201 bp, Homo sapiens
ggttgcagtgagccaagactgcgccactacactccagcctgggtgagagagtgagaccttatctcaaaaaaaaaaatttaaaaataaaaataaaaaagagrtcagggtggccagagcaggggatagggaagagagtgaaaggcaggccaggagcggaaggcaagagcagatcatatggccctatggcccatgctatggacg

SEQ ID NO: 415622 - DNA, 201 bp, Homo sapiens
cagttactctgatttttttacactactaggacttttaactatgaaaccacctgcgcacagctccagtggagcccagttggaacactgtttgcacctgcccygtatctgcagactgtgctggggagctgggctgagccaggctgctgtggtgccaaccatcttcagaaagcaatggcagctgtggcctcctggccctccaga

SEQ ID NO: 415623 - DNA, 201 bp, Homo sapiens
tgctgtacaccattatgagtgttgaggatacagcagtaaattaaaaagacaggaagctcttccttcaagggagtttatagtcaagaaaagcaaccaaaaayagaaataagtaaagcacagaaaatggtgataagggctatagagcagtgttccccaatctttttggcacaagggactggtttcatggcagacaaatttttc

SEQ ID NO: 415624 - DNA, 201 bp, Homo sapiens
gtaaactttattataattataggacaacatgaaaagctttagagctaaagaataaaactttctcactttacatgttttccaaataaacacccatcatgtgkgtgtgtgtgtgtgtgtgtgtgtgaatttgagacacatggaacttagcagggagtgtgcttcagaggtaataaatgctcccatcaacaaccacactattgt

SEQ ID NO: 415625 - DNA, 201 bp, Homo sapiens
tctgctgctgtgtagggccctcaacccccagccttgacaagaaccatcaagttccaaccattaaggtccacaccatctccctcagtgagaacggggaggawgtctaggacaggaaagatgcagaggaaaggggaataatcttaggtacccaccccacttccttctcggaaggccagctcttcttggaggacaagacaggac

SEQ ID NO: 415626 - DNA, 201 bp, Homo sapiens
ccatcgaccgctacatcggcgtgagctacccgctgcgctacccaaccatcgtcacccagaggaggggtctcatggctctgctctgcgtctgggcactctcsctggtcatatccattggacccctgttcggctggaggcagccggcccccgaggacgagaccatctgccagatcaacgaggagccgggctacgtgctcttct

SEQ ID NO: 415627 - DNA, 201 bp, Homo sapiens
cagccggcccccgaggacgagaccatctgccagatcaacgaggagccgggctacgtgctcttctcagcgctgggctccttctacctgcctctggccatcakcctggtcatgtactgccgcgtctacgtggtggccaagagggagagccggggcctcaagtctggcctcaagaccgacaagtcggactcggagcaagtgacg

SEQ ID NO: 415628 - DNA, 201 bp, Homo sapiens
tcagccatgctcggaggctgaatttggcagggacttgctgccatctccctgccaaatggtctctcgtgactcagaatctcaaacttgttttaaagagaggaaaaaaagtcactttcggggatgaggttcttggcccaactctgctttatataaacacagtctatggctatttcagtcttctggattttgagaagcagctgc

SEQ ID NO: 415629 - DNA, 201 bp, Homo sapiens
tgtatgactctatttacataacattcttgaaatgacaaaattatagaaatagagaacagattagtgatttccaggagtgaagatcggggtggggcagaagrgaagtgggtatggctataaaaggactatttgagagctccttgccaggatggaactattctgtatcttgactgtatcgttgtcaatatcctggttgtgata

SEQ ID NO: 415630 - DNA, 201 bp, Homo sapiens
gagcaagaagaggcagggggaggagaaagaagcagctctattcattgggcactccattttccagcccagggcaatactttcttctaaatgagcccagagtmacatagcgtggaacaaagacccaaagaaaggcttggagtatgaagatttcatttccaattctgccgctgtcttactatattgtggggttttgaccaagcc

SEQ ID NO: 415631 - DNA, 201 bp, Homo sapiens
aaggacttgcccaaggccaaggggaaccatgatttaaacctgggtctccctattctcaacctgcacattttccatagccccccttcctcaagagaatgggrgtaaacgttttcccatttggattaggtgtgctgaggatgccaagccatatccaaactttttaatgttctgtttccttgagatttgcctccaaattaacca

SEQ ID NO: 415632 - DNA, 201 bp, Homo sapiens
tgaatcattgttgtattgtcataataataaaaaggttaacctttatttagtgcttacaacatgccagatactattttaagcacattgcatgaatcatctawtttcttcttcacgcagtaccatgagggagattcagttcttgccctccattttacagatgaggaaactgagggttagtgatttgcagaacgggcacaatca

SEQ ID NO: 415633 - DNA, 201 bp, Homo sapiens
atcaacgtgacattatgggatagggcaagtttgagtttattctgacattatgggacagggaaaatttgagtttattctgcaactcaaactgcatgcattaygagagaccctgaatctcattattcaaaaatttccccagattatgtcaaggatttcagaaaagcattttactcatcagttttctttcctttgcctctctca

SEQ ID NO: 415634 - DNA, 201 bp, Homo sapiens
tcttatcagtattgtagctatgaggtttgtgacaatctctttaataagcatttttaagagttcagctttttattgaacgtgttataaaataggtttactcaaaaaaaaaaaaaaaaagcccatattatcatcagactccagattcttctttctttgcttccaccttcttcttctcggcctaggccacagtgacagaagggc

SEQ ID NO: 415635 - DNA, 201 bp, Homo sapiens
gaaagaaaaaccccagagcgctgtcttgtcccttccaccttgtgaggacacggatagaaggagccttctatgaaccagaaagtggacctcaccagacaccrcaactgctggtacctggatcttggacttcctggcatctagaactatcagaaatatgtttctgttttttatatgccagctagtttaggacatcttgttata

SEQ ID NO: 415636 - DNA, 201 bp, Homo sapiens
attgtctcccattacttcttatctgcttcactattgcataatgaatgagcttcacctgtggcatgttggaatgagccttatgatccaagtacattattccygaactttgaaaaatactaatgcttagcttcagacaatactgatggatcaccaaagaactgtctaacgcaggagtttgcaaacattttttgatagaaggcc

SEQ ID NO: 415637 - DNA, 201 bp, Homo sapiens
agtgctatgatctgaatgtttgtgtccacccctccccaaatttgtatgttgaaacctaatcaccaatgtaatagtactaggaagtgagacctttgggaagwgagtaggtcacaagggcagagcgctgatgtttgggattcgtgtctttatggaaaaagcccaagactgggcattcctgttgctaagaaaaaataaataaat

SEQ ID NO: 415638 - DNA, 201 bp, Homo sapiens
tcatggcttgctgcaactgataagcaaggaactgccctaaagattgtggcttattcatttcaaaagacaaaataattgcctttccttttcgtgtggctcargagttattactttactttttctctctctgtatcatattcagtgcagccacgttataaactggaaatgattattactaaactataaaaactacagacttaa

SEQ ID NO: 415639 - DNA, 201 bp, Homo sapiens
gctcggatatctaaacagctgcatcaaccccatcatatacccatgctccagccaagagttcaaaaaggcctttcagaatgtcttgagaatccagtgtctcygcagaaagcagtcttccaaacatgccctgggctacaccctgcacccgcccagccaggccgtggaagggcaacacaaggacatggtgcgcatccccgtggg

SEQ ID NO: 415640 - DNA, 201 bp, Homo sapiens
aatatcaaataggaaaagctccccctttccacccatctcattttagtttttcacctataattattcttccaggtaaaatttagaattattttgtctagttytaagtaaactctttgttgaaatgctgttaatttataaatcagaatggataaaactgatatcttcacaacctaaagacttcgatcccagaatgtattactt

SEQ ID NO: 415641 - DNA, 201 bp, Homo sapiens
agagtgagaccctgtctcaaaaaaataataataaaataaagtaaaataaaaacaagtaagaagacagagtctcagtgctatgatctgaatgtttgtgtccwcccctccccaaatttgtatgttgaaacctaatcaccaatgtaatagtactaggaagtgagacctttgggaagtgagtaggtcacaagggcagagcgctga

SEQ ID NO: 415642 - DNA, 201 bp, Homo sapiens
aggccagtccccagggacctggaaacatcagaagatccacccagaaaggctcaagttgatgaccctgaggattctaagggacagtaagatcccagttaggkgtgcagagcacagcagtggggaaccccaggtcagcagtggggaatcacagccatctcgagtcaggtgggcatatgcttacccagagacatttgcacctga

SEQ ID NO: 415643 - DNA, 201 bp, Homo sapiens
ctgggcctgctcctgtaattaatgacacacgcggaccaagtaggaatggtctttgaagatattgcaaaagggtgacagtcataggagctagtcagtcaaaygtgagaaactcatatgtgtttgggatcattttaaccgtttaaaaatacagaaagatgtctgtttgattgttttcctagccaattggcttgctggctttca

SEQ ID NO: 415644 - DNA, 201 bp, Homo sapiens
gcttgagctcaggagtttgagaccagcctgggcagcatggtaaaaccctgtctctaccaaaaatataaaaattatccaggcatggtggcacatgcctgtgstcccagctactcaggaggttgaggtgggagggttgctggagcccagaaagttgagggggcagtgagccatgatcacgccactgcaccccagcctgggtga

SEQ ID NO: 415645 - DNA, 201 bp, Homo sapiens
cactgtgcctagtatcgaaccagaatgcccgcaggatacaagggagactgttccttaaggattgttaaatcaggagggagagtataaattagcgtgcatgygcaattcatatatcattacaagctaaattttgatttttcctaaagaatgacagttgctctgtgaaggctgacatagttgaaaaagactttttggaggaag

SEQ ID NO: 415646 - DNA, 201 bp, Homo sapiens
gggctctgggtttctgaatcctatcacataccacactgcaggcctcatttgcagaaactgtacctagaaggacaagagccaaatgggaaacaacttacaattttttttttttttttttgagacagagttttgctcttgttgcccaggctggagtgcaatagcacaatctcggctctccacaacctccgcctcctgggttca

SEQ ID NO: 415647 - DNA, 201 bp, Homo sapiens
gcaggctctctctctttctctctctccttctctctctctctctgcctcgtcatcattggcatctcttctccccttacttgtgtgtgaaattaagctgaccytatatgctgtttttgtgacacagaatcatccataataagcatttcataactcaatctgtttctgccaattgttttaaatctctcttattagctatgttag

SEQ ID NO: 415648 - DNA, 201 bp, Homo sapiens
aagctggttagaccagaggctgtggaggactccgaatgtgaagcaaagacacacatttgggagacatcgagggatattgacaaagggagctaacggtgacrtcaaaagacatcatctaggaaaagtgattgagaatcactggcccaactttggcaaggccaatattgtgtaaagttgagattctcatcaaaatccataatt

SEQ ID NO: 415649 - DNA, 201 bp, Homo sapiens
gccaaaagccgtcatcatttaccccagctgctttagaaacgacattgaccttatcctatgtgatgatcccctcagcgttatacagaatgagggctgagtcrgtgcaggcgagctctgagatggagtccgtggtgtggacaagtgcaaggctgggctgcccggagtagtgctagtgctggatgcagtgagggcctgacccca

SEQ ID NO: 415650 - DNA, 201 bp, Homo sapiens
gagaatccagtgtctccgcagaaagcagtcttccaaacatgccctgggctacaccctgcacccgcccagccaggccgtggaagggcaacacaaggacatgktgcgcatccccgtgggatcaagagagaccttctacaggatctccaagacggatggcgtttgtgaatggaaatttttctcttccatgccccgtggatctgc

SEQ ID NO: 415651 - DNA, 201 bp, Homo sapiens
aactcaccttttccttggctcattgcattaactattatttccagaacaatgctaaatacatgaagatatcctattgaaatataaaaggctttcttttcatrtcaacagaaataagttattttgaagccatatgccagcttcctcttcctctccatagtttcttaaacacttgctgatagaaacaaaatctcattcagagaa

SEQ ID NO: 415652 - DNA, 201 bp, Homo sapiens
tgcatgttttacctatccagcaaaaggtggaagtggaaaaagtccagagttccaactggatgggtcagttctctgccagatgttggtgtcctgtagacccrgccagaggacatgctttgatactctgcccttggagatgcactcagtattgtcagaggaatacaggtccaaagtgaagaactatctgactgcaggggctga

SEQ ID NO: 415653 - DNA, 201 bp, Homo sapiens
gatttgagaaaaactggccctttacacgatgatttgagagcttggtatatgtggcatcaaaaatcccaggaaacaagtgaagaattaaaatagaagtctgyatgttttacctatccagcaaaaggtggaagtggaaaaagtccagagttccaactggatgggtcagttctctgccagatgttggtgtcctgtagacccagc

SEQ ID NO: 415654 - DNA, 201 bp, Homo sapiens
tgagaatcagagaccctcttttcttctgcctactctcatcctttatcgatttccacacacacgtatatctataactttactaatatacatacatgtgatcrtgcacccgtgcaatgggcgctgcagtgtgccttctgtgtcccttccctatggtgctgggagggccaatgcctggcagctcccaactgtgtctcactcctg

SEQ ID NO: 415655 - DNA, 201 bp, Homo sapiens
atattcacactaggtgatggattatttgaaattttcttcctaatgcagcgctgctgtgtaagaacatcatcattgttcagtttggtgggttttctcttcamggtgtagataacagtagaagggacttttgcaggattagcatttacaatgctttgtcagtcagggtcatgggattagactcactgagtcagtcatcagtag

SEQ ID NO: 415656 - DNA, 201 bp, Homo sapiens
catgtggcgaggtcaagggaaatcatccggccagtgtcactgctgtaactgcccaggctgagagtcttgtctgtttcccactggaatggggtccagtgagkcttcagactcaccagtgttagaaataaattttatactctgagaatcagagaccctcttttcttctgcctactctcatcctttatcgatttccacacacac

SEQ ID NO: 415657 - DNA, 201 bp, Homo sapiens
gtttatttttgtaaacttggcctataagacgctacttatttgctcttatatgtgttacctgcagttttaagaaagaactaccagaccaacaatatcacttkggttttggtttatgtagcctaaataactcgctacacgtctcttcttaaagtgtttaatgagagtttttagtgaaatttgctgttttgtggaaatattcac

SEQ ID NO: 415658 - DNA, 201 bp, Homo sapiens
ttttatttactttattcaagaaacattgagagtctaccaggcgccagacaggaacagaccctgacttcaaggtggagactagcatgtaattaagcccaatraaggaccaaaatcattgtacaggtacagtcagaggaggctggttttccagtttgaagtttaggaagtcaaaaaacttcttcaggccgggcatggtggctc

SEQ ID NO: 415659 - DNA, 201 bp, Homo sapiens
gctttcccctgtactatgctgccttcctgggctggtcgtttgcccttctctcagctctttggaactgcattcactggcacacagtctgaagggacctaagsactccccttcacttgccactcagcccaaataccactgctggcccctcctgaagagcacagagaagagaatctccttctgaacaatgagcagagattttgt

SEQ ID NO: 415660 - DNA, 201 bp, Homo sapiens
tttgtatttttagtaaagatggggtttcaccatgttgcccaggctggtctcaaactcctggtgtcaagtgatctgcccaccttggcctcccaaagtgcagkgattacaggcgtgagccaccatgcctagcccttttgctgtcttttctcactctttggaaagttcttgaaggaagcatagctatgagtctctcatctaacc

SEQ ID NO: 415661 - DNA, 201 bp, Homo sapiens
aacatgtggtgtgaggctggaccgagggtcaaggcttccattcctgtttgctccttgaccttggcagagttagcctgcctccgagagcttctctctagccrtaggggaatcacatagtttgtgcctttcctccccacacacccttcccaccatcccaccccaagacctgctcctattttctaggcttggtgagggcactaa

SEQ ID NO: 415662 - DNA, 201 bp, Homo sapiens
gcccaagtggccccacataaaccccaggagggttcaggccaaagtagttcagcacaaaggcatctggtagactctggtctgctcttaaactttgactctayagcttgtctctggggtttaatttgatggggcagttttcttcctggtaagaaggagccattgggtctggcctgaatgttactggcactggagctccttggc

SEQ ID NO: 415663 - DNA, 201 bp, Homo sapiens
cagcctggctattgtagactttaataggactcttaatttgactttaatgtgactacttctcttcctatctgtgcttcttcatatagactctgcaccgcacytggagatattttatcccacataatcaatgtcagacaaaaataaatttaaaaagcttttttaaaaagcctgaagaggtccaggcacatgcctggtagagga

SEQ ID NO: 415664 - DNA, 201 bp, Homo sapiens
aactagaagttggggtaatatggcctttaggggatgagaagccccacgatgaccagtgaaaagtgttcctggtccccttataggaaacgaagtagggcggrattagaaaacaaagaaactccatcttcctccctacccaccctccccattttttgtcaaacaaccaaactctcccacttgagtgtttcatggaagaatggt

SEQ ID NO: 415665 - DNA, 201 bp, Homo sapiens
tgcccagcctggctattgtagactttaataggactcttaatttgactttaatgtgactacttctcttcctatctgtgcttcttcatatagactctgcacckcacctggagatattttatcccacataatcaatgtcagacaaaaataaatttaaaaagcttttttaaaaagcctgaagaggtccaggcacatgcctggtag

SEQ ID NO: 415666 - DNA, 201 bp, Homo sapiens
aaggtttttgctttgtgattaccatgaagcttacatcaaacatcttatagttgtaacaatctattttaagctaatagcaatttaaattcaattgcatacaraaacttaccctctaatttctctcccccaacacacgtttgatttattgatatcacaatttacatctttttgtattgtttatttattaattattgtagctat

SEQ ID NO: 415667 - DNA, 201 bp, Homo sapiens
tggtctcctaccattggaaagcatatcatctgtgctctggaggatgagacaatcaaagaaaacaagtaaataagaaaacttaaaaactgtgatatgtaccrtgaaataaataagccattcagcaggtgtgagtttgaagattactcttctttagactgggtggtctcagggagagattttgtgcagagacaattaaaaaaa

SEQ ID NO: 415668 - DNA, 201 bp, Homo sapiens
caatttatcttctttcttttatgggtcatgcttttggagttgtagttaagaaatctttaaccccagaatccttgactaactccagatgacaaagatttttytactacattttcttctagatgttttacagtttggagttttacatttgagtctatgacatgtttgagttagtttgttgcaaagagtgagagggaggttcaa

SEQ ID NO: 415669 - DNA, 201 bp, Homo sapiens
ccatttgcctagaagcatctgctcttacagataggaaggggtagcatcaattactgttctaagtctttacttttacagatgaggaaactgaggcccaagarggaaaaaatgactcacccagctttaaacaaccagttcaccatgcagcagtgctggggttggaggtgatggagaaggaaaatttggaaggtgtttcaagga

SEQ ID NO: 415670 - DNA, 201 bp, Homo sapiens
gggggccgaggcaggtggatcacaaggtcaggagatcgagaccatcctggctaacacagtgaaaccccgtctctactaaagacacaaaaaatgagctgggygttgtggcaggagcctgtagtcccagctacttaggaggctgaggcaggagaatcacttgaacccgggaggcggaggttgcagtgagccaagattgcacca

SEQ ID NO: 415671 - DNA, 201 bp, Homo sapiens
ctgatggacaattatactcttcctcttactttctagtcaggcttgtcagaggcatgtccagtttaaagtcttttcaatgaatcagcttaaatgtactaatwaattctaatgattttctgctttttaattcattaatttttgcttcctttgttttaatttgtagttcttttccaacttatttactctaatgcccaaattaag

SEQ ID NO: 415672 - DNA, 201 bp, Homo sapiens
gctgtgagtaattgaagcaggagctgtgttcaaaatgttgttttcttccatcaaccaatgtcatctattggctcaaaagcattcattgagaatcatgttgmtcacttagagagacacgaatgaaggataagaaggagggtgtatctttaaggagactaaaaccaggaggattgaatgtgtcattcattcagcaatattgtt

SEQ ID NO: 415673 - DNA, 201 bp, Homo sapiens
atatggatatccaattttcccagcaccatttatcaaaaatactatccttgccccactgtatgttcttggcagctttgttgaaaatcagttagctgcaaatrcatggattgatttctggattctctattctattccattggtctatgtgtctatttttacatcagtaccatgctgttttgatcactgtagcttcacaacata

SEQ ID NO: 415674 - DNA, 201 bp, Homo sapiens
aaactattattggtggtgatctgatatgttctgaattaatcacctaattggagcagatattgggtgagcatttcagaggggaatcccgacagcgggaaacractttttcttagaaacatggctggtgtgaggtcacagaaaatcacaacgggtaccagggattagtccttctgagacagcctcaaatgcacttgtttcttt

SEQ ID NO: 415675 - DNA, 201 bp, Homo sapiens
gctgcttcgtcctctgctggctgccttttttcttagtcatgcccattggtaagtcttgaacacccctcactttagcatctgggggtcttcaccctcctcgkcttctgttaccccagactcccagtccgggatggaagaggaaggattagcatttcaaacagcacagctctagggcaattagaaaaggctcccttgtagaaa

SEQ ID NO: 415676 - DNA, 201 bp, Homo sapiens
attattttcattttgacgaactgtgtcagctttcttttcttctcatgaacatttttctgtgagtgagagagagagaaattgataactacagttgagtaaargttttactgcttccacacccacctggggaattagtacatctgtgctgagattgctgaccaacactattgttctctaacagcacatccagaaactattatt

SEQ ID NO: 415677 - DNA, 201 bp, Homo sapiens
ttgttttacgttaatgcactgtctttgttacattttggtagcacgtttatgttaatttcataaagcgaattgtgacacttttcattttttttctataaacygtaacagcttaaataccgtaagaattatgtgttccttgaaggtttgaaaaacttgcctataaaacattcgggcccagctccttttatggatgcaattctt

SEQ ID NO: 415678 - DNA, 201 bp, Homo sapiens
tatgaaaaacttaggaaaatagagtcatgccagatccccaggttctaacacattctgaaggcagtcacttgctaacaccaattcctatcttgagatagaarctcttctaactctccaaaatcaaatctgaataaacaacaatagtgagtctcattattttcattttgacgaactgtgtcagctttcttttcttctcatgaa

SEQ ID NO: 415679 - DNA, 201 bp, Homo sapiens
cagggccgagtgggtgagggcagacctcccccgccgtctggtgagacggaacccccacttttcccagcgcctcccgctttttccaccaggttttataccgrcccctctaccccacccccgattcccttacatcttctgcgaagttgccttctactgaacaagtgtctttttaaccctgtgtttatcaccctcgaggtagga

SEQ ID NO: 415680 - DNA, 201 bp, Homo sapiens
ctgcagagggacgtcctccccaccccgtcccccgccagtcccgctacggctggcagctggagcccctcgggtggccaacagtgaggcttggaaaggcgtcrtggacagacctgggtcgctttctgtcttcgggtccctcccggcttcgctcgggacctggctctcaagccagcttggctggtggacagaccggtgcgctct

SEQ ID NO: 415681 - DNA, 201 bp, Homo sapiens
acccagcttgcctggcaattgaagctggctgtgagtcttggtggcctctgttcccttctaaaccaccttcttatagcatggcagctctcccccaagaaagycaaggcagaaactgtgaggcctttgaagagctaggctcacacctggtccagcatcactgctgtttcattctgcagtcacagcaagtcaggagaccagcct

SEQ ID NO: 415682 - DNA, 201 bp, Homo sapiens
ggtgtttgaaggacacaatctaatggaatattcattgcaactgccctgatcattgtttcttagtttttttagaattcaaagttaggaaaaaagattttttwaaaaatacaacgtttgttttccaggtaacaaattattatagtacacaggatacacgtcttaataagttgccttttccattatttatatctgctttctttt

SEQ ID NO: 415683 - DNA, 201 bp, Homo sapiens
tttcttttgccaaattccacagggcaagaaaaaaaaaaaaagaacgctaaagttcaggataaaaaagaaacttcccaagaagtgcattggtacaaaccackgctgtggtcatcataaatgtcttttacttttactttccaaaccaaagtctagggtttccatggtaactgctttggccccagctggtttgcatcatgttgt

SEQ ID NO: 415684 - DNA, 201 bp, Homo sapiens
aattcaaattttagtgttcacaaataaagttttgttaaaacacagtcacacacattcatttacctaatgactatggttgcattcaagctacagtggcagarctgaataatagaaacagagaccatacagctagcaaggcctaaaatatttactatctggccctgtatcccaaaattcatgcaagattcatgaaccacaatt

SEQ ID NO: 415685 - DNA, 201 bp, Homo sapiens
ttagcaaatatggtttgaataaatcaagacttcctgttttagctatttaatggggaaggtaatatttccaatctgattttaaatttttcttttgccaaatyccacagggcaagaaaaaaaaaaaaagaacgctaaagttcaggataaaaaagaaacttcccaagaagtgcattggtacaaaccactgctgtggtcatcata

SEQ ID NO: 415686 - DNA, 201 bp, Homo sapiens
tttaagcggtttctccatttagagttaaatttgtctttagcaaatatggtttgaataaatcaagacttcctgttttagctatttaatggggaaggtaatawttccaatctgattttaaatttttcttttgccaaattccacagggcaagaaaaaaaaaaaaagaacgctaaagttcaggataaaaaagaaacttcccaaga

SEQ ID NO: 415687 - DNA, 201 bp, Homo sapiens
tgctctctatagccataattctcctgtcattactgagaggtggaaaaatgtttgaggggaaataacacaaataacacttcctggtgtcaacccagcctccrtaggggacaaaaatgcttagcaactctttcaaagtatccaagacaaaacttgacctttaagcggtttctccatttagagttaaatttgtctttagcaaat

SEQ ID NO: 415688 - DNA, 201 bp, Homo sapiens
aagtgacagagtagaaattgaacctgttccctctggtgcccttaatgtcctctgtattcttcacccagtgcactcatgcaaccagcctattcctgctatcrtgactggcttgctacaactgtgatcatgcccacataaggctgtgtttgctctctatagccataattctcctgtcattactgagaggtggaaaaatgtttg

SEQ ID NO: 415689 - DNA, 201 bp, Homo sapiens
gtatcacaatacttgttatctcatgatgctcaaaactcccatgatttttaaatctttgattagaaaaacacaaagggaaacaaataatcataacttgcttyatgcactaacatttatggcacaacacgtgttcgccaatttattaagcactttaccactgtgtctctgcagccattgtggtccgtttgtgaattccttcag

SEQ ID NO: 415690 - DNA, 201 bp, Homo sapiens
ggtagagggtggttaagtaactggcccaggatcatgcagcaagtaagtgacagagtagaaattgaacctgttccctctggtgcccttaatgtcctctgtaktcttcacccagtgcactcatgcaaccagcctattcctgctatcgtgactggcttgctacaactgtgatcatgcccacataaggctgtgtttgctctctat

SEQ ID NO: 415691 - DNA, 201 bp, Homo sapiens
caggtgtgtgtcagaatagcccttgcaaaattctctcataaagcaaagcttttttccttgtgctataacacatccccactgtgggcaccggttaggcctcrggctatctagcccaatggctactgtacactttttttttttttttgagacagagtctctctctgtcacccaggctggagtgcaatggtgccatcttggctc

SEQ ID NO: 415692 - DNA, 201 bp, Homo sapiens
gcaatgtttgagggctctagtttctctacatcctcaccattacttgtcattttttaaaatgatgtccatcctagtgggtgtgaaatagtatctctagtgaygttgctttgcatttccctaatgactaataatgctgagtgtcttttcatatgcatgtttggctattcatgtaacttctttggagttatatctattcacatc

SEQ ID NO: 415693 - DNA, 201 bp, Homo sapiens
  misc_feature (1)...(201): n = A,T,C or G
acaggaggcttgtcatggaggatgtggaaataaaagtggaggtgaggaacagagccaggacctgagaggacaaagcaaagggatgaaagattgtgctgtcnccatcaagggctccaccaagggtccaattttgtttttgtttttttccaagaaaagaaaaatgagtacagaaggaggggaatctgcaggcagtggttgaga

SEQ ID NO: 415694 - DNA, 201 bp, Homo sapiens
ttaacaaactctggtttatgctacaggaattcctgaaatttacaaaaatacatcagaaacagcacatttaaagcagacatcagttattattattgttcagmttttgtttactgtgttgccaacatcttagctagtgattcaaaacaaaacaaaacacatgaaccaaacaaaccctgaggtctccagatgccttgaggtccc

SEQ ID NO: 415695 - DNA, 201 bp, Homo sapiens
agggattagtgacatcttgcaggagctgcctggctgccttccctgtaacagaggaaaggggcctgtctacagttaaaagccctggaatcacacgtggtccygccctttgctctgcactctggtgtcctcatctgtaggagaggggcttgggttgagccagtggctttcaaacttctcagcttcagaactctttgtgcaaaa

SEQ ID NO: 415696 - DNA, 201 bp, Homo sapiens
tgtctactcactttgttttaattgtaattaaattcacataacgtaaaattcacaattttaaccatcttaaattgtaaaattctgtagcatttaatacattvgcaatgttatccaactatcaccactatctagttccaaagcacttcatgaccccagaatgaaatctgggtcccattagcaatcactcggcattccccactc

SEQ ID NO: 415697 - DNA, 201 bp, Homo sapiens
ttaataggatgctgtgtggtacttaactccccagtctctggcctcagtgagtgggtatcccgcctattctgagatacttttcatgtatcattgatggtaargccaagttccagggcagcccaaatcagtcttcctatagctttcagccatcggttagagctctgaccccaaaccaatatgctagcctcctggttggtctcc

SEQ ID NO: 415698 - DNA, 201 bp, Homo sapiens
aaaggctgtttctcttgtctgtttggtgcagggtgtgtagtgccctctcctccgggtggcatgactgaccgcctgggcacctgttgtagagaacctccttygtctgctgaccttgcctgggaaagttcagggtccttcccatcctgcctggatgtaagcattgagatttacctttgacaagctggccttgatcctgtgtgt

SEQ ID NO: 415699 - DNA, 201 bp, Homo sapiens
atggcaatagtgccaagattaacaaactctggtttatgctacaggaattcctgaaatttacaaaaatacatcagaaacagcacatttaaagcagacatcarttattattattgttcagattttgtttactgtgttgccaacatcttagctagtgattcaaaacaaaacaaaacacatgaaccaaacaaaccctgaggtctc

SEQ ID NO: 415700 - DNA, 201 bp, Homo sapiens
tcctgatcttttctgaatgttgacatccttgcgtatttgtagtccagacgtcagctcagctcttgttgccttaagtgtttatatgaggtgattataaatgrcttcaacaacaaattagatcaaaatgtgtgtaatgaatgctaaatggagaaaatttaggagttattgaaatacatatagactagtctcattctcagaaac

SEQ ID NO: 415701 - DNA, 201 bp, Homo sapiens
acttaaagtaaaattttaaaaatatatatttttaaccataaaatttcttaataattgattcaaattgctttgttttgttgtctaaatcaggatctgatttwgccagtgaaaatttggcaataagcacacagcactatacagcagtagagaaaccaggcagtgggttgtagcgcattcggtgttagcaggtacaggacaggg

SEQ ID NO: 415702 - DNA, 201 bp, Homo sapiens
tgtgctatccacatttagcttattgccagggcattcgttgccagtgagaaacctactgtctacaagtggactgcgtagtttagttcctcttaatgaaaaakgttttggacatttacctggaattttcatgttgttttgtttcatgagtttgctgtcatttggaaattactaaagaacaatctcagaaatgggtttttaaaa

SEQ ID NO: 415703 - DNA, 201 bp, Homo sapiens
caggagctgcctggctgccttccctgtaacagaggaaaggggcctgtctacagttaaaagccctggaatcacacgtggtcccgccctttgctctgcactcyggtgtcctcatctgtaggagaggggcttgggttgagccagtggctttcaaacttctcagcttcagaactctttgtgcaaaataaatcccactcagaaatc

SEQ ID NO: 415704 - DNA, 201 bp, Homo sapiens
atgtgtcattttgaacacattaaccctgaggtttctgtgagacatttacatgaagaggcatgtatgaatcatgagctgaaataagcaaggactgaagccaytcgcttgatggctgaatgctagctgcagatactcagcttgaatgtattcatgtttttttagagtagggtttctgagagcccccaaataattggaggatat

SEQ ID NO: 415705 - DNA, 201 bp, Homo sapiens
gctcttggtgagggttctcctgctaggtcacagatggttgccttctccctgcattctcacctgatgaagagagagagagagagagctctctggtaccttcytctttgtataagggcatgaatctcattatgagggttcaccctcgtgacatcatctagtcctaatcacctcccaaaggccccacctcctaacaccatcaca

SEQ ID NO: 415706 - DNA, 201 bp, Homo sapiens
caacttcaatccttgaaatgaaagtgttcccttcctgttaattattccattattccctaatgtttttaataataaaacttaaaaagtttgccacttcctgycctacttgatcatggtttgtttttacttaatagactggtagatataatcgacaactttcattgtatttcaacttcatttctaaatgatacaagtctgtgg

SEQ ID NO: 415707 - DNA, 201 bp, Homo sapiens
ctggggcaatactaggagttctgatctactgaagacgtcaagaagacatcaggactgattgtcactttttcttaacagtgagtgaataccaaatataattkataaagatgggaaatgccagaatcaagcagactagcatgtgtcattttgaacacattaaccctgaggtttctgtgagacatttacatgaagaggcatgta

SEQ ID NO: 415708 - DNA, 201 bp, Homo sapiens
gctgagctttcccttgtggctgtgatcacaagaggattgtgtgaaacgtgtagagtttaatgactcttttcctaggaaagaagaagtgaaaccattcacasacctgaggatgtgtgtgatgtcaagcggtagacttgtcagctcaggctgccataatggaatacctgggcaggtatagactgggcagcttaggcagctgac

SEQ ID NO: 415709 - DNA, 201 bp, Homo sapiens
gaagctctaggagtttagcacccagtgggcactcataatttactgccatcatcatcgccatactgtcattacttttcactgctggataagtataagtaggkatagcctctccagagagcaatttggcaatacggatcaaaaaccttatgaaatttatattatatgacccagaattctttctctagaaatgtaacttaagaa

SEQ ID NO: 415710 - DNA, 201 bp, Homo sapiens
gcaagagcagatcatatggccctatggcccatgctatggacgttgggcttcatctaagagtactggaaagtgtttgaggcctttaagtggaaatgtcaccraattagagttgtattccataaaggtcatcctagggaaaagggaaggtgacccaggcatgcaggagatcaacaagaaggcacttacaggtgacaggtgttg

SEQ ID NO: 415711 - DNA, 201 bp, Homo sapiens
agaatttagaaagaggacctgagagttcagctccgtctggaattcactgcctgtgtgcaggctccttttcatggggatatcagagtgtgaagcagaagtgrgtcacccgcagtgcgattctctccttcagtccttcagaagtttgtggttcaagacaaagcagacccatcctcctatagcctttgattctcaacagttaga

SEQ ID NO: 415712 - DNA, 201 bp, Homo sapiens
acagatgaggttcgaaaaagcatttttccaattcagcttcccccagctgcacactttatcactccccatcagctatcctcctaagagatgtattattgcartatatttggagattccacaaaggagcatgggccctgaaatcaatcacactgcctaatttcaaacctaccagtaactatgtgagtgacctcggttgagcta

SEQ ID NO: 415713 - DNA, 201 bp, Homo sapiens
cacctgtaatcccagctactcgggaggctgaggcaggagaattgcttgagcctgggaggcgaaggttgcagtgagccaagactgcgccactacactccagyctgggtgagagagtgagaccttatctcaaaaaaaaaaatttaaaaataaaaataaaaaagagatcagggtggccagagcaggggatagggaagagagtga

SEQ ID NO: 415714 - DNA, 201 bp, Homo sapiens
acaaaaattaactgggctatagtagcgtgcacctgtaatcccagctactcgggaggctgaggcaggagaattgcttgagcctgggaggcgaaggttgcagygagccaagactgcgccactacactccagcctgggtgagagagtgagaccttatctcaaaaaaaaaaatttaaaaataaaaataaaaaagagatcagggtg

SEQ ID NO: 415715 - DNA, 201 bp, Homo sapiens
gccgcagtcgcccctccggggcttcgaggattttaatttcgtggtacctgcgctcgaaatccagacttcgagcgctggagcctggggttttggggatttgttttttttgtttgtttttcgcttcggatcctgaactcgggcagaggtgactcagtagagtgcgctaggcaggttcccagtggtgggggcgcgagatgagct

SEQ ID NO: 415716 - DNA, 201 bp, Homo sapiens
ttctttttgtctttgctcagactttctgaaagcctgtatattttattaatttttttcaaagaatccaagtcctgaatttattagtcattttaatctctttyccagtacattaatgtaatctctagagatttctctcttttattttctggttatattttgcttttcaatattagcttacccagaatgtttagttcatctatt

SEQ ID NO: 415717 - DNA, 201 bp, Homo sapiens
gtcactccatttacttcccaaactacttttgaactgttgtttagactttagttttaagcacatctgctaacatctcctggaaaattgattaaacaatgaarttgggaaatgctgctttgatattttgacagatatgacactgtccattggttttagattgatatactccatcatatcaaagaaatatctttctagagttta

SEQ ID NO: 415718 - DNA, 201 bp, Homo sapiens
tgtcactccatttacttcccaaactacttttgaactgttgtttagactttagttttaagcacatctgctaacatctcctggaaaattgattaaacaatgawgttgggaaatgctgctttgatattttgacagatatgacactgtccattggttttagattgatatactccatcatatcaaagaaatatctttctagagttt

SEQ ID NO: 415719 - DNA, 201 bp, Homo sapiens
tacactcgcttcttttccatttatctgtctctctgctctagtattgctgtcacattactttaatggctgtggttgcataatacattttaatattctctagkttaaggcctggatgaatattctttttcaaaattattttgtctattgtacattcattctgccaagaaaactctggattcattttgtcactccatttacttc

SEQ ID NO: 415720 - DNA, 201 bp, Homo sapiens
accccaccacactggctgccacactaacaggtatggtggctctcatggaaaggactgactatacccagaatggagaatgggagaaagcacctctgcctgcyccccccgcccgccccgctttaacttcaggcatttttttgttccagacatggtcttgctgtgtcacccaggctggagtgaagtggcacaatcatggctcac

SEQ ID NO: 415721 - DNA, 201 bp, Homo sapiens
agaatcgcttgaacccgggaggcagaggttgcagtgagccgagatcatgcctgcactccagcctgggtgcagagcgaggctccatctaaaaaaaaaaaaamaaaaaacagagcctctgggggtcaggtcaggaaaaacaggagaaacagccagcaaacaagattgcaaaggagtagccagggagaagaaaaatcaggagaa

SEQ ID NO: 415722 - DNA, 201 bp, Homo sapiens
tgaaatttcctatctgtgctttttggccactttttatacagcagtttttctgtctttttttttttatcggtaagctcattttatacattgaagataaatarttacttatttatcacaaatcctgggttgccagtcttctcacactatatgcaaatgtgccaagaagatgtagcttattttccaaaaacggatgtgatcttt

SEQ ID NO: 415723 - DNA, 201 bp, Homo sapiens
agagaacctccttcgtctgctgaccttgcctgggaaagttcagggtccttcccatcctgcctggatgtaagcattgagatttacctttgacaagctggccytgatcctgtgtgtgtcgcagtttctgctctctcaagcccctggggctattcctgagaagctactggagccattccgtctttcccgtcttttgttgatgtg

SEQ ID NO: 415724 - DNA, 201 bp, Homo sapiens
caatccttctaccgtgccatttaaaaaacttatttccgtgagctgccacatcgttctggaatgcctcttttgtcactgccttcagagcttagatttatgasaaaagctttctcgtgatcagaaatagtataaccagacttggctttaaattaattttggctctttccacaagacaaatctgtcaatgaagatttaccatca

SEQ ID NO: 415725 - DNA, 201 bp, Homo sapiens
tggaagtaacatgttttgattttgcacagcaaaggctgtttctcttgtctgtttggtgcagggtgtgtagtgccctctcctccgggtggcatgactgaccrcctgggcacctgttgtagagaacctccttcgtctgctgaccttgcctgggaaagttcagggtccttcccatcctgcctggatgtaagcattgagatttac

SEQ ID NO: 415726 - DNA, 201 bp, Homo sapiens
gatgcccaagataaccaggggttgagggttgcttcactgcaggtacaaagggagcagttccctagttctcatggaaaaggttcacctcttagagataatgrtgtgaagaaaaactagtgccattaggatttattttattttatttatttatttaatgacaggatctcattctttcacccagactggagttcagtggtaatc

SEQ ID NO: 415727 - DNA, 201 bp, Homo sapiens
attgattgctgttgccactgaatcaaaggaggcagcattgggctgagatgtggcttacatagacatagaatatttgaggattatgtttataaaagaacagraggcagcacattgatagagcagaaaaatgtgttttaagattggatgtttgaggagggcacagctggcagtggatttatcaggtggaggcaatgaggcaga

SEQ ID NO: 415728 - DNA, 201 bp, Homo sapiens
tactaaaaatacaaaaattaactgggctatagtagcgtgcacctgtaatcccagctactcgggaggctgaggcaggagaattgcttgagcctgggaggcgraggttgcagtgagccaagactgcgccactacactccagcctgggtgagagagtgagaccttatctcaaaaaaaaaaatttaaaaataaaaataaaaaaga

SEQ ID NO: 415729 - DNA, 201 bp, Homo sapiens
catggaaggtgagaagtttagcacactcttcttttcccttctctttaaaacctctatcttttagttaataaaatagtgcattttaaaactagattattttyattaaattttgtattgcctctcctgtcttttgtatctctctataatttagtttaccaattgtcctcctattatatattatgacttactcactcctgtgct

SEQ ID NO: 415730 - DNA, 201 bp, Homo sapiens
ggacatacattcttaaatatgacgtgctgttttggagaaaagggctgtcggtctgcactaggctgcgggagaggaaagagattaaaaactgaaaccagggyagggatgagtgtgctatccacagctgagaagtgaaacacccatgtttaatagggactgacccaggaaaatcaggtgagtaggctatttgactgcaaaggt

SEQ ID NO: 415731 - DNA, 201 bp, Homo sapiens
gagtgctctataaatattttatccatgaacgaatacttatttaacaactacaatgtaccaggcacaaatcctatctttatgaaatttacatagggagatawgttgaacaaatcatcacccacataatcaaataagaacaattgcttgagctatgaagaaaaagtttaggatgctttgataacatttaatgagagacccccc

SEQ ID NO: 415732 - DNA, 201 bp, Homo sapiens
tcacatcaaatggatttctcataatccatgtttctaatatgggtatttgtccttaataaggatttaactaattttcatttattgtgacagattatttggtrtgatttttgtcaacttatcatatgctttctggctctatgcttccttcgttttcactattttcagtctttcgtaaaacgggtaacttttttctttgctttt

SEQ ID NO: 415733 - DNA, 201 bp, Homo sapiens
atgggataatgtttgtgtaatattttgcatgatgtctggcacataatgagtgctctataaatattttatccatgaacgaatacttatttaacaactacaatgtaccaggcacaaatcctatctttatgaaatttacatagggagatatgttgaacaaatcatcacccacataatcaaataagaacaattgcttgagctatg

SEQ ID NO: 415734 - DNA, 201 bp, Homo sapiens
aatccagtgtctccgcagaaagcagtcttccaaacatgccctgggctacaccctgcacccgcccagccaggccgtggaagggcaacacaaggacatggtgsgcatccccgtgggatcaagagagaccttctacaggatctccaagacggatggcgtttgtgaatggaaatttttctcttccatgccccgtggatctgccag

SEQ ID NO: 415735 - DNA, 201 bp, Homo sapiens
cacactggctgccacactaacaggtatggtggctctcatggaaaggactgactatacccagaatggagaatgggagaaagcacctctgcctgccccccccscccgccccgctttaacttcaggcatttttttgttccagacatggtcttgctgtgtcacccaggctggagtgaagtggcacaatcatggctcactgcagcc

SEQ ID NO: 415736 - DNA, 201 bp, Homo sapiens
gaaatttttctcttccatgccccgtggatctgccaggattacagtgtccaaagaccaatcctcctgtaccacagcccgggtgagaagtaaaagctttttgsaggtctgctgctgtgtagggccctcaacccccagccttgacaagaaccatcaagttccaaccattaaggtccacaccatctccctcagtgagaacgggga

SEQ ID NO: 415737 - DNA, 201 bp, Homo sapiens
acagagagcctggtgggttccttccacaccacactctctaccccaccacactggctgccacactaacaggtatggtggctctcatggaaaggactgactayacccagaatggagaatgggagaaagcacctctgcctgccccccccgcccgccccgctttaacttcaggcatttttttgttccagacatggtcttgctgtg

SEQ ID NO: 415738 - DNA, 201 bp, Homo sapiens
gagaatcgcttgaacccgggagacagaggttgcagtgagctgagtcacaccactgcactccagcctgggtgacagagcgagattctgtctaaaaaaaaaaraaaaagaaaaatgatatgacaggagggaagtagggaacatacagttcacagggtctgagtagctgctcagtagtgcaaaggatccctgaacctgccagtc

SEQ ID NO: 415739 - DNA, 201 bp, Homo sapiens
ttacctgattgttttttaggcgtactttattagttgcattttgtcaaagtcttttcagacagaatatagtatgtgtgggttttttttccatgtccaaacawgtctattctgaacaaacctaattattaacattcgagaattttatttttgtattaataatttgaattacacatgtctctgctttctgaaaaaataggacat

SEQ ID NO: 415740 - DNA, 201 bp, Homo sapiens
actgttctaggggccgagggcaaatttgtctatgcttctgtcattgactgacagacaagcacatgtgattctgttgtttctccctagatggcagcagcagrgccaaggaaataggcagggcaggaggctcttggtttgctccacagggtgacatgtaaggcagtgattgccaccttaatgtcctcaggaacgtagaggtcc

SEQ ID NO: 415741 - DNA, 201 bp, Homo sapiens
ttggaatttcaattcctatacctgccctgttttttttttgttttttgttttttgtttttgcatttctctctcattagtcacttttttactatttttttttwaatttccatttgaatttctcaagttcatgttccactttacttatttggtttttgtaatacacaatctccatattccctccatcccactccatatggtggg

SEQ ID NO: 415742 - DNA, 201 bp, Homo sapiens
ccaaattctcaacaatgtttccatcccagtctcagggcacagagagcctggtgggttccttccacaccacactctctaccccaccacactggctgccacaytaacaggtatggtggctctcatggaaaggactgactatacccagaatggagaatgggagaaagcacctctgcctgccccccccgcccgccccgctttaac

SEQ ID NO: 415743 - DNA, 201 bp, Homo sapiens
cacaaaaaatgagctgggcgttgtggcaggagcctgtagtcccagctacttaggaggctgaggcaggagaatcacttgaacccgggaggcggaggttgcartgagccaagattgcaccactgcactccagcctgggcgcagatcgaggctccatctcaaaaaaaaaaaaaaaaaaattcttcacagagaagtgaagcacca

SEQ ID NO: 415744 - DNA, 201 bp, Homo sapiens
caactttttaactatagtcatcttatagtgctatagaacactagaacttattcctcctatctagctgtaattttgtatcctttacccaatctctccctatmcccctccccacgattcttcccagccttcagtaaccactattctaatctctgcttctacgagaccaacttttttagcttctgcatatgagtgagaacatgt

SEQ ID NO: 415745 - DNA, 201 bp, Homo sapiens
gtcccagctacttaggaggctgaggcaggagaatcacttgaacccgggaggcggaggttgcagtgagccaagattgcaccactgcactccagcctgggcgyagatcgaggctccatctcaaaaaaaaaaaaaaaaaaattcttcacagagaagtgaagcaccacttaactagcacccttattactttctaataattagcat

SEQ ID NO: 415746 - DNA, 201 bp, Homo sapiens
ctgaggcaggagaatcacttgaacccgggaggcggaggttgcagtgagccaagattgcaccactgcactccagcctgggcgcagatcgaggctccatctcaaaaaaaaaaaaaaaaaaattcttcacagagaagtgaagcaccacttaactagcacccttattactttctaataattagcatgcatagtccatcattatat

SEQ ID NO: 415747 - DNA, 201 bp, Homo sapiens
acataatcaatgtcagacaaaaataaatttaaaaagcttttttaaaaagcctgaagaggtccaggcacatgcctggtagaggaaggtgaattctatatgcttttttttttttctattgacaaggacaaatatctctcagcacttatatactagccattgtatatctacctttgtttagtaatcacagttctattaggcaga

SEQ ID NO: 415748 - DNA, 201 bp, Homo sapiens
tgacatagtttgagtatatccccacccaaatctcaccttgaattgtagttcccataattcccatgtgtcgtgggagggacaagtggaaggtaattgaatcrtgggggcagtttcccccatgctattctcgtgatagtaagttctcacaagatctgatggttttataaggggcttctcccttcgcttggccctcattcttct

SEQ ID NO: 415749 - DNA, 201 bp, Homo sapiens
atctcaccttgaattgtagttcccataattcccatgtgtcgtgggagggacaagtggaaggtaattgaatcatgggggcagtttcccccatgctattctcrtgatagtaagttctcacaagatctgatggttttataaggggcttctcccttcgcttggccctcattcttctctctcctgctgcgctgtgaagaaggatgt

SEQ ID NO: 415750 - DNA, 201 bp, Homo sapiens
cccccatgctattctcgtgatagtaagttctcacaagatctgatggttttataaggggcttctcccttcgcttggccctcattcttctctctcctgctgcsctgtgaagaaggatgtgtttgcttcccctttcagcataactgtaagtttcctgaggcctccccagctctacggaactatgagtcaattaaacctctttcc

SEQ ID NO: 415751 - DNA, 201 bp, Homo sapiens
tggccctcattcttctctctcctgctgcgctgtgaagaaggatgtgtttgcttcccctttcagcataactgtaagtttcctgaggcctccccagctctacrgaactatgagtcaattaaacctctttcctttataaattacccagtcttgggtatgtccttctagcagtttgagaacagactaatacactatgtgagaaat

SEQ ID NO: 415752 - DNA, 201 bp, Homo sapiens
aattcttaaaaatatgaacatgcaattaccattcaacccagtagttgttcttctggccacatattctagagagatgaaaatttatggtcacacaaaaaacytgtacaggagtttttacagcagctttatttgtaatagccccaaactggaaacaatccagatattcatcagtgaatgaagggttaagcaaatggtaataca

SEQ ID NO: 415753 - DNA, 201 bp, Homo sapiens
agtgggttaagaaagaaaaaacaaaaggataccttatagttgttttgccttcttctcaatcctgctttaaaaagcctagccccacgatgtcactgaaaatrattttaactgctcctttggtgacttaggttaggttggtctgctgtgtttgtaatagaaggaagcaaatatttagtttccactctcatagcaactgaacaa

SEQ ID NO: 415754 - DNA, 201 bp, Homo sapiens
gtggtcggctgcttcgtcctctgctggctgccttttttcttagtcatgcccattggtaagtcttgaacacccctcactttagcatctgggggtcttcaccytcctcggcttctgttaccccagactcccagtccgggatggaagaggaaggattagcatttcaaacagcacagctctagggcaattagaaaaggctccctt

SEQ ID NO: 415755 - DNA, 201 bp, Homo sapiens
aattcagtttaatactagctgtgggtctgtcatatatggcttttattgtgttggaatatgttctttctatacccaattttttgaggctttttatcatgaarcgatgttgaattttatcaaatgctttttcagcaacaattgaaataatcatacagtttttgtccttcattctattgatatgctgtatcacactgattgata

SEQ ID NO: 415756 - DNA, 201 bp, Homo sapiens
agggatgctcagagagaccttccacaatgtaagtctgtttcctcctcattcttttagagcatcatttgtaatctacctggaattcatgtttgtattttggyagattatgcctcacagtatttattttgaaatggttagccagatagtctcaaaaggcttatcaaataatccatcatttcctttcttatttggaaaaccaca

SEQ ID NO: 415757 - DNA, 201 bp, Homo sapiens
aatgagtaggtgtttaaaggcaaaaatggggagggagggaagagaacgtgcgaagactttagtggggctggcttaatgtccataatgactttctagaaggycactgtggccagaaacaagaggccaagagataactggtgtccagtgaagctggaaagggaagaaccagactaaacaaggctttatagccattatacaagt

SEQ ID NO: 415758 - DNA, 201 bp, Homo sapiens
tgacctcaagcaatcctttttctttagcctcccaaaacattgagattagaggcatgagtcaccacacctggctagaatttattttaagataagaagccagygtttcagttactcttactacaccacagaccatcccaaaaggtagtggcttaaagcagcagccatctatgtctcatgattctatggtcaaaagtacgtcag

SEQ ID NO: 415759 - DNA, 201 bp, Homo sapiens
ttctataataaaaataaaatagcaaaatgttcatgacatattacataaaggctggtaaaaagcatgtgctctaaatacaatcatagttgtttaaaatctgktcttatttctagattgtagcatcatggttgatttttgtattgtgtgtgtgtgagtgtgtgtatgtgtgtgtacacatgcacctatatgtgcatgggaggc

SEQ ID NO: 415760 - DNA, 201 bp, Homo sapiens
tgttatatgtttttttattaactgtcttaagtatgtttttcatgcaaaatgtgagcagaagaataaatatactatcatattattatattcaagggacatayattcttaaatatgacgtgctgttttggagaaaagggctgtcggtctgcactaggctgcgggagaggaaagagattaaaaactgaaaccagggcagggatg

SEQ ID NO: 415761 - DNA, 201 bp, Homo sapiens
attgtgttctataataaaaataaaatagcaaaatgttcatgacatattacataaaggctggtaaaaagcatgtgctctaaatacaatcatagttgtttaawatctggtcttatttctagattgtagcatcatggttgatttttgtattgtgtgtgtgtgagtgtgtgtatgtgtgtgtacacatgcacctatatgtgcatg

SEQ ID NO: 415762 - DNA, 201 bp, Homo sapiens
tagtgcaaaggatccctgaacctgccagtctgtggctctcaatttcttcctgacaccaattgagtaagagatgatttcctccaagaatgtactggctatgyaataagcaccaggctctcagctacacagaataaaaaagatgaataaaacacagtgccctcaagggcctcacagtctagttaaggagacaaattgtcaaca

SEQ ID NO: 415763 - DNA, 201 bp, Homo sapiens
ttatattcatgcaatgaaatactaagatgccatgaaaaattgtgttctataataaaaataaaatagcaaaatgttcatgacatattacataaaggctggtmaaaagcatgtgctctaaatacaatcatagttgtttaaaatctggtcttatttctagattgtagcatcatggttgatttttgtattgtgtgtgtgtgagtg

SEQ ID NO: 415764 - DNA, 201 bp, Homo sapiens
attccctcaaccactcgccacttagaagatctcaagccaatgtttcaacatctccaaatcctcatttcctcttctcaaaaatgagaacaatgactactgtrcatcattagagggcttctgggctaatgaaataaaaccatgaagttaaagatttaaggaaatgcctgccgtatagttagcactcagcaattacaggttgtt

SEQ ID NO: 415765 - DNA, 201 bp, Homo sapiens
ttggctgatgcttcatggcagctttccctcccttcccttcttcgtcccctgtttggtcttggtcctgtgccctttcatctttcccatctcctttcttgatmccatcctctccattattccactctccccttcttgctaaacttacaaacagtgaaagaagctggggtgggtgcccttgctccagagggtgccatttcccat

SEQ ID NO: 415766 - DNA, 201 bp, Homo sapiens
ctgtgagtcccagagagtgtgtgtgtgaagagacacagactcggtcaggttagggagcatccacagccaggttgtagaaggagcccaggtgacgatgggtrgcctgagagtttggagcttgcagtggtggctgagctatgcatagagatgagaaacaatggcctgggtcctggagtcatctaggggaggtggatgctctgt

SEQ ID NO: 415767 - DNA, 201 bp, Homo sapiens
aacaataatcaccaacgtatatgaccttactatgtgccagacactgatctatatattcctgtctacattaattcatttgatgcttacaaagtaaacatttrctacataaagaacctaaggcaaagcatgagtgagaaagtactgagttaaatgtctatgtttttagtagttctttgtgaaatattgtgatggaacttacag

SEQ ID NO: 415768 - DNA, 201 bp, Homo sapiens
aggttttgctatacactggagctaggagatgcggtgtagctggaggggtatagagagagctttcaatggtgggaggtggggatatgacatgatatttataytctgatgggaacgatgggatagagagaggcactgatgggataggcaaaagaggcaacgggattcagtgcccaaggggagcattgggaagtgacaaggaga

SEQ ID NO: 415769 - DNA, 201 bp, Homo sapiens
ttgcatgaaaatgatgcagaatctaatggtgtatcactgaatacaaaaagagccacctcaggtaacaacttcaatccttgaaatgaaagtgttcccttcckgttaattattccattattccctaatgtttttaataataaaacttaaaaagtttgccacttcctgccctacttgatcatggtttgtttttacttaatagac

SEQ ID NO: 415770 - DNA, 201 bp, Homo sapiens
aagaaggcaggagtaatcagctgtgtcacatgcagctgagaggtcaggttagaggaggactgggagccaacactagatttggcagtaagcaggtttttagygataggaggaaggcacgtgaggctcacaggtccagaggagtgatggaaccaaaagcctgattgtgtactttctagaaagaacaaaggataaaaaaagtgg

SEQ ID NO: 415771 - DNA, 201 bp, Homo sapiens
cttgcagaccctttggaggagaacgctgagagaactcatgctctaatacgactcccttcatttcactctcaattccagtctcatctctataaaaatttgckcagtgagggaataaacctctccaatatgtcctgaacatatctgcctttaaaacaaagccatatgcaaaagcttcctgtggtcacacattacagaggctgc

SEQ ID NO: 415772 - DNA, 201 bp, Homo sapiens
acagcagagatataggtcatttctatcattgcagaaatgtctgtcctgtagggctgccagagaggccctccttaatccaatacctggccttccattgtgcytgcccatcattattacttactctgctcctggaagtacatcacagctttgaaattatagaaattacactctttacctgagcccctttgcacacgtattcat

SEQ ID NO: 415773 - DNA, 201 bp, Homo sapiens
gaacatattgttcaccttgcagaccctttggaggagaacgctgagagaactcatgctctaatacgactcccttcatttcactctcaattccagtctcatcyctataaaaatttgcgcagtgagggaataaacctctccaatatgtcctgaacatatctgcctttaaaacaaagccatatgcaaaagcttcctgtggtcaca

SEQ ID NO: 415774 - DNA, 201 bp, Homo sapiens
tagtcccagctattcaggaggctaagtcagggggattgcttaagcccaggagttgaaggctaccgtgaactgtgatcgcaccactgcattccagcctgggygacagagcgagacgctgttttaaatataaataaaataaaataaaataaaaataataaacccattacatattaacataaataacatacttttgttaaaaca

SEQ ID NO: 415775 - DNA, 201 bp, Homo sapiens
ccttgtgtccttctacttcatgtttaagaccttggactttatgagcacttaacaattatgtactgacgtaaacaccatgtcatgatcacttttcctttgcwattcctcttgaatcccccttctccatagcctcaataaacactcaaatgtaggaattcccagacctgttggtcttaagacccctctacactcttaaaatta

SEQ ID NO: 415776 - DNA, 201 bp, Homo sapiens
atttgtatctgaatcaaacagacctccaccttgaccacctgaagacaccttgtgtccttctacttcatgtttaagaccttggactttatgagcacttaacrattatgtactgacgtaaacaccatgtcatgatcacttttcctttgcaattcctcttgaatcccccttctccatagcctcaataaacactcaaatgtagga

SEQ ID NO: 415777 - DNA, 201 bp, Homo sapiens
tctcatagtctaagaaagacagaaaagaggaaaggaagctgcactgtttggatttgatatgaggatgtagacagccaggccctgctaaaagctctcttaakttcgaccttctgaagaccacctcccactcttaaagcctaagccttcatgagcacaatgagacggtcctgctgccctgccacccactctgcctggtctcag

SEQ ID NO: 415778 - DNA, 201 bp, Homo sapiens
tgggtcgcagctgttccctctcccaggccgccccctccaggtgactgcgaggcaacctgttctaacggaaaccgagtacatcctccagaattccccggctrggatccgtgcgacacactcgccagccgcagtcgcccctccggggcttcgaggattttaatttcgtggtacctgcgctcgaaatccagacttcgagcgctg

SEQ ID NO: 415779 - DNA, 201 bp, Homo sapiens
tggggcacatagtgatgttttgatatatataatgtatagtggtcaaattagagtgattaacatatccatcacttcaaacatttataagatcatttctttgwgttggaaacattcaaactgttctagccatccaacaatatatcacaactttttaactatagtcatcttatagtgctatagaacactagaacttattcctcc

SEQ ID NO: 415780 - DNA, 201 bp, Homo sapiens
atcagtcccctcgacaactcagtgagttatacacaattatcctgcaatcacaagccatgggaagggattcttcaggttctaataccatagccaccagccawggatagctatttaaatgttaattgaaattaaataaaattctttcagttcctcaattcctcagtcccactgaccacatctcaagtgctccatagtcacacg

SEQ ID NO: 415781 - DNA, 201 bp, Homo sapiens
tacttaaagtactttaatttgcaactctgtggaataatagcaactattatttttttgtgccacttatgttccagacattttcctaagctttttatttcatyagtcccctcgacaactcagtgagttatacacaattatcctgcaatcacaagccatgggaagggattcttcaggttctaataccatagccaccagccatgg

SEQ ID NO: 415782 - DNA, 201 bp, Homo sapiens
aagtggcttccaactgatgcagattaattggtctctttaataagaatgtcaacttttcttaatgcctataagcacgtgttcaattaaaatgcatctgctcyctctagtctcagagtctccaccaagtgcttaggctgactgtggaatgccattttcactctgctacagaatgcaaattctcttggcctgaaaataagtacc

SEQ ID NO: 415783 - DNA, 201 bp, Homo sapiens
actttttcgactgtaaagtggcttccaactgatgcagattaattggtctctttaataagaatgtcaacttttcttaatgcctataagcacgtgttcaattwaaatgcatctgctccctctagtctcagagtctccaccaagtgcttaggctgactgtggaatgccattttcactctgctacagaatgcaaattctcttggc

SEQ ID NO: 415784 - DNA, 201 bp, Homo sapiens
ggagagccggggcctcaagtctggcctcaagaccgacaagtcggactcggagcaagtgacgctccgcatccatcggaaaaacgccccggcaggaggcagcrggatggccagcgccaagaccaagacgcacttctcagtgaggctcctcaagttctcccgggagaagaaagcggccaaaacgctgggcatcgtggtcggctg

SEQ ID NO: 415785 - DNA, 201 bp, Homo sapiens
cgcagcctcctgggtctcagcacatattccacacctacgtcccctgacctgtgctcctagaagctggagagagcaggagccttcggtggggcagctcaaartgtaggtaactgcgggccaggagcagcgcccagatgccatcggtccctgcctttgagcgtcgacggctgatcttttggtttgagggagagactggcgctg

SEQ ID NO: 415786 - DNA, 201 bp, Homo sapiens
caaaaaattctccgagggtggtggcaggcgcctgtagtcccagctactcaggaggctgaggcaggagaatggcgtgagcctggaaggcagagcttgcagcragccgagatcgcgccactgcactccagcctgtgcgacagagcgagactccgtctcaaaaaaaaaaaaaaaaaaagaaagaaagctagacagtgagaccca

SEQ ID NO: 415787 - DNA, 201 bp, Homo sapiens
  misc_feature (1)...(201): n = A,T,C or G
tctcccaggcaaagggaaacctgggtacatggtgatcctcaccctggggccctgaatcatgacttaactatgaataaaaatgctttggaaaagcagggggnaagaagtggaaataacaaaaaataatgaatcagggagggcattccagggtgcattccagctttgtcagtaacccctttgaccatgtcactgaatatctct

SEQ ID NO: 415788 - DNA, 201 bp, Homo sapiens
ggagctgggagtgaagagcaagggtttattcatattcctgcttcgcacaaagctagaagatgctgttggaagatgcaagggccatgcctctgggtgagccwgtggcctgggagaggacccggaactgtccagagcactcagattaagcatctttgcagcagtccggaagcaaaaacccattttcctgctcccctgttcacc

SEQ ID NO: 415789 - DNA, 201 bp, Homo sapiens
aggttatgagggccgaggtcagagaagatcacagacaacacagctgtgttttgatgatgagttctttgatggaggttcttctctagccatgggctcagaayctgaaagcctcagggctaccctttcggccccactccctcagtgggactcctcagcaatgtggtttcctccttggggacatgaactctggagtcagattgt

SEQ ID NO: 415790 - DNA, 201 bp, Homo sapiens
attggttagccatttgtatgtcttcttttgagaaatatctgttcagattattttccctttttaattggattatcacatttttcactgtttaatagtttaarttccgtttatattctggatattaatctgttgtcagatgcatagcttgtttcctttgctgtgcagaaggtttttagtttgatataatcccgtttgtctatt

SEQ ID NO: 415791 - DNA, 201 bp, Homo sapiens
cctggtgaagagggatcattattttccacccaaagtccttggcatctaagtcaactgatagtaatacaggagctaaaaagaaattatttaggcagttaggrcaaaagagctctcagtggaatttccttttaataaaaagcagccccaaaataatttcttttctaacaaaaagcagcctgaaaaatcaagctgcaggcacag

SEQ ID NO: 415792 - DNA, 201 bp, Homo sapiens
gaaatacttggggattctcagagcagctgacaggtgtggcatctgggtaaccattgtgtaaaccagaaccacacatccaggggcatctctgcaggaagatrtactcaatgtccggtttctgaccttggaaattatccccaaatgttaaaaaaaaaaaaatagacaagatagcactaatgactgagaagataccctgaaagt

SEQ ID NO: 415793 - DNA, 201 bp, Homo sapiens
ctctaataaaatattttaaacctctttctttaaacacataacaccctagtttttcaatcatggtgtgttgttaatgtctcttgagaaatggagtgggtagygcaaagaaaattggtgtcttcagcgggctaaatgaggtagattgtaatagtttgcaaagtgtcttttgctttttggatgaataggtattaagatttattt

SEQ ID NO: 415794 - DNA, 201 bp, Homo sapiens
tcactgcactccagcctgggcgacagagcaagaccctgtctctagaaacataaataaatgaaaaattttagaaaggaatcatttaattctaggaagtatgtttttttttttcaccataggagatagtaatcactaaaaccactcctttaaagctaagaaaaaaactttataaaaataaataagcaccctctttttgttagg

SEQ ID NO: 415795 - DNA, 201 bp, Homo sapiens
ctacatgcagaggaaggaaactgatcatagctctgggatagcaaatgagcaaatgcttacagccagacactgaacttacgtgtgccaggaaactgaggcayagaaaagggaacaatcttgccctcatccctgaactaccaagtgagctgtcgggatttcctccctggggaacaagtactaagaactaagaagtctgtgtca

SEQ ID NO: 415796 - DNA, 201 bp, Homo sapiens
acatgcagaggaaggaaactgatcatagctctgggatagcaaatgagcaaatgcttacagccagacactgaacttacgtgtgccaggaaactgaggcacasaaaagggaacaatcttgccctcatccctgaactaccaagtgagctgtcgggatttcctccctggggaacaagtactaagaactaagaagtctgtgtcagg

SEQ ID NO: 415797 - DNA, 201 bp, Homo sapiens
tgaggcaggagaattgcttgagcctgggaggcgaaggttgcagtgagccaagactgcgccactacactccagcctgggtgagagagtgagaccttatctcaaaaaaaaaaatttaaaaataaaaataaaaaagagatcagggtggccagagcaggggatagggaagagagtgaaaggcaggccaggagcggaaggcaagag

SEQ ID NO: 415798 - DNA, 201 bp, Homo sapiens
tactaagaactaagaagtctgtgtcaggcattgatatttttatgcagcacacgagatggtaactatttctgttatcatctctccttcacttttcccttctytccatatccaagaactacagatgacagttctccttttattcctacactttcacccagattttgtcatacataacagatcatactttctgaccaatcttac

SEQ ID NO: 415799 - DNA, 201 bp, Homo sapiens
tgaatcctggaggacacaatggggtggggaacagaaacagttgttccaggcaaagaagggaggaatctgtgccaaggcccaggggctggtgaacctcaggygtgtgctgggggtgctgcctcctcccaaatgtcggggcacagggaagtcagtctcgcttatcatggtggccacttggctctacaaacccccattgcccaa

SEQ ID NO: 415800 - DNA, 201 bp, Homo sapiens
ctgcacttttgcaatcaactaacagttaggaaggacttgacttgctggggctaaggaaaacaaatctggaggttcattttgcctgtgaaattaaaattatrctttagtaaataaagctgacgccatttaaccatgaacccggtgacatttcctggcttgctgcagcgtttctgcttgtctccttgttacatttgtttaaaa

SEQ ID NO: 415801 - DNA, 201 bp, Homo sapiens
cttgctgcagcgtttctgcttgtctccttgttacatttgtttaaaatacaaacacagcatttccatgttgccagagaagcaaatgtgggctgactggctgrttttagctgctatggtttttctgtaacctttaacaattgttgtgacaaataagattccatgtaaggtgcaatttctaactgtgcagtgtttgtgaaccac

SEQ ID NO: 415802 - DNA, 201 bp, Homo sapiens
atacaaacacagcatttccatgttgccagagaagcaaatgtgggctgactggctgattttagctgctatggtttttctgtaacctttaacaattgttgtgrcaaataagattccatgtaaggtgcaatttctaactgtgcagtgtttgtgaaccacatccaccttctccaggtttggtatttggtcgactaagttgacgat

SEQ ID NO: 415803 - DNA, 201 bp, Homo sapiens
acacccaggctgactacaatggcttcaaagagtttaatttctcttaaatggactcagtatccttggaatgtgctgtttaagtgtttctgaattttctacaygccatttttacaggtccatctgtttatgatgtgatgagataaacaatcacgttgattttatgtttcttttcaaagaaaatgaatgtatatagtactaagc

SEQ ID NO: 415804 - DNA, 201 bp, Homo sapiens
attgctctagccttaaaagtaatggcaaagcttaaggccatgcctcaaagaatcaaatgaacccacctactggtattcttgtaggcaattaccctgtgctkgcactgggtatatttgaccacagattcaaatatttggctgtagtttaactgagaaccagcacacagattcactggaagtcactgcacagctctctcctct

SEQ ID NO: 415805 - DNA, 201 bp, Homo sapiens
tctagaaatgtaacttaagaaaatactccaaatctatccacacaaatatttatttcatagttatttataatagaggaaactggaaataaccaaaatattcraattagcagaagtagataaattttgttatattcatgcaatgaaatactaagatgccatgaaaaattgtgttctataataaaaataaaatagcaaaatgtt

SEQ ID NO: 415806 - DNA, 201 bp, Homo sapiens
atgccacgcttctgcagggacccctccagggccaagggctgcaggctgcctgcaccagggcccccgcccagctccacctgccccactgccaggacgtgccrcgcagagcaggttccggaacagcggcgaggcagagggacacaggaggacacagtcagggagacacagtgcccgcctgcccgccagccctaggtcgcactc

SEQ ID NO: 415807 - DNA, 201 bp, Homo sapiens
  misc_feature (1)...(201): n = A,T,C or G
ggcggcgggtggggggctgcctgcgggctgcgtctagttgcagtagttctccagctggtagagggagcagatgctggtacagcattgttccacaatgccangcttctgcagggacccctccagggccaagggctgcaggctgcctgcaccagggcccccgcccagctccacctgccccactgccaggacgtgccgcgcaga

SEQ ID NO: 415808 - DNA, 201 bp, Homo sapiens
ccaggagcagggggtggctgggggcggccaggggcagcaatgggcggttggctcaccctgcaggtcctctgcctcccggcgggtcttgggtgtgtagaagragcctcgttccccgcacactaggtagagagcttccaccaggtgtgagccgcacaggtgttggttcacaaaggctgcggctgggtcaggtccccagagggc

SEQ ID NO: 415809 - DNA, 201 bp, Homo sapiens
aagtggggcttggcccagggcccccaagacacacagacggcacagcagggctggttcaagggctttattccatctctctcggtgcaggaggcggcgggtgkggggctgcctgcgggctgcgtctagttgcagtagttctccagctggtagagggagcagatgctggtacagcattgttccacaatgccacgcttctgcagg

SEQ ID NO: 415810 - DNA, 201 bp, Homo sapiens
cccagggcccccaagacacacagacggcacagcagggctggttcaagggctttattccatctctctcggtgcaggaggcggcgggtggggggctgcctgcrggctgcgtctagttgcagtagttctccagctggtagagggagcagatgctggtacagcattgttccacaatgccacgcttctgcagggacccctccaggg

SEQ ID NO: 415811 - DNA, 201 bp, Homo sapiens
gtgcaggaggcggcgggtggggggctgcctgcgggctgcgtctagttgcagtagttctccagctggtagagggagcagatgctggtacagcattgttccamaatgccacgcttctgcagggacccctccagggccaagggctgcaggctgcctgcaccagggcccccgcccagctccacctgccccactgccaggacgtgc

SEQ ID NO: 415812 - DNA, 201 bp, Homo sapiens
cacaaaggctgcggctgggtcaggtccccagagggccagcagcgccagcaggggcaggaggcgcatccacagggccatggcagaaggacagtgatctgggwgacaggcagggctgaggcaggctgaaggccaggtgccctgccttggggcccctgggctcacccccacatgcttcacgagcccagccacgtcctccctgct

SEQ ID NO: 415813 - DNA, 201 bp, Homo sapiens
gcggttggctcaccctgcaggtcctctgcctcccggcgggtcttgggtgtgtagaagaagcctcgttccccgcacactaggtagagagcttccaccaggtstgagccgcacaggtgttggttcacaaaggctgcggctgggtcaggtccccagagggccagcagcgccagcaggggcaggaggcgcatccacagggccatg

SEQ ID NO: 415814 - DNA, 201 bp, Homo sapiens
agaagaagcctcgttccccgcacactaggtagagagcttccaccaggtgtgagccgcacaggtgttggttcacaaaggctgcggctgggtcaggtccccasagggccagcagcgccagcaggggcaggaggcgcatccacagggccatggcagaaggacagtgatctgggtgacaggcagggctgaggcaggctgaaggcc

SEQ ID NO: 415815 - DNA, 201 bp, Homo sapiens
accccctgctgggtggcagcctcctgcccccttctgcccatgctgggtgggagcgccaggagcagggggtggctgggggcggccaggggcagcaatgggcrgttggctcaccctgcaggtcctctgcctcccggcgggtcttgggtgtgtagaagaagcctcgttccccgcacactaggtagagagcttccaccaggtgtg

SEQ ID NO: 415816 - DNA, 201 bp, Homo sapiens
cacaggtgttggttcacaaaggctgcggctgggtcaggtccccagagggccagcagcgccagcaggggcaggaggcgcatccacagggccatggcagaagracagtgatctgggtgacaggcagggctgaggcaggctgaaggccaggtgccctgccttggggcccctgggctcacccccacatgcttcacgagcccagcc

SEQ ID NO: 415817 - DNA, 201 bp, Homo sapiens
gccaggagcagggggtggctgggggcggccaggggcagcaatgggcggttggctcaccctgcaggtcctctgcctcccggcgggtcttgggtgtgtagaasaagcctcgttccccgcacactaggtagagagcttccaccaggtgtgagccgcacaggtgttggttcacaaaggctgcggctgggtcaggtccccagaggg

SEQ ID NO: 415818 - DNA, 201 bp, Homo sapiens
gggtcttgggtgtgtagaagaagcctcgttccccgcacactaggtagagagcttccaccaggtgtgagccgcacaggtgttggttcacaaaggctgcggcygggtcaggtccccagagggccagcagcgccagcaggggcaggaggcgcatccacagggccatggcagaaggacagtgatctgggtgacaggcagggctga

SEQ ID NO: 415819 - DNA, 201 bp, Homo sapiens
tttttgtttgagatggagtcttgctttgtcacttaggctggagtgcagtggtgcaatctcggctcactgcaacctccgcctcctgggttcaaacaattctyctgcctcagcctcctgagtagctgggattacaggtgcatgccaccatgcccggctaatttttgaatttttagtagagacagggtttcaccattttggtca

SEQ ID NO: 415820 - DNA, 201 bp, Homo sapiens
gctatttcttcttcttctttttttgtttgagatggagtcttgctttgtcacttaggctggagtgcagtggtgcaatctcggctcactgcaacctccgcctyctgggttcaaacaattcttctgcctcagcctcctgagtagctgggattacaggtgcatgccaccatgcccggctaatttttgaatttttagtagagacag

SEQ ID NO: 415821 - DNA, 201 bp, Homo sapiens
cgcctcggcctcccaaagtgctgggattacaggcgtgagccatataaaaattcttaatttgcccaccggcctcagggggatctgacttatatctgtctctrcagcctcatctcacaccagacaccccctcactgtgaggatgtcagtcaggttgtctcctacctctgggcctttgcacaggccactctccctgactgtgct

SEQ ID NO: 415822 - DNA, 201 bp, Homo sapiens
ccatgttagaaaaattctagaaaaccaacttacctattgcacaaaaattcaggttattttaggccaggcatggtggctcacgtctgtaatcccagaacttyaggaggctgaggcaggcagatcacatgaggtcaggacttcgagtccagcctgaccaacgtggtgaaaccctgtctctatcaaaaatacaaaaattagctg

SEQ ID NO: 415823 - DNA, 201 bp, Homo sapiens
tactctccgtggacattaaaggacataataagccctttgggagtcctttgactgatttataactacaccagcatacctccggaataatgggggttttattrtcaagctttataaaagtgttttttgagaaattattttgaggcagagatgtggatgagcacgttaattgtgtttttccaagtaatgtttgggccatgtcct

SEQ ID NO: 415824 - DNA, 201 bp, Homo sapiens
gcaacttggatccagaagacttggttatttacattcattggtcctgagacacctgggacacaaacagagacacctgcaatacttaaacacttaggtgcttyctaatttgtcattattacaaatataaaaacctctgctctgactatccttaccatgaagtcttttccacgtttaagactatctccccgagaaaattcctgg

SEQ ID NO: 415825 - DNA, 201 bp, Homo sapiens
tactttggagttcattgtgacttgaaaattccaattaaagttggtataacctctatcatgtattgattaaaaatgcacataccctttgacttagcaactcygtttctctgagtttatcttacaaatatactccacatgtggggaataatacatggacaaggttattcattatagcattatttataccaaaaacatggaaac

SEQ ID NO: 415826 - DNA, 201 bp, Homo sapiens
tcaagtggagcctgtttggcagcacccatgccaagatctagcttgtcatcacatggaaatctgagaacatctaccagacaccaggcatatacactgtgctyatatatagggggttgacactagacaggagccttaacaggcatgcgatcccagcccatctcttacagatggagaaactgaggcccaaagggagcctcttgc

SEQ ID NO: 415827 - DNA, 201 bp, Homo sapiens
atacatctccagtgtcatgaattcatggatgtgtgaccagtagctcttggccagccatttctggtcttaacacccagatcatcatagaatatgaggataggaatccactgatgacagaatcctgaatgactatcttatgtgcctgaaagcctgcctcaaagaaggctgatgtcttcttgaattaaagagttgcttgcatat

SEQ ID NO: 415828 - DNA, 201 bp, Homo sapiens
tctgccttcagtagaatggaggctgtatttggttctttgatcgccctttacaagccgcagcctgataaggtcactcaagtggagcctgtttggcagcaccyatgccaagatctagcttgtcatcacatggaaatctgagaacatctaccagacaccaggcatatacactgtgctcatatatagggggttgacactagacag

SEQ ID NO: 415829 - DNA, 201 bp, Homo sapiens
acatatgcctgcatgtcccatgaaatcagaaatgtgaccacagagacagcagtgattctgtgaaatcaagaacaccagactttcaagtcgaaagcattctmgtctaaatcacctgctgagcgagtgtgcaattttggtgaaatcacgtaatcactgagtcttggttttctgatccgtaatttagaaaaataatgcctacat

SEQ ID NO: 415830 - DNA, 201 bp, Homo sapiens
agagacatcagatgacttacctaaaagtcacacagctagtagcaaatttttgtttcaacttgctgtctatctttctccttacttacaactctggagagggrtttgttaatcagatctccttaaggttggaagagtaaattctcccctctccatccaaaggggaagatgcctgtgtctcctgggttttttccaggtggaggt

SEQ ID NO: 415831 - DNA, 201 bp, Homo sapiens
gttgcttatagtgcttctgccttcagtagaatggaggctgtatttggttctttgatcgccctttacaagccgcagcctgataaggtcactcaagtggagcytgtttggcagcacccatgccaagatctagcttgtcatcacatggaaatctgagaacatctaccagacaccaggcatatacactgtgctcatatatagggg

SEQ ID NO: 415832 - DNA, 201 bp, Homo sapiens
gagttgggctgagatgttaaaacagctataatatcactaggcaatagaaatgtttcagctccattaataatcttttttttttttttgagacggagatttgytcttgttgcccaggctggaatgcagtggcgtgatctccgctcactgcaacctcacctcctgggttcaagcaattctcctgcctcagcctcctgagtagct

SEQ ID NO: 415833 - DNA, 201 bp, Homo sapiens
gggcacgggcgcgggcggcgcggcgaggaggcggcccgcggagtccagcgaagtttggcggaacatggcggaagcgtctggggcacgcaggagcgcggggyggcggcggccggagcccgaggagctgtagcagccttagtcgccgccgccgcggggcgaggtcgccgccatggcccgctggatcccgaccaagaggcagaa

SEQ ID NO: 415834 - DNA, 201 bp, Homo sapiens
aatcccagcactttgggaggccaaggcgggcagatcacaaggtcaggagatcgagaccacggtgaaaccctgtctctactaaaaatacaaaaaattatctkggcacagtggcgggcgcctgtagtcccagctactcgggaggctgaggcaggagaatggcatgaacctggaaggtggagcttgcagtgagccaagatcacg

SEQ ID NO: 415835 - DNA, 201 bp, Homo sapiens
gcaggaatcagcaccaagtaaatctagcatttaacatgatgaaactgagaacagctgtcttgcaagagaccaaggatgctcaaagtctattggcagcaagyctgcctcatctgcagtgtagaaagctctttccttaatgtttttttttttttttgagacggagtctcactctttcgcccaagctggactgcagtggcgctg

SEQ ID NO: 415836 - DNA, 201 bp, Homo sapiens
agttaaaaaataaaatgcacttaccttgtatgctaccacctatatattgaccttccaagacgagacaaatattttatgtagcacagtgctaaagttaattrtgtgataactttcatctccatgaatgctgctcttgttttgtgcataatataaaacactgcatgcacatacctatataaatatgtattgtataatatataa

SEQ ID NO: 415837 - DNA, 201 bp, Homo sapiens
tgtgcttttgatgttatcttagctggaagcagtagccatctggacaccctccctctgggaagccttggcatagcttctctctttacccgactgcctgcccragactctgaagctcccttctgtatggccccttatccaaggtcgcttcctttggaacaattatcttaggcaaagtggccttgagcactcagcagccaagct

SEQ ID NO: 415838 - DNA, 201 bp, Homo sapiens
gtcgccgccatggcccgctggatcccgaccaagaggcagaagtacggggttggtgagtgcgcgccccaccttgtcccggcccgacccacgcggccaagttygcggacagcggccctgccaggtttgcgcagagcccggcggaggaccctggccgggggctcggcccggctgcgcagctctgggagccggggacggtaggag

SEQ ID NO: 415839 - DNA, 201 bp, Homo sapiens
atccaaggtcgcttcctttggaacaattatcttaggcaaagtggccttgagcactcagcagccaagctaaatttctcaccatacatagagaacctgcttgktttaaattcaagtccaggaggcccgggtcattccaaaatacagagaaactgcaaatgtatggcagtttctgatggtctttccctatactgctgtgcctca

SEQ ID NO: 415840 - DNA, 201 bp, Homo sapiens
ctgaattcctagaagtactattagaaacaaatgacttatatttcaggcctttgtttgtttcctgttaggtctcattttttgatatgctctttctcattagrgaagataagatgttttatttttattagaaatcaggaatcattttaactcacattaccatgatctggagcattgttacatgttggatttgtgtgtgcactg

SEQ ID NO: 415841 - DNA, 201 bp, Homo sapiens
gttagctcagcttcaatccaggtcaacataaaagaacaacccctgccatagccgttacatatgcctgcatgtcccatgaaatcagaaatgtgaccacagasacagcagtgattctgtgaaatcaagaacaccagactttcaagtcgaaagcattctcgtctaaatcacctgctgagcgagtgtgcaattttggtgaaatca

SEQ ID NO: 415842 - DNA, 201 bp, Homo sapiens
aaatacaaaaattggccaggcatgatggtgcatgcctgtagtccgagctactcaggaggctgaggcacgagaatcacttttaaccccagaggcaaaggttkcagtaagccgagattgggccactgcactccagcttgggtggcggaattagcttctaggacccctgcctgacttggtgtgccagaggttgtatggacaact

SEQ ID NO: 415843 - DNA, 201 bp, Homo sapiens
acgggcacgggcgcgggcggcgcggcgaggaggcggcccgcggagtccagcgaagtttggcggaacatggcggaagcgtctggggcacgcaggagcgcggsgcggcggcggccggagcccgaggagctgtagcagccttagtcgccgccgccgcggggcgaggtcgccgccatggcccgctggatcccgaccaagaggcag

SEQ ID NO: 415844 - DNA, 201 bp, Homo sapiens
ttctcttacccaaaagtttgtatgtatagtaaaccctgatgtccaaaaatcagtatcaactttaaaccacagaaagaaaacctgagtgtgaaattaaaatrtattttcttatggatggttcactagttcatttcctcttcatttgttgaagcacatcagagtcctcattctagacaccagataggacagtaaaggatggtg

SEQ ID NO: 415845 - DNA, 201 bp, Homo sapiens
tcagtatcaactttaaaccacagaaagaaaacctgagtgtgaaattaaaatgtattttcttatggatggttcactagttcatttcctcttcatttgttgargcacatcagagtcctcattctagacaccagataggacagtaaaggatggtgagtgtggaaaacaaaaggttagggcgacagaggacccatgaaattgact

SEQ ID NO: 415846 - DNA, 201 bp, Homo sapiens
aaagttccgtgcctaaaaccaggtgttcctgggtggcctggaggggctgcatccctgcagggctgattgcagagcttagagctactggtactggtcgaggragagttgcaggaaggagacaggcagttcaggaggtggcactgctgtgtgtgagctgtctgtgttttccttctcagagtgcagagaagtgctgctgccact

SEQ ID NO: 415847 - DNA, 201 bp, Homo sapiens
tacatttcatatgcatgtagctgctttcataattgtttttgacgagctcctcacagctacaattttcttttctcctcctgagcagttcagtggatagtgcrtgtatgtactaaccttttctctccagtgagtgatggtgtaatacgttctagctctacttatctgcatttttttctttgaattcatcctgttctctttaat

SEQ ID NO: 415848 - DNA, 201 bp, Homo sapiens
tcacctgaggtcagaagttcgagaccagcctggccaacatggcgaaaccctatctctaaaaaatacaaaaaaaaaaaaaaattagccaggtgtggcggtgytcacctgtcattgcagctactagggaggctgaggtaggagaattgcttcagcccaggaggcggaggttgcagtgagccaagatcacgccactacactcca

SEQ ID NO: 415849 - DNA, 201 bp, Homo sapiens
gctctttataggttcacaagcattgcgtaattatgtgttcttccccacactttttttatatgaatggtagaattttctttactttgctttttttcatttamtattatatcttgaaactctttccatttcagaacataaaaagccccctctttatgctttctgtagctatagatatggctcattgtatgtatgtggcatgat

SEQ ID NO: 415850 - DNA, 201 bp, Homo sapiens
agagccccagacctgctttttcttcattaaaaaaggaggaagctgatacccaatggaatctttctcttcagtatagtgtccattctcattattcatggtarttatgttctatttagtcacagtgaacactgagttagtgaatactgacccgttgctcctaggggagaggcagggttcctgtgagcctctggtcacaagctt

SEQ ID NO: 415851 - DNA, 201 bp, Homo sapiens
atggtgaaaccccatccctactaaaacaatacaaactttagctgggcatggtggtacacacctgtagtcccagccactcagaagtcaaggttatagtgagmtgtgatcgcaccactgcactccagcctgaatgatgggagaaagaccctgtctcaaaaaaaaaaaaaaaaaatagcctaaagagtcataactgctggtact

SEQ ID NO: 415852 - DNA, 201 bp, Homo sapiens
gcaggaaggagacaggcagttcaggaggtggcactgctgtgtgtgagctgtctgtgttttccttctcagagtgcagagaagtgctgctgccactgctgacrgaccagctcagcggccagttagatgacaactccaacaagcctgaccacgaggcaagctcgcagcttctgagcaacatcctggaggtgctggacaggaagg

SEQ ID NO: 415853 - DNA, 201 bp, Homo sapiens
ttccagaggctttgcaaagtgcgatatggccaccgatggaatgcaggggcagctataaagacccagctgcctatagtgaagtcagacattaaagagacttycaaatatgcaaaacaaagccacgcttccaagtgtttttgtttgagaaaatagttctgttccttgaaaatatgtatttttacaaacatgtattggatttat

SEQ ID NO: 415854 - DNA, 201 bp, Homo sapiens
gatccctgagcttttattttcacccaacagcatcgcagaggagtggctggtccccagtgatggaggggctcattccttgtcttgaaaagctgaatgctaayagtattgaaagaactgttataaaactagactaatgagatcacaaatgtatgtgtaagtgcatacacctttttttttgttttttttgagacggaatcttgc

SEQ ID NO: 415855 - DNA, 201 bp, Homo sapiens
catggatttttttttttttttttttttttttttgagacggagtcttgctctgtcgcccagggtggagtgcagtggcgcgatctcgtctcactgcaagctcygcctcccgggttcacgccattctcctgcctcagcctcccgcatagctgtgactacaggcgcccgccactgcgccaggctaattttttgtattttttagta

SEQ ID NO: 415856 - DNA, 201 bp, Homo sapiens
atatcctagcaatttgggtcacttcaaccatttcatttcataaccctccggtttaatcccacaaagggaaagaaaccttttctagtatttctcagcagaasgtagttccaaacctagatggcagatgaggaaacttaattggaaaagagttaattttgctgttcagggcatattctagaagatataattagttatgacttc

SEQ ID NO: 415857 - DNA, 201 bp, Homo sapiens
cagagcacgacttatgaacctttggtaattgacactctaattaaagcaataaaacacacattgatgaatacataaaaaaatttgtaaaactgcagaaaacygcagaaagatgagttataagtgaatatagtaccatagaagtactctatttttattctctccctaaataaatgtatgttgtggtttagatataaatacatc

SEQ ID NO: 415858 - DNA, 201 bp, Homo sapiens
tttatctgttgaatgcttagaaccatgaatgttctggagagtgagctcctctttcttcactccataaagtttctatctggctccatattgatggatcccartgggttgaggcagaataaaaggaattaggcttcttttaagtcaactcctgtaggcaggcataatccctcatttatgggagcatctgaagatgtcagaatt

SEQ ID NO: 415859 - DNA, 201 bp, Homo sapiens
gtgttatgactgatcattttcaactattttcttcataaagttatatattattctgtgagaccattttccacttttggacaagagattgctttgtagggaaragccaaaaagagatctaaagacaaaactcatctatctgaggttccttaaagaaagtgaaactgagtcagaaggaatggagtcaaatcctgtgttccctgc

SEQ ID NO: 415860 - DNA, 201 bp, Homo sapiens
gcattcctccccagagcactcagctcaccatggcattgtgtgtgcctgccacacccacccgttgccttccagttattgtgcagaatgtgataaatagtgawaggaatgtagctggattggtccatgatcttcttatgacagtggcttaagccacatcctgtagattgctgcccactgacttgtcagcaagaacaccagtga

SEQ ID NO: 415861 - DNA, 201 bp, Homo sapiens
ggtaagcagttaaacatattaactagtgtttattgttgcaactttgtagttttcaatatttcactattataagtgattgtgtgaatatcttctcacataartatttgtttacatctctctggttattgttttaggctgaattcctagaagtactattagaaacaaatgacttatatttcaggcctttgtttgtttcctgtt

SEQ ID NO: 415862 - DNA, 201 bp, Homo sapiens
gaaatgcatcctgtgctgagatacgtccaaagatatacaatcgcaatgatgagggccctgatttttcaataccctgcttaagctgatgaactggagacttycaacgggctgtgatctgatttgtaaatttgaagtaggaactggggaacaaaaaagcacttgtttacaagcacaaagtcatgttttctgatgccataatag

SEQ ID NO: 415863 - DNA, 201 bp, Homo sapiens
atgtcatggaatgtttcattagctgcatccttggattagagaaaacacctttccagagcctccttcctcctgcccgttaggttacctgggcatcgactccsctgtctttgagatagtcagctccctgaggccaaggatgctggcttgagttggtttcttcacagcatttaacatagtgcctgacacataatagtctctcta

SEQ ID NO: 415864 - DNA, 201 bp, Homo sapiens
gtatgaggacaccagtcatattggattagggcccacctatatgacctcattttaccttacttactcttttaaaggccctatctccaaatacagtcatattytgcgttactaggggttgtggcttcagcatatgaatttggggaggacacagttctgcccagaacagccctctgtctcacctgtgttttctccctaggggta

SEQ ID NO: 415865 - DNA, 201 bp, Homo sapiens
tcaattgtcttttaacacagaaacaggtgttagaaaccattttctcagagaaggaaagattctaagctgcaagattgtcagataggagctgaacagaagamtttattcaaagtccttgatgttggactcccattgaagagggtaaactgaactttcctgattctatagaaagcatcaaaggaatataaaagggcacatatc

SEQ ID NO: 415866 - DNA, 201 bp, Homo sapiens
gggtaaagttccgtgcctaaaaccaggtgttcctgggtggcctggaggggctgcatccctgcagggctgattgcagagcttagagctactggtactggtcragggagagttgcaggaaggagacaggcagttcaggaggtggcactgctgtgtgtgagctgtctgtgttttccttctcagagtgcagagaagtgctgctgc

SEQ ID NO: 415867 - DNA, 201 bp, Homo sapiens
ggtcatgtattgctaataaaggattatgttagtaacctggatgtgagagaacatttctactttttcagacctgtatttcaaataaaatgtgatgtcatcttctgaagacttaggaaaagtttgagtgagtaagcgccttctccctcagcttccatttccgctctgttctttttttttttttttttttgtgagacggagtct

SEQ ID NO: 415868 - DNA, 201 bp, Homo sapiens
aatgtcatggaatgtttcattagctgcatccttggattagagaaaacacctttccagagcctccttcctcctgcccgttaggttacctgggcatcgactcycctgtctttgagatagtcagctccctgaggccaaggatgctggcttgagttggtttcttcacagcatttaacatagtgcctgacacataatagtctctct

SEQ ID NO: 415869 - DNA, 201 bp, Homo sapiens
gcaaactgatcccaatgcactacaggtgacaaatttttattttttgtccctcattttacccagaagtgcaaagtcaccatctttattatcataattttttwaaaaaatatgaaatatataatccctgaaggctcaaatgtgaactttactattaatatttattttttgctctttatggccatgttgcaagagaggcttcaa

SEQ ID NO: 415870 - DNA, 201 bp, Homo sapiens
ggacgacagccactatagccactacatcagcactttcaaaaccagacaagacatcatcgtaagttgcctttactggtcctggtaacctgaagacttcttawatttggtttaaaaaaatgactgaagctgagcatcgtgagtccagggttctcttcccacgcacctccggtgctatgtggctgtccacagtgattacagaaa

SEQ ID NO: 415871 - DNA, 201 bp, Homo sapiens
agtgatggatattactgatatcatacatgggaaggtggatgatgaagaaaagcagcattttattccctttcagcagtaagtactttggcatgtgtcccagstgacttgagacctggattagccattcaattgtcttttaacacagaaacaggtgttagaaaccattttctcagagaaggaaagattctaagctgcaagatt

SEQ ID NO: 415872 - DNA, 201 bp, Homo sapiens
aaacctacaacccattgcaagaattgaaatcagatcagggataagtgatatcagaatctgggaaagccagaggtgagggtggaggggaagaagctgaaagkctcaaagcaagcatcgttttcaccttggtggggtgaaatttcaggacaggattttacctgaatgccacagctgaggaggaaggtcagttgcagctttagg

SEQ ID NO: 415873 - DNA, 201 bp, Homo sapiens
catcttccagcttcgggcagaaggggtgggcagataatgtctagcctccctccagccccgtagtaacttaactaggtcgatgggtttcagattttctatcyactattcttcccagccttggaaagcagctccagcgagctgatctttggcctcttttcctttctgtcaacacctcttcctgcttccacacggctgaggtgg

SEQ ID NO: 415874 - DNA, 201 bp, Homo sapiens
actcagacctggaaggaggtggtttgaagcagaaaccgcaaagcacgtggcctttggacctttagaatgcagcgtgtttccagtgtggtgggatacctgcrtggctcagtgggtgggaaaagccaagttcatggggctcacatagtgtttttgtcagttggtggtctaaggagtcttggatttgtgctttccttttccttc

SEQ ID NO: 415875 - DNA, 201 bp, Homo sapiens
cttttcctttctgtcaacacctcttcctgcttccacacggctgaggtggaatcagggcagatccccgtgctagatgggcggatgcccatgcagtgacttaracacggtcggattcgtgtaatgtctaacttttatcttgtcgataacaactcagttatactttttgaatataaacaattctacatctcaagtcaaaggatc

SEQ ID NO: 415876 - DNA, 201 bp, Homo sapiens
gcagcctcttctgcctctgaaagagcatggagtgttgcctctgattttagttgctaaccgttggtcaccagttttgtgtactcttgggtttttttcctccstctttgcctcaagtcatttccaaggtgaatttagtatttaagatgacacaaaatggaaaaataaaggaaagatagaaagataggggtacttagtgttgat

SEQ ID NO: 415877 - DNA, 201 bp, Homo sapiens
tatcatgttgcaggagatgttcggaatgacatttatgtcaccctgatccacggtgagtttgacaaagggaagaagaagacgccaaagaatgtggaggtgaygatgtctgtgcacgatgaggagggcaagctcttggaggtgcgcggcatggcccagaaatcctgctaccatcgcatccgtctttacaatcacgatagaatt

SEQ ID NO: 415878 - DNA, 201 bp, Homo sapiens
tacttaattttctgtaaaactacagtgcaaagacatcttggtatgcatggaaaggtaaaatgtgataagctgaagacagcaaacgcatatgaaagcctttygtcggatgagtagttcagtataaaaccagaccatttcgtgttgtctttaccttttatgtcgtatgacattctgaaacttagaatgacttctctcagcaac

SEQ ID NO: 415879 - DNA, 201 bp, Homo sapiens
gagcatttatcattaagaaactcagtgatgtatgagaatttgaatagcaaagcttgtggttgacgtgatggatataatagactgccaagatggtacaaaascaaacagaaattttcacactgtgcaaacagtttcctaacatttttttattcttggcctctcaccaagtgttctgggcctcttttcaacttcaatatgtgt

SEQ ID NO: 415880 - DNA, 201 bp, Homo sapiens
gcagccctgttggtatgagactgtcaaggtgagaatgagtcatttgtaacccctgttatctgttaaacctcagttagattcctatcttctgtttacccccmaattattcctactttattttgaaatttttagataagttgcctatggtgtgcagtaagaaatgaatcagtaattataattctgtattaagagcatttatca

SEQ ID NO: 415881 - DNA, 201 bp, Homo sapiens
cagcagaccacagagccgtgcctatgataaaaacaggccacaggttaccctactcagagccactgaagcaggggacccggtgagttcagagactggccccraagaccaagagagaggagctctgcctcctcatgaagctgcaccctcctcccagctgccacagggcatgcagatcttctttcctggcactggagctggtat

SEQ ID NO: 415882 - DNA, 201 bp, Homo sapiens
agtaagaaatgaatcagtaattataattctgtattaagagcatttatcattaagaaactcagtgatgtatgagaatttgaatagcaaagcttgtggttgaygtgatggatataatagactgccaagatggtacaaaaccaaacagaaattttcacactgtgcaaacagtttcctaacatttttttattcttggcctctcac

SEQ ID NO: 415883 - DNA, 201 bp, Homo sapiens
ttttgtgaatactggtatacggttggaggtgtttttaaatctttatttcctctctttctttgttctagtgacttgtcttgctttaagattttttttaaagrattgttttattcaacatatatcaagttcttatggaatgccagtcatggtactagccccttgggatgtagtggttgagtgtgttcaatggaaacagcccca

SEQ ID NO: 415884 - DNA, 201 bp, Homo sapiens
gaaaaaccccaccatcaacacaaaacaaggctataaagactgtgcaccttttaacaagtcaatttgtagtcagtccctgggcctgtctttttttttttttwtttttttttttaattttgaagctacctgaggtttagaattccttcagccctagctgcttttattctgctttttatttaaacaaaaagagggggaggatct

SEQ ID NO: 415885 - DNA, 201 bp, Homo sapiens
gatgttttcatctccccaagaagctccttagggccttttgtggtcaatcaccattccctcctcacagccccaggcaaccaataatctcctatattgccttygatagatttgctaaattctggacattttgaataaatggtgtcataaactatgtggtcttttgcatctggcttctttcctttagtgtaatgttttgaggtt

SEQ ID NO: 415886 - DNA, 201 bp, Homo sapiens
ggagggactctgctgagggtgggggacattcacagctgggtccttggactcctgccctttattatctttctctgatacaaaacagcctctgctggggaccrtccccctcagcttccaaccacaggcttttaatactgaactgcattgagatgcacccagcggtgatttgatcacagttgtgttttgtaaattctttggaac

SEQ ID NO: 415887 - DNA, 201 bp, Homo sapiens
ctgaggcagggggaatcacttgaaccccggaggcagagctttcagtgagctgagatcgcgccactgcactccagcctggtgacagagcgagactccgtctsgaaaaaaacaaaaaatacataataatggagagcttgcctgtcagacttagtggacacatatcagcagaacagaaccatgataagtgaaaaggagactttg

SEQ ID NO: 415888 - DNA, 201 bp, Homo sapiens
gtttatagaggaaagaggtttaattgactcacagttcagcatggctggggaggcctcaggaaacctacaatcatggcagaagaggaagcaaacgtccttcrtcacatggcggcagcaagaagtgccaagcaaaaaggaggaaaaccccttgtaaaaccatcagatctcgtgagaactcactcactatcacgagactagcat

SEQ ID NO: 415889 - DNA, 201 bp, Homo sapiens
tgcctcagcctcccgagtagctgggattataggtgcccaccaccatgcctggctaatttttgtatttttaatagagatggggtttcaccatgttggccagmctggtctcaaactcctgacctcaagtgatccgcccaccttggcctcccaaagtgctgggattacaggtgtgaaccaccccaccaggcctaaaaaataaac

SEQ ID NO: 415890 - DNA, 201 bp, Homo sapiens
gctgtgtgaactttgggaaatgtctttaaatccctttgcctcaaacccatcatctgtaaagtgaggatcttcctgctccagaggtcctaatttatgtgctygtgatcttgattttcccagggtaattgcctttgctccacctcgggctctctactcccttctctagcgtcgtctcttcagtgctctcatggtaattgtcat

SEQ ID NO: 415891 - DNA, 201 bp, Homo sapiens
ctgcctcagcctcccgagtagctgggattataggtgcccaccaccatgcctggctaatttttgtatttttaatagagatggggtttcaccatgttggccakactggtctcaaactcctgacctcaagtgatccgcccaccttggcctcccaaagtgctgggattacaggtgtgaaccaccccaccaggcctaaaaaataaa

SEQ ID NO: 415892 - DNA, 201 bp, Homo sapiens
ctagatatggggacatgagaaaggaaatcggctttagaatccgggacatgtggtataacctgggtgagtgtctagccttgaacaggcctgatcacaacctytgagtgataagcatcccacgataaagtcttttttttattttaatccagataaccctgagatgtatttgtctgtgtgtctggaagtgaaagttgatttgtg

SEQ ID NO: 415893 - DNA, 201 bp, Homo sapiens
cctgcctcagcctcccgagtagctgggattataggtgcccaccaccatgcctggctaatttttgtatttttaatagagatggggtttcaccatgttggccrgactggtctcaaactcctgacctcaagtgatccgcccaccttggcctcccaaagtgctgggattacaggtgtgaaccaccccaccaggcctaaaaaataa

SEQ ID NO: 415894 - DNA, 201 bp, Homo sapiens
tatgataatttggcaatatatatatatcaaaggccttagtacaataagtttatactgctttataattgaaaaaataaactttttttttttttttttttttttgagacaggctctggctctgtcacccaggctggagtgcagtggcagaatctcggctcactgcgtctctgcctcccaggttcaagcaattttcctgcctca

SEQ ID NO: 415895 - DNA, 201 bp, Homo sapiens
ggtcttggagaaacaaattgtgttagacaccgttgggaaaacaagctatatgataatttggcaatatatatatatcaaaggccttagtacaataagtttayactgctttataattgaaaaaataaactttttttttttttttttttttttgagacaggctctggctctgtcacccaggctggagtgcagtggcagaatctc

SEQ ID NO: 415896 - DNA, 201 bp, Homo sapiens
tttatacacatcttgcagtctgaaagatcctgtgtggacctcaaaataccagtatttcccctctgaagtattactgtttcttacttcagaaaatgctagawattcacagtatccctatgctcagaatctatgataaacagcaagatgatctgagattcttttgatttgaaaatagctcagtctcctttgaatgaaacctat

SEQ ID NO: 415897 - DNA, 201 bp, Homo sapiens
ataataaatagataactgatttgaggaggaataggattcatggattttttatagttaaaatacaagaaaacaattttactagataaaattttaaatccctmtatatgaagattatatatatatatatatatatatatatatatatgcaaattaaatgtcaagtcccaagctttaaaaattttgtaatataggtgacaggtg

SEQ ID NO: 415898 - DNA, 201 bp, Homo sapiens
cattacctttctaaagggaaaatgaaggtttttagtaaatgttatttagaaaattagttaacaatttggggctgggtgcggtggctcatgcctgtgatccyagcacttcgggaggctgaacctagcagattgcttgatcccaggagttggagaccagcctgagaaacatggcaagaccctgtcttaaaaaaaatacacaaa

SEQ ID NO: 415899 - DNA, 201 bp, Homo sapiens
aacttgcacagacaccagggtgaaagctcatgcatatgtgaagggtgctggtgtggccaggccacttgggcacagaaggatcagtgacagagctggctcgygaggagacacttgggatgttgggctggcagtagctcaaaggaagcactgctgattaagggtctctttctgttcagcactaaatgttcccaggttggggga

SEQ ID NO: 415900 - DNA, 201 bp, Homo sapiens
aagttctcacaagattcttcatggatcaggcaagctttgaacttcaggtaggcatgtgactcacctacctgcttctagaattcttggccatggcaagagarctatatgaatttggaaaatgtctcctcagatttcactgttttcacatgaaaaaggttttcctgtgttttttcatttcctaaagcacatatgcctgtcaca

SEQ ID NO: 415901 - DNA, 201 bp, Homo sapiens
agatcctgtgtggacctcaaaataccagtatttcccctctgaagtattactgtttcttacttcagaaaatgctagaaattcacagtatccctatgctcagratctatgataaacagcaagatgatctgagattcttttgatttgaaaatagctcagtctcctttgaatgaaacctataccaaatctcactctctagtaatt

SEQ ID NO: 415902 - DNA, 201 bp, Homo sapiens
gaaattcacagtatccctatgctcagaatctatgataaacagcaagatgatctgagattcttttgatttgaaaatagctcagtctcctttgaatgaaaccyataccaaatctcactctctagtaatttgtgctgtggaaagtataaaattgagcctaattccatgaaataaaccatgcttgcaaagtactgtgtgtctgta

SEQ ID NO: 415903 - DNA, 201 bp, Homo sapiens
gagttggtgtcaacacccacatttctgatttggatgactgggcagatgctagtctcatttattaggggatgtaggaagaggagagcatacttgggggtgcyaggcagtttcagtggcacatggtacgtggcttattgcagtttgctcagttgtgcttattagaatatggttgaacgctgcacccccgagcaaaatgtgaaa

SEQ ID NO: 415904 - DNA, 201 bp, Homo sapiens
acacagttatatgaaagaaataagtgataaactggactttattaaaatttaaaacttctgctctgcaaaagataatgtcaagagaatgagaagttaagccmcagtatggaagaaaattttgtaaaagagaaatttgagggtgggcccagtggctcacacctgtaatctcagcattttgggaggccgaggtgggcagatcac

SEQ ID NO: 415905 - DNA, 201 bp, Homo sapiens
ctgtgggatttaccttgattacatttcctttcttgaataatatgtttttctagagctaattcctttttttcttcattctctgtgaatttacctctatttcrtactcaaggttgctgacaggagtattgactgccttttaatatgttgagacaaataagatcatttatcagtttcttttttttcttggattcattcctcatg

SEQ ID NO: 415906 - DNA, 201 bp, Homo sapiens
ttatttaacttaagtaatgtgtaaggaaccctactggatgtagtaaaccaagaatgagctgcctaggggacttgcgctagaaattctgtctcccatatgcygtgtagagactgttgcctttggccttgtagacagtttgagtgaggtacaggcaagagctctgccttaaggggtgccaagatagacaaaaaagtgtagtta

SEQ ID NO: 415907 - DNA, 201 bp, Homo sapiens
tgaggcagggggaatcacttgaaccccggaggcagagctttcagtgagctgagatcgcgccactgcactccagcctggtgacagagcgagactccgtctcsaaaaaaacaaaaaatacataataatggagagcttgcctgtcagacttagtggacacatatcagcagaacagaaccatgataagtgaaaaggagactttgg

SEQ ID NO: 415908 - DNA, 201 bp, Homo sapiens
ctccacctcccaggttcaagtgattgtcctacctcagcctcccaaatagctggggttacaagtgtgtgccctgacacccagctaatttttgtatttttagyagagacgaggttttgccatgttggccgggctagtcttgatctcctgacctcaaatgatccacccgccttagcatcctaaagtgctgggattacaggcatg

SEQ ID NO: 415909 - DNA, 201 bp, Homo sapiens
gcatatctacaaaacccaagagggtttactcaaattttagtaaaactaataaacaatttattaaactaacctgtttatttattttgttttgagacagggtstcactctgtcagccaggctggagtgcaggggtgctatctcggctcactgcgacctccacctcccaggttcaagtgattgtcctacctcagcctcccaaat

SEQ ID NO: 415910 - DNA, 201 bp, Homo sapiens
ctgttaatcacttgtgcaaaaataaaatctatagcttaactgatctgtcttttccacccattgactattgaagggtaagaatgacttaggaagctgggtgyggtggctcatgcctgtaatatcagcactttggaaggctgaggcgggcagatcacctgaggtcaggagttcgagaccagcctggccaacatggtgaaactc

SEQ ID NO: 415911 - DNA, 201 bp, Homo sapiens
actgtgagtatttcaggaacgaaacctgaagtcagtggtgtcatttagtaatagagaaaaacaggggtcctgttgcaccgatagagcaattgagtagtctyagagtcactagggccacccccactgtggtcttcagtatggttatggggtgtatactgtccacagctgacattgtttatctggtgggagtcaaatgctggt

SEQ ID NO: 415912 - DNA, 201 bp, Homo sapiens
cccccacaatagaaatctctaaaggctcagaggagccttattcatttcataccctccccacaaggcacagcgtgtaacttgcacaactatttagggccacmctaaggaaatgttatgtaaatggaagtgaaagcagcatctcctggagaggctgattttatgaatcactttcattcagggaaatgggaaacaagtaaatga

SEQ ID NO: 415913 - DNA, 201 bp, Homo sapiens
cacccccacaatagaaatctctaaaggctcagaggagccttattcatttcataccctccccacaaggcacagcgtgtaacttgcacaactatttagggccmcactaaggaaatgttatgtaaatggaagtgaaagcagcatctcctggagaggctgattttatgaatcactttcattcagggaaatgggaaacaagtaaat

SEQ ID NO: 415914 - DNA, 201 bp, Homo sapiens
ataacatctattttttgatatcatcatgagaattacaggagatgatgtgctaacatagcatctgttgcagagttcatgactaataaatattggctgctctrgtgttcatggttgttattattacaatttgtttttggtgtttgtttttaagagatagggtctctctctgttgcccaggctggagtgcagtggtgcaatgat

SEQ ID NO: 415915 - DNA, 201 bp, Homo sapiens
ttgaacccgggaggcagaggttgcagtgagccaagatcacaccactgcactccagcttgggcaacagagcgagactctgtctcaaaaaaaaaaaaaaaaawttatgtaccactcacccgcacccccacaatagaaatctctaaaggctcagaggagccttattcatttcataccctccccacaaggcacagcgtgtaactt

SEQ ID NO: 415916 - DNA, 201 bp, Homo sapiens
aattatttctagccctgagcaccttctctaactttggatttacatataaactttgattggccaatatgcagctcaaactgaacaaggcggtaacaggaacytttatttctcactctttgctcctccccagcccatcctacctcactttgttaccatgttactaataacattcccatccatttagttgctcaggcaacctca

SEQ ID NO: 415917 - DNA, 201 bp, Homo sapiens
ggaggctgaggcgggagaatcacttgaacccgggaggcagaggttgcagtgagccaagatcacaccactgcactccagcttgggcaacagagcgagactctgtctcaaaaaaaaaaaaaaaaatttatgtaccactcacccgcacccccacaatagaaatctctaaaggctcagaggagccttattcatttcataccctcc

SEQ ID NO: 415918 - DNA, 201 bp, Homo sapiens
tgtggtttccacctcttcaaactcgtctgacaatgctccttccagaccgggatctgatgggtaagggtttcatctttaatctgcaggaagggtggggtaaygccttactaatgtttgcctttagccacgcatcactcctttgagaaaaatagcctttgggtcattctcattgtcttcctcatgaggaatgtcatgattagc

SEQ ID NO: 415919 - DNA, 201 bp, Homo sapiens
gtttgcagtctcagatctaccttcaattacctaaattgggatgtggccctgagtggctcttcttgtttgttctgtaaactgacctcctgtgccccatctgyggatggtgttatgctgttgtctgcaaggacactgttagattatgaggtcttatgatgccaagttcaggtttggtttggtttagttcttaatataggtggg

SEQ ID NO: 415920 - DNA, 201 bp, Homo sapiens
cactctgcaggatgggaggcacgatctggtggtttataaggtggtgctaacagaaaatggctgagaaaaatactccctttcaaatgagcatttaagactcytttcatatttatttgtacaaacatcagaaacctttctagagctttctgtacttgcccattaacatctagaaacccagagggctctgggccctccagcttt

SEQ ID NO: 415921 - DNA, 201 bp, Homo sapiens
gcatgatagaaattgtttttatttgcatataagagattttggccatcatttggtgttcctaacatgcttccttttagggtgacaacaaaaaaatggaagaygctaaattctacctgaccctgcctggaaccaagatggagatggaagaaaaagagcttcaagcatctaaaaacctggtcaccttcaccccaagcaaggata

SEQ ID NO: 415922 - DNA, 201 bp, Homo sapiens
tgagtcccttcagcttgaaaccttctcacaagccaagcgcaacaaaattgttaaaaagtaagtgtccttttaaagttaagatcgggaaggggcttcttccrtttgtttacattgagagcaatattttaggtatcacagaaattactatttagtggctacccatgttgttagtgaggtaagtcttcaactaattacttaata

SEQ ID NO: 415923 - DNA, 201 bp, Homo sapiens
ctagtttatgatcttcttcctagatatggggacatgagaaaggaaatcggctttagaatccgggacatgtggtataacctgggtgagtgtctagccttgarcaggcctgatcacaacctctgagtgataagcatcccacgataaagtcttttttttattttaatccagataaccctgagatgtatttgtctgtgtgtctgg

SEQ ID NO: 415924 - DNA, 201 bp, Homo sapiens
aaaacctggtcaccttcaccccaagcaaggatagcactaaagacagctttcagattgccaccctcatctgctccacaaagctcacccagaatggtaggagyggtgaatacactgacacaaataagcttcttgctcagcctttctgggctccttggttaggctcacagggctggactatatggggctgggtcttattaggta

SEQ ID NO: 415925 - DNA, 201 bp, Homo sapiens
gatccacctgcctcggcctcccaaagtgctgggattacaggcgtgagccactgcgcccggccagcccgtgctcttttggtgagtgtttggttttctcttcrcctgtcctcatatgcttcccccaaaacccatgaagtgtcagggaccaactattatgtgaaacatcttgcttagaacgctcttaggaatgtagcaacaaag

SEQ ID NO: 415926 - DNA, 201 bp, Homo sapiens
taggagatagtaaattaaaagaatatataaggcatcttgaattagccactattgagagcaattacctgttctagagaattctttagctatgtcctgaaatkgtctgggttgttctcacctgtatctaatgtttgtggttgttcttcctagttgacctgttaggcttgttaaattggcgttccaactcccagaacattaaac

SEQ ID NO: 415927 - DNA, 201 bp, Homo sapiens
cagagtttgtagtgaggtgagatcatgccgctgcactccagcctgggcaacagagtaagactccatctcaaaaaagagaaaaaaattcatctagaacaatsgtttccagtgctagtatgtggatcagctaatcaagatctccttgaagatctccttgaaaatacagattcccagatttctagagaccgattcagagctccc

SEQ ID NO: 415928 - DNA, 201 bp, Homo sapiens
aggtatgtttatatattcatagttagaaatacacatacctacatatatatacctatctaattatacctaattggttcaccatttaaaattaaatcattcaytgtaaatataaaatctacgttgttaaacaagtgtgctagttttttaaaaaatgctattttaaacctctttgatttaaactagttgtacccagatttctgt

SEQ ID NO: 415929 - DNA, 201 bp, Homo sapiens
gagctggttactgtggagctaggatggagaaccaggccttttggtgtcacacaagctctctttataaagaagcaatggctcctctattctgggcattctgrccgtgtaggcagggtgctttagcgctgcctgtctctgcccactgggcatgggatcccaggagaacaaagaagggtcactcagaccctgctatccaagtgt

SEQ ID NO: 415930 - DNA, 201 bp, Homo sapiens
ctaattatacctaattggttcaccatttaaaattaaatcattcattgtaaatataaaatctacgttgttaaacaagtgtgctagttttttaaaaaatgctrttttaaacctctttgatttaaactagttgtacccagatttctgtggtgtggggctgaatgaaagcatcaaaataacctctccgtttttcttatcttcagt

SEQ ID NO: 415931 - DNA, 201 bp, Homo sapiens
caagactctctctcaaaaaaaaataaaattaaaaaatttctctcatctcatcagttctacttctcctatgagagagaaatgaagaaaaacttttcactcakacaattccttcctctgtcttctctttctataattgttcctcctttccattacttctccagaatactaaacacagaagtagcaaaaactgagggcttttgc

SEQ ID NO: 415932 - DNA, 201 bp, Homo sapiens
aaaaaatttctctcatctcatcagttctacttctcctatgagagagaaatgaagaaaaacttttcactcatacaattccttcctctgtcttctctttctakaattgttcctcctttccattacttctccagaatactaaacacagaagtagcaaaaactgagggcttttgcctctacattacatttattatctgttcactg

SEQ ID NO: 415933 - DNA, 201 bp, Homo sapiens
ggttctgagacaaacatttgagctgctttacctgttatttcattaaatcattgtggcagtgatatgaaatgctgttgtcccctgtttctgatataggaaaygaggtttgcagaagatgagtttctcatccatggccatataatctcactccaaaaacaaaatcttttttttaaaattatatatatatatttattatacttt

SEQ ID NO: 415934 - DNA, 201 bp, Homo sapiens
tgaacaggacagtcttgatcactgaaaatataatgattatattttgctcactgcatttgtccacttacatacactttttcttagcaaatgcacttcctctygggtgttatctgtgttttgttttttgttatttattgattaatcaactgattgattgagacagggtctcactttgttgcccaggctggagttcaatgactc

SEQ ID NO: 415935 - DNA, 201 bp, Homo sapiens
ttagctgagcatggtaatataagcctgtagtcccagctacttggaaggctgagacagggactgcttgagcccaggagtttaaggctgtctctaaaaaaaawaaaaataaataaattctcacaacaaccttgaagggtaaggaatgtatacaaatgaagaaaccaaagttgtgcagaattaagtaaattctccagggtcata

SEQ ID NO: 415936 - DNA, 201 bp, Homo sapiens
tgcctgggaccggtccctctctgtgcaccctctctccatgctgctcagtggcatcgtggacccggccgtcatggggggcttctccaactatgaaaaggttygcttggtcccagaatcccctagggattcacagacctgggtgtctgtgtgcctccctctgtgccatttgccactgacaaattcatttcctacagctgctct

SEQ ID NO: 415937 - DNA, 201 bp, Homo sapiens
cagtcctcaacttcttgagcctaagcaaaattttttctacttctgtgtgcactttgggcacaaaagccttgaggggagggattgcacccacgatatggccsttagtattcccaagcatatgcagagctacaacttcacacacagccaggtgtttgcttctactagttgctgcgataagagctgtgttagtccattctcaca

SEQ ID NO: 415938 - DNA, 201 bp, Homo sapiens
ctctgtgccatttgccactgacaaattcatttcctacagctgctctaagaaatgttcactttcccttctggcaagtgaagtgaatgaaacgattgtccctsacttcttagagactatcagcaacccagctggtatagaacttacctagtaaagcgtcacagaaaaaaaaccaacatgcctctggtcaaagcacctgttatt

SEQ ID NO: 415939 - DNA, 201 bp, Homo sapiens
gttgcggtgagccaagatcatgccactgcactccagcctgggtgatagagtgagaatccctctcaaattaattaattaattaataaaaggccaattgggtrggataaggaaactccattgcacataggacacctctgtcatttggtgtcttgccatgacattggcctggaggtcccgtgatctctggcacaggatgttcac

SEQ ID NO: 415940 - DNA, 201 bp, Homo sapiens
ttgaacccaagacttttgactccatgtctaatgctgccttcttagggttaagaattaatagtgcccttccctattacttgaccacccagaagaccataccyacagtggctgcactgccaggcttgtggtgtcagaggacttattaaaaggccaattaggccaggtgaggttgctcatgcctttaatcccagcagtttggga

SEQ ID NO: 415941 - DNA, 201 bp, Homo sapiens
tactaaaaataagaaaattatctcattgtgtggtgtgtgcctgtgatcccagctacttgggaggctgaggcaggagaattgtttgaacccaggaggtggasgttgctgtgagccaagattgcactactgcactccagcttgggtgacagagcgagactccattaaaaaaaaaagttataaatatttggactaaaactacaa

SEQ ID NO: 415942 - DNA, 201 bp, Homo sapiens
tgatggtctttccctatactgctgtgcctcagttggaactagtcactgggtgtgttttcattggttgttcaggaaaggagggaacattgtgatcaaggagrcctcctggtgacgtaccaagaccttggacattggagtcagacagactgcctagttcttaagttctggcttctcccttactgggtatgtactattatattc

SEQ ID NO: 415943 - DNA, 201 bp, Homo sapiens
aaaaaaaaaaaaaaaaaaaaaagatacctgtgatgtcttagaaatcctgcatttctatagtacatttccttgttcttttcttttcagtctcagttcaccaraaatgtacgttgtggatccacagtctcatatgaggggaaaatgcagtccactaaccagattaaccccagccatgtagacgctggtgattattctagaaaa

SEQ ID NO: 415944 - DNA, 201 bp, Homo sapiens
ctccggaaagccacaatccccattttctttgatatgatgcagtgtgagttcaatttcagtggaaatggcaatttccatatggtaagaagtggcagaccgcrtaatattagtaaatggacatatagtcaaatcataactcatttctttctatatagagaagcagtaaccttaataatgcaagtccatgttgatctgaaagtt

SEQ ID NO: 415945 - DNA, 201 bp, Homo sapiens
ggcacatacctgtaatctaggctactcagaaggctgaggtgggaggattgcttgagctcgggtggttgaagctgcagtgagccatgattataccactgcaktccagcctgggtgacacagtaagaccctttctcaaaaaaaaaaaaaaaaaaaaaaaaaaaaagatacctgtgatgtcttagaaatcctgcatttctatag

SEQ ID NO: 415946 - DNA, 201 bp, Homo sapiens
gctggtctgaaactcttggcctcaggcaatcctccagcctcggcttcctaatgggctgggatttacaggcatgagccaccacgtctggcctagtattattrttattattatttacaggcctacccttcattcaggttgtaactactctagaccattgctttctcatgttccctgaacttttctagtgttgaccaactgcat

SEQ ID NO: 415947 - DNA, 201 bp, Homo sapiens
acctgtggccagctagtggctcacgcctgtaatcccatccctttgggaggtcaagcctgggggattgtttgagtccagcagtttgagaccagcctgggtgmcatagcaagaccctatctctacaaaaattagctgggcacagtggcacatacctgtaatctaggctactcagaaggctgaggtgggaggattgcttgagct

SEQ ID NO: 415948 - DNA, 201 bp, Homo sapiens
gagctctgcctcctcatgaagctgcaccctcctcccagctgccacagggcatgcagatcttctttcctggcactggagctggtattctggggaggaagggkaaagaaactttgggcagcaccataaaccctagagtagaataaatatcttgcagagcctgttttagagcaacataaattgagatctctcattcaagtgttt

SEQ ID NO: 415949 - DNA, 201 bp, Homo sapiens
gatcctcccacttcagcctccctagtagctaggactgtaggcgtgcaccaccatgcccagctggttttcatttttatttttgtagagacagggtcttgctrtgttgcccaggctggtctgaaactcttggcctcaggcaatcctccagcctcggcttcctaatgggctgggatttacaggcatgagccaccacgtctggcc

SEQ ID NO: 415950 - DNA, 201 bp, Homo sapiens
gttctttttggacttatttttgtttggttccattcttctattctgtatatttagtctccgtgtatctgaaataaattttatttcaagtatattaattgttyttcctgctgcgtaacttaattctcttattgtgtgtcgcagtttcttagtcaactgccttgcattgtgaggaatacaaccataatgtttgcaaattgtggt

SEQ ID NO: 415951 - DNA, 201 bp, Homo sapiens
tggcttttgccactgaatcaatgactgccttgttctccacttttaaccttactttcctttttctgaagatgtgggagaaggccatcaagctgagcaaagakttggctgagacttacgaaagcaaagtatttgactacgagggccttggcaacctcctggtgagtctgggtcaaaatatgttaggcctctgacagggttgct

SEQ ID NO: 415952 - DNA, 201 bp, Homo sapiens
acttacgaaagcaaagtatttgactacgagggccttggcaacctcctggtgagtctgggtcaaaatatgttaggcctctgacagggttgctaaaattagcrctcatgaaaatgtttccgtaagttgaaagtcaggatgaatggtgtttttttacaatggaaaagtcaactttgcttgaaatgagaatgaaaaaagatgtag

SEQ ID NO: 415953 - DNA, 201 bp, Homo sapiens
tcttgatgttggggggctgaatatttgttgtattaaccgtgtgtcgcttttcttccttttcagtggtctgacaagccctgtgtgcctcatttgcttcagarggacagttactatgtttatacccagcaagagcttaaagagaagctgtatcaagaaatcatatcatatttcgacaaaggcaaagtgagtattggattgttt

SEQ ID NO: 415954 - DNA, 201 bp, Homo sapiens
agaatatggttgaacgctgcacccccgagcaaaatgtgaaatcgtgtcatagccatcgcctcctggtgtctctctgcactgctcagacatgtctttctgcyttttcagccagagataaatcggagcgagcatttggggtggccttcgtgaagctgatgaacccggatggcaccactctgcaggatgggaggcacgatctgg

SEQ ID NO: 415955 - DNA, 201 bp, Homo sapiens
gatgaactggagacttccaacgggctgtgatctgatttgtaaatttgaagtaggaactggggaacaaaaaagcacttgtttacaagcacaaagtcatgttytctgatgccataatagctcttggatggagatgggggagaagagagtcgttctaatacttcagcattgagaaataaggtcggaacaggattttgttgtaga

SEQ ID NO: 415956 - DNA, 201 bp, Homo sapiens
acactgaggacgtgctttagcctgtaacttacatggttatacatgctcggaggcatttcctaaaactcatccactaagtagggaaatcagtgccctgcatkgaaatacagtttgccaaattccacactatcggggaaacccacccccaatatttcaacataggttctttctattttccataagtgttggccggctgagaaa

SEQ ID NO: 415957 - DNA, 201 bp, Homo sapiens
aatacttatgtataggaaaaaacagcacatatagagttcggtactgtctttggtttcaggtatccaccaggggtctcagagcatattcatcacagacaagsgggggctactctatcaatgtgccacaatatatgtaactagtcacctggagtctttatttttccattaacagaagccttgcagacctagagtagaaatgca

SEQ ID NO: 415958 - DNA, 201 bp, Homo sapiens
aatattctcctaatatgaaaatcatcatgtctgaacatccagtgtaaattgtctgcttatgatctgcttagatgtcacaagattcatcactctgcatttaygtttctgaatacttctatcttgaatgttttccacttattaggagcgactagtcaccagattgtgaatgcatgaaaattttaattggtcctttaccttctg

SEQ ID NO: 415959 - DNA, 201 bp, Homo sapiens
tgtttccgtaagttgaaagtcaggatgaatggtgtttttttacaatggaaaagtcaactttgcttgaaatgagaatgaaaaaagatgtagtccaaaggctstgatcaatatttctgccaaatatccttcagagaaggttcaggacatctctggaagtggagtggggttgtctcgacagtgtggtggaatattgagtttcag

SEQ ID NO: 415960 - DNA, 201 bp, Homo sapiens
ctaccgaaactcaatcccccagaccacttgctcattcccagtgactcgccagtggcttttgccactgaatcaatgactgccttgttctccacttttaaccytactttcctttttctgaagatgtgggagaaggccatcaagctgagcaaagagttggctgagacttacgaaagcaaagtatttgactacgagggccttggc

SEQ ID NO: 415961 - DNA, 201 bp, Homo sapiens
atctagattactacattctagtagtatgtagtttgtgggtaggatttgaacacaggctatctggctccagagttgtgctcttacccactacataaaactgyctattgaatctcttactttaaagattctgtctttgcctgtacattgaattaagcccttcacttcctggggtaagatactccctaatattttcgtccagtc

SEQ ID NO: 415962 - DNA, 201 bp, Homo sapiens
aagcagaagaccgaaggggaatctgaaggctggtcttcgaaagcactttcagaaatgaatgttaaggtctgggaagaaaacatgtcactccaattttggastctgttggaaacgtttgctgcaaacttctatttctctttcctgatgaattctgtctttaaaacagtaccctatataaggcctgtgtttggaatttaagtt

SEQ ID NO: 415963 - DNA, 201 bp, Homo sapiens
agttgtgctcttacccactacataaaactgcctattgaatctcttactttaaagattctgtctttgcctgtacattgaattaagcccttcacttcctgggrtaagatactccctaatattttcgtccagtcgtctgatggtcttgtttctgtacattaacaccttgagatgtttgttcagttgtaattgaaaatttagatt

SEQ ID NO: 415964 - DNA, 201 bp, Homo sapiens
ttaagagaatacagctctaaaatacagttagatttttcttgtgtaataaactaaaacattcatcttctaacgtactgttaattgtctctgtcaactgttgyatcccagtattgctaatagaacatgagagtatatattgctaataactttatgatatcccagaaaacataaaatattttgtgttctcttttgctctgacag

SEQ ID NO: 415965 - DNA, 201 bp, Homo sapiens
ggattacagtcatgagccacctcacctggcccctagatgaaagcatatttacaatgcccaatcactacagaaatgttatcaactctaattttatcaggatkaaaagctcttttcaaaactattcagttgagggtaattaatgcaaacatgtttcaaaaatgtggtttttattgccatagtcctaggagcaagtataattgt

SEQ ID NO: 415966 - DNA, 201 bp, Homo sapiens
acccagagttccttaggcctcctagggacaggcctagagcttccgaactgcagaaatcaggccccagaggaatcacacgcagtttttgaactgaacaccckcctttctcattgctatattcatcagatgtttactcagtgcctgctgcatgcctggcactgcaaaggacagttccctgttttgatcattaaaaaaattaaa

SEQ ID NO: 415967 - DNA, 201 bp, Homo sapiens
agctgcgcatggttgtggccacctgtagtcccagctactcgggaggctgaggcagaagaatcacttgaacccgagaggcggaggttgcagtgagccaagaytgtgccattgcactccagactgggagacagagggagactccgtttaaaaaaaaaaagaaaaaaaaaaaaaaaagccatcccctcttcgagggcagcacat

SEQ ID NO: 415968 - DNA, 201 bp, Homo sapiens
aaaaaaaaggccaggcgcagtggttcacgcctgtaatcccagcactttgggaggctgaggtgggcggatcacaaggacaggagttcaagaccagcctggcyaatatggtgaaaccctgtctctactaaaaatacaaaaattagctgcgcatggttgtggccacctgtagtcccagctactcgggaggctgaggcagaagaa

SEQ ID NO: 415969 - DNA, 201 bp, Homo sapiens
agctgtcttgcaagagaccaaggatgctcaaagtctattggcagcaagcctgcctcatctgcagtgtagaaagctctttccttaatgtttttttttttttktgagacggagtctcactctttcgcccaagctggactgcagtggcgctgtcccggctcactgcaagctccgcctcttgggttcatgccattctcctcctta

SEQ ID NO: 415970 - DNA, 201 bp, Homo sapiens
ccagaaattcaaacttaactaggtctcctatatttttcctcattgagcctggcagtcctaccaccagttccaatttgtttgcttgctcttgctttctcctkttttctttttgctaatcataaaaatgccagagaggatttctgtgaataaatgtagtacctacctttatgagagtcttctgtgagtaagcaaggattttgt

SEQ ID NO: 415971 - DNA, 201 bp, Homo sapiens
gcatctttttatcccattcaagggaggcctgcagctggccctcaagaaattgtcccaaagacaaactttggctaaggaaatctgatgcttcacacaggatrtgtaagttaagtgggtgtgttgctttttgttaatgtgttaagtaatgtgaagattgtatactgttttcattaaaaaaaaagtcaccgggtaattggctaa

SEQ ID NO: 415972 - DNA, 201 bp, Homo sapiens
gggaagtactgcctctgtgacagctaagaagagtgagctacttagtctaagtgggagagagagaggtgacttaggtgatggtgagtctctggacaggagarttctggaggcagtacggagaggctggggtaggactggaatcctggggctgatggagaggagagtggggccgaggagagagtggacagctgggtcacagaa

SEQ ID NO: 415973 - DNA, 201 bp, Homo sapiens
gaactcatctcattaaatgtatcatttgatatgtttccctaccctttattatgaaaggcttaggattttttttttcttaaagctacattgatgagttagastcttcagattcagtgtttatgatttttataaggaggccattttcattttcaaaatggggtctcactctgttgtccaggctaaagtcagtgttgcaatcat

SEQ ID NO: 415974 - DNA, 201 bp, Homo sapiens
taaaaatcaatctagctaatagtgccattgttgttggctttgaacagtagatagatagggttcccccaggatctaaatgataaattctggatttttttttwaatttttttgtgttcattaaagagtgcttaaaacctttaagcttaaaatctcacccttcagaagaaatctttcggtaagagtttctctttgttctcttgg

SEQ ID NO: 415975 - DNA, 201 bp, Homo sapiens
tctatacgccaggaacccaagtgttggggatatggcagcgagagagagagagagagagagagaaaatgtgtgtgtgtgtgtgtgtgtgtgtgtgtgtgtgygtgtgtgtgtgtgcgcgcgcgcacgcacgcacgcgtgtgtctgattagctcatgggaaacaaggaggataagtcagtgtagttttccatttcactttgca

SEQ ID NO: 415976 - DNA, 201 bp, Homo sapiens
agtcacctcattagcatagatttgggtatgatcctggggtgggggcaccaggaataacaaagacactcttattatttgagaaattctaagaaaattcaccrgaactcaggaccaagaccagatacatgatttaatatacaacaataactcacagctactgtttattcttcccttgtgtattcttgaattctgagatttcag

SEQ ID NO: 415977 - DNA, 201 bp, Homo sapiens
acattcacgtttacaaattcagcatgataattttgtgcctttaggtagggcttacacacacaccacaattctagagaagacataggaggttaaaaaaaaaagttttttcaacaatgacaggcttaggaagcataattccgtgatgaatggttgtgcaaaatactgtttacaaacgtacagataaattcttctttgaaagtg

SEQ ID NO: 415978 - DNA, 201 bp, Homo sapiens
tctggaaatagcaaaacttgttcagaatgaattttggagcatgcagtagtaattaagatgaataatgtctttgggaagacaaaataccacgtaaagtaatrgagaaatagttctgtgctttttcacacatgactcaaacttgtttcagaggcatttccaaacaaaaatattcagtcatatttcagcaatgcaattccatgt

SEQ ID NO: 415979 - DNA, 201 bp, Homo sapiens
taacaaatgacttttaagtgcctcctgtctatacgccaggaacccaagtgttggggatatggcagcgagagagagagagagagagagagaaaatgtgtgtrtgtgtgtgtgtgtgtgtgtgtgtgtgtgtgtgtgtgtgtgcgcgcgcgcacgcacgcacgcgtgtgtctgattagctcatgggaaacaaggaggataagt

SEQ ID NO: 415980 - DNA, 201 bp, Homo sapiens
ttaggttggcgttttgaaaagctagagaaattgttaaataatttaaacattttgctaagttcccaccttcacctgtgagaagggtcattttttttttttttaattcattcatctgcgcattgaacaagggtaaagttccgtgcctaaaaccaggtgttcctgggtggcctggaggggctgcatccctgcagggctgattgc

SEQ ID NO: 415981 - DNA, 201 bp, Homo sapiens
gttacatccagacaatggagtatcattcagcgctaaaaagaaatgagttatcaagccataaaaagacatagatatgcatgttactaagtaaaaagagtcartccacatgattccaactatatgacattctggataaggaaaaactatggagatggtaaaaagattcgtggttgccaggggttagagggaaggagggatgaa

SEQ ID NO: 415982 - DNA, 201 bp, Homo sapiens
atttaacaaatgacttttaagtgcctcctgtctatacgccaggaacccaagtgttggggatatggcagcgagagagagagagagagagagagaaaatgtgwgtgtgtgtgtgtgtgtgtgtgtgtgtgtgtgtgtgtgtgtgtgcgcgcgcgcacgcacgcacgcgtgtgtctgattagctcatgggaaacaaggaggata

SEQ ID NO: 415983 - DNA, 201 bp, Homo sapiens
aatgttttcatgtataatgaatgaatgaccacattagtaatgtaaatcctcagcctaaatgtacatcctcagagagacaattttctttctttctttctttyttttttttttaaacggacagaatcttgctctgttgcccaggctggagtgcagtggcgcgatcatagctgactgcagcctccaacttctgggctcaagaga

SEQ ID NO: 415984 - DNA, 201 bp, Homo sapiens
gggagtaaacaagatgttcttcagtaggtgaatggataaacacagtgttacatccagacaatggagtatcattcagcgctaaaaagaaatgagttatcaarccataaaaagacatagatatgcatgttactaagtaaaaagagtcaatccacatgattccaactatatgacattctggataaggaaaaactatggagatgg

SEQ ID NO: 415985 - DNA, 201 bp, Homo sapiens
cctctcaattagctgggactacaggcatgtgccaccatgcccagctaattttttaatcttttgttgaaatggggtctctccatattgcccaggctgatctyaaactcctggcctcaagtgatccccccccccacctcagccttccaaagtgctgagattacagatgtgagccactgcctgcccccagccctctatttcaca

SEQ ID NO: 415986 - DNA, 201 bp, Homo sapiens
caaggccctggttactcagtgccatgtttctcgattattctagccacagtcttagggtttttctatcactcaaattgtttcttcttgacttttttttttttggtcctctttcttttaaagtcatcttttctaccattttcttggagtagggaagttatgctggaaaataaaattatgtcttcatatcaggtactatagtct

SEQ ID NO: 415987 - DNA, 201 bp, Homo sapiens
gtcttatcagctcatacctcttttgtcaggaggccaggttaattcactttgtctagcctcaatggatgcatattttcctattgtgcaggtaaaaagcatawgttcaatttttctaactcttccatgtgggcttggaaagaatgtatatttaaggattattgggtgcaaagttcttttttttttttttttgagatggagtct

SEQ ID NO: 415988 - DNA, 201 bp, Homo sapiens
cactgcgcctggccttggaaggttctttatcttctcccatgggtgtctggttaagtgcagccgccttctgtgaatctcagaatgcactttttaaccttttrtagtccctgagcccactttgagaaactgctgaaagttgtgcactgccccgttacgcagaagaattccaacgtgcacacacttcagcatacaccctcaggg

SEQ ID NO: 415989 - DNA, 201 bp, Homo sapiens
gagaacagaataataccatacattccagaaaatgttgtcatcttcagcttaatactaaaaccctgaacaaaaaaagttttggccaggcacggtagctcacrcctgtaatcccagcactttgggaggccgaggcaggtgaatcacgaggtcaggagatcgagatcatcctggctacagtgaaaccccatctgtactaaaaaa

SEQ ID NO: 415990 - DNA, 201 bp, Homo sapiens
ttttaatttttataagtacatagtaggtgtatatatttatggggtacacgagatgttttgatgcagacatgcaatgtgaaataatcacatcaggtctgtcwctttgaacttcacacacacacctatgtacacatgtcctatccttctgtttcctcactgcaatttcagtagggtgtgattctggagtatataaatacccag

SEQ ID NO: 415991 - DNA, 201 bp, Homo sapiens
cacctcggcctctcaaagtgctgggattacaggcgtgagccaccgtgcctggctgtgtaatctttattactatcagcttttaccatcatttttgatggcarttgacattgcatcatacaaatatgccatgattaattattcttctactatagaatatttaagctgtatccttctttctaaacaattaaccataaaacttca

SEQ ID NO: 415992 - DNA, 201 bp, Homo sapiens
ggtggctagtaaacaacagaaatagatttctcacagttttggcagctcaaagtccaaggtcaaggttccagcattgtcaggttctggtgagggcagtcagrttctggtgagggcaaccttctgggttgcagactgccaacttatcactgtgtccttgcatggtacaaaaagggcaagtgagctctctggggccttttataa

SEQ ID NO: 415993 - DNA, 201 bp, Homo sapiens
gcatttccctgcctgcaagcagattcccatcatccagtgaggacaaagtatgtgaaatttgccaaaagtgtcttgcacgcttggtgcccttggcagctacstcgccagcagatgacaccccaagtaatgcccttcctaaagggcttctcaccctacctggagtactgcttgcccaggtgcccatgaagtgcttccatggaa

SEQ ID NO: 415994 - DNA, 201 bp, Homo sapiens
tttcttcctttctaatctccctttcttccatctgttcctcgcctccatcaggggctcctggcagccctgggctgtgtgtcctcatcttccgcaagcaccargcccatggcagctcaatgagaccttcatagaggctgtcggtcctcagcatttccctgcctgcaagcagattcccatcatccagtgaggacaaagtatgtg

SEQ ID NO: 415995 - DNA, 201 bp, Homo sapiens
ccagttccccaatgcggagaagatgaccagtaccacgcctcctggggaagacatcaagtcgtcccccaagcagtgtatcctttccggggggagtatggccycgaggctcttatggctgtgcacagccccagctaagccagagaacataggagctacagtcccttctctgcagacacaccatcttctcaagcattctgacac

SEQ ID NO: 415996 - DNA, 201 bp, Homo sapiens
gtagtatgcaacattggtctgtaactgataatagggcaacatcatttctttggaacataattttcttgattccacaagaagtgacaggataagaaaactcatagttaaatgagaacagtcttgttacaggacagttatctcccaggtgtatgtcatcaattctaatttccgtgttgttaccaaagggccttattttcattc

SEQ ID NO: 415997 - DNA, 201 bp, Homo sapiens
agggaaattacaaggagccagcacatcctctccgtaataaacaataagctcaagttgtgtgcaggaatcagcaccaagtaaatctagcatttaacatgatsaaactgagaacagctgtcttgcaagagaccaaggatgctcaaagtctattggcagcaagcctgcctcatctgcagtgtagaaagctctttccttaatgtt

SEQ ID NO: 415998 - DNA, 201 bp, Homo sapiens
accaagtaaatctagcatttaacatgatgaaactgagaacagctgtcttgcaagagaccaaggatgctcaaagtctattggcagcaagcctgcctcatctscagtgtagaaagctctttccttaatgtttttttttttttttgagacggagtctcactctttcgcccaagctggactgcagtggcgctgtcccggctcact

SEQ ID NO: 415999 - DNA, 201 bp, Homo sapiens
tcattgatcatcttgcacttatattgagagtactctctggttctggtttattgattagttagttgggtggatgtaacaaggttgatggatgaggaattgcrtgtacgtgggttggttccttaacatgttctttctggaaattgatgagtgttgaaatgcattagataatcagtattgggaaaggagttttttttttttttt

SEQ ID NO: 416000 - DNA, 201 bp, Homo sapiens
ctaaaattccatctttatttatttttttgagacagagtgttaccctgtctcccaggctggagtgcagtggtgcaatcttggctcactacaacctctgcctsctgggttcaagtgattttcatgcctcagcctcccgagtagctgggattacaggcacgtgccaccacgcccagctaatttttagtagagacgtggttttgc

SEQ ID NO: 416001 - DNA, 201 bp, Homo sapiens
tctaggcagcttcaaattcatttcatgtaagtggaatcacataatatgtggtcttttgtgactggctgccttcatttggcatcaggacttcatctctctcrccctctctcttgctctgttggtcaggctggagtgcagtggcatgatcacggctcactgcagccttgacctcctgggctcaaggaatcctcctactccagc

SEQ ID NO: 416002 - DNA, 201 bp, Homo sapiens
tttaaggcagctcgaggcaagggccggagtgctttgcaaacatgaaacgcgatgggaatgctgagtaatcacttgtcttctacccctcttctcctagtccytcttaactttagaaaaataaacacaatgaaaacaccgacagtcctgccgggtggaactgaagggtgacactggcactgtattgtggccctgggattcgtg

SEQ ID NO: 416003 - DNA, 201 bp, Homo sapiens
atgtatgacctcctcttaactaattaaatctgcaacagccttgcttccaaatagggtcacattctaaggtaccaggcattaggacttcagcataggaatttgggggacataattcaacccataatgtctgctcgcaagataggctttgcacatactttgtttgccacgcaaaatgggccattcacttttataagtctgtcc

SEQ ID NO: 416004 - DNA, 201 bp, Homo sapiens
ttttggtctctttcagattttgacctggtaattcttcactgccatgttagtttgtgtgtgtgtgtgtgtgtgtgtgtgtgtgtgtgtgtgtgtgtgtgtgkcgggggcggggtggggcagtgtatatgtttgtgtgtgttgttttgtcaagcttttctaattgtcctacagagtgtgggagggaagaatggagacttggtc

SEQ ID NO: 416005 - DNA, 201 bp, Homo sapiens
accagtgttggttttcttcctgcctacttggagcagacggtgtaattggaatgttcttcatgggtggtgacatctatgctctgtggctgccactatgatcrtcttctttctgtcctttttctcaggctttcagccttctgtagccttattatactcagcagctgggaaagactcaacaccagagacaaattctagtttctc

SEQ ID NO: 416006 - DNA, 201 bp, Homo sapiens
aatgtatgtgtaagtgcatacacctttttttttgttttttttgagacggaatcttgctccgtcacccaggctggagtacagtgcgtgatcttggctcactrcaacttctgcctcccaagttcaagcaattctcctgcctcagcctcccaagtagctgggattacaggtacacgccgccacacctggctaattttttgtatt

SEQ ID NO: 416007 - DNA, 201 bp, Homo sapiens
gtcttgaaaagctgaatgctaatagtattgaaagaactgttataaaactagactaatgagatcacaaatgtatgtgtaagtgcatacacctttttttttgktttttttgagacggaatcttgctccgtcacccaggctggagtacagtgcgtgatcttggctcactacaacttctgcctcccaagttcaagcaattctcct

SEQ ID NO: 416008 - DNA, 201 bp, Homo sapiens
cagagtctttagcccatgcaggtctcaaactcctaggctcaagcagtcttcctaccccagcctcccaaagtgctaagattataggcatgaaccattctacmcatccctgtggtctgcattctttgggaaaatgaagaatagagtccaggttttctaatacccattgcagctgggccatcatctaaatggcccctcaaattt

SEQ ID NO: 416009 - DNA, 201 bp, Homo sapiens
gtaatacaaagggatgtgggggttttggtttttttaggcagaggaaaatcagaaatttcacacctagcttacagatccctgagcttttattttcacccaamagcatcgcagaggagtggctggtccccagtgatggaggggctcattccttgtcttgaaaagctgaatgctaatagtattgaaagaactgttataaaacta

SEQ ID NO: 416010 - DNA, 201 bp, Homo sapiens
tgtcttgaaaagctgaatgctaatagtattgaaagaactgttataaaactagactaatgagatcacaaatgtatgtgtaagtgcatacacctttttttttkttttttttgagacggaatcttgctccgtcacccaggctggagtacagtgcgtgatcttggctcactacaacttctgcctcccaagttcaagcaattctcc

SEQ ID NO: 416011 - DNA, 201 bp, Homo sapiens
agttccccaatgcggagaagatgaccagtaccacgcctcctggggaagacatcaagtcgtcccccaagcagtgtatcctttccggggggagtatggccccsaggctcttatggctgtgcacagccccagctaagccagagaacataggagctacagtcccttctctgcagacacaccatcttctcaagcattctgacacag

SEQ ID NO: 416012 - DNA, 201 bp, Homo sapiens
ccaggaggtggaggttgcattgagccgagatcacaccactgcactccatcctaggtgacagagcgagactccatctcaaaaataaataaataaataaactrtaaccaagaaagataccctgtgctataagaatctgtaaccaggaagtatttacccaagtgaaatagaaacttacccttttacaaaaaatgtacaggaata

SEQ ID NO: 416013 - DNA, 201 bp, Homo sapiens
gataaacctgttccagagcagatcttaaagtaagtggtttttcatttaaaaaaaaaaaaaatctgtgtctaggcacagtggctcacatctataatctcaayattttccgaagctgagggaggagtattgctcgaagccaggaatttgagaccagcctgggcaacaaagtgggatgctgtctctacaaaaaagagaaaagtt

SEQ ID NO: 416014 - DNA, 201 bp, Homo sapiens
ctgggcgtggtggtgcatgcctgtaatctcagctactcaggaggctgaggcaggggaattgcttgaacccaggaggtggaggttgcattgagccgagatcmcaccactgcactccatcctaggtgacagagcgagactccatctcaaaaataaataaataaataaactataaccaagaaagataccctgtgctataagaat

SEQ ID NO: 416015 - DNA, 201 bp, Homo sapiens
aaaaaatctgtgtctaggcacagtggctcacatctataatctcaacattttccgaagctgagggaggagtattgctcgaagccaggaatttgagaccagcstgggcaacaaagtgggatgctgtctctacaaaaaagagaaaagtttgtctctccctcacacctgtttggagtacatcaaaaccaaagccttacatttatt

SEQ ID NO: 416016 - DNA, 201 bp, Homo sapiens
ttgcccaggctggagttcaatgactccatcataactcactcactgcagcctcctctgttcccaggtagctgggactacaggcacagctaattaaaaaaaawtttttttgtagagacagaggcttgctgtgttgcccaggctggtctcaaattcctgggcctctagtagcactgggattacaggaatgagccactgtgccca

SEQ ID NO: 416017 - DNA, 201 bp, Homo sapiens
cgtgtccctgaactggtgatgggataaacaaacttcagtgtatccacacaacagaatactgcagcagccaaaggcagtcagctcctgatacacacaactgygggcatgattcccacccacatgcagcttgctaggtaaaagaagttacacttaaaaggctgcgtactctgtggttttatttatacgaaattcttgcctagg

SEQ ID NO: 416018 - DNA, 201 bp, Homo sapiens
atactcccggccgttccggaaaggagaaaaggatccagacaatgaatttgctgtgagttcaccccttttgtcctttaagaggtaaaattaacgggctgagyacggtggctcacgcctgtaatcccagcattctgggaggccgatgcgggcggatcacgaagtcaagagatcgagaccatcctggctaatacggtgaaaccc

SEQ ID NO: 416019 - DNA, 201 bp, Homo sapiens
tttgctgtgagttcaccccttttgtcctttaagaggtaaaattaacgggctgagcacggtggctcacgcctgtaatcccagcattctgggaggccgatgcrggcggatcacgaagtcaagagatcgagaccatcctggctaatacggtgaaaccccatcggtactaaaaatacaaaaaaattagccgggcgtggtggcacg

SEQ ID NO: 416020 - DNA, 201 bp, Homo sapiens
tgaagtgctgtaggtgcttgacctgttaaacacagtattgcttttttgggcgacacatggtacttattcttaatgtccgtgcaaacagaactacagaagaygcccctggcaaagctgccaatatacactgtctttatgatgtcaggaaatgaaggtttcactgatctaagggataaagcgagtgaggaatatctaccgaaa

SEQ ID NO: 416021 - DNA, 201 bp, Homo sapiens
cgggcggatcacgaagtcaagagatcgagaccatcctggctaatacggtgaaaccccatcggtactaaaaatacaaaaaaattagccgggcgtggtggcaygcacctgtagtcccagctactcgggaggctgaggcacgagaattgcttaaacccaggaggcggaggttgcagtgagctgaggtcgcaccactgcactcca

SEQ ID NO: 416022 - DNA, 201 bp, Homo sapiens
tagccgggcgtggtggcacgcacctgtagtcccagctactcgggaggctgaggcacgagaattgcttaaacccaggaggcggaggttgcagtgagctgagrtcgcaccactgcactccagcatgggcgacagagcgagacttcgtctcaaaaaaaaaaaaaaaaaggtaaaattgacatcccaagtggagatcttccacct

SEQ ID NO: 416023 - DNA, 201 bp, Homo sapiens
caagcagtggttgttctaagagagaaaaatacagcattgctttgtccttctccagctactacagagccaatgaagtgcagcagttcagatactcccggccrttccggaaaggagaaaaggatccagacaatgaatttgctgtgagttcaccccttttgtcctttaagaggtaaaattaacgggctgagcacggtggctcac

SEQ ID NO: 416024 - DNA, 201 bp, Homo sapiens
agaccacacaatagcacacacttttttgcattgtccaacatagtataagagctgtctgaggaaagggatgcatttttagttagacacatctggttcttccrcacaggacacatgtttcacccttccaggctttcctgcacagataggaatgtgttctaattaaaacttgcatatgcttttttttaggctttttttacagaa

SEQ ID NO: 416025 - DNA, 201 bp, Homo sapiens
ccattgcactccagactgggagacagagggagactccgtttaaaaaaaaaaagaaaaaaaaaaaaaaaagccatcccctcttcgagggcagcacatttctsattttaatttagatatctaataacataattattttggtatttgtgaataatttaaaatgtcttatagccgctgttgattgactaaaagacattctttgta

SEQ ID NO: 416026 - DNA, 201 bp, Homo sapiens
attacttgattataatcttaaaacatagggttgaggtagctgttattatttacatcttatggataaagaaacagaccaagtgagcttaagtgatttatttyccagtcacatagataataaatgggaaaggttaaatttgaacccaagacttttgactccatgtctaatgctgccttcttagggttaagaattaatagtgcc

SEQ ID NO: 416027 - DNA, 201 bp, Homo sapiens
cagctttaggcgatttaccagctttgagaaactagtcagtttaggaaatgattagggtattaaagctaaggtttaagataaagaaagaaaaggccacctasttgagatccaactggttggacttgggtttatgggaaagagagacagtggttatggttgctgtgggacaaggtctggaaacagattcctgagggacatagc

SEQ ID NO: 416028 - DNA, 201 bp, Homo sapiens
ccctctcatctgtctgacattcccgttaaaaacaaacaaataaaaaaaggatgttcccatcctctgtcacacctttttctaagaatcttttcttcatcatrttttctcatcttagaacaacaagctcaccctcttccgccagctgcagcagatgacgtacagcctgatcgagtggcggtcccagatcctgtctgggacgct

SEQ ID NO: 416029 - DNA, 201 bp, Homo sapiens
tactaatgtattcatttagttaatatgtatgactgcacatttctaaacgtaagaaaaaggtaaactcattaatcaccatgatgtattgcaatcagtggggwagcccgtcattacatatttgatgtaatatgtaatggtaataggtagtaggtaaactattctaatccagctctttattcatcgccaaaatgataagaacac

SEQ ID NO: 416030 - DNA, 201 bp, Homo sapiens
acatgaagttttagacgtttggacttgaagcctcaaagatcaaccaaccagtccccttatttagtaaataaggaaattgaggctacacacagaaaattgtrctacagattattactaataacccagcttgctaaattaggctatacctaggtaatctctagaagacaactctgacagactctttaatatttacccctggtt

SEQ ID NO: 416031 - DNA, 201 bp, Homo sapiens
ccatgaaatcttcacaatttatgttcctctgccgcagctccagccggtccctccattcggggtccctgacttcctgcaacaccacacaacagtactgttarcctttttccatctccacaaacaacatcactacacctacacacacacacacacacacacacacccatacacacacctgtacacacacatttcagaaccaaa

SEQ ID NO: 416032 - DNA, 201 bp, Homo sapiens
tgtgaaagcaccacctatctatgtatttgtttgctcggccggcagttaaactgcccagggttgacggagccttcttaaagctgagatcaaagttcatcggytggggccaggcccagtggcttatgcctgtaatcccagcactttgggaggctgaagtgggtggatcacctgaggtcaggagttccagaccagcctggccaa

SEQ ID NO: 416033 - DNA, 201 bp, Homo sapiens
ggtcttaatattaatattccttgctaggaaaagaatttagtgatatctctcctacttgtacgtccatttataggctctctgcaagaagaaaaatgtggctstttttgcccgaccccgcaggcagtcagaccttatggttgtcttcccttgttcccaaaaaatcgctgttattctgttctttttcaaggtgcactgatttca

SEQ ID NO: 416034 - DNA, 201 bp, Homo sapiens
agtctcgctctgtcgcccaggctggagtgcagtgacacgatctcagctcactgcaagctccaccttccgggttcatgccattctcctgcctcagcctcccragtagctgggactacaggtgcccaccaccacacccagctaattttttatatttttagtagagacggagtttcaccatgttagccaggatggtctcgatct

SEQ ID NO: 416035 - DNA, 201 bp, Homo sapiens
tataccactgcagtccagcctgggtgacacagtaagaccctttctcaaaaaaaaaaaaaaaaaaaaaaaaaaaaagatacctgtgatgtcttagaaatccygcatttctatagtacatttccttgttcttttcttttcagtctcagttcaccagaaatgtacgttgtggatccacagtctcatatgaggggaaaatgcagt

SEQ ID NO: 416036 - DNA, 201 bp, Homo sapiens
ctagtaaacctgagggtactgcaggagactgtttattcttccttatctcaactgcataggacagacattcccagagtggccatttatagacctccccccaaggaatgcattcctttcccagggtcttaatattaatattccttgctaggaaaagaatttagtgatatctctcctacttgtacgtccatttataggctctct

SEQ ID NO: 416037 - DNA, 201 bp, Homo sapiens
tttgcttatggaaaccacagctcttccaatctttttatttatttatttattttttgagacggagtctcgctctgtcgcccaggctggagtgcagtgacacsatctcagctcactgcaagctccaccttccgggttcatgccattctcctgcctcagcctcccaagtagctgggactacaggtgcccaccaccacacccagc

SEQ ID NO: 416038 - DNA, 201 bp, Homo sapiens
ataccactgcagtccagcctgggtgacacagtaagaccctttctcaaaaaaaaaaaaaaaaaaaaaaaaaaaaagatacctgtgatgtcttagaaatcctrcatttctatagtacatttccttgttcttttcttttcagtctcagttcaccagaaatgtacgttgtggatccacagtctcatatgaggggaaaatgcagtc

SEQ ID NO: 416039 - DNA, 201 bp, Homo sapiens
aacagggagcaggtcacatacttcaaggggcaaaaagcagagcaaagatcacatgcttctgaggaaacaggacaaagggcaaaaggcagaaactcctgaaragggtctatgttcagcggtgcacgtatagtcttgataaacatcttaacagaaaacaaggtttgagagcagagaagcggtctgaccaaaaatttaccagag

SEQ ID NO: 416040 - DNA, 201 bp, Homo sapiens
gcactccatcctgggtgacagaatgagactccatctaaataataataataataataattataagtgactattattatattattatgtatgactattattgkatataactattattattattctaggaaagctcaaggatccccagaaggaaagtttaagtttaaaatatcagtgccctccaaagtctaagggatagcacaa

SEQ ID NO: 416041 - DNA, 201 bp, Homo sapiens
gagaagctgctctacctgtataccaggagacgtatgagaatgttcatggcggaattgcttatgatagcaaaaaaactagagacaacccacgtgtttatcakcagcagagtggataaacaaattgtgtacacccatacaattgaatagacactatacagcgagaaaaaaaattaactagagctacatggataaacctgtata

SEQ ID NO: 416042 - DNA, 201 bp, Homo sapiens
gagaaagagtacaaagagaggaattttacagctgggctgccgggggcgacatcacatatcggtaggaccgtgatgcccacctgagctgcaaaaccagcaastttttgttaaggatttcaaaaggggagggggtgtaccaacagggagcaggtcacatacttcaaggggcaaaaagcagagcaaagatcacatgcttctgag

SEQ ID NO: 416043 - DNA, 201 bp, Homo sapiens
gatctgtaagctgttctcatccatgtgcgtgggttgggaacaatgcctcttgctcttttccagtgatttttttcttagcctcgggtattttcacacacatkcactgaccagtactcagctaaagacttggggaaccttctacacatctctagcactctctctgagcagccctcttctctctggttctctgccctgcacatt

SEQ ID NO: 416044 - DNA, 201 bp, Homo sapiens
gcacgatcatagcccactgcaacttcaaactcctgggctcaagagaccctccctcccacctcagcctcctaagtagctgggacatacaccaccacacctgkgtgtgtgtgtgtgtgtgtgtgtgtgtgtgtgtgtgtgtgtgtgtgtgtgtaaatgggatcttgctgtgctgcccaggttggctggtcttgagttcaagcg

SEQ ID NO: 416045 - DNA, 201 bp, Homo sapiens
catggaaatacagtttgccaaattccacactatcggggaaacccacccccaatatttcaacataggttctttctattttccataagtgttggccggctgakaaataaagagaaagagtacaaagagaggaattttacagctgggctgccgggggcgacatcacatatcggtaggaccgtgatgcccacctgagctgcaaaa

SEQ ID NO: 416046 - DNA, 201 bp, Homo sapiens
caatatgtatagatgtatacaatatgtgtatacaatatgtatagatgtatacaatatgtgtatacaatatgtatagatgtatacaatatgtgtatacaatatgtatagatgtatacaatatgtgtatacatgtatagatgtatacaatatgtatatatgtatatataatatgtgtatatatacacatatatacgtatatat

SEQ ID NO: 416047 - DNA, 201 bp, Homo sapiens
aaaaaaaaaaaaggtaaaattgacatcccaagtggagatcttccacctacctaaccagcttccacaggagaaacgatggcacccctgggaacagagacttyacctgctaattacctagacagcaagtactaattacctagacagccagctgtcatctccatggaaaatgctagactaggagtccagaatctggtctcttcc

SEQ ID NO: 416048 - DNA, 201 bp, Homo sapiens
tctttggaaaagtgaaacttttgaaaagcaacaatagtggtttgtctatttttgtgtcaatagctcttgatttatgttgggattctgtgatccttttttttcctggcagaacttttataaagaaaagaagagagaggacatatacataaggtaagctgaaggaaatttcttgcttctgctgtttatttcatggctttgtga

SEQ ID NO: 416049 - DNA, 201 bp, Homo sapiens
acaatatgtatagatgtatacaatatgtgtatacaatatgtatagatgtatacaatatgtgtatacaatatgtatagatgtatacaatatgtgtatacaatatgtatagatgtatacaatatgtgtatacatgtatagatgtatacaatatgtatatatgtatatataatatgtgtatatatacacatatatacgtatata

SEQ ID NO: 416050 - DNA, 201 bp, Homo sapiens
ttttttaggctttttttacagaaaagtacttgcaggagcatcctgaagaccaggagaaggttgagctgctaaagcgactaatagcattacaggtacaggayggctttcctctgcactcccagggaggccacagtgtgggacacccattattctccagggcttaagtctacaagcccactcagggtgacttttctttctttt

SEQ ID NO: 416051 - DNA, 201 bp, Homo sapiens
ccagttaatgtttttattttttcttagatatggggtctcactatcttgcccaggctcaagaccagtgatctttgaatcagcgtcgactcccctgtctgccytgcccttctcccgacaccaaagaagcaaacactgaatgctgttacttctgtctctccttctgttacttttccttcttctgctcagtccagcctgtgagct

SEQ ID NO: 416052 - DNA, 201 bp, Homo sapiens
tacaggagatgatgtgctaacatagcatctgttgcagagttcatgactaataaatattggctgctctagtgttcatggttgttattattacaatttgtttytggtgtttgtttttaagagatagggtctctctctgttgcccaggctggagtgcagtggtgcaatgatagctcactaaagccttgaactcctgggctcaag

SEQ ID NO: 416053 - DNA, 201 bp, Homo sapiens
tacaatatgtatagatgtatacaatatgtgtatacaatatgtatagatgtatacaatatgtgtatacaatatgtatagatgtatacaatatgtgtatacaatatgtatagatgtatacaatatgtgtatacatgtatagatgtatacaatatgtatatatgtatatataatatgtgtatatatacacatatatacgtatat

SEQ ID NO: 416054 - DNA, 201 bp, Homo sapiens
tttttacagaaaagtacttgcaggagcatcctgaagaccaggagaaggttgagctgctaaagcgactaatagcattacaggtacaggacggctttcctctrcactcccagggaggccacagtgtgggacacccattattctccagggcttaagtctacaagcccactcagggtgacttttctttctttttttaacccttgt

SEQ ID NO: 416055 - DNA, 201 bp, Homo sapiens
tgttctctgtcactctgtttctgtgccagaagacacattgcttctcctcattctcttatgcagtgctgtttaagtggtggtccacaaattgttgctggatsgtgatgagatcgattaggagtttatacctcaatgtaaattaatgcacttccttccttccttaagaatgtcttgccatgaaaatatcagcatgcctgggga

SEQ ID NO: 416056 - DNA, 201 bp, Homo sapiens
gcttctgctacttccctgtgtatgctacctgtactccaaccaaactggcctctgcccagtccctgaacacatggtctgctctgcctcacaccggtcttccrctagcagtgccttccccataacctctggctgtcagcattccagctattccataaggttcttctgaagcgtcacctccagaggaagcctttctgacctgga

SEQ ID NO: 416057 - DNA, 201 bp, Homo sapiens
caatatgtatagatgtatacaatatgtgtatacaatatgtatagatgtatacaatatgtgtatacaatatgtatagatgtatacaatatgtgtatacaatatgtatagatgtatacaatatgtgtatacaatatgtatagatgtatacaatatgtgtatacaatatgtatagatgtatacaatatgtgtatacaatatgta

SEQ ID NO: 416058 - DNA, 201 bp, Homo sapiens
ctgtcactctgtttctgtgccagaagacacattgcttctcctcattctcttatgcagtgctgtttaagtggtggtccacaaattgttgctggatggtgatragatcgattaggagtttatacctcaatgtaaattaatgcacttccttccttccttaagaatgtcttgccatgaaaatatcagcatgcctggggatgtcat

SEQ ID NO: 416059 - DNA, 201 bp, Homo sapiens
tcactgcaacctctgcctcctgggttcaagcgattcccctgcctcagcctcccgagtagctgggactacaggcatacaccaccatgcccggcaaatttttrtatttttagtagagatgggatttcactatgttggccaagctgcccacctcggcctcccaaagtgctgagattacaggtgtaagccactacacccaaccct

SEQ ID NO: 416060 - DNA, 201 bp, Homo sapiens
acaatatgtatagatgtatacaatatgtgtatacaatatgtatagatgtatacaatatgtgtatacaatatgtatagatgtatacaatatgtgtatacaatatgtatagatgtatacaatatgtgtatacaatatgtatagatgtatacaatatgtgtatacaatatgtatagatgtatacaatatgtgtatacaatatgt

SEQ ID NO: 416061 - DNA, 201 bp, Homo sapiens
tctagcagtttacctttccaccccatccctcccttccccaaccaaatcaaaacgatccctcttcctgaagcacactgcactcattttttgcccttctttcyagatgcccctgctaacagaagggatccgcatccatggggagaaactcacagagcagctgaagccgctgcatgagcggttgtcttcttgcttccgggaact

SEQ ID NO: 416062 - DNA, 201 bp, Homo sapiens
aatcaactctcgagcctgggcagcatggtgaaaccctgtctctacaaaagatacgaaaattagccgggcctggtggcacgtgccagctacttaggaggctraggtgggtggatcacttgagccctggggcttaaggctgcagtgagccatgatcggaccactgcatactgcagcctgggcaatacagcaagaccctgtctc

SEQ ID NO: 416063 - DNA, 201 bp, Homo sapiens
tgaatcccaagtaattatttctagccctgagcaccttctctaactttggatttacatataaactttgattggccaatatgcagctcaaactgaacaaggcrgtaacaggaacctttatttctcactctttgctcctccccagcccatcctacctcactttgttaccatgttactaataacattcccatccatttagttgct

SEQ ID NO: 416064 - DNA, 201 bp, Homo sapiens
tgtttggttagatggaggaagggagagcctccactctgtctttatctctgcaagtaagagaatgagatattctgctgagaaaacaaggaagcatggagcasacagactttcttaaatatagttgggaaaattggctttctggacttctctaagtgtgtactggtcagatttggtttctggatgaaggaaccgtaggatagt

SEQ ID NO: 416065 - DNA, 201 bp, Homo sapiens
atctaatcctactccttatggaaaagagatagaagatcttttttggtgatagaaggtattgaaggcatagtgttgaatcaagtgaatttattattattttyttttttgagatgtagtttcattattctcgcccaggctggagtgcagtagtgagatcttggcgcactgcaacctctgcctccagggttcaagcgattctca

SEQ ID NO: 416066 - DNA, 201 bp, Homo sapiens
aaagattctgacgcagtgatagataaagtgttgacaaaggtgagagtggcatgtagtggttgaaggatgatcttttcaaaaaatgatactgagtcgtttgyttatctatactgaacaaaatgtatcaggacccctacctaataccacataaaaaattgattccagctgtatgaaagataaaacagtggaagctcttagaag

SEQ ID NO: 416067 - DNA, 201 bp, Homo sapiens
ttggggggatgaggcgggaggatcaccagagcctagggaggtcaaggctacagtgacccacgattgtgccactgtactctggcctggttgatagagtgagwtcctgtctcaaaaaaataaaaaataaacataaaaaaagaaatatttattactttctagcctacagacttttcattgtcaaaactgatcactcagtttgca

SEQ ID NO: 416068 - DNA, 201 bp, Homo sapiens
gatttgtggacattaaaattatgaatatgtcagtaataatccagcacacattgaaatattgacacagattaccataatttgtgcaacatcttataaacaaygtcatttccatagtagtctaaggcttcaccagcctggcccactgtatctagactttaggttcattttaataattatgctttccttctctgtatcatttgg

SEQ ID NO: 416069 - DNA, 201 bp, Homo sapiens
ctgccaaatatccttcagagaaggttcaggacatctctggaagtggagtggggttgtctcgacagtgtggtggaatattgagtttcagatagtagtgactygctttccacatccctcaggatctctgtctgcagctctctcattcttcctgaagccatttttctttctgtgggccctccatattcccagccatcagtaaag

SEQ ID NO: 416070 - DNA, 201 bp, Homo sapiens
tgaactttgagaagccaaggtgggaggatcacttgagctcaggagttcaagaccaccctgggcaacatagcaagacccccacctctacaaaaagaatagcwgtatgtggtggcatgtgcctgtcatcctagctacttgggaggctgaggcaagaagatggcttgagcccaggagttggaggttacagtgagctgtgaataa

SEQ ID NO: 416071 - DNA, 201 bp, Homo sapiens
ctgcagctctctcattcttcctgaagccatttttctttctgtgggccctccatattcccagccatcagtaaagcaaaacaaaaatgagtgcccagtgttasgcagccaccattctgaaagctcagtggaggcagccaccattccgaatgcccagtggaggcagccaccattccgaatgcccagtggaggcagcaccattcc

SEQ ID NO: 416072 - DNA, 201 bp, Homo sapiens
tggaggcagccaccattccgaatgcccagtggaggcagccaccattccgaatgcccagtggaggcagcaccattccgaatgcccagtggaggcagcaccaytccaaatgcccagtggaggaggcagccattctgaatgcccagtggaaggcagccaccattctaaatgccccagcggtaggcagacaccattctgaatgcc

SEQ ID NO: 416073 - DNA, 201 bp, Homo sapiens
ggaggcagcaccattccaaatgcccagtggaggaggcagccattctgaatgcccagtggaaggcagccaccattctaaatgccccagcggtaggcagacaycattctgaatgcccagtggaaggcagccaccattccaaatgcccagtggtagacagccactcttctgaatgcccaatagaaggcagccaccattctgaat

SEQ ID NO: 416074 - DNA, 201 bp, Homo sapiens
tggggtccaaagctccaagttctcatccagctcttctccttcccactttctttttttccttttttcttttcttttcttttcttttttttttttttttttttgagatagagtctcactctgctgcccaggctggagtgcaatggcacaatcttggctcactgcaacctctgcctcctgggttcaagcgattcccctgcctca

SEQ ID NO: 416075 - DNA, 201 bp, Homo sapiens
caaatgcccagtggaggaggcagccattctgaatgcccagtggaaggcagccaccattctaaatgccccagcggtaggcagacaccattctgaatgcccartggaaggcagccaccattccaaatgcccagtggtagacagccactcttctgaatgcccaatagaaggcagccaccattctgaatgcctgatggtaggcag

SEQ ID NO: 416076 - DNA, 201 bp, Homo sapiens
tacaatatgtatagatgtatacaatatgtgtatacaatatgtatagatgtatacaatatgtgtatacaatatgtatagatgtatacaatatgtgtatacaatatgtatagatgtatacaatatgtgtatacaatatgtatagatgtatacaatatgtgtatacaatatgtatagatgtatacaatatgtgtatacaatatg

SEQ ID NO: 416077 - DNA, 201 bp, Homo sapiens
cttatggtgctctagtaccccagtgttaagtgctcagtggctaagtgttcttccctggagacgtggaaaatgtgcttttttctcatcttttttctttctttgtttctcttttctctctcttttttctgtttgagcatatgaagatataaaacacttttaagcaaacattagtgataaatatccagaatagtctgattataa

SEQ ID NO: 416078 - DNA, 201 bp, Homo sapiens
ttggggtccaaagctccaagttctcatccagctcttctccttcccactttctttttttccttttttcttttcttttcttttcttttttttttttttttttttgagatagagtctcactctgctgcccaggctggagtgcaatggcacaatcttggctcactgcaacctctgcctcctgggttcaagcgattcccctgcctc

SEQ ID NO: 416079 - DNA, 201 bp, Homo sapiens
caaatgcccagtggtagacagccactcttctgaatgcccaatagaaggcagccaccattctgaatgcctgatggtaggcagccaccattctgaatgcccartggtaggcaaccataatattaaatttaataatttctagtagaggagttagaaaagatcaggtcacccatagtcatgaaataatcatttatttgaggagct

SEQ ID NO: 416080 - DNA, 201 bp, Homo sapiens
acttatggtgctctagtaccccagtgttaagtgctcagtggctaagtgttcttccctggagacgtggaaaatgtgcttttttctcatcttttttctttctttgtttctcttttctctctcttttttctgtttgagcatatgaagatataaaacacttttaagcaaacattagtgataaatatccagaatagtctgattata

SEQ ID NO: 416081 - DNA, 201 bp, Homo sapiens
cttggggtccaaagctccaagttctcatccagctcttctccttcccactttctttttttccttttttcttttcttttcttttcttttttttttttttttttttgagatagagtctcactctgctgcccaggctggagtgcaatggcacaatcttggctcactgcaacctctgcctcctgggttcaagcgattcccctgcct

SEQ ID NO: 416082 - DNA, 201 bp, Homo sapiens
gtagaggagttagaaaagatcaggtcacccatagtcatgaaataatcatttatttgaggagctgggtgtcaagatcactttgtaaaaagtttaccagtgtrctattaccagcccctggcttcacatgcaaaaaactgacttattaatttcatcaactgggctgggcacggtggctcatacctgtaatctcagaactttggg

SEQ ID NO: 416083 - DNA, 201 bp, Homo sapiens
ctgtgcaccatctcaccctaagatttagtttcgtgctattcctcatcttcccatgggagaaagggttcagtgaattgtggtcaatcgggctgttttgttcrtgtaactttggaagactggatctaatcctactccttatggaaaagagatagaagatcttttttggtgatagaaggtattgaaggcatagtgttgaatcaa

SEQ ID NO: 416084 - DNA, 201 bp, Homo sapiens
aacttatggtgctctagtaccccagtgttaagtgctcagtggctaagtgttcttccctggagacgtggaaaatgtgcttttttctcatcttttttctttctttgtttctcttttctctctcttttttctgtttgagcatatgaagatataaaacacttttaagcaaacattagtgataaatatccagaatagtctgattat

SEQ ID NO: 416085 - DNA, 201 bp, Homo sapiens
acttggggtccaaagctccaagttctcatccagctcttctccttcccactttctttttttccttttttcttttcttttcttttcttttttttttttttttttttgagatagagtctcactctgctgcccaggctggagtgcaatggcacaatcttggctcactgcaacctctgcctcctgggttcaagcgattcccctgcc

SEQ ID NO: 416086 - DNA, 201 bp, Homo sapiens
agcaacatagtaagacaccatctctacaaaaaatataaaaaattagctgggtgtggtggcaccttcctctagtcccagctacttttgggaggctgaagtgrgaggatcacctgagcctgggaggtcaaggctgcagtgaactgtaatcatgctactgcactccagcctgggcaacagaatgagaccctgtctcaaaaaaaa

SEQ ID NO: 416087 - DNA, 201 bp, Homo sapiens; identical to SEQ ID NO: 416057

SEQ ID NO: 416088 - DNA, 201 bp, Homo sapiens
accttacttactcttttaaaggccctatctccaaatacagtcatattctgcgttactaggggttgtggcttcagcatatgaatttggggaggacacagttytgcccagaacagccctctgtctcacctgtgttttctccctaggggtatcatccactcacttggctttcatctgcctgtcaccttcaaatctgtagctcca

SEQ ID NO: 416089 - DNA, 201 bp, Homo sapiens
aaacttatggtgctctagtaccccagtgttaagtgctcagtggctaagtgttcttccctggagacgtggaaaatgtgcttttttctcatcttttttctttctttgtttctcttttctctctcttttttctgtttgagcatatgaagatataaaacacttttaagcaaacattagtgataaatatccagaatagtctgatta

SEQ ID NO: 416090 - DNA, 201 bp, Homo sapiens
agagataagggttgcaaacttggggtccaaagctccaagttctcatccagctcttctccttcccactttctttttttccttttttcttttcttttcttttcttttttttttttttttttttgagatagagtctcactctgctgcccaggctggagtgcaatggcacaatcttggctcactgcaacctctgcctcctgggtt

SEQ ID NO: 416091 - DNA, 201 bp, Homo sapiens
ttttgtagagatggagtctcactatgttgcccaggctggtctcaaactcctagcctcaagcaatcctcccacctctgcctcccaatgtgcaaggattatargcgtgagccactgcgcctggccttggaaggttctttatcttctcccatgggtgtctggttaagtgcagccgccttctgtgaatctcagaatgcacttttt

SEQ ID NO: 416092 - DNA, 201 bp, Homo sapiens; identical to SEQ ID NO: 416060

SEQ ID NO: 416093 - DNA, 201 bp, Homo sapiens
ccatgagcctctgcttgggccataccctggcaggcagcatggcatgggaaccatagcaatatgtagatgtgcctgtggagaccaggcgcaagaggcccagkatggggggtggggggtggaggaggaagcccaaggttagccatgtgttctctacaggcaggtggtgtagcgggtaagagcacaggccttagaacacgcagc

SEQ ID NO: 416094 - DNA, 201 bp, Homo sapiens
cattcatggagcccaggtccaaaacctgtgatccgagaataggataacccttttctgcccatagggtgttttccaaagacctttcattgctctgggttacrtgggaaacaacaaaacaaagtctgactttttttttcccccaactgtgtacttataacctccccttggaatgtcttgttttgttttccagaaaaaaagggc

SEQ ID NO: 416095 - DNA, 201 bp, Homo sapiens; identical to SEQ ID NO: 416076

SEQ ID NO: 416096 - DNA, 201 bp, Homo sapiens
agtccatccagtccacaagtcctacactgagaagtggccttcccattggccagcactatgtctagcagtttacctttccaccccatccctcccttccccarccaaatcaaaacgatccctcttcctgaagcacactgcactcattttttgcccttctttccagatgcccctgctaacagaagggatccgcatccatgggga

SEQ ID NO: 416097 - DNA, 201 bp, Homo sapiens
gaagatctgtcccttagagaggagaacagcgagaaccggatcagcaagtttaagagaaaagactggagtctgagcaagtcccaggtcattgcagagaaagmaccagaacccgatttgatggtaaaaaacagaaaagaaaaaaagaaatctctggaggcttgcccccctctcccctgtacccaggcatatcaccatcccctc

SEQ ID NO: 416098 - DNA, 201 bp, Homo sapiens
tgtgcatacaatatgtatatatgtatacaatatgtgcatacaatatgtatatatgtatacaatatgtgcatacaatatgtatagatgtatacaatatgtgyatacaatatgtatagatgtatacaatatgtgtatacaatatgtatagatgtatacaatatgtgtatacaatatgtatagatgtatacaatatgtgtatac

SEQ ID NO: 416099 - DNA, 201 bp, Homo sapiens
tatatatgtatacaatatgtgcatacaatatgtatatatgtatacaatatgtgcatacaatatgtatatatgtatacaatatgtgcatacaatatgtatakatgtatacaatatgtgcatacaatatgtatagatgtatacaatatgtgtatacaatatgtatagatgtatacaatatgtgtatacaatatgtatagatgt

SEQ ID NO: 416100 - DNA, 201 bp, Homo sapiens
aggttggcttaggtgttacagtgccagcaacatttccatgagcttccttgctcagtgcctctctctgccgcctgcactttctgtcatttctaggctccccvtcgttgcagacagatggaatcgcggccactcctgtcccacctccacctccccccaaaagcaagccctatgaaggcagccagaggaactccactgaggtag

SEQ ID NO: 416101 - DNA, 201 bp, Homo sapiens
gtatttcaggcaaagggaagaatatacacaaagacacagagatatttcagaacctgccatggttgggctgtagtgattggatttctctgactgctaaaggrtaaaagagaatggtggtggttggaagtatgcaggagtgatataggtggggccttattacattctctatgtggcattggaagtttatcctgtagacacgag

SEQ ID NO: 416102 - DNA, 201 bp, Homo sapiens
actgggctaagtattttttatgcctgtgatttaacttctccaataaaccgcagctcttgtaggatatgatggtcgctgtcaggcaaggactagattttcartgagaacttgatggtggggattgaacgttggctggggagtgcagtggctacctcagtacccggaactccagttgcctctccactcttcctatgtaatgac

SEQ ID NO: 416103 - DNA, 201 bp, Homo sapiens
aaagcttgtggttgacgtgatggatataatagactgccaagatggtacaaaaccaaacagaaattttcacactgtgcaaacagtttcctaacatttttttwttcttggcctctcaccaagtgttctgggcctcttttcaacttcaatatgtgtattacacattccaaagtgcttttcagatcagtcatctcctttgagccc

SEQ ID NO: 416104 - DNA, 201 bp, Homo sapiens
aaaaagaatcggccaaaagatgttccctctcatctgtctgacattcccgttaaaaacaaacaaataaaaaaaggatgttcccatcctctgtcacacctttktctaagaatcttttcttcatcatattttctcatcttagaacaacaagctcaccctcttccgccagctgcagcagatgacgtacagcctgatcgagtggcg

SEQ ID NO: 416105 - DNA, 201 bp, Homo sapiens
gtcacacctttttctaagaatcttttcttcatcatattttctcatcttagaacaacaagctcaccctcttccgccagctgcagcagatgacgtacagcctratcgagtggcggtcccagatcctgtctgggacgctccccaaggatgaactggcagagctcaagaagaaagtcacagccaaaattgatcatgggaacaggt

SEQ ID NO: 416106 - DNA, 201 bp, Homo sapiens
aaaaagtctgcccctggtgaggagaaccagctgactactcctttctctccagaatgctggggttagatctggtggtgcgagatgacaatgggaacatcctrgaccctgacgaaaccagcaccattgccctcttcaaggcccatgaggtggcctccaaaaggattgaggaaaagatccaagaagagaaggtacagttcctca

SEQ ID NO: 416107 - DNA, 201 bp, Homo sapiens
gctgggggaatgcaaattattagtacgacgactatgaaaaacagtatgaaaaactatgaaaaacagactatgaaaaacagggaatgcaaattattagtatracaactatgaaacatgtttaaagaactaaaagtagaagtaccattcaatccagcaattccactcctgggcatctacccaaaggaaaataagtcattatat

SEQ ID NO: 416108 - DNA, 201 bp, Homo sapiens
acctgatatttctgagctgctgagaagttctcatttccatatcctcttggacactgatactttctctggaacctaatggaaattatgttttctcatcttgygttttctctgtgacctggcccccatccctcttgaaaacacagggctaaggccgggcgtggtggctcacgcctgtaaccccagcactttgggaggccgagg

SEQ ID NO: 416109 - DNA, 201 bp, Homo sapiens
catactttgtttgccacgcaaaatgggccattcacttttataagtctgtcctgtagttccaggagctcttggttttatataatggggggtttggctctcawggcattaaagcagaagaccgaaggggaatctgaaggctggtcttcgaaagcactttcagaaatgaatgttaaggtctgggaagaaaacatgtcactccaa

SEQ ID NO: 416110 - DNA, 201 bp, Homo sapiens
ttccatgtctctcgtcctggcttctggtgtcttcttggtgctccgtggcttgaggatgctcctccatgtcttgtcgatggccatcttcttgcatctcttcwcataatgttctcccagtgtttgcacttctgtctccaaatttcccctttttataaggacaccagtcatatgggcttaagggcccaccctactccagtatgt

SEQ ID NO: 416111 - DNA, 201 bp, Homo sapiens
ggtagaaattaaaggagccagaggggaagggtgagcagcattaattgggtggcactcttgtgtccgtgtgtgtgtgtgtgtgtgtgtgtgtgtgtgtcccrggaagagcaggagctttgcactcagttgctcccaggacccagttctggcttccaattggccactgtgtgctctgggcaacatgcttcacctctctgagct

SEQ ID NO: 416112 - DNA, 201 bp, Homo sapiens
aggtataattaatggaggcagaatttttcattgctgtggtatgtttacagtggttaaatattttttgaatataaactttttggatataaatcaacatttgycaaggacgcccctgtggagccgcctggagagtgggtagaaattaaaggagccagaggggaagggtgagcagcattaattgggtggcactcttgtgtccgt

SEQ ID NO: 416113 - DNA, 201 bp, Homo sapiens
gacgaacaatacaaggttcttctggaaaaactgtgagtatttcaggaacgaaacctgaagtcagtggtgtcatttagtaatagagaaaaacaggggtcctkttgcaccgatagagcaattgagtagtcttagagtcactagggccacccccactgtggtcttcagtatggttatggggtgtatactgtccacagctgacat

SEQ ID NO: 416114 - DNA, 201 bp, Homo sapiens
taaactcctaccatatacttggctctaatataggcatgggagcagagtcaaaacgaaccaaaatcttgaaattatctagcttatgttccagcttggagagrtcaaaaaatgagataaatcaataaactatttagtatgagagatggcctagaacactgcctcctacagtgtagctactcagtaagtatcatggagaaaagg

SEQ ID NO: 416115 - DNA, 201 bp, Homo sapiens
aagaacaatcaacacaatatgccagtattaccactcttgcactttggggccatgattaagtaaaataagggtgacttgaacaccagcactgcaataccccrgcagtttgtttttgaatttttttatttaatatttttggaccttgagtacctgaagccacagaaggtgacacaggggacactaggagactactgtgtaaga

SEQ ID NO: 416116 - DNA, 201 bp, Homo sapiens
cccaggagtttgagaccagcagtttgaggccagcctgggcatcatagcatgaccccgtctctataaaaaaattttttaaaaattagccaggcatggtagcrtgtgctatggtcctagctactcagtaggctgaggcaggaggattgcttgagtattggaattagaagtgacagtgagctgtgatcaagccactgcactcca

SEQ ID NO: 416117 - DNA, 201 bp, Homo sapiens
gtagacatttccataggaagaactctctgaatctgtactgtgtctcattttcttttcattcaaaattcagcctgtatattcgaatacatcctattatttckgacttctgatacacatagaattcatactaagattatgtatggtctgaatgcatggcctccaagatcacttacctctttcatggaggaagcatcaaacgtt

SEQ ID NO: 416118 - DNA, 201 bp, Homo sapiens
agctttcagttgggcatagatgccactgttggcttacattgtctacacttcttctttcatcatgcatctcctgccttccagaacctccagtgaacattccragtctttgaaacctctgcctgccatgcgagaccattcattttctggctcattcttccagtccaagctcatttcttctcccagaattctgtgctttccgcc

SEQ ID NO: 416119 - DNA, 201 bp, Homo sapiens
ccaagctcatttcttctcccagaattctgtgctttccgcccctgggcctgactctttccacatacccacctggtccttcgcaccccttctctttacgcttycttatcccattcatctgtctatgcccatctaaggcccatgtcttgcttgaagccttctctttccagtcgagctaattcttcctgacctgcttctgtgatt

SEQ ID NO: 416120 - DNA, 201 bp, Homo sapiens
ccagagacaaatgtgaaatagtgcagtgctgtggaaaatagcatggcgatttctcaaaaaattaaacatggaactagcaaatgatccagctgccctgcttygaaacaatcaaaagcaaggtctggaggagatatttgtgcatccatgtttgtagcagtattattcacaataggcaaaagatggaagtaacctaggtgccca

SEQ ID NO: 416121 - DNA, 201 bp, Homo sapiens
ttctctttacgcttccttatcccattcatctgtctatgcccatctaaggcccatgtcttgcttgaagccttctctttccagtcgagctaattcttcctgayctgcttctgtgattccttttacagttatcgtctgcatcatacaactagcgttgtattacactctgatcctttacccaccattgtttcatctgaatgatgg

SEQ ID NO: 416122 - DNA, 201 bp, Homo sapiens
acaggtgacacagtggtccagccccacctcctctcacactttctctgcccctttaggaccttagcagcatggacctcatccggccccgcgtcagccttgtrtgccagattgtccgcgtgggccatatggagctgaaggaaggcaagaagcacacctgtggactccgaagaccttttggagtggcaggtacaagagagaccc

SEQ ID NO: 416123 - DNA, 201 bp, Homo sapiens
agcagccctgttggtatgagactgtcaaggtgagaatgagtcatttgtaacccctgttatctgttaaacctcagttagattcctatcttctgtttacccccaaattattcctactttattttgaaatttttagataagttgcctatggtgtgcagtaagaaatgaatcagtaattataattctgtattaagagcatttatc

SEQ ID NO: 416124 - DNA, 201 bp, Homo sapiens
tatgcccatctaaggcccatgtcttgcttgaagccttctctttccagtcgagctaattcttcctgacctgcttctgtgattccttttacagttatcgtctrcatcatacaactagcgttgtattacactctgatcctttacccaccattgtttcatctgaatgatggaatttcaacaggcttgagtcccatagacttttcc

SEQ ID NO: 416125 - DNA, 201 bp, Homo sapiens
ctgctgcaacctctgcctcccaggttcaagcaattctcctgcctcagcctctggagagctgagattacaggtgctcgccaccatgctcgactgatttttttatatttttagtagagacggggtttcactatgttagccaggctggtctcgaactcctgacctcatgatctgcctgcctcagcctcccaaagtgctgggatt

SEQ ID NO: 416126 - DNA, 201 bp, Homo sapiens
agttttaccatgttggccagcctggtcttgaactcctgacctcaggcgatccgcccgccttgacctcccaaagtgctgggattacaggcgtgagccactgygccctgcctaaaattaaattattaatttagcaaagctgaaacttttattcaaagattttgagatggaaggacaacccagaccgtagcatcccataagctc

SEQ ID NO: 416127 - DNA, 201 bp, Homo sapiens
ttggggagctaagactttctaagacttgatcattaaatcagagcaggagcgcttacacttgagctgcttttgaagcctaactttaccatttaccagttgtrtgatgttggattttaacctctcttatcctcagattctccatctgtgaaaagagaataagaatatccctcatgtagagttgttgtgtatagtagagataac

SEQ ID NO: 416128 - DNA, 201 bp, Homo sapiens
gtaaaaagtctgcccctggtgaggagaaccagctgactactcctttctctccagaatgctggggttagatctggtggtgcgagatgacaatgggaacatcytagaccctgacgaaaccagcaccattgccctcttcaaggcccatgaggtggcctccaaaaggattgaggaaaagatccaagaagagaaggtacagttcct

SEQ ID NO: 416129 - DNA, 201 bp, Homo sapiens
cctctgcttcccaggttcaagtgattctcctgcctcagccccctgagtagctgggattacaggtgtacatcaccacacccagctaatttttttttttttttgtatttttggtagaggtggggtttcacaatgttggccaggctggcctcaaactcctgacctcaagtgatctgcccaacttggcctcccaaagtactggga

SEQ ID NO: 416130 - DNA, 201 bp, Homo sapiens
gaaggaaatagattcatagtatatgtggattcagtggaattctgtggggttttatttaactaacatttcaaaagtgatacacagaagacttttctctgaaygcagtacctaaagtaacatccttcccctatatacgcaagatcatattgtcctatttattcttcttatacttttcatcatcagaaattatctcatgtgtgt

SEQ ID NO: 416131 - DNA, 201 bp, Homo sapiens
ttcatgggtggtgacatctatgctctgtggctgccactatgatcatcttctttctgtcctttttctcaggctttcagccttctgtagccttattatactcmgcagctgggaaagactcaacaccagagacaaattctagtttctccatgttaggtgccataataatatccagtgttacaatggcagtcaatataaaaatag

SEQ ID NO: 416132 - DNA, 201 bp, Homo sapiens
gttggggcaaggctggtgagtggctcaccatcgccacccagacacccagcacacgcctgctgcagagtaggagctcaagcactttttaaaatgaatgttayctccattacgtgattataccataatttattcaactaattccctgtgcttggaaatcgagactgtttccatgtttccacttttataaacaccgcaatgaat

SEQ ID NO: 416133 - DNA, 201 bp, Homo sapiens
atggacgggcaataattaaattgccacggatagtgtctaatgtaactgagactaagaacttgtgcacatgtaccccaaacaaagcactgtgtcacacagargatccccggagcctttgaaccctttctttaccatattatgagaagcaatatcttaacattagaaaacactttgaatagctaaaagtggacaaatgcgttg

SEQ ID NO: 416134 - DNA, 201 bp, Homo sapiens
atatgtatatatgcgtatatgtgtgtgtgtgtatatatatatgtatatggaaatatgggtggaaattgtgtgtgtgtgtgtgtgtgtgtgtgtgtgtgtgtaaaatatttggattgcatttccagggcctaggtgttagggaaactgctccaggatataattctgaacacttatttcaccagacatagattctggtttgtc

SEQ ID NO: 416135 - DNA, 201 bp, Homo sapiens
aggaaagcacatacctcatgagaagttcgagtctataaatcaacattggtgaagatcttgtacccacaatgtaaacatgtgggttgatgcttagagctgtygttcttgccactctgtcccctgagtcaatccaaacattgtcatttctcttctttaatttttttaaaaggtacttttccttccatatcaagttgttaaatg

SEQ ID NO: 416136 - DNA, 201 bp, Homo sapiens
gctaatggtgggtttacttgtgcagattatttgactggtgcttctctctggcaccagactgtaacctgagttggggcaaggctggtgagtggctcaccatmgccacccagacacccagcacacgcctgctgcagagtaggagctcaagcactttttaaaatgaatgttacctccattacgtgattataccataatttattc

SEQ ID NO: 416137 - DNA, 201 bp, Homo sapiens
tatatgtatatatgcgtatatgtgtgtgtgtgtatatatatatgtatatggaaatatgggtggaaattgtgtgtgtgtgtgtgtgtgtgtgtgtgtgtgtgtaaaatatttggattgcatttccagggcctaggtgttagggaaactgctccaggatataattctgaacacttatttcaccagacatagattctggtttgt

SEQ ID NO: 416138 - DNA, 201 bp, Homo sapiens
gcccctggtgaggagaaccagctgactactcctttctctccagaatgctggggttagatctggtggtgcgagatgacaatgggaacatcctagaccctgaygaaaccagcaccattgccctcttcaaggcccatgaggtggcctccaaaaggattgaggaaaagatccaagaagagaaggtacagttcctcaaatgtgaaa

SEQ ID NO: 416139 - DNA, 201 bp, Homo sapiens
atccacctacccatccaaccgtccacctatctatctaaccgtccacctatccaacctctatccatccatgtatctatccatccatccatccatccatccayccatgtacccaacctctatccacccatccatccctccctccacccacccacccatccatccacccacctatccatccactgcacaagcaagaagccagaa

SEQ ID NO: 416140 - DNA, 201 bp, Homo sapiens
tgggaggatcacctaaggtcagaagttcgaggccagcctggccagtatggcaaaacactgtctctactaaaaataagaaaattatctcattgtgtggtgtrtgcctgtgatcccagctacttgggaggctgaggcaggagaattgtttgaacccaggaggtggaggttgctgtgagccaagattgcactactgcactccag

SEQ ID NO: 416141 - DNA, 201 bp, Homo sapiens
gaacccgggaggcggtggttgcagtgagctgagattgcaccaccgcgctccagcatggcaacagaacaagactccgtctcaaaaaaaaaaaaaaaaaaaaattagctgggagtggtggcgcatgcctgtaatcccagctacttgaaaggctgaagcgggagcatcacttgaacctggaaggcagagtttgtagtgaggtga

SEQ ID NO: 416142 - DNA, 201 bp, Homo sapiens
gcagaacatactgaatggccctttcttcccatcatcgcatatccaggcagtttaaagctgctggattctaatctctttgaaccggtggttattactggctkctggaacgtaatctctgaagtacaattaagctggtctcatggtttgaaaccagcatcttattccttattaccaagaacagaaaattcccatagcaaactt

SEQ ID NO: 416143 - DNA, 201 bp, Homo sapiens
tcctagaccctgacgaaaccagcaccattgccctcttcaaggcccatgaggtggcctccaaaaggattgaggaaaagatccaagaagagaaggtacagttyctcaaatgtgaaattctgcccactgaggttccatttttgccttggtttttaatgaaagaaagggaaatcattgagaacaaaactacttctgtagttttcg

SEQ ID NO: 416144 - DNA, 201 bp, Homo sapiens
agtaccatccacacctatggcctctatgtgaacttcaagaactttgtctgcaacatcggggaagatgcagagttgtttatggccctctacgacccagaccrgtccacttttatcaggtagcagagacccacatcccctgctgctgacctaacaaagatacccagccttcccctgacccctacccgggcagctctttgccag

SEQ ID NO: 416145 - DNA, 201 bp, Homo sapiens
tgaacccgggaggcggtggttgcagtgagctgagattgcaccaccgcgctccagcatggcaacagaacaagactccgtctcaaaaaaaaaaaaaaaaaaaaattagctgggagtggtggcgcatgcctgtaatcccagctacttgaaaggctgaagcgggagcatcacttgaacctggaaggcagagtttgtagtgaggtg

SEQ ID NO: 416146 - DNA, 201 bp, Homo sapiens
ctggtatagaacttacctagtaaagcgtcacagaaaaaaaaccaacatgcctctggtcaaagcacctgttattctgtctcccctgagggttatacaaactrattggtggaccccagaacccaggcgcactggaaatgaagcagcatctctggggatggcagagccacactctctttagaattagcttctaggggccaggtg

SEQ ID NO: 416147 - DNA, 201 bp, Homo sapiens
tttgatcaaggtgacagcagggttggcttctcctgaggcctttgaataaggtgagtttaccttttaaatctggcttgtaaaagaacatttagttttgtttygttttttaagtcaataggattggttcataggatgccaagggctacattggttttaaaattcatctagaatacggccaggccagatggctcacatcggtaa

SEQ ID NO: 416148 - DNA, 201 bp, Homo sapiens
tgcagatgagaagaaaacatgggactattccagaaaggggtgctgcctccgtaccccccacctctaccctggcctctgccccaaccaggtcctgggtggastcacagccccaggacactcgtgccacacacacctttccatccagcctcccaaatgaaacagctgcttggtggaaccagctaaaatgctgcatattttgct

SEQ ID NO: 416149 - DNA, 201 bp, Homo sapiens
cagttcacgatacagtttgcactcctatgaaaatctgataccaccactgatctgacagcaggcagagctcaggttgtaatgcgagcgatggagagtggctrtaaatacagatgaagcttccctcacttacctgtcgctcacctctggctgtgtggcctgtttcctaataggccacggactgatactggcctggcattttgg

SEQ ID NO: 416150 - DNA, 201 bp, Homo sapiens
gtcccttctagaggtaatgggagacagtgacagatcatcaggcattagattctcataaggcatgcacaacctagatccctcgcatgtgcagttcacgatasagtttgcactcctatgaaaatctgataccaccactgatctgacagcaggcagagctcaggttgtaatgcgagcgatggagagtggctataaatacagatg

SEQ ID NO: 416151 - DNA, 201 bp, Homo sapiens
agtcttgaatccgttttgcttaccctgaggtttttcttggtttcccatttctctagctttctctataacagttattcatgttctagaaagaaactatgggmccactaagtgcattagctgtactctcattcttgaaatagcatcagactagcggacaatgtgatcaccagtcactgatgtgtgtgatgagaaagcttggtt

SEQ ID NO: 416152 - DNA, 201 bp, Homo sapiens
ttctacttatgagaaagaacccacttttgagttggtggacagatcttttggagacaagtagagtactttaattaaggcaagcatgtatcagcgaagactarggggtcttgtcctggaaggcccttatggtagagcaggccagcatcggcacgggcagttcagtggctaaagtggaacaaatggttttgtaggctgggttgg

SEQ ID NO: 416153 - DNA, 201 bp, Homo sapiens
tctcttgatttctacttatgagaaagaacccacttttgagttggtggacagatcttttggagacaagtagagtactttaattaaggcaagcatgtatcagygaagactaaggggtcttgtcctggaaggcccttatggtagagcaggccagcatcggcacgggcagttcagtggctaaagtggaacaaatggttttgtagg

SEQ ID NO: 416154 - DNA, 201 bp, Homo sapiens
gacaccagataggacagtaaaggatggtgagtgtggaaaacaaaaggttagggcgacagaggacccatgaaattgactaggagagttgcttcattacacaytgtctgtgatggcctgcgtgtggttacttttcccttatatgttattaaagaagaacctgagctggggaagagactggcaatgtgcgtcccctggttgctt

SEQ ID NO: 416155 - DNA, 201 bp, Homo sapiens
actgattggtggaccccagaacccaggcgcactggaaatgaagcagcatctctggggatggcagagccacactctctttagaattagcttctaggggccargtgtagtggttcacacctgtaatcccaggatttagggaggccaaggcaggtggatcacttgaggtcaggagcgcgagaccatcttggccaacatggtgaa

SEQ ID NO: 416156 - DNA, 201 bp, Homo sapiens
tcctcttgggtgttatctgtgttttgttttttgttatttattgattaatcaactgattgattgagacagggtctcactttgttgcccaggctggagttcartgactccatcataactcactcactgcagcctcctctgttcccaggtagctgggactacaggcacagctaattaaaaaaaaatttttttgtagagacagag

SEQ ID NO: 416157 - DNA, 201 bp, Homo sapiens
tggttgtttaaggatctaaatggctatttcttcttcttctttttttgtttgagatggagtcttgctttgtcacttaggctggagtgcagtggtgcaatctyggctcactgcaacctccgcctcctgggttcaaacaattcttctgcctcagcctcctgagtagctgggattacaggtgcatgccaccatgcccggctaatt

SEQ ID NO: 416158 - DNA, 201 bp, Homo sapiens
tcctactttttaaaacttgtataattacatcttattaattgtagtgttaatttgttggttgtttaaggatctaaatggctatttcttcttcttctttttttgtttgagatggagtcttgctttgtcacttaggctggagtgcagtggtgcaatctcggctcactgcaacctccgcctcctgggttcaaacaattcttctgc

SEQ ID NO: 416159 - DNA, 201 bp, Homo sapiens
ctcagcctcccaaatagctggggttacaagtgtgtgccctgacacccagctaatttttgtatttttagtagagacgaggttttgccatgttggccgggctrgtcttgatctcctgacctcaaatgatccacccgccttagcatcctaaagtgctgggattacaggcatgagccactgcacccagcctctaacctgttttaa

SEQ ID NO: 416160 - DNA, 201 bp, Homo sapiens
atacacaatagaacctaagttgtgactattggaatcctccctgtctgggtctgcgtattgattttagtggaataaaatactcgctgggaagtggtttgccrgtctaggaaatttactcttcgaagacaatgttgtgtttgtttctaaatgctttcagagatgctccttggcttacatcaaaccccagaacctgcttaaacg

SEQ ID NO: 416161 - DNA, 201 bp, Homo sapiens
agattgcttgatcccaggagttggagaccagcctgagaaacatggcaagaccctgtcttaaaaaaaatacacaaaaattagccaggcatggtgacatgcgyctgtaatcccagctactcaggaggctaagatgtgaggatcgcttgagccccagggaagtcgaggctacagtcagccatgatcgccactgcactgtagcct

SEQ ID NO: 416162 - DNA, 201 bp, Homo sapiens
gcccatcagtgcataaatggactaagaaactgtggtgtgtacgcacaatggaatattactcgccttaaacaggacgggaattttgactcatgctacacacwgcgtggatgaaccttgaggactttacactaagtaaataagtgagacacaaaaggacaaatattctatgatcccacctatatgaggcacctagagtagtca

SEQ ID NO: 416163 - DNA, 201 bp, Homo sapiens
aactacaattcaagatgagatttgggtggggacacagccaaagcatatcacaggtattctagcagggagttttcatcatcatcgcttgccctcctctcctycatgctcagtgttgccacctcttttcctgctagccttcctccccgttaagatttgtttaactaatctaagtatttcagacatttctccatggaattctat

SEQ ID NO: 416164 - DNA, 201 bp, Homo sapiens
ccacctcccttccagtccacatggaattccagaatcagtcacagcctctgattttttccaagaagagattgccttcaccattgttaaatgtcagcctgtamggcagagacatggtggtctgcacaagcctggacaagttcttccatattgatggtggagcaacccctgtaatctactccttggaaggattttttgctttgc

SEQ ID NO: 416165 - DNA, 201 bp, Homo sapiens
tagcagtattattcacaataggcaaaagatggaagtaacctaggtgcccatcagtgcataaatggactaagaaactgtggtgtgtacgcacaatggaatawtactcgccttaaacaggacgggaattttgactcatgctacacacagcgtggatgaaccttgaggactttacactaagtaaataagtgagacacaaaagga

SEQ ID NO: 416166 - DNA, 201 bp, Homo sapiens
ggaatttaagcctcttcacaaagcaaaccactggaaattcataggtagtatgcaacattggtctgtaactgataatagggcaacatcatttctttggaacrtaattttcttgattccacaagaagtgacaggataagaaaactcatagttaaatgagaacagtcttgttacaggacagttatctcccaggtgtatgtcatc

SEQ ID NO: 416167 - DNA, 201 bp, Homo sapiens
actacagctctgtctcaacaagaaacccaaagccccacaagttgttacatcttcactggtaatctcattgaggtgtcctgtctataggattccacacttcwtagctgttaatgagatttcttcactcagacctggaaggaggtggtttgaagcagaaaccgcaaagcacgtggcctttggacctttagaatgcagcgtgtt

SEQ ID NO: 416168 - DNA, 201 bp, Homo sapiens
cagagacaaatgtgaaatagtgcagtgctgtggaaaatagcatggcgatttctcaaaaaattaaacatggaactagcaaatgatccagctgccctgctttraaacaatcaaaagcaaggtctggaggagatatttgtgcatccatgtttgtagcagtattattcacaataggcaaaagatggaagtaacctaggtgcccat

SEQ ID NO: 416169 - DNA, 201 bp, Homo sapiens
ctgagctgacacagcatgtttgcctcttcattcacaaaatatcctatgctctctgaacccaaattttaatttctacctttttgatgtttccaccatgcttwtgtggaggtagccagtcaacgtaagtggtgtcctgccaacctgatctcaggagtttagctattgcctgggtgttcccatttattctctttactttgggct

SEQ ID NO: 416170 - DNA, 201 bp, Homo sapiens
gttgctgtgaagcactcatctaagaagctgagttaggcctccggctgtggcttcacggcaccttcccttcaggggattattagtggcccttcagacgtccmtgaaggtgttattagactttgcagagcagtggacaggatgtgccgctggattagcacactgttgtcatgttgacactagtctttggataacttcccatca

SEQ ID NO: 416171 - DNA, 201 bp, Homo sapiens
agcactttgggaggccaaggaggctggatcccttgagcctagacgttcaaggccaaggccagcctggataacatagggagaccttgtcaaaaaaaaaaaaatacaaacaagtgtagaaccctagctgcaagagaaataggtatttcattgacacatctgtcatgattcagtatacactgataagctctcaatagagacctc

SEQ ID NO: 416172 - DNA, 201 bp, Homo sapiens
aggggattattagtggcccttcagacgtccatgaaggtgttattagactttgcagagcagtggacaggatgtgccgctggattagcacactgttgtcatgktgacactagtctttggataacttcccatcatctgtgcgtactccagtctctttgttctagattttccactttctgcctctgtcatgctgagtagatggcc

SEQ ID NO: 416173 - DNA, 201 bp, Homo sapiens
acacataataaacaataatcaatccaggcacaggggctcacgcctgtaatcccaggactttgggaggccaaggtgggaggatcacttgagctcaggagttygagaccagtctgtgcaacatggtaaaaccctgtctctactaaagaatttaaaaaaggaaaaatgaccttaaagtacaagaggagtgatgctggcaattcg

SEQ ID NO: 416174 - DNA, 201 bp, Homo sapiens
tattagttggttccatggtggactctcaatgccgtgttagactacgtggctttagctgaaggtctccatgagcctctgcttgggccataccctggcaggcrgcatggcatgggaaccatagcaatatgtagatgtgcctgtggagaccaggcgcaagaggcccagtatggggggtggggggtggaggaggaagcccaaggt

SEQ ID NO: 416175 - DNA, 201 bp, Homo sapiens
ctcctccctcttcatctcgcccaaaagctgcttattttacctgtttagtattgattaaatctgttttatttcccacctcctcattggcctccctgccatgsatggccttctcaggtccagttacctcactgcctcagtgggaattccattaaggaaatctcaccatttcgtccattctcgtgcttaaagtccttccatggc

SEQ ID NO: 416176 - DNA, 201 bp, Homo sapiens
tgcctagcaggaataacccacccatttattcaacatgtacttcaatgccaggcactgatttagacacttgagatacatccgtgaaaaatcggggaaaaaaagcagcttttgtcctgattggtaagacacataataaacaataatcaatccaggcacaggggctcacgcctgtaatcccaggactttgggaggccaaggtgg

SEQ ID NO: 416177 - DNA, 201 bp, Homo sapiens
  misc_feature (1)...(201): n = A,T,C or G
caattacatcttccctcccaaagcctgttctcttcttttattctctgctaatcatatccacagttaccctagactcctccctcttcatctcgcccaaaagntgcttattttacctgtttagtattgattaaatctgttttatttcccacctcctcattggcctccctgccatgcatggccttctcaggtccagttacctca

SEQ ID NO: 416178 - DNA, 201 bp, Homo sapiens
cactgagcatttctggcctttcctccttcccttgtaagtctatactaagggtagcctcatctccaaccccagttagcctctcattaagagcaattttttttcctttgccagtgagaactatctaattcgttggggcagtaacgggatgcccaaggaaatagagaagctcaataacctccaagcagtgtttacagtaagtcc

SEQ ID NO: 416179 - DNA, 201 bp, Homo sapiens
ggcaggcagcatggcatgggaaccatagcaatatgtagatgtgcctgtggagaccaggcgcaagaggcccagtatggggggtggggggtggaggaggaagsccaaggttagccatgtgttctctacaggcaggtggtgtagcgggtaagagcacaggccttagaacacgcagctctgggtttgaattctgaccattccact

SEQ ID NO: 416180 - DNA, 201 bp, Homo sapiens
  misc_feature (1)...(201): n = A,T,C or G
cagaaacatttttggaatgctgctttggagtttcttgtcaattacatcttccctcccaaagcctgttctcttcttttattctctgctaatcatatccacanttaccctagactcctccctcttcatctcgcccaaaagctgcttattttacctgtttagtattgattaaatctgttttatttcccacctcctcattggcct

SEQ ID NO: 416181 - DNA, 201 bp, Homo sapiens
ctgcagcctcctctgttcccaggtagctgggactacaggcacagctaattaaaaaaaaatttttttgtagagacagaggcttgctgtgttgcccaggctgktctcaaattcctgggcctctagtagcactgggattacaggaatgagccactgtgcccaggctttgtctgccatttgcaggcttatttatttatttattta

SEQ ID NO: 416182 - DNA, 201 bp, Homo sapiens
cacactcagtatttgcacatgtatgtgtacacatacacattttgttaactttgacagtttattcatctagcaaaataaaggaatgtttgcttttaatgcarttcccacagttttggtccttttttctcacctcaagccagagaatgaatttttctacccacagttattctagtgtcgcatgtctttatttcaaaccaaatt

SEQ ID NO: 416183 - DNA, 201 bp, Homo sapiens
tgtcggatgagtagttcagtataaaaccagaccatttcgtgttgtctttaccttttatgtcgtatgacattctgaaacttagaatgacttctctcagcaayactcacagcatgcttatcatgttgcaggagatgttcggaatgacatttatgtcaccctgatccacggtgagtttgacaaagggaagaagaagacgccaaa

SEQ ID NO: 416184 - DNA, 201 bp, Homo sapiens
tcatgtgttgattcattttaactctgaaaagccaatcttaataagttactgggaatacctcactctagaccctaaatactgaaggcagtaatcaaaagctmattttggcataacttataagagttcatggaagatatttcattttcattcagggctgttgtttcccttggttaatcacagcagtagaaatcaccaacccct

SEQ ID NO: 416185 - DNA, 201 bp, Homo sapiens
acaaaaaaattagccagtcgtgatggtgcgtgcttgtaatctcggctactcaggtggctgaggtaggagaatcacttgaactcagaaagtgcagcctgcastgagccaagatcgtgtcactgcactccagcctgggtgacagagttagactctgactcaaagtagataaataaataaaaataaataaataaaattgtgtgc

SEQ ID NO: 416186 - DNA, 201 bp, Homo sapiens
tgaagctgcagtgagccatgattataccactgcagtccagcctgggtgacacagtaagaccctttctcaaaaaaaaaaaaaaaaaaaaaaaaaaaaagatmcctgtgatgtcttagaaatcctgcatttctatagtacatttccttgttcttttcttttcagtctcagttcaccagaaatgtacgttgtggatccacagtc

SEQ ID NO: 416187 - DNA, 201 bp, Homo sapiens
cagatgtctgaccgaaaaaaaaaaaaagggccctaggattaattataatcactgaataaggcattccagtgatacacaaaggaactcccattttcagtgtkgtcctggcattggggtcaaagggagtgattggtgctggtggcatttccggctgtgaagcaggaggaacaggggtgtttggtgtctgacaccttcacgacc

SEQ ID NO: 416188 - DNA, 201 bp, Homo sapiens
gctcaggcaatcctgcctcagcctcctgaggaggtgggattacaggtgtgcaccatcacgcccagttaatgtttttattttttcttagatatggggtctcmctatcttgcccaggctcaagaccagtgatctttgaatcagcgtcgactcccctgtctgccttgcccttctcccgacaccaaagaagcaaacactgaatgc

SEQ ID NO: 416189 - DNA, 201 bp, Homo sapiens
tgtatatatacacatatatacgtatatatgtgtatatatacacgaatgcaggagaaggtgatagcattgttcactttcctgttgtagggagagagagagakatatatatatatacacatacacatgtatacatacaatatgtatatatgtatacaatatgtatatatgtatactatatatgcatatatatgcatatataca

SEQ ID NO: 416190 - DNA, 201 bp, Homo sapiens
tctgacaagaatgtaaaatgaggacagtgactttgcataatatttaatatggttgaagatattcttcctgatgccccagaaatcccaccttagttttctaycccagagaagctgctctacctgtataccaggagacgtatgagaatgttcatggcggaattgcttatgatagcaaaaaaactagagacaacccacgtgttt

SEQ ID NO: 416191 - DNA, 201 bp, Homo sapiens
caaatgatccacccgccttagcatcctaaagtgctgggattacaggcatgagccactgcacccagcctctaacctgttttaaaataaatgatatttaatgmctgttctttaacaatggaagctatttagagattataaataagaaattctatttaatttagtcacaaaaatatcagagtaaaaataaatactagttacaaa

SEQ ID NO: 416192 - DNA, 201 bp, Homo sapiens
aggacctggtattgtgcattcacagagcctggcacattcctccattgctaatggtgggtttacttgtgcagattatttgactggtgcttctctctggcacyagactgtaacctgagttggggcaaggctggtgagtggctcaccatcgccacccagacacccagcacacgcctgctgcagagtaggagctcaagcactttt

SEQ ID NO: 416193 - DNA, 201 bp, Homo sapiens
tgcaccgatagagcaattgagtagtcttagagtcactagggccacccccactgtggtcttcagtatggttatggggtgtatactgtccacagctgacattrtttatctggtgggagtcaaatgctggtattttcctggccagcctggccctagagaacacagcagatggaggcaaggaggaggtgcagagtggtggcattt

SEQ ID NO: 416194 - DNA, 201 bp, Homo sapiens
tgctggactatagaaccatcatcatgcaagatgagagcaaggagaaccgtatgagctgcactgtgaacgtgctggtatgtgacatgcctccggtgtgatgsgagggtactgtcaggccgcccctgcaccctacagctcagctctaggtagatcccacaaacacagaggcgccctgaggcacctttgtggagccggtgtctt

SEQ ID NO: 416195 - DNA, 201 bp, Homo sapiens
aggcaggtggtgtagcgggtaagagcacaggccttagaacacgcagctctgggtttgaattctgaccattccactcccttgtatgcaatttggggcaagcrgtttaacctcactgaacttcagtctcctcatctgtaagatagtacccaccttgagggttaattaagtgttgcttggctccatgcatgggaaatgcccagc

SEQ ID NO: 416196 - DNA, 201 bp, Homo sapiens
gaaggcccttgggaagtggtggataaaaccaggctttgggattccctgtgagttccatcatgccgtctcattaatttagatttccaggagttaaatagagrgtctgtatctgaagcaaataacaagtatctaaattcaatccttgcttcacaaaccatgaattcttatggatttagaagaaaagttaacagaatggccaat

SEQ ID NO: 416197 - DNA, 201 bp, Homo sapiens
taagtcacactcagtatttgcacatgtatgtgtacacatacacattttgttaactttgacagtttattcatctagcaaaataaaggaatgtttgcttttawtgcaattcccacagttttggtccttttttctcacctcaagccagagaatgaatttttctacccacagttattctagtgtcgcatgtctttatttcaaacc

SEQ ID NO: 416198 - DNA, 201 bp, Homo sapiens
gagagtctgtatctgaagcaaataacaagtatctaaattcaatccttgcttcacaaaccatgaattcttatggatttagaagaaaagttaacagaatggcyaataaattggtggaagcacttaaaatatataatgaggccggatgtggtgactcatgcctgtaatctcagcactttgggaggctgaggcaggtggatcact

SEQ ID NO: 416199 - DNA, 201 bp, Homo sapiens
caactctccaaagagtacggggcccaggaaaacacctttctacaaggtatagttcattagaaaccaggactgcttctgcattgttgatgcttaagtcacaytcagtatttgcacatgtatgtgtacacatacacattttgttaactttgacagtttattcatctagcaaaataaaggaatgtttgcttttaatgcaattcc

SEQ ID NO: 416200 - DNA, 201 bp, Homo sapiens
gtaagtcgagattgtgccgctgcactccagcctgggcgacaaagcaagactccatctcgaaataaataaataaataagtaaataaaatatatgatgaaacraatttgaattcattaattatgtctaggatttcagaactgagggtgggtatgtctaactcgccataaaaccaggggagaatccacagttgcacacacacac

SEQ ID NO: 416201 - DNA, 201 bp, Homo sapiens
ctcagaaaaatatggttagcaataggacctgggcctcctgtctctcacatactgtgtccaggcagaactgtgtaggttagtgccagagaaactggacaggrctttcaagaatcccagtggaaaaggtctaaatttagctaactaataaaaatgccttcaaaacattttagctttgatttcaactctgattgttctatttct

SEQ ID NO: 416202 - DNA, 201 bp, Homo sapiens
tctctataaaaaatgcaaaaaatagccgggcatggtggcatgcacctgtattcccagctaccaggggtcggggttgggtgctgaggtgggatccatggagstggggtggcggaggttgcagtgagccatgattgtgccactgcactccagtctgggtgacagagtgagatcctgccacaagaaaaaaacaacaaaaaaaac

SEQ ID NO: 416203 - DNA, 201 bp, Homo sapiens
tttttttttttttaaacggacagaatcttgctctgttgcccaggctggagtgcagtggcgcgatcatagctgactgcagcctccaacttctgggctcaagrgatcctctgaccttggcttccctagtagctaggactatgaatgtgtgccacctcacctggctagttattttatttttagttttttgtggagacaggattt

SEQ ID NO: 416204 - DNA, 201 bp, Homo sapiens
ttagttcttaatataggtgggaaaaggtttcaaaggacatacagttggcttctttatctggtgttttccttccgcagggtttttctccgtgctataaatcrgtttgctgaagttctcacaagattcttcatggatcaggcaagctttgaacttcaggtaggcatgtgactcacctacctgcttctagaattcttggccatg

SEQ ID NO: 416205 - DNA, 201 bp, Homo sapiens
cttggcctcatttactgtgttttatccagtaagataccagaccagcaacacttaaaggaaaaacaacaggatttagcacctgctccttctctggggtgccrcccacccccgcccagtccccacaaacacacacataatgcaggtgtatagaaacatagctcttttatgtgtgtacgtggggtaaaactaatttatcttgtg

SEQ ID NO: 416206 - DNA, 201 bp, Homo sapiens
taaaggtaacatatgtaaaaaaaaaatcttaaagagtaatagtagaagatcaaaaatataaatagtcctccttgtcgctataaacatttggagttgacccyttgtatatttacacaaatgcacatagacacacatggctacaaataagcacacaggtaactctcctaccgacaaatgagtttggttctaaagaacagttct

SEQ ID NO: 416207 - DNA, 201 bp, Homo sapiens
tgtaatcacagctccctgcagccttgacctcccaggctcaggcaatcctgcctcagcctcctgaggaggtgggattacaggtgtgcaccatcacgcccagytaatgtttttattttttcttagatatggggtctcactatcttgcccaggctcaagaccagtgatctttgaatcagcgtcgactcccctgtctgccttgcc

SEQ ID NO: 416208 - DNA, 201 bp, Homo sapiens
gactttctgcctttgaacttattttcaaaagccccagtgagttccatgtggagtgcggacatcttgagacctgaggctcaggaaggcggtgagtgtgctgygcacagggagaggtgcagccactgtctgtaaggaaggattttagacccagccctttgtctgtcctgtgacgagtttgcacccagcagtttctgctcactg

SEQ ID NO: 416209 - DNA, 201 bp, Homo sapiens
cttggttacaccctatgtaaatgaaggagtagcatgtgaccagtctgaccctcccaccaattgtgggaggggactaatcagaggtactttcaatttttcawctgccacagagtgcaaaggggtagcctctgatccttttgttacttgggtgtggagaggtggggttttccttttgattcagttctaggaagtcagtgtgaa

SEQ ID NO: 416210 - DNA, 201 bp, Homo sapiens
ggacgtgggggtggtggctttacagagaagcggaaatactagaggggtggagatgaggtcacagccatctgatgattgatgggctgtgtgggtgaggaagygagagttgtcaagaatgatttctgggcttctggcctgcatcattggagggggtagttgaaccatttactgggacaggaggaccggaaaaggccagagtca

SEQ ID NO: 416211 - DNA, 201 bp, Homo sapiens
ccatggtcatccatggagaatggatgggaggtgctgcaggtaaaccactaagagaccattgcagatgttcagaaaagagatgacaggctagactcgggacrtgggggtggtggctttacagagaagcggaaatactagaggggtggagatgaggtcacagccatctgatgattgatgggctgtgtgggtgaggaagcgaga

SEQ ID NO: 416212 - DNA, 201 bp, Homo sapiens
gggctctgtgaaggcacagagggaggtttccttgttttgcagtggaaatttggatatatcatctctctattttgctgactgtgatttggtcctcttcctcrtccctcactgcctggaccaggtctctctgcttgtctcagaaggtatttactggttgcaaatagaaatctctgctatcaccctctgtgataggcaaccaga

SEQ ID NO: 416213 - DNA, 201 bp, Homo sapiens
caccacatctggctaatttaattttttttttttttttgtagagatcaagtttcattatgttgcccaggctaatcttgaactcctgggctcaagcagtcctyttgcctctgcctcccaaagtgctgagattacaggcatgagccacaacactcagcccctccttgctttaattggctaattcttactcagcatccccatttg

SEQ ID NO: 416214 - DNA, 201 bp, Homo sapiens
ctgcaacctgaaaggtaagctgggagtggagcaggtaaagggggtaggaataagcattgcaggcagaggaagcatcaggcaagagcagggcagtgccttgmaaggaagggccagtgcagcaggcacagagagagctggggtgccagcggggaggcggggagccctggaagagcctgcagggccttggggtttcctggggtg

SEQ ID NO: 416215 - DNA, 201 bp, Homo sapiens
tggacaggcctctggaggaagccgtcaagatcaaggtcagcctggcagcatcatgggtaactcttcttaggctgtggtaaggatgttctgggaccgcttaraattggccatcatgagggagaaacaaagtgaatcatggttcatgcatagcttatgaattttagtatgatttacagaaaataaaggaaaaaaaatccattt

SEQ ID NO: 416216 - DNA, 201 bp, Homo sapiens
gctcccaaggaccaatatttatccctttgtggacagtatcactcccattgagagtgcatggtgtagagccttccaatgtgaatattttgaaaaacacgctrgaatggatgtatattaccccaatatcagtctataaagtatataagtatttagtcacctgttaggcattagtcacagtactgtatgatcatacttcattca

SEQ ID NO: 416217 - DNA, 201 bp, Homo sapiens
ttgcatttctcacccatgagtcccttcagcttgaaaccttctcacaagccaagcgcaacaaaattgttaaaaagtaagtgtccttttaaagttaagatcgkgaaggggcttcttccatttgtttacattgagagcaatattttaggtatcacagaaattactatttagtggctacccatgttgttagtgaggtaagtcttc

SEQ ID NO: 416218 - DNA, 201 bp, Homo sapiens
ccaggttcagctctcttttcttaaggcccaaccatcttcccatcagtcatcccatgctttttatcaaatctgtacctggagacggaccttggctgtcagcktgcccatccccaagaacagctgcgcctctgctggcagcttccccaaattgcaggcatagtacctcctcattcatagcgcttcacaaagcacactccttca

SEQ ID NO: 416219 - DNA, 201 bp, Homo sapiens
atatagtcaaatcataactcatttctttctatatagagaagcagtaaccttaataatgcaagtccatgttgatctgaaagttcactttacatttcattttrtaaagcaattagagatagagtcagacagtgcaacccagagcctggaaaagatttttttgctacatgtctttcctaaggcaacacctgtctgtagaaaatt

SEQ ID NO: 416220 - DNA, 201 bp, Homo sapiens
gttggatcaagtggttgaaatgggagcagagtccttccatcccatgcacacacatacctgctcacagctgtcttcacacccctgattgctgtagcattcasattatttggtgcataacctttattttttttaaatgcgttaggttatgtccatataacatcacggttgggctggctaagcctcattaaggattagtgtaag

SEQ ID NO: 416221 - DNA, 201 bp, Homo sapiens
cgcatctatgaacctctgcaaaagcaatctcactgcagagacttagacatgaaactgaagtaaaatagaaaaacaagaattattattctatttttatatgmatagttgtaacagaaagcaatgttttggataatatgtttttaatcaaatgtaatgcaaaggacaaagtaacatgagactttgttagaagattttgatagg

SEQ ID NO: 416222 - DNA, 201 bp, Homo sapiens
catcatcctttagagatgtggtaataggaaccctgcattggattatgatacagtatggtatctaacgttttgagaatgtctgtctgattgtcacattctgytatgctctatgacaattaattctgtaacactgaaatctctttattgttcctcctttctacttgtttctttctctacttggtcatccatgcacagtggtca

SEQ ID NO: 416223 - DNA, 201 bp, Homo sapiens
actttttaaggatacagaaaaggtaattgagatagtaaagataaggtgtttgagcagaagagcaagcatgcactggatagttctacttagagtgtgatcayggttaacagtcatttctgtagcattcagagtacctgaactcattataaaatgtgttacaatagcaaagatctcagaagacataataggtcataccttact

SEQ ID NO: 416224 - DNA, 201 bp, Homo sapiens
agcaatcctcccacctcagcctcccaaaatgcttggattacaggtgtcagcccctgtgcctggtctcttcttttatgtggagagcgctctccctctctctygctcttgctgtctctcactctctctccctctgtctctctctttctgtctttctctttctctctctatgctatgtgaggatacaatgagagggtggccacc

SEQ ID NO: 416225 - DNA, 201 bp, Homo sapiens
gaacaatacaaggttcttctggaaaaactgtgagtatttcaggaacgaaacctgaagtcagtggtgtcatttagtaatagagaaaaacaggggtcctgttkcaccgatagagcaattgagtagtcttagagtcactagggccacccccactgtggtcttcagtatggttatggggtgtatactgtccacagctgacattgt

SEQ ID NO: 416226 - DNA, 201 bp, Homo sapiens
ttattgagcatgagagatgttctgggtactctgtggtctcttaagtgacaaaatgcaagttcctgctctcatagggtttacattggagggatagacaaaamcaagtaaacaaagtaagtaaacaaaacaattcagatatgtgcttacaaatgctatggggagaagagggtggtattgcagaggccagaggtggaggacagc

SEQ ID NO: 416227 - DNA, 201 bp, Homo sapiens
atacaaggttcttctggaaaaactgtgagtatttcaggaacgaaacctgaagtcagtggtgtcatttagtaatagagaaaaacaggggtcctgttgcaccratagagcaattgagtagtcttagagtcactagggccacccccactgtggtcttcagtatggttatggggtgtatactgtccacagctgacattgtttatc

SEQ ID NO: 416228 - DNA, 201 bp, Homo sapiens
aagccttgctgtgttgccctagctggtctggaactcccggcccttagcgatccttccacctcggcctcccagagtatagggattacaggtgtgagccatcrtgcctggccttgtgggtttttttgtttgtttttaataacagctttcttgagatataattcaaataccaatcaatttacttatttaaagtatacaattcaa

SEQ ID NO: 416229 - DNA, 201 bp, Homo sapiens
tagagcaattgagtagtcttagagtcactagggccacccccactgtggtcttcagtatggttatggggtgtatactgtccacagctgacattgtttatctsgtgggagtcaaatgctggtattttcctggccagcctggccctagagaacacagcagatggaggcaaggaggaggtgcagagtggtggcattttgcccagt

SEQ ID NO: 416230 - DNA, 201 bp, Homo sapiens
tcagcccctagtgtgatggtatttggagatgggtcctgggagataattaggtttagatgagttcatggtggggccctcatgaggggattagtgctttttttaaaaaaaattatttttaaaaatgtcttttattaaaaagttaattaaagtacagacagggtctcattatgttggccaggttggtcttgaactcctggcctc

SEQ ID NO: 416231 - DNA, 201 bp, Homo sapiens
agagtcctcacagagcacacacgaaccttttgagcaagggtttgttgactgaataaaacacaaacaaaaacagacattgaaagaaggacattgtgtgctcrgattctaagtgatgttgggacttgagctgagtcctaaagaaaactggaactcgagtccacaaagaagcgcagcataagtgaaggtcacaggataggaagg

SEQ ID NO: 416232 - DNA, 201 bp, Homo sapiens
acaatctgagctcactgcaacctccacgtcctgggttcaagcgattctcatgcctcagcctcctgagtagctgagattacaggcatatgtcatcacacctygctaatttttgtattgttagtagagacggggtttcatcatgttggccagcctggtcttgaactcctgagctcaggtgatagccccatcttggcctcccca

SEQ ID NO: 416233 - DNA, 201 bp, Homo sapiens
cctccaggctcctagaacattgccggaaacacaaatacctctccagctctggggaggtcttcgccctcctggtcagcagcctcttagagaacctgctggaytatagaaccatcatcatgcaagatgagagcaaggagaaccgtatgagctgcactgtgaacgtgctggtatgtgacatgcctccggtgtgatgggagggta

SEQ ID NO: 416234 - DNA, 201 bp, Homo sapiens
ttctaactcttccatgtgggcttggaaagaatgtatatttaaggattattgggtgcaaagttcttttttttttttttttgagatggagtctcattctgtcrtccaggctggagtgcagtggcacaatctgagctcactgcaacctccacgtcctgggttcaagcgattctcatgcctcagcctcctgagtagctgagatta

SEQ ID NO: 416235 - DNA, 201 bp, Homo sapiens
taaattaatttgtgttttctcctcatctaaatttcaagagacaaatcagtggggcttgaatgtaaggaatcaaatctcattgtacttaattttaccataamgcaaagtttttctaacttctagcttattgccagcagtattcaatgcaatgacgttataatgcaatgcatataaaagattttagtactttcaaaagaatta

SEQ ID NO: 416236 - DNA, 201 bp, Homo sapiens
caacctcatagtcatcttcaatttctctcttttactcaccacctcccacattctccacaagcgagagatgtggcccctctgttcagaacatgcccctaacytatccgcttttctttttctttctttatttttttttttaaagagatgagatcttgctatgtttcccaggctggtctcaaactcctgggctcaagcaatcct

SEQ ID NO: 416237 - DNA, 201 bp, Homo sapiens
ctcaaacattagtctgtctaaatttttcttgtggccatagctgtcatgtagccatcttgttagctgaaaatataaattaatttgtgttttctcctcatctraatttcaagagacaaatcagtggggcttgaatgtaaggaatcaaatctcattgtacttaattttaccataaagcaaagtttttctaacttctagcttatt

SEQ ID NO: 416238 - DNA, 201 bp, Homo sapiens
ggcaaggggctttgaagccatggttactcaaacattagtctgtctaaatttttcttgtggccatagctgtcatgtagccatcttgttagctgaaaatatarattaatttgtgttttctcctcatctaaatttcaagagacaaatcagtggggcttgaatgtaaggaatcaaatctcattgtacttaattttaccataaagc

SEQ ID NO: 416239 - DNA, 201 bp, Homo sapiens
tcttttgtttacttgatttgttttttagaaactaaaacagaccaatttgtgtgggatcattggtttctgggcccactggaaggtaagaatagatttgtttyccaggaaaaagagaggaatgtgcaggtccccagaggtgcgtggccttgggccaggaggttcatactcagtcagtcattgcaccctccagcaccaactttg

SEQ ID NO: 416240 - DNA, 201 bp, Homo sapiens
gatggtgatgagatcgattaggagtttatacctcaatgtaaattaatgcacttccttccttccttaagaatgtcttgccatgaaaatatcagcatgcctgkggatgtcattgatttaaatgagggcacaagttccgtatttccttgcagatgggtccagactgtttgcagactggccatggtccttgggccacactggaag

SEQ ID NO: 416241 - DNA, 201 bp, Homo sapiens
tctgtgtggtcccagttcccaactcagctgttttcacaccggcctgttgaatttcactgagcatttctggcctttcctccttcccttgtaagtctatactragggtagcctcatctccaaccccagttagcctctcattaagagcaattttttttcctttgccagtgagaactatctaattcgttggggcagtaacgggat

SEQ ID NO: 416242 - DNA, 201 bp, Homo sapiens
actatagaaccatcatcatgcaagatgagagcaaggagaaccgtatgagctgcactgtgaacgtgctggtatgtgacatgcctccggtgtgatgggagggyactgtcaggccgcccctgcaccctacagctcagctctaggtagatcccacaaacacagaggcgccctgaggcacctttgtggagccggtgtcttcctaag

SEQ ID NO: 416243 - DNA, 201 bp, Homo sapiens
ggtagggagactcaatgtcaaaatgtcagttcttctgaagttgatttatagattcaaagcaatcccaattaaaatcccagacagttattttgtggatatckacagatggattctaaagttatgtggagaggcagaggactcagaacaaccaacatgaagttgaagaacaaagttggaggactgacactacctgatttcaca

SEQ ID NO: 416244 - DNA, 201 bp, Homo sapiens
tattaaatagagagttgtttgttgaccgaattgttcactgtgacatgcattcttttttttttttttttgagacggagtctcattttatcacccaggctggygtgcagtggcgtgatctcggctcactgcaatctctgctgcccgggttcaagcagttctcctgcctcagcctcccaagtagctgagattacatgcgcctgc

SEQ ID NO: 416245 - DNA, 201 bp, Homo sapiens
ccgtcacccgagcactgtacccaaaatgtagtcttttatccctcaccctcctataaccttccccactgagttcccaaagtccattatatcactcttgtgcytttgcatcctgaggataaatatccccttttcttatggggatatttgttaaagggaaacagtgatctctttggaaaagtgaaacttttgaaaagcaacaat

SEQ ID NO: 416246 - DNA, 201 bp, Homo sapiens
atatcactcttgtgcttttgcatcctgaggataaatatccccttttcttatggggatatttgttaaagggaaacagtgatctctttggaaaagtgaaactkttgaaaagcaacaatagtggtttgtctatttttgtgtcaatagctcttgatttatgttgggattctgtgatccttttttttcctggcagaacttttataa

SEQ ID NO: 416247 - DNA, 201 bp, Homo sapiens
ctaaaagtacatgatacgctccattcaccctgaaccgacaaactctttagacagatacatgaataagtacgacaggaaggagtgcctatgtgaggtcatgycagggatcaggggaaggatagacaacttctggcctgggtgggcaggagaggctgtacaggaagaggcaggaaaacccacccaagagtcttagcttgaagt

SEQ ID NO: 416248 - DNA, 201 bp, Homo sapiens
tcggggaggccaagacgggaggatcacttgagcccaggagttcaagaccagtctgggcaacgtagtaagacctcatgtctaccaaaaaaaaaaaaaaaaaattgtgatgcaagaattttacactcagttgaacttgaaggcaacgaaaagtcgcagatgcaggaaccagaaagaatgccacacatacgtttcttgacttaa

SEQ ID NO: 416249 - DNA, 201 bp, Homo sapiens
aaaggcatttctccttcgcctgaggagagttattcagactcaaaaggttaaaagccactggagttttaacaaacagatcttggagactcttttgtttactygatttgttttttagaaactaaaacagaccaatttgtgtgggatcattggtttctgggcccactggaaggtaagaatagatttgtttcccaggaaaaagag

SEQ ID NO: 416250 - DNA, 201 bp, Homo sapiens
caggggaaggatagacaacttctggcctgggtgggcaggagaggctgtacaggaagaggcaggaaaacccacccaagagtcttagcttgaagtctgcgaayccctgaacatgaaacaaacttgtacgtaaccaacgtgcatgttgttggggagagattccatagctttcattagcttcccagaggggtccaagacctaata

SEQ ID NO: 416251 - DNA, 201 bp, Homo sapiens
gcattttttttggatgtgataaaagatagggagtctaattttgtttttttttcaagcaaatagccaattatacccatgctgtttattaaatcatttgtccygctaaattaaaatacataattatatgcattttggatattttcttatttgattccattgatttatttttttatttctgtgtcagtgctagattgctttggg

SEQ ID NO: 416252 - DNA, 201 bp, Homo sapiens
acaaagaagggttaaaaaggcaaaccttgtctgagtcagagaggagtgagctgccatccaaacagactgcgagcagggagagggaacagggtacagagagrgaaagacggagacttggcaaaggcatcacgagcatcagggaaaatggggtattccagggacaaatgattgcagattattcatgcatttgctttcttctga

SEQ ID NO: 416253 - DNA, 201 bp, Homo sapiens
aagtggtattctgggtagtgctgatcacattgcacagcctcttctgaagtttcatcgtccactttagagcaggatgaaaaacattttagtatttaatatcwtaaaacctataaatgcatttattaacagcaactgtaaaattcaaaagccgtatgttccctgatagtgcattctgtgtagtatgtgcaggaagagatgttg

SEQ ID NO: 416254 - DNA, 201 bp, Homo sapiens
agaaacacggaggcaggaggtgcacagtgtattgaagaaatggggaagatccgacttcttggctcaagaggaaggaattgcttctgtacagtagtggggargggggtcaggcagggaagcaggctggggtctggttatggaatgagctgaacactaaatcaactctcgagcctgggcagcatggtgaaaccctgtctctac

SEQ ID NO: 416255 - DNA, 201 bp, Homo sapiens
acttgcattttttttggatgtgataaaagatagggagtctaattttgtttttttttcaagcaaatagccaattatacccatgctgtttattaaatcatttktcctgctaaattaaaatacataattatatgcattttggatattttcttatttgattccattgatttatttttttatttctgtgtcagtgctagattgctt

SEQ ID NO: 416256 - DNA, 201 bp, Homo sapiens
cagggcttcctgtttgagttctgtccttccctcctatattctcttctttcccatttttttccaagcagtcagggattttccataaattcagctgaatagtkcaaagagggattcatttggtttttccttcaaatctctgatatcaattttaacctctcttgtgtagattatgacatgtgctagccaatatcaacttcttat

SEQ ID NO: 416257 - DNA, 201 bp, Homo sapiens
ttaaacaggacgggaattttgactcatgctacacacagcgtggatgaaccttgaggactttacactaagtaaataagtgagacacaaaaggacaaatattstatgatcccacctatatgaggcacctagagtagtcaaattctcagagacagtatagagtggtgagtgtcaggggctggagagggggaatggggagttagt

SEQ ID NO: 416258 - DNA, 201 bp, Homo sapiens
attcttctattctgtatatttagtctccgtgtatctgaaataaattttatttcaagtatattaattgtttttcctgctgcgtaacttaattctcttattgygtgtcgcagtttcttagtcaactgccttgcattgtgaggaatacaaccataatgtttgcaaattgtggtagttttacctcttcctattcatttttatact

SEQ ID NO: 416259 - DNA, 201 bp, Homo sapiens
cttccttttagggtgacaacaaaaaaatggaagatgctaaattctacctgaccctgcctggaaccaagatggagatggaagaaaaagagcttcaagcatcyaaaaacctggtcaccttcaccccaagcaaggatagcactaaagacagctttcagattgccaccctcatctgctccacaaagctcacccagaatggtagga

SEQ ID NO: 416260 - DNA, 201 bp, Homo sapiens
tgttgctaggtcaagagtagtgccagattgtttttcaaaaagtccagagcagctcacgttcacaccacatctggtgagaagcctgactgccgacctcccaygagggccaggtactgtaatctgcaggtagaaaatggcttgctgtgatctttcaaacatatagttaggaagttgagtagcttttataaatttattacttgc

SEQ ID NO: 416261 - DNA, 201 bp, Homo sapiens
ttttagtggaataaaatactcgctgggaagtggtttgccagtctaggaaatttactcttcgaagacaatgttgtgtttgtttctaaatgctttcagagatsctccttggcttacatcaaaccccagaacctgcttaaacgcccagcatcttcctctgtagtttgttcaattgaggaaatacattttgggccttacattgac

SEQ ID NO: 416262 - DNA, 201 bp, Homo sapiens
ttagtctccgtgtatctgaaataaattttatttcaagtatattaattgtttttcctgctgcgtaacttaattctcttattgtgtgtcgcagtttcttagtsaactgccttgcattgtgaggaatacaaccataatgtttgcaaattgtggtagttttacctcttcctattcatttttatactcctaatttgttccttttat

SEQ ID NO: 416263 - DNA, 201 bp, Homo sapiens
cacctaatggcatagtaacgctgatcatatcagctccccactgccagggctatgctgacccatgccaaccaagactcaccttcagggcctttgagagtgargaagtgtgctctgaatcttaccttttctcctgctgtcagccctgcgagttaagagagagcattgctttttgctaggggtttttgctgtttaggacactct

SEQ ID NO: 416264 - DNA, 201 bp, Homo sapiens
cgaccttgctttgtcgctggcattttggggggatgctgtgagtgctccttcatttggcatgatactcttgttttggagctggcatgtgtatatgtgtgtayatgtaacttttgtgtttaatacataatctaaaatacaaaatcaatgagtcaaatatatatacaatattttcttgatgttggggggctgaatatttgttgt

SEQ ID NO: 416265 - DNA, 201 bp, Homo sapiens
agacctcatccctggagcactttttctgttaatttcaatctggcatagtcgctctttatatctctgtccatggctatcatccgagacctcctgtcctcctsattttgggaccttccttttcctctctccattgttggattttgtctttccccttcttggtttacttatttgtttttctggattgcatcctgtagtaactct

SEQ ID NO: 416266 - DNA, 201 bp, Homo sapiens
ccctgaaagttttgtctttgttcttgccttccaactgatgctgagctcccacttctactgagattttagagtataaagtagatgctggaagatctcatttrgccaacaatatctggggatttccccacagttggctgctcttttgagatgcatctacctgaggaatatttttcttaacatcttagtttatgaatcattttg

SEQ ID NO: 416267 - DNA, 201 bp, Homo sapiens
aaagtaatttagaatactggcaaggggctttgaagccatggttactcaaacattagtctgtctaaatttttcttgtggccatagctgtcatgtagccatcwtgttagctgaaaatataaattaatttgtgttttctcctcatctaaatttcaagagacaaatcagtggggcttgaatgtaaggaatcaaatctcattgtac

SEQ ID NO: 416268 - DNA, 201 bp, Homo sapiens
aattgtcaattaacaattaacaaagatcaagtttgtatgaagtattatgtgaagctatatttgtacatggtcctgtttagtatccacaataatataacaargtacattctacttttatctacatttatacacaaagaaactaaggcatggagaggttaggcacttgcctgtggtcacaaggctagcatatgaccaggctgg

SEQ ID NO: 416269 - DNA, 201 bp, Homo sapiens
cctggcctcaagtgattctcctgcctcagcctcacaagtgctggaattacaggcatgaaccaccaagcccagctaagaggaactttttaaaggcaagaacytgacattgccacctccctgcttccaccttcccattgcagttgggatggcactgaagttcctggtcatgccctccaggccctgtgggatcagacctgccgc

SEQ ID NO: 416270 - DNA, 201 bp, Homo sapiens
cgtgtgaaattggcattttttaggtctaaatggccaaatatcagccatttcatatggttctgcataataactaacaattgtcaattaacaattaacaaagrtcaagtttgtatgaagtattatgtgaagctatatttgtacatggtcctgtttagtatccacaataatataacaaggtacattctacttttatctacattt

SEQ ID NO: 416271 - DNA, 201 bp, Homo sapiens
agctgtgaagacagatgaagctttgcttgctcctccgccgcttacctcctgctgtgtagcccagttcctaacaggccacagactggtatgggtttatggcytggggtttgaggtcccctgctctaagatgctactagatgctctataacaaaaagtgttgtatttcacaatcaaataggtataggaaaggctatatataca

SEQ ID NO: 416272 - DNA, 201 bp, Homo sapiens
gcttgtggttgacgtgatggatataatagactgccaagatggtacaaaaccaaacagaaattttcacactgtgcaaacagtttcctaacatttttttattyttggcctctcaccaagtgttctgggcctcttttcaacttcaatatgtgtattacacattccaaagtgcttttcagatcagtcatctcctttgagccccac

SEQ ID NO: 416273 - DNA, 201 bp, Homo sapiens
gatactttctctggaacctaatggaaattatgttttctcatcttgcgttttctctgtgacctggcccccatccctcttgaaaacacagggctaaggccggrcgtggtggctcacgcctgtaaccccagcactttgggaggccgaggtggatggatcacgaggtcaggagatcgagaccatcctggctaacacagtgaaacc

SEQ ID NO: 416274 - DNA, 201 bp, Homo sapiens
ggactgggtggcgtcaacaacgtttattttctcacaacaaaggacagggactggaaattcaacaccaaggtgacagcagggatggcttcttgtgaggcctstctccttggcttgcagatggccatcttctcccttcgtcttcacttggttgtccctctgtgcatgtctgtgtcttaatctctttgtatgaggacaccagtc

SEQ ID NO: 416275 - DNA, 201 bp, Homo sapiens
agtaatatttttcttcttctttggctacttggtaatcttgaaccagatgtcagtcatgaatttaatcctcttgggaggattctgcaatgcagaatgcaatkcaatgcaatgcagatgcaatgcaatgcagaacaaggctgagctagttattggaaaacgtattcaaggtttgcatttaagctttgttatgcaggaccaaca

SEQ ID NO: 416276 - DNA, 201 bp, Homo sapiens
gtttttgtactaggggaaagaggaaaatgaccgcagtatcgcaatacaattctgatgctcaccacttggagttagcactgactacccaggttcagggcacygtctccaacgagactgcccccgcttcagatgccatcttcaaatttgggggtccccagtccattcacagttctgggcaactgggtatacatctggggggct

SEQ ID NO: 416277 - DNA, 201 bp, Homo sapiens
tactgtgggtgaaatactatgaaatgctatcaaatagcatcacatgctatagagaaatatttcatgaaaggaattatcaattgatctggcaaacttaattrctgtcttattttaagaaattgccacagctgccccagtcttcagcaactgccaccctgatccatgagctgctatcaatatcaaagcaagacccttcaccag

SEQ ID NO: 416278 - DNA, 201 bp, Homo sapiens
gggggcttccactgccccctcaggtttaatagtctgctagaacaaccaatagtacacagtgaagtgctatatttaaccattccagtttcatcaggaagaaygtaaactggggccagccacatgaagggacccatagggaacagtctgggagaatctcaagcgtggggcttctgtgtcttccccctgtgaactcggggcacc

SEQ ID NO: 416279 - DNA, 201 bp, Homo sapiens
gattgactccaaatttgaaagaagttatactgtgggtgaaatactatgaaatgctatcaaatagcatcacatgctatagagaaatatttcatgaaaggaaktatcaattgatctggcaaacttaattactgtcttattttaagaaattgccacagctgccccagtcttcagcaactgccaccctgatccatgagctgctat

SEQ ID NO: 416280 - DNA, 201 bp, Homo sapiens
ctgggctccagtgatcctcctgtattggcctcccaaagtgccaagactacaggcatgagccactgtggggtttcattatacaggcaggattgaatgaatcrttaactacacaatgaacttgatctttagccttccttttgtccctgaagattgggctgatatcgcatggctcacagccctaaccttctagtcacatgatta

SEQ ID NO: 416281 - DNA, 201 bp, Homo sapiens
catatggtttgacgcaaagaagtaagtactcaatcaggttccttctcttgggaatttgaatgaggaaataccaatatgttttgccacaggggcaaaagctraaaggatgtcgtttgggagttgagttggtggcaacctgaagccatgtggaagccaatgttgtgaatggaaaccacaaggaaactgaaaaagctgattgat

SEQ ID NO: 416282 - DNA, 201 bp, Homo sapiens
ttagccttccttttgtccctgaagattgggctgatatcgcatggctcacagccctaaccttctagtcacatgattagtatttctggcatggcagcccccawcctgagactaggagaccaccatgagtcacctcattagcatagatttgggtatgatcctggggtgggggcaccaggaataacaaagacactcttattattt

SEQ ID NO: 416283 - DNA, 201 bp, Homo sapiens
tgaacggaccacgtatacgactgcatatacctttcctgggattctcaagtggtttgaagtcaaacagatttcaacagtgagtcatttgaaattggcatttrgaaaaaaactttctgtttccaaatataataacagcctttgttgaattccctctgcagttcacaccagcttggccagcctcctctggccaactttgttttt

SEQ ID NO: 416284 - DNA, 201 bp, Homo sapiens
gagattattctaattgagggagttgaggaagcttcagggaagtagttgaactttatagagatggacatcaggtttgggaaggctggggacctggcacagcrtgagccctggccctaacgcagttatttgtggcaagtggataatgaggaagttgtccattcttgctgaagcaaagggtgggtaaagtggaaaagagggaaa

SEQ ID NO: 416285 - DNA, 201 bp, Homo sapiens
gccctgcatggaaatacagtttgccaaattccacactatcggggaaacccacccccaatatttcaacataggttctttctattttccataagtgttggccrgctgagaaataaagagaaagagtacaaagagaggaattttacagctgggctgccgggggcgacatcacatatcggtaggaccgtgatgcccacctgagct

SEQ ID NO: 416286 - DNA, 201 bp, Homo sapiens
caggtgtggcggtgctcacctgtcattgcagctactagggaggctgaggtaggagaattgcttcagcccaggaggcggaggttgcagtgagccaagatcaygccactacactccagcctgggtaacagagcaagactctgtctcaaaaaaataaaagataattgaaaatggaatcacttcctttccccatgtgtttgtttt

SEQ ID NO: 416287 - DNA, 201 bp, Homo sapiens
acatacttcaaggggcaaaaagcagagcaaagatcacatgcttctgaggaaacaggacaaagggcaaaaggcagaaactcctgaaaagggtctatgttcascggtgcacgtatagtcttgataaacatcttaacagaaaacaaggtttgagagcagagaagcggtctgaccaaaaatttaccagagtggaatttcccaacc

SEQ ID NO: 416288 - DNA, 201 bp, Homo sapiens
agccctgttggtatgagactgtcaaggtgagaatgagtcatttgtaacccctgttatctgttaaacctcagttagattcctatcttctgtttacccccaarttattcctactttattttgaaatttttagataagttgcctatggtgtgcagtaagaaatgaatcagtaattataattctgtattaagagcatttatcatt

SEQ ID NO: 416289 - DNA, 201 bp, Homo sapiens
actccagcctgggtaacagagcaagactctgtctcaaaaaaataaaagataattgaaaatggaatcacttcctttccccatgtgtttgtttttgttcacakattggatgcagttgactttacttctagaaacattttcttctctagacttttgatcccatttctccacagttttcctcccatatccccaccctccatcctc

SEQ ID NO: 416290 - DNA, 201 bp, Homo sapiens
ggcaaaaagcagagcaaagatcacatgcttctgaggaaacaggacaaagggcaaaaggcagaaactcctgaaaagggtctatgttcagcggtgcacgtatwgtcttgataaacatcttaacagaaaacaaggtttgagagcagagaagcggtctgaccaaaaatttaccagagtggaatttcccaaccctagtaaacctga

SEQ ID NO: 416291 - DNA, 201 bp, Homo sapiens
tttccatctgcaaaacagagataatattttctattaccttctagattctcagagtgtgatgaattttcagttgttgaaaatttctgcaaatgaattaagcratgcctgttaggccacattaatggactaaaaactgctaggatctaaagttgacatgccattgaactttctgcctgaagacttactgaggaaactttgtct

SEQ ID NO: 416292 - DNA, 201 bp, Homo sapiens
ctttacttctagaaacattttcttctctagacttttgatcccatttctccacagttttcctcccatatccccaccctccatcctccctgccttccctccgytttgccacaactttaagtcttgccatagcctggctggcttttgtgtctcctttatctacctgataacaagtgatctcatcccccgccttggctctcattc

SEQ ID NO: 416293 - DNA, 201 bp, Homo sapiens
agtcaagcagccctgttggtatgagactgtcaaggtgagaatgagtcatttgtaacccctgttatctgttaaacctcagttagattcctatcttctgtttwcccccaaattattcctactttattttgaaatttttagataagttgcctatggtgtgcagtaagaaatgaatcagtaattataattctgtattaagagcat

SEQ ID NO: 416294 - DNA, 201 bp, Homo sapiens
caggaattatcgacttcatagtcgatacaacataatgagaccctgtctgtactttaactttttaatacaagaaattttttaaaattttaggggcatttagrtttttgggggatagtgcatggagtgaaactaacagaagtattgatcccaggattaggaagttgggtttgtatttcagtctctgttacaggagtgaccaag

SEQ ID NO: 416295 - DNA, 201 bp, Homo sapiens
actgtaagaaactttaaaaggatgagttattgtctctgggaaacacaggagttagtggcagagctgggagggtatctaagtatcctgaattccagtccagwgttcctccaactctggcagctttttcttttcttttcttttctttcttttgttgctgttgttgttgttgtttgatggagtcttgcactgtcacccaggatg

SEQ ID NO: 416296 - DNA, 201 bp, Homo sapiens
ttattactctttaccttgtgaagtcatataaggctctaagtcaagtaagacggaaggaataagattagcacacttcctggtacagtgggcagtacgtgatmgctatctgaaagtttgctcagtcgcagcctccctgacagtaccctagcctggcaatcaggtgcctttgtttgcagagtggggctgattaccaagtagtta

SEQ ID NO: 416297 - DNA, 201 bp, Homo sapiens
cgatgaggagggcaagctcttggaggtgcgcggcatggcccagaaatcctgctaccatcgcatccgtctttacaatcacgatagaattttggccgtatttyaattcttctttgcatcaggatgggtttgatttttcctgagaaaagaaatataaagcctgttaaatttgtgattagcagtgagcagtttcactaaggaagc

SEQ ID NO: 416298 - DNA, 201 bp, Homo sapiens
ttctccacagttttcctcccatatccccaccctccatcctccctgccttccctccgctttgccacaactttaagtcttgccatagcctggctggcttttgkgtctcctttatctacctgataacaagtgatctcatcccccgccttggctctcattcccattcatttgctgcagccttccacatggatagccccagacccc

SEQ ID NO: 416299 - DNA, 201 bp, Homo sapiens
cgatgtctgtgcacgatgaggagggcaagctcttggaggtgcgcggcatggcccagaaatcctgctaccatcgcatccgtctttacaatcacgatagaatyttggccgtatttcaattcttctttgcatcaggatgggtttgatttttcctgagaaaagaaatataaagcctgttaaatttgtgattagcagtgagcagtt

SEQ ID NO: 416300 - DNA, 201 bp, Homo sapiens
aaaattaactgtttaaaaagtgtaaatgtcacggtatagatctgttatccaaaactccaaaaggcagtgaaattggtaacagatattcctcctcatctttsgacccatacaacagcagaattgatgaaactggttcccaggcaagtatgtgccacttgctcccgtgcctcagggaggagaggatgttatgacacaggcgtt

SEQ ID NO: 416301 - DNA, 201 bp, Homo sapiens
atccccaccctccatcctccctgccttccctccgctttgccacaactttaagtcttgccatagcctggctggcttttgtgtctcctttatctacctgatamcaagtgatctcatcccccgccttggctctcattcccattcatttgctgcagccttccacatggatagccccagaccccttccctgtgcttcgggatcaca

SEQ ID NO: 416302 - DNA, 201 bp, Homo sapiens
gagtaagcaaggattttgttaagtgtacgttttctgtgttgtgaaactgcagatgagaagaaaacatgggactattccagaaaggggtgctgcctccgtaycccccacctctaccctggcctctgccccaaccaggtcctgggtggagtcacagccccaggacactcgtgccacacacacctttccatccagcctcccaaa

SEQ ID NO: 416303 - DNA, 201 bp, Homo sapiens
ctgataacaagtgatctcatcccccgccttggctctcattcccattcatttgctgcagccttccacatggatagccccagaccccttccctgtgcttcggratcacatacagctgttcactgggcgtctcccagtgtttttcttaacaggcagtccctgcttccagaacagaagtttggatcctctctaaccccagaaccg

SEQ ID NO: 416304 - DNA, 201 bp, Homo sapiens
aaaggctattaaaaatttttaagcatataaggagacttctgtgtcataaatattaactctgtgcttgagtacacccattctgtttcacccatggagttgartgattcaacagaaatggtcatagtagcaggaaacagactgcctaaaaaacttgtgttttattgatgggtcttagaaacccatgaaaacttcacttctctt

SEQ ID NO: 416305 - DNA, 201 bp, Homo sapiens
aggtgacagatgatcaggaaagatgggtcttggactgaggctgctccactccaaataaagaaaacaaaaacaaaaaacctggctgggcacagtggctcacrcttgtaatcccagtactttgtgaggatgaggctcgaggatcacttgagcccagtagtttggaaccagcccagacaacatagcgaggccccatctctacaa

SEQ ID NO: 416306 - DNA, 201 bp, Homo sapiens
cactgtagcctccacttcctgggctcaagcatcctcctacctcagccttccaagtagctgggactacagacatgtaccaccatgctcagctaacttttaarttttttgtagagatggagtctcactatattgcccaggctggtctcaacttctggccttaagtgatcctcccaccttggcctcccaaatccctggaacttt

SEQ ID NO: 416307 - DNA, 201 bp, Homo sapiens
ctacactctaacctgggtgacagagcaagactctctctcaaaaaaaaataaaattaaaaaatttctctcatctcatcagttctacttctcctatgagagaraaatgaagaaaaacttttcactcatacaattccttcctctgtcttctctttctataattgttcctcctttccattacttctccagaatactaaacacaga

SEQ ID NO: 416308 - DNA, 201 bp, Homo sapiens
ccagggccccaccctcatgacctcatctaaccttcattacatctcaagagctgcatctcctaataccatcacgatgggggttagggcttcacatatgaatytggaggagacacaaacatttactccataacaattcccttgacttgaatttcttgtttttttccctccaacacagaaggtggtaagagctttgtatttttg

SEQ ID NO: 416309 - DNA, 201 bp, Homo sapiens
gcagaaaattgaatttgtcgcacaaagcacttaaacctacaacccattgcaagaattgaaatcagatcagggataagtgatatcagaatctgggaaagccrgaggtgagggtggaggggaagaagctgaaagtctcaaagcaagcatcgttttcaccttggtggggtgaaatttcaggacaggattttacctgaatgccac

SEQ ID NO: 416310 - DNA, 201 bp, Homo sapiens
cgccaggaacccaagtgttggggatatggcagcgagagagagagagagagagagagaaaatgtgtgtgtgtgtgtgtgtgtgtgtgtgtgtgtgtgtgtgygtgtgtgcgcgcgcgcacgcacgcacgcgtgtgtctgattagctcatgggaaacaaggaggataagtcagtgtagttttccatttcactttgcaaagcct

SEQ ID NO: 416311 - DNA, 201 bp, Homo sapiens
tgtgaaaggtatttataaggcccttcaaatttgtggcttcctttctcatacttctcaggtataatgaaagggggagaaaaaccccaccatcaacacaaaasaaggctataaagactgtgcaccttttaacaagtcaatttgtagtcagtccctgggcctgtctttttttttttttttttttttttttaattttgaagctac

SEQ ID NO: 416312 - DNA, 201 bp, Homo sapiens
tggtgaataaaccattagcctcaggcttcgtctcctctctctgtttgaagacaataaagtatgatgtaattgtattattttgataaggtaatatttagtcscatgacatacaaaacactagtagcattacataaaacaaagtatttcaatagtgaaagagaacatttatatacaattatttctatagtctaacagtatcac

SEQ ID NO: 416313 - DNA, 201 bp, Homo sapiens
gtcagtgagatgagcctcagtttcaggaatgagaagaaattataaagaagagcagggatatctgaaggctgcagggagcagcattaccaaaggaggaacasaggtaccttttactttagcacaatctaggtgagaaagagggaagtagaaggaggctgtacatgtgattatttcatcaattctgcctgctcccagagagcc

SEQ ID NO: 416314 - DNA, 201 bp, Homo sapiens
aaagaagagcagggatatctgaaggctgcagggagcagcattaccaaaggaggaacagaggtaccttttactttagcacaatctaggtgagaaagagggawgtagaaggaggctgtacatgtgattatttcatcaattctgcctgctcccagagagccagccgaacagtggccttccctgggcttgctatgccaacagttg

SEQ ID NO: 416315 - DNA, 201 bp, Homo sapiens
tgtacatgtgattatttcatcaattctgcctgctcccagagagccagccgaacagtggccttccctgggcttgctatgccaacagttgccccaaaacattstcaatcattgtgaaacacgacagaaaccaggtttcatccactcactgccagcaacacacacaaaaaaataaagtaaaaaataaacagaagacaatgctgg

SEQ ID NO: 416316 - DNA, 201 bp, Homo sapiens
ctagctattgctttatttaaaatcaattttatttgcttacgatctaagattatatcctatcaaaatatctacttttaaaaaaaggtgttcattttaacctygtgatttatattttattaatattccatggacaatcagaaatctattttattaactcatatgatgtgagttctgtgtacaaatctattagattgagtgtgt

SEQ ID NO: 416317 - DNA, 201 bp, Homo sapiens
ttctgaaaaccagaattgcaggtaaccagtattccttctgcatgccaaagcaaaccccgggcccttaatcttcaaatgactggactattaatattaaaatkgtttctattatatagcctgggtaaagatttgttagtttctgaggtaaagcaacaacaacaacaacaaaaattgaaggacttttactttgaaacatgtcta

SEQ ID NO: 416318 - DNA, 201 bp, Homo sapiens
ctgccatgtgaagaccagatcatcctcctcaaaggctgctgcatggagatcatgtcccttcgcgctgctgtgcgctatgacccagaaagtgagactttaamcttgaatggggaaatggcagtgacacggggccagctgaaaaatgggggtcttggggtggtgtcagacgccatctttgacctgggcatgtctctgtcttct

SEQ ID NO: 416319 - DNA, 201 bp, Homo sapiens
ttagattcaccaggacctggatttggatgcagacctgcttcttctagctgtgtgtcttcagacaaatcattaaaccctgccaaatatctgtgaaatggagrtaaaaatctatcattaggtgattgggctagttaaatgacagcaggtgtataaaacgcctatctcagtactacagtagattatgaacaaaaatatactttt

SEQ ID NO: 416320 - DNA, 201 bp, Homo sapiens
cctaagggcatttgccttgaatacatggaaatcctcagcagcagaatttttctgacatgttaccttgatccctggaagacattgaccttcaactccctgawtttcagcagaatctttatgagttccagaagcattgccagtgctaagagtgaaattccagggactagacttcactgggtgatggcagtgtcttctcactca

SEQ ID NO: 416321 - DNA, 201 bp, Homo sapiens
tccaagttaatgatccctcagggtttgcaaaaggtaataataataggcactcacttacctgctcaggattccagcctgctcaggattcccttgttctggattttttttttttttttttatggtccatattcaaacttttgtcccttggagtccaatgcatattttcccccacttatgtttcagtctgacttcccaatatcc

SEQ ID NO: 416322 - DNA, 201 bp, Homo sapiens
ccaagttaatgatccctcagggtttgcaaaaggtaataataataggcactcacttacctgctcaggattccagcctgctcaggattcccttgttctggattttttttttttttttttatggtccatattcaaacttttgtcccttggagtccaatgcatattttcccccacttatgtttcagtctgacttcccaatatcct

SEQ ID NO: 416323 - DNA, 201 bp, Homo sapiens
atcatttggatgagttttagctgtactacatatgtgcgtatatcttcctaaacaatatattctaaaatttggcttgtctgtgggttttataaaaatggtascatgtcatatatatgttcctacaacttgcttttctcattcatatttgtatttctaagatgtattcatccagaatataaagctagaatttttccattttcc

SEQ ID NO: 416324 - DNA, 201 bp, Homo sapiens
attctgctgttcttaaaaattcctgcagaacgtttcaggctcttttctcttttatcttttcactgtattttcttcaaccaacactggggaatatttgcttrtaaaatgttaaaccaggggttctttattaattaatttgatgcatgaactaaaggaaaagacacattgtatgcatatattgatgtaatttcaaagccatat

SEQ ID NO: 416325 - DNA, 201 bp, Homo sapiens
gcatgcattgagaataccacttatcagtcttatgactgtgggcaagttatggaacctctctgagtctcagtttccttatctctaaaacaggaacagtcatrtctacaagcaggattgctgtgaggcttaaatgatataatctataggaaagtggttagcacagtgcatgggccactgtacgcaggaaactgtgtgtgacca

SEQ ID NO: 416326 - DNA, 201 bp, Homo sapiens
tcatgcctttataaagaaaacataaattacagaattgaacagttaatgtaagctttaggtctcatgtagattagtgcttatgaagtagaaaataatcatgmgcaaggaacagaataaaactcacttgcagacatcagcagcattttcaaccgtgtacttccttggcatgttttaaaaaccagcgggacctatgtgtcatgg

SEQ ID NO: 416327 - DNA, 201 bp, Homo sapiens
atttgaggaaaagaaggaggtctgtgagactagaatggagtgagtgaggaaaaacagccagagatgcaatcagggggaatggggaacttggtttttacccwgagtgtgacaggaaagcattgcagggtttggtgcccagggattaaatgaactgacatgtaatttggccaatagacattaatgtcagtaagacataaatat

SEQ ID NO: 416328 - DNA, 201 bp, Homo sapiens
aaaatctcaagtcctttgttgaacagatggagtttgcttttataaaaatatgcttgataaagtggcagcataatgtattaatctgaaaaataatacatctragcagacaagagctgagggaaatatatcatttttgaactatcatatattgtcatggaccttaattttttctggagggttattgaccaggcttctttagca

SEQ ID NO: 416329 - DNA, 201 bp, Homo sapiens
aatgtacatttagccaaacaacctgaatctgttataaatgtgcaaagaccaagttttatatttttatatgttttgtaataacctcatgacaggtacttaaygggttgtgtttatgttcagagaatgaacttttaggttgtcaagatgggaggtatacaagtctttttaataaagacccctagctaaaggctgcttctctag

SEQ ID NO: 416330 - DNA, 201 bp, Homo sapiens
caagttaatgatccctcagggtttgcaaaaggtaataataataggcactcacttacctgctcaggattccagcctgctcaggattcccttgttctggattttttttttttttttttatggtccatattcaaacttttgtcccttggagtccaatgcatattttcccccacttatgtttcagtctgacttcccaatatcctt

SEQ ID NO: 416331 - DNA, 201 bp, Homo sapiens
tcgaaagtctgcagccaagtagggaagggaaaaccatgggctcaaagaatgcaggacaaatgttaatcacagaaggttattcctattgcttttaagatacwgtatgttgttcctgactggcatttttgcatttgttctttgctgacatgaactggttcttttcagctgccatgtgaagaccagatcatcctcctcaaaggc

SEQ ID NO: 416332 - DNA, 201 bp, Homo sapiens
ttctggttctagatccttgaggaatcaccacactgtcttccacaatggttgaactaatttacactcccaccaacagtgtaaaagcattcctatttctccayatcctctacagcatctgttgtttcttgactttttaatgatcaccattctaactggtgtgagatggtatctcatttatgtggccaacaagcatatgaaaaa

SEQ ID NO: 416333 - DNA, 201 bp, Homo sapiens
ttctacaaaccactgcattagaagaacaattctactcaaatctgggaggtaatatttttattgtaatctgctgaagtattgtagcaatgttgggtcccacyctttcagtcagaacaaaatccagaaggatgtagaaaattcaggcaaccagttaatattaaggaccactgaggaaagaggaatatatggagaagagaaaaa

SEQ ID NO: 416334 - DNA, 201 bp, Homo sapiens
aggccaaggcaggctgatcacttgaggtcaggagttcgagaccagcctggccaacatggtgaaaccccctctctactaaaaatacaaaaattagccgggcrtggtggcaagtgcctgtaatcccagctactggggaggctgaggcaggagaattgcttgaacctgagaggcaggggttgcagtgagccgagatcgcaccat

SEQ ID NO: 416335 - DNA, 201 bp, Homo sapiens; identical to SEQ ID NO: 224808

SEQ ID NO: 416336 - DNA, 201 bp, Homo sapiens
gacagaatgaccttggaggaatacaaggttgcaatagcacaaattctttgtgcaatttatagagcgatggttgtacactcagtggtgccagggaataggcygataacaccagtgatgacaaaggttaggtaaaaggaaaaacaagtaaacaaagctggagaactctggttctctctaaaaggaagccatctcccactctaa

SEQ ID NO: 416337 - DNA, 201 bp, Homo sapiens; identical to SEQ ID NO: 224809

SEQ ID NO: 416338 - DNA, 201 bp, Homo sapiens; identical to SEQ ID NO: 224811

SEQ ID NO: 416339 - DNA, 201 bp, Homo sapiens
taagagtgtctagtttccttccttctctctcccttcttccctctgtttacttcccggctaactcccctcctttcttccttctccccttcctccttcttccytcctttccttccttcctcattaattcttaaaatgttcatttgaatgcttagatgctagattgtctcatttctgcctctatgattattgcttataaatcaa

SEQ ID NO: 416340 - DNA, 201 bp, Homo sapiens
atatttttcaaaacatgattattcaatgactgtataatattgcacttttggatgtacgtctatggttgaatgtttatgcttctgcctagaatgaatgatayggccttgaatagttttgcattacatcttttttcaccttcttaattgtttctattggacagttcctaggagaggcaatcaaagggcatggacgtttttatg

SEQ ID NO: 416341 - DNA, 201 bp, Homo sapiens
tgagaataacaacactgtccaatgtgtcaatgttcagtgcttagcttaatgccaggcacatagtaggtactcaataatattttgtttattgacagcaggargacaatgcatgttgtaggagaggaaaaagattaattccttccagtcacatgaagactgaagcttagtatatggatttaatttttcatattatctttggac

SEQ ID NO: 416342 - DNA, 201 bp, Homo sapiens
aaatctataactgaatttctttgtacctatctttaaacaaatagaacttcctttaaatgctgagggctttccaatatattaaaaacaaacaaacaaacttytagtctctgatatgggaaataacttgtaggagttaagcttttttccttaaaaaaaaaaaaaaaaaaaaaaaaaggtaagcagagctaattcccactttgt

SEQ ID NO: 416343 - DNA, 201 bp, Homo sapiens
ggtaatcaggaagttgaaatgtcaaaaggacaagactttatagagagtagaaggtgggagcagaagagtgaaaaaaaaattctttctcagcaacccctgtrttcttcctagaagtcaccctttacagaaggcaccctttacaaagctggcttcttctcataccccaaccacaatcatcatcacaccaacctccactatgat

SEQ ID NO: 416344 - DNA, 201 bp, Homo sapiens
gaggaaggagagtggtccctaccttttgaagaccttctaatttgtggcgatgggcaggggagtgcaccaatactataaagcagtagttctcacactcaagygtgcatcagaaacataggacccgaaccccaccttcagagtttataactcattaggtctgggatagaggcggtgcatctgcattgccatcttgttcccaag

SEQ ID NO: 416345 - DNA, 201 bp, Homo sapiens
taactgaatttctttgtacctatctttaaacaaatagaacttcctttaaatgctgagggctttccaatatattaaaaacaaacaaacaaacttctagtctytgatatgggaaataacttgtaggagttaagcttttttccttaaaaaaaaaaaaaaaaaaaaaaaaaggtaagcagagctaattcccactttgtagtgctt

SEQ ID NO: 416346 - DNA, 201 bp, Homo sapiens
actctgtctcaaaaaaaaaaaaaaaagaaaagaaaaaagaaaaagaagaaaagaaaaaagatgaaagataatatgtataaagcccccaacatagtgcctgrcacttaggagagactaaacaatgataactgttcttagaatataaacacacctcttagccttgtgcccacctcctccagtttttgccaccctttctgacct

SEQ ID NO: 416347 - DNA, 201 bp, Homo sapiens
agaatgctgggattatagacgtgagccaccgtgcccagcaccttacttctgtgacatgatcttgtagttattattccttagttttctgtttttgtttttgttttttttttttttttgagacggagtttcactcttgttgcccaggctggagtacaatggcacgatctcggctcaccgcaacctctgcctcccaggttcaag

SEQ ID NO: 416348 - DNA, 201 bp, Homo sapiens
gaatgctgggattatagacgtgagccaccgtgcccagcaccttacttctgtgacatgatcttgtagttattattccttagttttctgtttttgtttttgttttttttttttttttgagacggagtttcactcttgttgcccaggctggagtacaatggcacgatctcggctcaccgcaacctctgcctcccaggttcaagc

SEQ ID NO: 416349 - DNA, 201 bp, Homo sapiens
ccttgcagcacctgaaaataaattctgtcgagactgatgctccatcctcgaatttttgataaatctttatggaagagttattggatgctcatggagcaggygtgggtctgcagtgggggcacgaaggaagcatcaggaggccaagttagcttctcagctagtggctctgtgaccttgggcaagccatttaattttccattt

SEQ ID NO: 416350 - DNA, 201 bp, Homo sapiens
tgggattatagacgtgagccaccgtgcccagcaccttacttctgtgacatgatcttgtagttattattccttagttttctgtttttgtttttgtttttttwttttttttgagacggagtttcactcttgttgcccaggctggagtacaatggcacgatctcggctcaccgcaacctctgcctcccaggttcaagcaattct

SEQ ID NO: 416351 - DNA, 201 bp, Homo sapiens
gtttcactcttgttgcccaggctggagtacaatggcacgatctcggctcaccgcaacctctgcctcccaggttcaagcaattctcctgcgtcagcctcccragtagctgggattacaggcatgcgccactacacctggctacttttgtattttttagtagagaagggtttctccatgttggtcaggctggtctcgagctcc

SEQ ID NO: 416352 - DNA, 201 bp, Homo sapiens
ccatggaaactgtgaaataacttttggtcttttaagctgttaatttggtaggaatttgtcatgcagcaatagataactaatttagtcatttagtctcttgyattctcttatctcagatcacctgtttccctcagtacaatttgtattccatgtgtccctatccagagctcagtcatcatccctttcaccccctcagacttg

SEQ ID NO: 416353 - DNA, 201 bp, Homo sapiens
gataggcgtcatctcatatctagcaacagtgttctaggggcttttcaggttagaaaaacatgaagatcagttggtgtccatctctttttctctttttaacygctctatgtttctgcttctttattcttctctctagatgtctttcttgtaatgggcacctggctgacccatataaggtggcatgtgggaatgcaggtggag

SEQ ID NO: 416354 - DNA, 201 bp, Homo sapiens
tattgctgcaaatgagaggatttcatgtttttggctgaataatatttcattatatatatatatacatttcgttatatatatacatttcattatatataatataataatatttcattatatgtatgtgtatatatatacacacacacattttaatgatatatatatgatatatatatacacatttttatgataatggagaaa

SEQ ID NO: 416355 - DNA, 201 bp, Homo sapiens
attgctgcaaatgagaggatttcatgtttttggctgaataatatttcattatatatatatatacatttcgttatatatatacatttcattatatataatataataatatttcattatatgtatgtgtatatatatacacacacacattttaatgatatatatatgatatatatatacacatttttatgataatggagaaaa

SEQ ID NO: 416356 - DNA, 201 bp, Homo sapiens
ttgagcatgtcatttaatttcctgagacattggactctcctgtctgtaaaatggggatggttagagaagcatggaaaaacctggagacctttggctagaaratattatgtgaatgggattgactgaaatgagctgttgatctccgactcatccctatgtaaaggaacagccctggattacttcagggccaccttctctagt

SEQ ID NO: 416357 - DNA, 201 bp, Homo sapiens
aaaagtgaattattttactaagaataaaaagaaatatcagcaacagcaaattaagctcagtttcaaccatagaccctggttgaattatttcccttcctgamggcaaaacacttacagagactgcctgaaaatctgaaatgaaaagtatagctttgccattcaacagtcatttgctaaagtctgttatgtggggcatgagtc

SEQ ID NO: 416358 - DNA, 201 bp, Homo sapiens
ttgaatactgagacaggcaagtattaggttggtgcaaaaacaaaagcaattagaagtaatggcaaaaactgcaattgcttttgcatcaacctaatagcaaygatcccactcaaagaggtgccaccaaagggtgagcctcccaagcaggcctcctccacactgcagcagggctgcctttctcacactggatcactgcttaaa

SEQ ID NO: 416359 - DNA, 201 bp, Homo sapiens
ctatttggcccaaaaatcctaaaatatttattatctagctctgttcagataaaatttgccaacacttgatttagatgtggacatcagatattataggtctrtagagaatagccatataaattatctaaatttctttttttactatgaagcatgtattttcctatagatcttaaaaagatctatttcatattctataaccta

SEQ ID NO: 416360 - DNA, 201 bp, Homo sapiens
ttgctgcaaatgagaggatttcatgtttttggctgaataatatttcattatatatatatatacatttcgttatatatatacatttcattatatataatataataatatttcattatatgtatgtgtatatatatacacacacacattttaatgatatatatatgatatatatatacacatttttatgataatggagaaaag

SEQ ID NO: 416361 - DNA, 201 bp, Homo sapiens
ctttcagatgagttacctaaaagttcatacgtcaaccaattgtacaatgtgaataccaattattatacactaactggcaatattttggggaaatgatttarcaactgctaaaaacaatactacttagcatagccatacacaatagatgtttaaacttgtccttgagtctccaagtatgataatggcttaactcagaaggct

SEQ ID NO: 416362 - DNA, 201 bp, Homo sapiens
attccctgcaacgaactcacaattatttattctcctctttccagccaaacttctgaaagtttggcttcccagtctttggctgggaagaggagaataaatgwgcaccatttctgtgtccttatctcccatttactcttcaactccatctgtctggcttcaggccccttccactaaccaagtaatactcattaaggcctctga

SEQ ID NO: 416363 - DNA, 201 bp, Homo sapiens
gtttttggctgaataatatttcattatatatatatatacatttcgttatatatatacatttcattatatataatataataatatttcattatatgtatgtrtatatatatacacacacacattttaatgatatatatatgatatatatatacacatttttatgataatggagaaaagtgccaggtccatgcacatttgatt

SEQ ID NO: 416364 - DNA, 201 bp, Homo sapiens
tggggaaatgatttagcaactgctaaaaacaatactacttagcatagccatacacaatagatgtttaaacttgtccttgagtctccaagtatgataatggyttaactcagaaggctgtctacaagagcatggaaaggaggttattaaaaaaaaaaaaaagtagaagactgcagggagatttcccacacttctttcttctct

SEQ ID NO: 416365 - DNA, 201 bp, Homo sapiens
atatatatatatacatttcgttatatatatacatttcattatatataatataataatatttcattatatgtatgtgtatatatatacacacacacattttwatgatatatatatgatatatatatacacatttttatgataatggagaaaagtgccaggtccatgcacatttgattgatgcagggactggatgatctcttt

SEQ ID NO: 416366 - DNA, 201 bp, Homo sapiens
ctgagccctttagaagcagaagaagaagaggaaaaaccctgatagcaatcaacagaatccaaagtattgagtgttttattaaatgcctgtaaggctgggasacttgtgttgactcctacacatttaagtgcaatcttcttcaatgattaccttggaagatgcatatttattttagtgacactgttcttactctaaatattt

SEQ ID NO: 416367 - DNA, 201 bp, Homo sapiens
tctcacctacagcagctcagaacttggtgcctctcactcaaaatgctgctggacaggtgaacaaagatgggacaaagggcttgtggtagagacccttgacsagctaatcagaggcaagaatgcattttcctagcagtgaatactcatcctctccatcaggtgccaatttggcagcttacactatgctatatcaacttcatt

SEQ ID NO: 416368 - DNA, 201 bp, Homo sapiens
ctgtatgaaagagacagttaggccagcagctctcaactgctatcattgtctgtcctgacctcactatttaaatactgtactcccagtgcactttgctgctkcttattccatgtgacatttatttgtttaattgcctgtgtcatctccctctagaccaaaagctcagtgagggcagagattttttttcctgtgtttgttcaa

SEQ ID NO: 416369 - DNA, 201 bp, Homo sapiens
caagtgacagaaacctaagtcaaaccagcttattgtaaaaagggtaatattttactgagggcatccaaggaagggctgaatagccaaatccctggaggagyagaagaggatacagctgggcctcaggaagagccgagagacaccacagctttctccttccacttcaggctgtctgtgaatgtcagatggatcctctctctc

SEQ ID NO: 416370 - DNA, 201 bp, Homo sapiens
ctttatggaatttttttaaatgaacatatgttattttcattggcagtcttataaactttatttgacagccagtggttagatctcacccacactgactgtaraattttaaggtgatgactggtacgcaggtaaccagtgcatgagtttgtttggtgaatcttcattctgactgcattttctggacaactgcacatggttaca

SEQ ID NO: 416371 - DNA, 201 bp, Homo sapiens
atattctatactaattgacagaaagaatcaatattttagaaatataaatctccccaaagtaatccaacaatttaatgcaactgaaataaaaattactgggygattcgttcagtaatgtgacaaaatactttaaaaattcatgtggaagaaaaaaaagcaaaatagtcaatgaattattaaagtaatcaatgttccaaaaag

SEQ ID NO: 416372 - DNA, 201 bp, Homo sapiens
aaaacccttccctgaccagagagaaacagggcatgttttaatgaatgacacacagatgctaggtgtcaatccttcattagcgtagccacccctttctaacycaacaactccttgacccttcctcctcactgacctacaaagcccttcgctgtttttgtttccttcctggcaaataaagaaactcagcttgctttactttta

SEQ ID NO: 416373 - DNA, 201 bp, Homo sapiens
ttcccttcccctagtgctgaactgttgaagcagttaaaggaccatcgactttgaagggccgtggtacacagaccctcactggatctaactgaaaacccttmcctgaccagagagaaacagggcatgttttaatgaatgacacacagatgctaggtgtcaatccttcattagcgtagccacccctttctaactcaacaactc

SEQ ID NO: 416374 - DNA, 201 bp, Homo sapiens
ccaaataagcccaagtagaaatgacctttccttctctcatggccccagtctactctgaagagacaggtaaggtgaaacctgtatatatttttgcatttatytggtgcaattctctccctatgttagtttagaagctgcttgtggacaggccacagtgttgtctttaaacaaaacctagggcattgcctaaacagagtagcc

SEQ ID NO: 416375 - DNA, 201 bp, Homo sapiens
gcagagtagtccatgggccttaggagcacaaggatgagaacaaagggttaaatcataacctggggataggtctatttgaaagaagggcctaaaggtctggrgtcacctccactcaaaatcctccccaaataagcccaagtagaaatgacctttccttctctcatggccccagtctactctgaagagacaggtaaggtgaaa

SEQ ID NO: 416376 - DNA, 201 bp, Homo sapiens
gaagctcattccttgcagagtagtccatgggccttaggagcacaaggatgagaacaaagggttaaatcataacctggggataggtctatttgaaagaaggkcctaaaggtctggggtcacctccactcaaaatcctccccaaataagcccaagtagaaatgacctttccttctctcatggccccagtctactctgaagaga

SEQ ID NO: 416377 - DNA, 201 bp, Homo sapiens
gctttaaaaacccacattgggtcttatcacacccctgcttaaaacctgcgtaatgtaaaggcaccacccagtttttctgtatgaagctcattccttgcagrgtagtccatgggccttaggagcacaaggatgagaacaaagggttaaatcataacctggggataggtctatttgaaagaagggcctaaaggtctggggtca

SEQ ID NO: 416378 - DNA, 201 bp, Homo sapiens
attcttcacatcaacattgtgaagtactttcacaccaacactgtgaggtcctataacctataacgcttccatagcaattcttgaatgtagtaatagcagayttcctttagaaacagccaacaatttaacttttcactattttggagatgtctctcctcccttgtccgaatattccaaatttacaagtctcatggcatcagc

SEQ ID NO: 416379 - DNA, 201 bp, Homo sapiens
ggtgtaattaattacagtctcttcagtgccttcaaacacatcttgtatccctcttgttcagctcttctgcccctgagttacaggttggttcttcacctaasccttgcaggagtgggctccatgagtaattcatcttgaatgatctaaagcctgagttggtgtctgatgggattaatggggcagccctagacagatccttgg

SEQ ID NO: 416380 - DNA, 201 bp, Homo sapiens
aaggaccatcttgggattcccctcctcagtacagagcattttaccaacacccaccatgtaggacaggagaccaggaaaggaggccccgggacacctgcctkccctgggggattgttagaagctttactggaattacattgaaaactctagagctcactgaaggaaaattgtactaaatactactaaatactaaataatacc

SEQ ID NO: 416381 - DNA, 201 bp, Homo sapiens
ggctgtctgtgaatgtcagatggatcctctctctcaccttcaaatggactttttccaggtggctgagagatatggtctcagtgttagagttttaacttctrataaattctgtccctagagaggaactagataatatctctttctctctccctcaatccctccctttctttcaccctgaaaaatcatcttactagtccagct

SEQ ID NO: 416382 - DNA, 201 bp, Homo sapiens
ctgacctcactatttaaatactgtactcccagtgcactttgctgcttcttattccatgtgacatttatttgtttaattgcctgtgtcatctccctctagaycaaaagctcagtgagggcagagattttttttcctgtgtttgttcaatgctgtatctccattgtctggggtatggctggcacttgatgcctatctgttgaa

SEQ ID NO: 416383 - DNA, 201 bp, Homo sapiens
catctagtcacgtttgctcaatgctaggtgagaagatggatatgtccttctctgaaggccttcccagttttaatggtcttgggctagggtatgtaataacrtcacactcatgggtctgaccttttaaaatgaaccaagagaattgctaatgaaggttccccaacccacagcccccaacccagtcagtcatggcttttctgg

SEQ ID NO: 416384 - DNA, 201 bp, Homo sapiens
gtcctccttttaaatttacaggcattttccaattgctttggtcctcagcataatcctgagagggcaggaattgtgatttatctttacaaatgaggcttgargagttaaaggaacttgtccatgatccccaaactactaaactgagacccaaagccatctggaatgacgcccagtccaggagcctttcctccatacctggga

SEQ ID NO: 416385 - DNA, 201 bp, Homo sapiens
ctccccacagcaaggttaaatgaacatgcaaagtaaccttgaaagggaaaaattttttttcacaaaaattcagccttgcaagaggaaaatggcagggcagstgaaggagaagcaatttcacctccttttaatctttgtaatgacagcatctggggaggtgggctctgtattgttcttgagtctttaaatgacctcaggtaa

SEQ ID NO: 416386 - DNA, 201 bp, Homo sapiens
gttcttaactgattcctatcatgagaaattcaaccattatttattcacttcattgggtcctagatttaatattaaaatgcaaagggctcggggaaggatarctggggctgcactcaggatgctatagacttgggaacaaatttatttctgtgtccaaactttcttactccccacagcaaggttaaatgaacatgcaaagta

SEQ ID NO: 416387 - DNA, 201 bp, Homo sapiens
ctccaagaggtgacccactcagattaatacctgggatacggtacagacagagctttcactagttttccacatttttactaactcagagttttatgttcctytttaggctcatgcccagtctaactacgctagcttttcatattttttctcttactgattttttgatactacattcccaaatagggttagttttactgaata

SEQ ID NO: 416388 - DNA, 201 bp, Homo sapiens
caatgatttggcctggatattgactaacataaagagtagggggaactctagaatgagattgttgaactggagttgagagagtgggtggagtggaagtaaargtgaattattttactaagaataaaaagaaatatcagcaacagcaaattaagctcagtttcaaccatagaccctggttgaattatttcccttcctgaaggc

SEQ ID NO: 416389 - DNA, 201 bp, Homo sapiens
caccttgggtaccacagcaaccccacagaaatacagtgggatgtttttaatttttgagggaaacccagaaacaactgtcagacaccatgcaaatccacctrtcaagctgtttggacctcataacttcataaacagggcatttaagtatttcttttgacctagggtcaccgtaaaaaatattactgaaacactaagagtgac

SEQ ID NO: 416390 - DNA, 201 bp, Homo sapiens
ctaataaattctgtccctagagaggaactagataatatctctttctctctccctcaatccctccctttctttcaccctgaaaaatcatcttactagtccasctcaagtcttaagccagttttgccagaggtggggcacagtccaagccaagttcctccacctctttagaatattcaggagtggtagcatgtgaaaacatgg

SEQ ID NO: 416391 - DNA, 201 bp, Homo sapiens
tctatgacttgaaagtgcacatgaatcacctgggggtcttgtccaaatgcagattctgactgaggggatgcccaaattttctatttctcacaagctctcargcaatgtcgagactgctggcccacagaccacaccttgagaagcaagatctagattagagatgctaatacatcttagccactcttgggataaacagcaaat

SEQ ID NO: 416392 - DNA, 201 bp, Homo sapiens
ttctcacaagctctcaggcaatgtcgagactgctggcccacagaccacaccttgagaagcaagatctagattagagatgctaatacatcttagccactctygggataaacagcaaatctgtgagctggtagctttcttaaaaatctgagatggaaaaatgtgcgcttgataaaaaatttatttttaaaacatgtttataga

SEQ ID NO: 416393 - DNA, 201 bp, Homo sapiens
gtttaattgcctgtgtcatctccctctagaccaaaagctcagtgagggcagagattttttttcctgtgtttgttcaatgctgtatctccattgtctggggyatggctggcacttgatgcctatctgttgaatgaattaatgtctagcccctgtaagcagtaaagtttgcaacctttgctctagagttgcactttgtagaaa

SEQ ID NO: 416394 - DNA, 201 bp, Homo sapiens
taaagtttgcaacctttgctctagagttgcactttgtagaaaagaagactaaatggttacctttctatagatatacaacaatctataccatatatactttycattttcctttttatattatttattttatgcctctattatgttattgcatttcatctccacagcaattttgtaaaacgtacattatctctgagtgttacc

SEQ ID NO: 416395 - DNA, 201 bp, Homo sapiens
gatccagaatctaaaatgtatggaaaggtctgcaataaacctcatcccttaaccatccaggtcccctcctcataggcagtgttgttagtttctttgtgtcyatccacagatactctttggatacccttttatattcttctttctctttgtatatatggatgtcacataccgtgtacactgctatgcactttgcttttctca

SEQ ID NO: 416396 - DNA, 201 bp, Homo sapiens
tgttatagccatggttcccaaaatctgtaccagagcaccttgggtaccacagcaaccccacagaaatacagtgggatgtttttaatttttgagggaaaccyagaaacaactgtcagacaccatgcaaatccacctgtcaagctgtttggacctcataacttcataaacagggcatttaagtatttcttttgacctagggtc

SEQ ID NO: 416397 - DNA, 201 bp, Homo sapiens
tctcatatcctccacaccaagtggtaagccaggccgactcacttggctgtatgaaactttttaatggcacctttaggtcaaatgttgtggccatggtctcmcaaagagtgaggggtgaaaggagatactgcaaatcacacttctagacttttcactgattttcaaagctgttatagccatggttcccaaaatctgtaccag

SEQ ID NO: 416398 - DNA, 201 bp, Homo sapiens
tgtgggccctggaaagtatatccagatcacctaggaacttgttagaaatgcagactctcaggcaccccaaactaactgaatcagaaactctgggaatggarcccagcaattggttttaacaaacccttcacatgctcaccaaagtttgaaagacactagtttagcttatgctataggtagctccttgctacctgtaagtca

SEQ ID NO: 416399 - DNA, 201 bp, Homo sapiens
ccctcagtgggcacagtccaccaacacagctggacgtgttggccagagtaagctgccgttcactggaaatattctagagaaggctgaccgtgtgctggtcrggatggaaaggtgggggtgcctgccatgtgttgagtgagtacagcctaccaggatggcaccttagttcctccaacatgttcttaaatggatcaggctggt

SEQ ID NO: 416400 - DNA, 201 bp, Homo sapiens
cccgttatatatttaaatctggtttccaggtggtgagttttcagacctaggacagcatttaaaatataattgtgtgaggaatttgagttggtatcatagtyacagggacatttttggacatagtatttcagaaagctaacatggattttattgaattcacaggtgatttcttacatttcagtgaagacatctctatcctgt

SEQ ID NO: 416401 - DNA, 201 bp, Homo sapiens
aggcctggagacggtgagcaaagctcctcagatgattctgccgtgaaaacccctccttgagaactgagaatgctttttctgcatcctgtgtggttgtgccycatacttacaagtaagcagagtgcaaagccaatcttttggaaaatacaaaatcaaagtgcccaatgggtacactccccttcccattgtgtctcattgccg

SEQ ID NO: 416402 - DNA, 201 bp, Homo sapiens
tgccgcctcagagctttttctagagcctcggtcctcaatgacgcgcttgacctgttgatgcctcagcccagcgaagcccctcacctgtgccccgggcgacrgctcttcagtgtgcagtgcaggcctggggtggactgccaggccttcgctctgtgccagcaacgccgttcttgttgctcctccatgaacaggggtacaagc

SEQ ID NO: 416403 - DNA, 201 bp, Homo sapiens
cattattgggcccaggcctggagacggtgagcaaagctcctcagatgattctgccgtgaaaacccctccttgagaactgagaatgctttttctgcatcctktgtggttgtgccccatacttacaagtaagcagagtgcaaagccaatcttttggaaaatacaaaatcaaagtgcccaatgggtacactccccttcccattg

SEQ ID NO: 416404 - DNA, 201 bp, Homo sapiens
tgtaatatattagggcagaagagaaggataaggctagaacctcaagaagaaggtatgtgattcactcaacaaacagtgtttaagaataatagtgacagtgkgccaggcattgtgcaaggagcagctgagaaaaaaataaggtttaactgtccttgcccaagccaaatggctcaaagtgagcaccgtctaatatttcaaaat

SEQ ID NO: 416405 - DNA, 201 bp, Homo sapiens
caggagacccctggatactacttcagaggctactttagggcctctaaacctaagtggctctcaatcttggctgggcatcagaatcacccacgctgctttasaaactgaggcctgagctacagacactaattggcctggagtgcacctgggcactgggattttttttttttttttttttttttttcaaaggtgcgcaggtga

SEQ ID NO: 416406 - DNA, 201 bp, Homo sapiens
tcctatgaatccaatagaccaaaggcccacaaactttttctgtaaagggcaaatagttaatacttttgattttgcaggtgccacagtctattttgctactrctaaactctgtccttgtaattcaaaagcggccatagacagtctgtaaacaaacagtcatgactgtgttacagtaaaactttatttgtgaaaataggaagt

SEQ ID NO: 416407 - DNA, 201 bp, Homo sapiens
agggaataggccgataacaccagtgatgacaaaggttaggtaaaaggaaaaacaagtaaacaaagctggagaactctggttctctctaaaaggaagccatytcccactctaagcaatcactgacaagaaggaatgaagccccatgtgtccagagatttcaaatttgcaagagaagttggaaattcggattttaaatgaaat

SEQ ID NO: 416408 - DNA, 201 bp, Homo sapiens
gaatcacatatcttcttatttcacatcaacaggcaccaaaacgcacccactcccacatctattccactgccaactaggtcaaattctccgccactaaaatygcactccttctacgtcataaaccaacacattcaaccttagctacagcctcaatgtttctgttgggatgaatggcaatctcagtcaggaggagtgatggcc

SEQ ID NO: 416409 - DNA, 201 bp, Homo sapiens
atatattaaaaacaaacaaacaaacttctagtctctgatatgggaaataacttgtaggagttaagcttttttccttaaaaaaaaaaaaaaaaaaaaaaaaaggtaagcagagctaattcccactttgtagtgctttgttgtgaaaaacttggaccaaagtggctgttaattctacttttcaaagctgaattctttctgacc

SEQ ID NO: 416410 - DNA, 201 bp, Homo sapiens
ttgctgtggggattagttctaggtacagtgcagttcatctagggagagtgaccattcattccagctcctctggatcaggggctggcaatttttattgttgytgtaaagggccagtgaataaatatttctggctttgcagcccatacagtgtctgtcataattactcaattctgccattgtagcatgaaaagccatagacta

SEQ ID NO: 416411 - DNA, 201 bp, Homo sapiens
gtagctgggattacaggtgcgtgccaccacgcccagctaatttttgtatttttagtagacggggtttcaccatgttggccagaatggtctcgatctcttgmcctcgtgatctgcccacctcggcctcccaaagtactgagattacaggcgtgagccactgcgcctggccgagagatgtatttttgaagattcaggaaataa

SEQ ID NO: 416412 - DNA, 201 bp, Homo sapiens
ccagtgaatagaaagccctctggcaagggactctgggaaatagccacatcccagccccagcatcacagaatagagcaaagaagggtggatctggagctgasgggcaacaggtaacaaactagcacccagcttttgggtcaaaaactcagtagttttataaatggcagctaaccagctttattcattgtactattccaaacc

SEQ ID NO: 416413 - DNA, 201 bp, Homo sapiens
atttaagtcagcaagtatctattctataaatgtttattgagtgcccactctgtctaggccatggtgctggtatggaaggaatgccagcaaaaaaaaaaaaaggcctgtaaccccaatccacatgaagtttactatctagtgtgtcattaagtcatttccagtataatctccaaaaataattgagggtgaaaagccaaaatt

SEQ ID NO: 416414 - DNA, 201 bp, Homo sapiens
taagaaatcatttcacactgagaaatatcaataccatgcccttttcaaaaactgcaaccgtacaaccagtgcatgaagtaaatcaagttctcagtaggcarcagtggcacttagtgagtgttccactgccttctttcttgaaaccccatgaaaggaacacacttcacatgccagctcttctcttggtgtgtaacaaaatga

SEQ ID NO: 416415 - DNA, 201 bp, Homo sapiens
cacctacggttctggggccctctgctgtaaggaggactgccctcttgtggacttttaggatattgctactaaaagcacaaagtctagttttttttttttttgcaacaagattgctgttttagggggttctctaagtgtcaaatatttgaaacattgattttcaggtttattctttttttgattaattgaagtttttaatct

SEQ ID NO: 416416 - DNA, 201 bp, Homo sapiens
ccacctacggttctggggccctctgctgtaaggaggactgccctcttgtggacttttaggatattgctactaaaagcacaaagtctagttttttttttttttgcaacaagattgctgttttagggggttctctaagtgtcaaatatttgaaacattgattttcaggtttattctttttttgattaattgaagtttttaatc

SEQ ID NO: 416417 - DNA, 201 bp, Homo sapiens
ccttccacccacctacggttctggggccctctgctgtaaggaggactgccctcttgtggacttttaggatattgctactaaaagcacaaagtctagttttwtttttttttgcaacaagattgctgttttagggggttctctaagtgtcaaatatttgaaacattgattttcaggtttattctttttttgattaattgaagt

SEQ ID NO: 416418 - DNA, 201 bp, Homo sapiens
tggcatttttgcatttgttctttgctgacatgaactggttcttttcagctgccatgtgaagaccagatcatcctcctcaaaggctgctgcatggagatcaygtcccttcgcgctgctgtgcgctatgacccagaaagtgagactttaaccttgaatggggaaatggcagtgacacggggccagctgaaaaatgggggtctt

SEQ ID NO: 416419 - DNA, 201 bp, Homo sapiens
tctttactgagaagcactgagacatttcctaaattattttcattatttccaaaaaataccacttttactgtcttgatcagtgccctttggctttttcttcagagttcaaagtagcatagtgattcagtgaacaaactccaggatcagaaaggcctgggagctgctcattacttgcatgatctaatgttccctcctcacctc

SEQ ID NO: 416420 - DNA, 201 bp, Homo sapiens
atgttgcctgtatggctaatggtgcctacccagaaggggaatttacattaataatgccagtgctaaaagtatgtaagaaattttctattttcttttatttttaagatgtcacttttataaaatataataatgtatattgcttaattatttatataatagaatgtagcacttcctgttaaaatttaaatataacataaaatg

SEQ ID NO: 416421 - DNA, 201 bp, Homo sapiens
gctaaaaatgttgagataatacatccattggaaaggggtaatttctaaggttgcaagacttgctttttggaatgtggtgtaacatgttcttatttatccasacccctttgatctggaattcgtagtcctttaacaaagactgggctaaaggttgccattacatctatgaaaataatgtcttagggaatttaatgaatctaa

SEQ ID NO: 416422 - DNA, 201 bp, Homo sapiens
catgttgcctgtatggctaatggtgcctacccagaaggggaatttacattaataatgccagtgctaaaagtatgtaagaaattttctattttcttttatttttaagatgtcacttttataaaatataataatgtatattgcttaattatttatataatagaatgtagcacttcctgttaaaatttaaatataacataaaat

SEQ ID NO: 416423 - DNA, 201 bp, Homo sapiens
ccatgttgcctgtatggctaatggtgcctacccagaaggggaatttacattaataatgccagtgctaaaagtatgtaagaaattttctattttcttttatttttaagatgtcacttttataaaatataataatgtatattgcttaattatttatataatagaatgtagcacttcctgttaaaatttaaatataacataaaa

SEQ ID NO: 416424 - DNA, 201 bp, Homo sapiens
agagaaaatccacatgcctgacaagaaataataatagcctatttctttttcagctctgtctttaacaccctgtatgatgcttcagttaggtgtgtattttyaacagttttattgagatgtaatttatataacaaagtttacccattgaaaatatatagttcactggattttggtgtatttacagccatttatatactgccg

SEQ ID NO: 416425 - DNA, 201 bp, Homo sapiens
tgagggagggacccaagcaggtgttggaggcatgagcatttcaggcaaggaaaaatcctgacgcaaaaggccctcttgtagggggcacatatgacacgttygaggaagaggaaggagttggtgaagctgaaactgggagaggagagacagagaggcagatggggcagatccttgtgggagccacagtgggattttgagcag

SEQ ID NO: 416426 - DNA, 201 bp, Homo sapiens
aactgggagaggagagacagagaggcagatggggcagatccttgtgggagccacagtgggattttgagcagaggggtgacaggagcggaatcgtatcctamctgttggaatgccattttaaacagagatgagaaggggcaagggcagatgcaggagacccctggatactacttcagaggctactttagggcctctaaacct

SEQ ID NO: 416427 - DNA, 201 bp, Homo sapiens
tattgttatcatcattactattcttactttttaggaaaccgtgcacacatgtgtaagatgtatggtgattaagatatttattcatcataaagaagtattgktattttcttttttctgtactcaatttcattgaacacaacaaatagaaactctttacatttgttgtagatttctactcaaagccaagagccacgttttgtc

SEQ ID NO: 416428 - DNA, 201 bp, Homo sapiens
tctcacacatgctggctctttgctggaaataataatttctcacacttagcagaaacagatttgcattaagtcaacggtgttgtttctgctactgcactttyacaagtgtagcactgacatgcagcagtcaggatccagagaggaaacaaaatcacactaggtaattcaaacagaaggatttagttcagggaattggttgtt

SEQ ID NO: 416429 - DNA, 201 bp, Homo sapiens
tatcctttggattgggccttatcatttctcacacatgctggctctttgctggaaataataatttctcacacttagcagaaacagatttgcattaagtcaayggtgttgtttctgctactgcactttcacaagtgtagcactgacatgcagcagtcaggatccagagaggaaacaaaatcacactaggtaattcaaacagaa

SEQ ID NO: 416430 - DNA, 201 bp, Homo sapiens
ttctcctttatactttctgttttcaaacatttccagggtgatcaggaatcatttttatgcaaaaaaaaataagaatttttaaaagtttgatcctttgaagmcttctactctactatcctttggattgggccttatcatttctcacacatgctggctctttgctggaaataataatttctcacacttagcagaaacagattt

SEQ ID NO: 416431 - DNA, 201 bp, Homo sapiens
aagaatatgccaaactatccactgatagtttgttagtggttaactctatggtgggttttaattgtttctcctttatactttctgttttcaaacatttccarggtgatcaggaatcatttttatgcaaaaaaaaataagaatttttaaaagtttgatcctttgaagacttctactctactatcctttggattgggccttatc

SEQ ID NO: 416432 - DNA, 201 bp, Homo sapiens
ctgtggccctagccattgattgtttaagttctgggttagaggtaagcagcccttgccagagtgatccagtcccaaagtagaaggaacaagttttcttgtgrtgtggcaaggttatatcgctctaagagtttaattcttcatactgccatgtgaaaatactagagaacaagggttggtttaaaataattatcaccttaaagt

SEQ ID NO: 416433 - DNA, 201 bp, Homo sapiens
ttatacagcattccagttggtgatttattcccagatggtttatttaactagttcctgttgatggacatttgcgttttacatatctccttttataggcattygagatatggttgttacaggtgtttaagaagtgagattgtgggtggtttctagatttgtgccatagttagtaagtcttcaccattttaaagctgtggaaag

SEQ ID NO: 416434 - DNA, 201 bp, Homo sapiens
acatttatacagcattccagttggtgatttattcccagatggtttatttaactagttcctgttgatggacatttgcgttttacatatctccttttataggyattcgagatatggttgttacaggtgtttaagaagtgagattgtgggtggtttctagatttgtgccatagttagtaagtcttcaccattttaaagctgtgg

SEQ ID NO: 416435 - DNA, 201 bp, Homo sapiens
tacatttatacagcattccagttggtgatttattcccagatggtttatttaactagttcctgttgatggacatttgcgttttacatatctccttttatagrcattcgagatatggttgttacaggtgtttaagaagtgagattgtgggtggtttctagatttgtgccatagttagtaagtcttcaccattttaaagctgtg

SEQ ID NO: 416436 - DNA, 201 bp, Homo sapiens
tagatgaagcttaggtgtcacgcatcacttttataaaacattcattgactatgctcagctctatggggctgagtagggatctcaaatctacttgccgagtcacctttctcaattttagggacttgttacagaatcctcatgctgaatagggacttcccttatagtcccttccactcctaaaagggggaaagtggctcagac

SEQ ID NO: 416437 - DNA, 201 bp, Homo sapiens
ttgaatctctttgccctttccaacggctatggcatcaggttctaaaataagctcgtaatttttcctgttattttaataatatggaaatattagcatagtgyttcttttgatagtgatagactataatccatatttaaattttatagagaagaaattttattgtactgtgatgtagatatttattatccaggtaaggatttg

SEQ ID NO: 416438 - DNA, 201 bp, Homo sapiens
ttttatacataaatacaaacatttaaatactttaaaccataacagtaatagacaatatatatgtattctcttcctatgtatttttgcattgtagcttcagkatgaatatttgtctaaaaatatgttcttgagtataagtctgtctttatatgcttataatgttgtctctgacaatatttagtacttaatattggttctgag

SEQ ID NO: 416439 - DNA, 201 bp, Homo sapiens
caaaggaagaccataatgaagttataagctgtcagaactaagtgcttgctctaggagcatacttcaaaggccaaatgtgcatatttttcctttgaaaagcwtaatagataatattactgctattcaacacaggaaatcaattaaacccttatgaaaagaaaatcattttttagatgatcagtagttaatatggaatctatt

SEQ ID NO: 416440 - DNA, 201 bp, Homo sapiens
aaattctgctgacattgatgacaatataatgagctctatttttaataaaaccgtgatcctcagcatagggaaatttgttccaagatatgagtagctaaaaygttaaataccaaagttagaggcttttggccttgactgaacaggaaaccaagaattcaaactgtgctggaagaggcaaaaacaaagacccattatgtttgc

SEQ ID NO: 416441 - DNA, 201 bp, Homo sapiens
gttaaataccaaagttagaggcttttggccttgactgaacaggaaaccaagaattcaaactgtgctggaagaggcaaaaacaaagacccattatgtttgckctgaacctggctgtatgatattaggatatggcataaagctggcaaagtacttgacgttttcattgaaactgggcctccagtaatttaaagtcactctatt

SEQ ID NO: 416442 - DNA, 201 bp, Homo sapiens
gccatgttgcctgtatggctaatggtgcctacccagaaggggaatttacattaataatgccagtgctaaaagtatgtaagaaattttctattttcttttatttttaagatgtcacttttataaaatataataatgtatattgcttaattatttatataatagaatgtagcacttcctgttaaaatttaaatataacataaa

SEQ ID NO: 416443 - DNA, 201 bp, Homo sapiens
ggccatgttgcctgtatggctaatggtgcctacccagaaggggaatttacattaataatgccagtgctaaaagtatgtaagaaattttctattttcttttatttttaagatgtcacttttataaaatataataatgtatattgcttaattatttatataatagaatgtagcacttcctgttaaaatttaaatataacataa

SEQ ID NO: 416444 - DNA, 201 bp, Homo sapiens
gggccatgttgcctgtatggctaatggtgcctacccagaaggggaatttacattaataatgccagtgctaaaagtatgtaagaaattttctattttcttttatttttaagatgtcacttttataaaatataataatgtatattgcttaattatttatataatagaatgtagcacttcctgttaaaatttaaatataacata

SEQ ID NO: 416445 - DNA, 201 bp, Homo sapiens
cgcgcgcgcgcgtgtgagctatgatgagctatgatggtgtcgctgcactccagcctggacaacagagcaaagataacgtgtgtgtgtgtgtgtgtgtgtgtgtgtgtgtgtgtggtgtatccattttaataagcctatgggaatgtctgcccttatttcctgagataacattagtaaatcattaaaaccttaatccttctc

SEQ ID NO: 416446 - DNA, 201 bp, Homo sapiens
gccatagtgagatatgatgggtgtcattgcactccagcctggacaacacagcgaagataacttaaatgtgtgtgtgtgtgtgtgtgtgtgtgtgtgtgtgygcgcgcgcgcgtgtgagctatgatgagctatgatggtgtcgctgcactccagcctggacaacagagcaaagataacgtgtgtgtgtgtgtgtgtgtgtgt

SEQ ID NO: 416447 - DNA, 201 bp, Homo sapiens
ggagcatcacttgagcccaggaggttgaggccatagtgagatatgatgggtgtcattgcactccagcctggacaacacagcgaagataacttaaatgtgtrtgtgtgtgtgtgtgtgtgtgtgtgtgtgcgcgcgcgcgcgtgtgagctatgatgagctatgatggtgtcgctgcactccagcctggacaacagagcaaag

SEQ ID NO: 416448 - DNA, 201 bp, Homo sapiens
cactttgggaggctgaggtgggaggattgcttgagtccaggagtctgagaccaactgaggcaacatggtgagattctgtctctacaaaaaaaaaaaaaaaattaaaaattatccaggtgtagtggcacacacctgtagtcccagctacttgggaggctgaagcaggagcatcacttgagcccaggaggttgaggccatagt

SEQ ID NO: 416449 - DNA, 201 bp, Homo sapiens
gaggccaaaacaagaggattacttgaagccgggagttcaagaccagcctaggcaatatagtgaggccccatctctatgaaacatttaaaaactagctggaygtggtagtatgcaccggtagtcctaactacttgggaggctgagggggaaggatcacttgatcccaggagttcaaggctgcagtgagctaacatagcacca

SEQ ID NO: 416450 - DNA, 201 bp, Homo sapiens
taactttttccaaacttttcccaagctcctaaacagttatctcaaaatcattattattgagtaatccatctctttactgttgatttgtgatgacttctttrtaattttttaaagcttctcatataaactggggtttatttggaagacatgtattttatcacatctatctatttttggccaatatgagagactaaaattatt

SEQ ID NO: 416451 - DNA, 201 bp, Homo sapiens
gcctcataaaatgagttagggaggattccctctttttctattgattggaatagtttcagaaggaatggtaccagttcctccttgtacctctggtagaattyggctgtgaatccatctggtcctggactctttcgttggtaaggtattgattattgccacaatttcagctcctgttattggtctattcagagattcaacttc

SEQ ID NO: 416452 - DNA, 201 bp, Homo sapiens
agtatcctacacataagaatgcagaatttgataaatggttagataagatcgtctcccttatataacaatttagagaacttgaaaacaataccaaaaggccyagttttccttttaatgtacagggctcattctgcagaggtattctgtggttgtattctaaatccagacttgccctgtttagaaaccaaaattagaagtctg

SEQ ID NO: 416453 - DNA, 201 bp, Homo sapiens
tttttgatgtgctgctggatttggtttgccagtattttactgaggatttttgcatcaatgttcatcaaggatattggtctaaaattctcttttttggttgygtctctgcccggctttggtatcaggatgatgctggcctcataaaatgagttagggaggattccctctttttctattgattggaatagtttcagaaggaat

SEQ ID NO: 416454 - DNA, 201 bp, Homo sapiens
atacagtttcaacctaagcagacagagttgtaatggaatgtaatgatgcactcatttttgcaacatgtgctttttgatagcctactgcatgccaggcaccragctactcactttgaacaaaagaggtttcctgcgtgcaagaagtttggtatttagttggtaatgcagatgaataagcagacaatttcagggtggtaggtg

SEQ ID NO: 416455 - DNA, 201 bp, Homo sapiens
gtatcataaagattatgagatgatgatgtaggagagtaaacgttttcattgccacaaatgtgggatgacagcatgattcaagactggtagataaaacaagstgactctaaggagaaagagacaactctccacaagaccttttctgtagctgaattataattattcttttatgcttttgaccatattttaccacccatgttc

SEQ ID NO: 416456 - DNA, 201 bp, Homo sapiens
ctcttaatatccccacaaatctttcgtcttttcctataagctcactcttgcttgtcccatcttcagggcaccctgtagagctgtcccaccggagttcttcractttccctttgggacacttgaactttatcaggcctgccctgtggtggctgatgccacagtctctacagtcagctacatgggcaagaatcctaaacaagt

SEQ ID NO: 416457 - DNA, 201 bp, Homo sapiens
ctgctgtgtttgttttcaaacccaatctcatttctttagagatctgaactgatcatctacctggccagccttggctagcaagatgtgttttatttggccamcgtagtggttttctttaaaaattgagtcaggattgaaaaaccaggagatttccagtacaaatctgaatttcttatctccttggaaaatctgaagatctgg

SEQ ID NO: 416458 - DNA, 201 bp, Homo sapiens
acaaattgaatgaaaaaattaacatcagtattaacccaccaacatttcaaaggacactcagtgccatttaaatatatcagatcagctctatcagtattcawtgagagatgtttagattcagccaggccaaaacaatgttattacacttcttaattttatttttattttaaaaagttcatcctacatatatataattatata

SEQ ID NO: 416459 - DNA, 201 bp, Homo sapiens
cctccctctcttctctgttcaaagtcactcatctccagccctgcggtgaataaattcatacaaagagagtgttttgatttatgtcaccaatttgatctcaraaaactacagaccctgattctccatgcagtccatttattgttcatgcactcactattttggaagtgttgctccaagtgtgaggtgccaagccacataact

SEQ ID NO: 416460 - DNA, 201 bp, Homo sapiens
ttgctgggtgccctttttaacttttccatcttcccccaaatgagtccgaggccccagcctctgtgcctaatcctgcctcttggcatgcttcctttcacctyattctcctccctctcttctctgttcaaagtcactcatctccagccctgcggtgaataaattcatacaaagagagtgttttgatttatgtcaccaatttga

SEQ ID NO: 416461 - DNA, 201 bp, Homo sapiens
taggatttggcaatatgagcctcatgggttggcttaactcagacagttttgaagagtggggagagaactaagtctgattggagaaactttcagagaaaaargcaggaaagaaattggaatcagggagtaaggacaactcctttgctctaaaggggagcagggaaatggagtggaagctgaagagtatagtgggatctagag

SEQ ID NO: 416462 - DNA, 201 bp, Homo sapiens
accactaagaaaggaagccaaccagctgctgctagaacctctgagggacgcaaagggactggttttggaaatgtagaaagaggcccatactccagacagcmgtgactactggaggatgctcctggggcatgaaaaaggagaaaggaagttccttctcctcaccttccagtcttcttccagtgaatagaaagccctctggca

SEQ ID NO: 416463 - DNA, 201 bp, Homo sapiens
gtataagatctctgacagtatctgggagagaagctttgcagagagctcacattcaaaagtcctgaggtgagagcaacccttgatatgtttgaggaacagarggagttcagcaagactggaatggagtgagtgaggaacaacagctgaagacacaatcagagggagtggggaacttggtttttaccccaagtgtgataggaa

SEQ ID NO: 416464 - DNA, 201 bp, Homo sapiens
ccagggattaaatgaactgacatgtaatttggccaatagacattaatgtcagtaagacataaatatgttctgccaatgccaagcaggagcaaaaacatcaytttttcatctttcctcagttcagtgcctccaaaactctaagaactgagacatcactttggatgatgacataggacttgtgtacttattacatgtagtatc

SEQ ID NO: 416465 - DNA, 201 bp, Homo sapiens
tgtagatgtgctttgtttggcacttgtcactctgcactgtaactacctgcttcacttgtccacgtaagtccctgtggacttcttttttttgaggacatagrtgtgtctaactgtacatccagcacctaggccagtgtgcaatagaattcaagaaatgcttattggataaatggctgaatatgtggataaaatatcggtcac

SEQ ID NO: 416466 - DNA, 201 bp, Homo sapiens
gtcatttagaaatttgtcttttcaaggccctagtttcttcaaacgtaaaatgaagctttgcagagagctcatgttcaaaggtcctgaggcacaagaaacastgatatatttgaggaaaagaaggaggtctgtgagactagaatggagtgagtgaggaaaaacagccagagatgcaatcagggggaatggggaacttggttt

SEQ ID NO: 416467 - DNA, 201 bp, Homo sapiens
gtcctctgcattttcagggcacccaagtgtagatgtgctttgtttggcacttgtcactctgcactgtaactacctgcttcacttgtccacgtaagtccctstggacttcttttttttgaggacatagatgtgtctaactgtacatccagcacctaggccagtgtgcaatagaattcaagaaatgcttattggataaatggc

SEQ ID NO: 416468 - DNA, 201 bp, Homo sapiens
taaacagtagggtaagctgttacctattcaagctacaagacaaaaaaccaaacaaacaaaaatggagagtttaacataaaccctgctctcaagcagttatyagttgaagttataatacaaacccccaaactgaggggttattagcacagtttcacacacgactgtaatagcagttggagaactgtgtctgtcataaaagca

SEQ ID NO: 416469 - DNA, 201 bp, Homo sapiens
gtgacagatctgcggatgataggagcctgccatgccagccgcttcctgcacatgaaggtggaatgccccacagaactcttcccccctttgttcttggaagygttcgaggattagactgactggattcattctcataattcctacagcactactgggtgtcatttcattccattgcctagctcttttttgtttgtttctttg

SEQ ID NO: 416470 - DNA, 201 bp, Homo sapiens
atttatatagaatgagttctattgaggtgtcatttatgatttatttctttgttgtcaagcttagtaatatcttctgatgagtactgagggacagacctcartgggctctttggaatgtgttagcacttttatttcaacatgtagttctttttaattagacgcaggaatgacttgcttaaggttgaggatttttctctctca

SEQ ID NO: 416471 - DNA, 201 bp, Homo sapiens
acattggacaagcaccaatagtcaatgccccagaaggtggaaaggttgacttggaagccttcagccattttacaaaaatcatcacaccagcaattaccagmgtggtggattttgccaaaaagttgcctatgttttgtgaggtgaggatgttgtttttccttctgcattattcttaattatagtttcatcagtttccaggaa

SEQ ID NO: 416472 - DNA, 201 bp, Homo sapiens
tgctcagacatctctcccacagatccatgcctcacaggaactgctgaaacctcacatcctcttctccctctctccccagaggctaaaaccctgatgagtckgctgtacacactgcctcccctccccgctgcagtcaggaatctggacccttcgctcccctccctcttctccccactactacctccaccttcaagactgtga

SEQ ID NO: 416473 - DNA, 201 bp, Homo sapiens
ttcatgtggtatgactgggtaaaagatgccctataggctacatgaagaaggactggtcctcttgtgctctgactgtctctgtcctcctttcatccctcctstttaacttcctgagcttctcttggaagagaaacttactacagaaaagtagggagctttctgaaagagaccagattaacaaaatctcaccaaatccagaca

SEQ ID NO: 416474 - DNA, 201 bp, Homo sapiens
ggtgtatatgtgccacattttcttaatccagtctatcattgttggacatttgggttggttccaagtctttgctattgtgaataatgccgcaataaacataygtgtgcatgtgtctttatagcagcatgatttatagtcctttgggtatatacccagtaatgggatggctgggtcaaatggtatgtctagttctagatccct

SEQ ID NO: 416475 - DNA, 201 bp, Homo sapiens
gaagttaccaggtagttagggttaaatggtcagtattcctgggagaaaataagattaatatggcatcagaaattggttctatggcttttttttttaattayactttaagttttagggtacatgtgcacaatgtgcaggttagttacatatgtatacatgtgccatgctggtgtgctgcacccactaactcgtcctctagca

SEQ ID NO: 416476 - DNA, 201 bp, Homo sapiens
gtaacatgcctaattttgggtaaaaccagcttatattttatacttgattctgggacagaccagtgagtggtagcaggtgcaaaaaattatgagcaacaaamaaaaactttgcagctgagaaattctatcaaatgctatttttagaaaattgataaaattgactaaattttaaataaattaaacttttttaactttagccaa

SEQ ID NO: 416477 - DNA, 201 bp, Homo sapiens
tttaatttagttaattgggtggcatgacaggtcatcaaggtgccctccatcttgttgccctactattgtctccgtgttgccttttgttcccaggctgtccrctcagagtcacctctctaggcagcatatgttcacacagccacatccaaagaccaaaagagaagcagtgtcttgtcacatgtgtcttcattacaggaagga

SEQ ID NO: 416478 - DNA, 201 bp, Homo sapiens
tgaagagaaaataggatttggaaaagacagagatgagagacagaagtgggggctttggagaaagcaaaagtctggagagaaggcagcagtgaaatgggaaratgtaaggcaagctgtaggggagacatagagcagacagctgggctagctcaggaagtccatttagggcaaagagaggatatcagaatgagagttgaaaat

SEQ ID NO: 416479 - DNA, 201 bp, Homo sapiens
tagttataatgcatgattcttagtttcctctacatttttattttattctacagtgaacctgaattacttttcttttttttttttttttttttttttatgaractgagtctcactcggtcgcccaggctggagtgcagtggcactatctcggctcactgcaagatcagcctcccgggttcacgccattctcctgcctcagcc

SEQ ID NO: 416480 - DNA, 201 bp, Homo sapiens
cttaagcccaggaggtcaaggctacagtgagctgtgattatgccactccactccagactggacaacagagtaaaaccatgtctcaaaaaaaaaaaaagaaagaaaagaaaaagaaagaaagaaagaaaaagaaacagagacagtgatttgatctggattttaaatctatatttgggtctgagaaaattagagtctttggca

SEQ ID NO: 416481 - DNA, 201 bp, Homo sapiens
atgtgattgtatacctgtaagagtggaaggactccagtaaaaaactggagtgcaacaatcagtaagaatatttgacaaggctgttggactaaaaaataaaygtagaaaaatcagtaagtcttctttatagccattcgttcaacaaatatttattaaacactcactgaataataagcattcatctggtccctagtacagtcg

SEQ ID NO: 416482 - DNA, 201 bp, Homo sapiens
tcacttaagcccaggaggtcaaggctacagtgagctgtgattatgccactccactccagactggacaacagagtaaaaccatgtctcaaaaaaaaaaaaagaaagaaaagaaaaagaaagaaagaaagaaaaagaaacagagacagtgatttgatctggattttaaatctatatttgggtctgagaaaattagagtctttg

SEQ ID NO: 416483 - DNA, 201 bp, Homo sapiens
aaatatgactttttttagaaccagatatgatagactaattaattggctcctaataaatagtgtgcctacctaagtgattattaaactctatcagttaattktaggaaagtaaagagacaactgtttacatccagatagattttagctctcttgagaagtttcatcaaactccaaccgtacgtggttacagggttgtgtatc

SEQ ID NO: 416484 - DNA, 201 bp, Homo sapiens
atcacttaagcccaggaggtcaaggctacagtgagctgtgattatgccactccactccagactggacaacagagtaaaaccatgtctcaaaaaaaaaaaaagaaagaaaagaaaaagaaagaaagaaagaaaaagaaacagagacagtgatttgatctggattttaaatctatatttgggtctgagaaaattagagtcttt

SEQ ID NO: 416485 - DNA, 201 bp, Homo sapiens
ttaatattttattataatttattattatatttataaaaacagccaagaactctcatatgattcatttttttattttgagaaaaaaagaatgatctgtaatwgtggtttgcttttaaaatatgactttttttagaaccagatatgatagactaattaattggctcctaataaatagtgtgcctacctaagtgattattaaac

SEQ ID NO: 416486 - DNA, 201 bp, Homo sapiens
atgttccattcagcctccacacttgagtatctatgctatgtgtgatggaaacttgtggcagcttttctccaagatggctgccatcaaattatttctcatcyctgtatacacagcccgttctctctctgggagaggtagagtctgttcccctctccccttgaatctaggctggtatctgatgcctttaaacagtgcattttg

SEQ ID NO: 416487 - DNA, 201 bp, Homo sapiens
atatagattataatcctgtgttttttaaacttcaaaaatgttaaggagaattgtaaaaggaaattaaattaccttcctattctgaaataagaccctgcaggaatatatgaataaaaaatgtgtaatccattcctagtgccatcctttgagagacatttagtttcctcgagtaccatacttgaggggacacctggaatatgt

SEQ ID NO: 416488 - DNA, 201 bp, Homo sapiens
accctggaggtggaggttgtagtgagccaagatcgcaccactgcaccccagcctaggtgacagagcgagactctgtctcaaaaaaaattttttttaatttyttacattttaaaacactcattttgccttgttatcctaccaacagttaaaatgaactttttaagtggctggggcaggactgtttataatctgttgatctaa

SEQ ID NO: 416489 - DNA, 201 bp, Homo sapiens
ggatctgggtgacagtggaactgttctgctgtagacaaggggaggttttggccattactctaaagaagagaaggagaaagatagaatgaatggatggatgdaaatgaatgaatgagcaaactggacaaagcaccacagagaagacaggaggctataaagttaacaaagtgacttctttctatgacctctcaggtcctcaat

SEQ ID NO: 416490 - DNA, 201 bp, Homo sapiens
tgggagagagatcctgattccatttaatatggaattcaatttaatacttaattccccaaaatgactctaaagagtgaatgtgccttacagaggacaatacrttattagtgactgacttaaacaaagagagaattgagcctattaacctatatccctgcctcacatatgtcttcaggatgatcaagaaatcaactagcctgt

SEQ ID NO: 416491 - DNA, 201 bp, Homo sapiens
tatctagaactcacagtgctcaaatcctggcctctctgcttgagtcactggctctacagccttcctgccattcccacctgcacagcaagtgatcacagctrtctttctttctttctttctttctttctttttttttttttggcagaatttcgctcttgtcgcccaggctggagtgcagtggcacaatctcagctcactgca

SEQ ID NO: 416492 - DNA, 201 bp, Homo sapiens
acactacccaatgttaagaatggttatcttaattggtagactttagaataacttttagtttcccttggattgtttttctacaaagtttttttttttcttttgcattcatagccgacagaataagttatcaagttctggaagcattaagaacacgaactaaggaagagtcagatgtcagttcattgaatcacatttaaaata

SEQ ID NO: 416493 - DNA, 201 bp, Homo sapiens
ggctacactacccaatgttaagaatggttatcttaattggtagactttagaataacttttagtttcccttggattgtttttctacaaagtttttttttttyttttgcattcatagccgacagaataagttatcaagttctggaagcattaagaacacgaactaaggaagagtcagatgtcagttcattgaatcacatttaa

SEQ ID NO: 416494 - DNA, 201 bp, Homo sapiens
aattagttctgtcctcttgtcttgacttacatgctatggttttgagaaaagtgtgagtcaatgagcaaaaattccttgccagggaaaagatgtacccccamataagggtaaggtagtatcagtatcctttaagtgaggggaacatgtgagtgcattacaaattgttggcaatgtttttcagaactaagacaaaatcctgca

SEQ ID NO: 416495 - DNA, 201 bp, Homo sapiens
ttttgtttgcttgggtttttgaggggtgggggggttcgggaagatagtattgtgctctaccgcaatgggtagaactctaccccagtgacatctgggggaaygccccattgcaaacacatgaatatttctgcagtgaagcatacaaatatttacactaagttggatcaataaagactatgaaacactcatatgaaatcaggt

SEQ ID NO: 416496 - DNA, 201 bp, Homo sapiens
agatcaggtcagtatcgcctgagtttcacatttcacaggtgagcataatgttaagaaaaaaaatagaggattgacaatctttctattttgctaaataaagytatctgaaaacagaacaaaccaatatttatgctatcacaacataaagaaataatattttcctacccccaaagcaagaaaaataaaggataggcctttctg

SEQ ID NO: 416497 - DNA, 201 bp, Homo sapiens
gagggacagacctcaatgggctctttggaatgtgttagcacttttatttcaacatgtagttctttttaattagacgcaggaatgacttgcttaaggttgargatttttctctctcatacttacctttaacacttgcattgttacctttgtgcaccaaacactcacacaaagtggtgagcctctgaggcaagggaggggcaa

SEQ ID NO: 416498 - DNA, 201 bp, Homo sapiens
aatgtctaggcaacaagtttgttagatcaggtcagtatcgcctgagtttcacatttcacaggtgagcataatgttaagaaaaaaaatagaggattgacaayctttctattttgctaaataaagttatctgaaaacagaacaaaccaatatttatgctatcacaacataaagaaataatattttcctacccccaaagcaaga

SEQ ID NO: 416499 - DNA, 201 bp, Homo sapiens
atttttctcaatttagtacatatctcttctttttgtttatggcaatatttaaccttaatttttcttcctttgaaataattttatacttacaggaaagttgyaaaattaatacaaagaatttcaagccatcctttaccctaagtcttaaaatgttaattttatcacatttgctttaatcttctttctctctctttccatctc

SEQ ID NO: 416500 - DNA, 201 bp, Homo sapiens
tcctcaaagggatttgttcatggctacttagtaattcatcatatggtgatatagtccctgattattaggctattaacataatattgttataaataatataygatgaatacatatttattacatattgacatgatgaatatataatgaactgccttgtacataattttgcatctttccgataatttccctctggataaactc

SEQ ID NO: 416501 - DNA, 201 bp, Homo sapiens
agcagcagaatttttctgacatgttaccttgatccctggaagacattgaccttcaactccctgaatttcagcagaatctttatgagttccagaagcattgycagtgctaagagtgaaattccagggactagacttcactgggtgatggcagtgtcttctcactcagcaggtcctggcagtgcctctggcaatggcagccct

SEQ ID NO: 416502 - DNA, 201 bp, Homo sapiens
cggtaaaaacatcctttggcagccttcagaaaaattttttaatagcagtggaaataaacaggtattaaatctattaatggaggacagcctcagccaaaaartaacaaggggttaaaaaaaaagagcagtcacatactcacagaaagtagacagaatcctgcagaacctagttctagaattttgtgtccaagcacaactctc

SEQ ID NO: 416503 - DNA, 201 bp, Homo sapiens
ttcctcaaagggatttgttcatggctacttagtaattcatcatatggtgatatagtccctgattattaggctattaacataatattgttataaataatatrcgatgaatacatatttattacatattgacatgatgaatatataatgaactgccttgtacataattttgcatctttccgataatttccctctggataaact

SEQ ID NO: 416504 - DNA, 201 bp, Homo sapiens
tgctgtattccatatttgtttgagattattgtatcaattttcctaatgatttggtctttagttgaatttttatgctatcttattagttttgatatcaaaawtatgtaaactttatgtaatgattagaaagattttatcattttctgtgttctgcacctatggaaattatattttcatgggcaatttttttttctctgaaat

SEQ ID NO: 416505 - DNA, 201 bp, Homo sapiens
gggaacacggtaaaaacatcctttggcagccttcagaaaaattttttaatagcagtggaaataaacaggtattaaatctattaatggaggacagcctcagmcaaaaaataacaaggggttaaaaaaaaagagcagtcacatactcacagaaagtagacagaatcctgcagaacctagttctagaattttgtgtccaagcac

SEQ ID NO: 416506 - DNA, 201 bp, Homo sapiens
ttcagctgcttcttaatggccatttcttccttcagaaatagattcacggtggtgcatatgtcctacaacctacgtagaatggctttccatggtttcaaaargttactgatggcaaaataatgacaccattcaaaaataactaatgttaacactgtacatattgttaacatttcctgctgtcaataaacacgcttcctcaaa

SEQ ID NO: 416507 - DNA, 201 bp, Homo sapiens
tttttgtctttttctcattaattgtagaacctgtttatgtgttatggatatatgagctctattttggataaaaccatgatcaacagcatagggcaatttasgctgagatgcgaatatgctaaatgttgaatatcaaagctagagtctccttttgctaagttaactaagcaagtcacgtcatctccctagatcttgaattcc

SEQ ID NO: 416508 - DNA, 201 bp, Homo sapiens
tattttaaaaggtggaggattaaaaagcttgtgcccttccgccagtactaccatctgctccatccatctctgctctctactctgccccactcatcatacaycaggatctgcagtcccaactgagagtgccagtgattcttatacctcaagggcactctgggaaccttagcaatcaacatgagaacgatggctctctcccca

SEQ ID NO: 416509 - DNA, 201 bp, Homo sapiens
actatatgaaatcattcattgaaaaatgcgattccttccaacctcagcagaaacaagaaaaaaaatacaattcttaaagaaggaagtaaaaaagtaccttratacaatattttatctgtctggaattaagcatcacttcctagataatctgagggaaattctgctgacattgatgacaatataatgagctctatttttaat

SEQ ID NO: 416510 - DNA, 201 bp, Homo sapiens
acagtgtggcatggaacccaaggccttccaaagttcctggacctatttactaagtgttgataataattccatttacttttcagtttcagaggattcaatartaactttaccatcatttggatttttaaaatacaaacacactttgtgtgtttgagaggtgaatgcctgcttttctactcttccaatgagtggaatgagctt

SEQ ID NO: 416511 - DNA, 201 bp, Homo sapiens
tgttaagcttctcattcccagcaccttgggtgccttgggatgaccttttctctcctgtctctgctctgactgatttactgtgtgactttgagagtgtgttktaaggacttgttctggaaaagattaagacaatttctaaagatgcatacactataagaagttgacctaaataagaacaaaaggtgagaaggcaaaggaaaa

SEQ ID NO: 416512 - DNA, 201 bp, Homo sapiens
catctacctggccagccttggctagcaagatgtgttttatttggccaacgtagtggttttctttaaaaattgagtcaggattgaaaaaccaggagatttcyagtacaaatctgaatttcttatctccttggaaaatctgaagatctggcaaaactctttccacagccccatgtgacaattccgtcctggagcagagtatct

SEQ ID NO: 416513 - DNA, 201 bp, Homo sapiens
tatgtggagctagaggcctagaaacaggttaaggtccaaaacgattcatctcatagttatatggacacaaaattccagaatcactgatttcaagaaaataygaaactgttgtcttgggtctttgtttttcatatagggtttctttagaagaaccattcagaaaaatctccatccatcctattcctgtaaatatgaaggaaa

SEQ ID NO: 416514 - DNA, 201 bp, Homo sapiens
tgaggacctacaaactgtgcctctttagtgggtcaggaaggcatatacaaggaaaaggcatgaggggatttcattggtgtgtttgaatgtcactaggtgamattcaggggaaggaaagaagggggacttgtggcagggaccagccttattacactagtacaacctggtcactggggcagggcgtgttcacaatctattgta

SEQ ID NO: 416515 - DNA, 201 bp, Homo sapiens
gatgcttttcatttttctgtcaatagagtgctttacattgatagctaatattaaaccaaccttatatttttaaaagaaaaccctcttgcgttaacgtgttrtccttttaaaattatctcaggattcggtctgctaacactttgtttactttttcttccaaattcataaaaaatactagttgataattttcttttcttataa

SEQ ID NO: 416516 - DNA, 201 bp, Homo sapiens
tgggaaactgtgggttaaatggcttcaaatggtgattatgtttctttcttttttttttttttcttttgtttaaccttgactgaagttctttgtctttttcrtgctgcatttccaaggaagatgtattaagcattctttcttctcctttttagtaagctgagaccaaattaataaaatctcagcaaatttagtcagattagc

SEQ ID NO: 416517 - DNA, 201 bp, Homo sapiens
gtgctgcatttccaaggaagatgtattaagcattctttcttctcctttttagtaagctgagaccaaattaataaaatctcagcaaatttagtcagattagsaaaaacctccctcaaaactcctagagattcggacaattgcttctagaacaacttcagtttccaaaatgacagccaggtgaccagaaatttgatccctctc

SEQ ID NO: 416518 - DNA, 201 bp, Homo sapiens
gtcagattagcaaaaacctccctcaaaactcctagagattcggacaattgcttctagaacaacttcagtttccaaaatgacagccaggtgaccagaaattygatccctctctttgaaagaggacctaagtttgtcctgctcaaacttggctgcatattagaatccctctgggagctttctttttgagacagggtctcactc

SEQ ID NO: 416519 - DNA, 201 bp, Homo sapiens
cagagcccacagacgaggaatgggagctcatcaaaactgtcaccgaagcccatgtggcgaccaacgcccaaggcagccactggaagcaaaaacggaaattyctggtaaggcttccttgcacagatcagtttcacttatatgccagtgttttctacctcaatttattcagtcctcatcaccttgggatactggtgttattgc

SEQ ID NO: 416520 - DNA, 201 bp, Homo sapiens
ttatttgtaaggttggacatttttcactttttgttgaacttcattaaaggattatttgttgatgtcatgcacccatttcctatagggtattgatttttttwaatgatttttaagaactctttttttctttattaaggatattatctctttgtccatctcatgcattgccaatgtgttgttctactttcttgtttacctttg

SEQ ID NO: 416521 - DNA, 201 bp, Homo sapiens
agatctgcccgccccccaataaaggcctggaattggacaaagcaagccttcccccttccatctctgaatcaatgtccatcttctctcttccccgcagatcrcccggggcttgcctgtgttgagagaatagaaaagtaccaagatagtttcctgctggcctttgaacactatatcaattaccgaaaacaccacgtgacacac

SEQ ID NO: 416522 - DNA, 201 bp, Homo sapiens
tcaaatttgtagagtaaattgaccaaggagaatgtgtttattcattagctgccatccaaaactgtgaactatgtttaaacatacacacacacacacacacmccatacacggaggtgtgtgtatgtatataaacacactatatatgtgtatgtatattcatacacacatgcatacataaaacaaaaacaacaatgtaaaact

SEQ ID NO: 416523 - DNA, 201 bp, Homo sapiens
acagatctgcggatgataggagcctgccatgccagccgcttcctgcacatgaaggtggaatgccccacagaactcttcccccctttgttcttggaagtgtkcgaggattagactgactggattcattctcataattcctacagcactactgggtgtcatttcattccattgcctagctcttttttgtttgtttctttgtgt

SEQ ID NO: 416524 - DNA, 201 bp, Homo sapiens
tcctggataaccctgattgatacagctggtgtttgatggatatttgctgaattttttaaaccattttctatgtaggcatctctctctttttttttttttttgagcgcaacagggataagccctctatcagttatctagtgcataatgacattatttggaattaccagggatagtaacaaattaccacaaaacatagtttga

SEQ ID NO: 416525 - DNA, 201 bp, Homo sapiens
aatgggaagagaaaaaactgatttcttgcatgatttggggtgctgatctacaactatacacaagaaaaaaatttctgctattcttcaccaagaaaaaaaaatgaataacatactaagcagcgtatttacagaaaatcctgaaaacttaatgctgtttcttttagcctcctcttttataccatttcatatagatactacatg

SEQ ID NO: 416526 - DNA, 201 bp, Homo sapiens
atcagtgtaaaggagacaaagaggagagcccagtcttacacaaatgttaaaatacactataaatcaaggggaattacaacaaattcataccaacacagaartaggcagacaaatgaacaaaatataatagggactggaaagtatagtgtaaatatttatgagaatttggtatatgataaagatgacattcagaataatgag

SEQ ID NO: 416527 - DNA, 201 bp, Homo sapiens
ctgttctcttgtgacgaagatataaaagaacaaactggatcgattttagacagacagatatctcccagaaactttcaagcctaagataatccacttattgmaatatgtaacattttatcttttttttttttaaatgcacatggattttggtgcagagagtcctccatcttttttctgagagagcaagtgttgttatgtata

SEQ ID NO: 416528 - DNA, 201 bp, Homo sapiens
cttgaacccgggaggctgaggctgcagtgagccgagatggtgccactgtactccagcctggtgacagagagagactccttctcaaaaaaaaaaaaaaaaaagtgagaggctgtgctatagtcacagaaaaaaaatggatttgaaatcagaaaacctgatgaatagcagttcagataacttgacttccggatccttaaaatg

SEQ ID NO: 416529 - DNA, 201 bp, Homo sapiens
cccataattcatgtcttctcactagtgtcacatacaaatttagcaccctagctagaattttctaaaagaattttccgtacagctaaggacttttctttttwaaaaaaaaaaaaaaaaaaagagagagagagagagagacaaaaaatttatttgttattctttatggaaatttttttttgttttttgtttttttttgagaca

SEQ ID NO: 416530 - DNA, 201 bp, Homo sapiens
tttaaaatgtggccagtcatagctgctgtaggactattgtgatgtttaaataagatgatgcatataaacacccaacacagaatctgacacactgagtttasaattggtatgtgaggtaccttggcatccacagaaaggggtttggtaggtggctggaatgcaggtctggaaggcacaagagagattaagcaccatctgcac

SEQ ID NO: 416531 - DNA, 201 bp, Homo sapiens
gcttgaacccgggaggctgaggctgcagtgagccgagatggtgccactgtactccagcctggtgacagagagagactccttctcaaaaaaaaaaaaaaaaaagtgagaggctgtgctatagtcacagaaaaaaaatggatttgaaatcagaaaacctgatgaatagcagttcagataacttgacttccggatccttaaaat

SEQ ID NO: 416532 - DNA, 201 bp, Homo sapiens
gagatcatgtcccttcgcgctgctgtgcgctatgacccagaaagtgagactttaaccttgaatggggaaatggcagtgacacggggccagctgaaaaatgrgggtcttggggtggtgtcagacgccatctttgacctgggcatgtctctgtcttctttcaacctggatgacactgaagtagccctccttcaggccgtcctg

SEQ ID NO: 416533 - DNA, 201 bp, Homo sapiens
aggacaaatacctaatgcatgcccggcttaacacgtagatgacaggttgataggtgcagcaaaccaccatggcacatgtatacctatgtaacctgcacgtyctgcacatgtatcccagaacatgaagtaaaataaaaattttttttaaaatgtggccagtcatagctgctgtaggactattgtgatgtttaaataagatga

SEQ ID NO: 416534 - DNA, 201 bp, Homo sapiens
tagactaatgtcttattaatggtacattgtattagacaggataaagaagaatcttctcctcctgttcatttgtgcacactcttgtgcacactgtacacacrtcctgccatggtcatcttgtcacaataccgcagtaaagtcagggggcacaaagaggaccccagggtgctgtgaagtaatagagtatgccagacagaaaag

SEQ ID NO: 416535 - DNA, 201 bp, Homo sapiens
ctattaaaaaaatgtggctacattaggacaaatacctaatgcatgcccggcttaacacgtagatgacaggttgataggtgcagcaaaccaccatggcacaygtatacctatgtaacctgcacgttctgcacatgtatcccagaacatgaagtaaaataaaaattttttttaaaatgtggccagtcatagctgctgtaggac

SEQ ID NO: 416536 - DNA, 201 bp, Homo sapiens
tgttttgatgaaagaaaaatatcagctgaattaaatttaatggagtttaattcagcaatggacgattcgtgaattgggcagcccccagaatcacaccagattcacagagactccagcacagccatgtagtgaaagaagatttataaaccaaaaaaaaagggaaatgatgtacagaaattggaagcgaggtacagaatggct

SEQ ID NO: 416537 - DNA, 201 bp, Homo sapiens
aaaacataagaccagttccaggataagttgggaaatcagttgccttaaaccatctctttcagtgtccttacttcccttgaggatatctttttcccaggaamataggagtcttcaggctatccaaacccattttcagtctctacgaagtctaggcttcttccctcttcacattctgaaaacattctcattttccataaaaaa

SEQ ID NO: 416538 - DNA, 201 bp, Homo sapiens
gtctaactataatatattaatattatatgtctaactataatatattaatattatatgtctaactataatatattaatattatatgtctaactataatatattaatattatatgtctaaatataatatattaatattatatgtctaaatataataatatatgtctaaatataatatattaatattatatttctaaacattat

SEQ ID NO: 416539 - DNA, 201 bp, Homo sapiens
ggttttaagttgttgtcttctactcattaaatccttgtgtcatcatcctgaaaggagagattatggtgttaggaggttgtcacctcataaggcaaaaaaaacattaaactggcctaagttcctgattgcattagatttaactgttctttacctcaggtcgcctccaccctgacagatgtctttgtgctgatcgctttattg

SEQ ID NO: 416540 - DNA, 201 bp, Homo sapiens
ttctccaactgttcttttactaggcgtccttttcttcaaatattcttttaaacataaataaataagtggaatccaaagaaaggcagcttgtttcggtttcwcgttgtgctgggacacttggggtgaagacatttttacttctctaattagtagaggggttgtaagttttggctttaattccatttttgggtctgagtagaa

SEQ ID NO: 416541 - DNA, 201 bp, Homo sapiens
actatctgctttccttcatcggttcttattgccaacttgggactctactgaagccctttacaaaacttctatttgtaagattcccttctttttttttttttctttttgtaggccatcagaggtagaaggtggtaaaaacagagttgccactctcggtgtggccacgtgagcacgtcccacttaagtaacagggtgtccctc

SEQ ID NO: 416542 - DNA, 201 bp, Homo sapiens
agaagagtttggagagtaaggcaagggaagagaggtcatgtggatgcataagtgaagaacttacaattagtgcatgcttacaatgtgcaggacactgttcyaagacctttttatatataaacctatttggtcatcaaaacaatagtatattcccattttacagaaaacccacatctctaaagttccagaagcaactttttt

SEQ ID NO: 416543 - DNA, 201 bp, Homo sapiens
acacgcaggtgtgagcacacagataccagacagcaggtagccacgctgcaaaatggagggacagtattcctttctgataaaggaggacagtgtgagagcargtgctataaggatggctctctactccatgataatttgcccacctgaaaaagtgtccaaagatctggactcaaagaacataccccaagacatatgaaatgg

SEQ ID NO: 416544 - DNA, 201 bp, Homo sapiens
ggctgtttattccattcagcagtagagtcagaatggaatatgattaggtcatgtaaggtataagtcagttataaaactcttagcaagggtcaaaggagagrcagaatgaccttggaggaatacaaggttgcaatagcacaaattctttgtgcaatttatagagcgatggttgtacactcagtggtgccagggaataggccg

SEQ ID NO: 416545 - DNA, 201 bp, Homo sapiens
aggcatcagttcctaggccagacaaggcaagggaccacaccacacagtattttcctgaatgcctagcgtcctgcaggatggaggacttagcatgatacaaycacatcatgtaggaagtcatagcagaaaatgggaggggaaacataccttcccactactgccaataaaatgtgtttaaaagcactggcttcccttaattca

SEQ ID NO: 416546 - DNA, 201 bp, Homo sapiens
acaatctcggctcactgcaagctccgcctcccaggttcaggccattctcctgcctcagcctccccagtagctgggactacaggtgccctccaccacgcccrgctaattttttgtatttttttgagtagagacagggtttcaccatgttagccaggatggtctcgatctcctgacctcgtgatctggctgccttggcctccc

SEQ ID NO: 416547 - DNA, 201 bp, Homo sapiens
ggtagtggtgaggtggggagttcagctctgactaggacaagtcataaatgggcagatgagaatatggattcagttctctagggcagtgtgtctatgacttkaaagtgcacatgaatcacctgggggtcttgtccaaatgcagattctgactgaggggatgcccaaattttctatttctcacaagctctcaggcaatgtcga

SEQ ID NO: 416548 - DNA, 201 bp, Homo sapiens
ccctccaccacgcccggctaattttttgtatttttttgagtagagacagggtttcaccatgttagccaggatggtctcgatctcctgacctcgtgatctgsctgccttggcctcccaaagtgctgggattactggccactgcgcccagccagcaattcatatttttaacatctgactcatggaagttcagcattggaagga

SEQ ID NO: 416549 - DNA, 201 bp, Homo sapiens
atatagctttagtgctgaatatggtgagaggttcccctctcttaactagaaggtgtatgtacctctgtaaccttgccctactgatatagaattaatggaawattagacagactagcccatttccagaaagaatccaattttaagctgtatgttgactcataacccatttgaaatacagagaaagaagcaaaatatttcttt

SEQ ID NO: 416550 - DNA, 201 bp, Homo sapiens
actccagaaaaagaaagctaatcctaatctgtctccggcaatatgctgaaggactgtgacccaggttcatcacccaccagtgtccatctgtgtcatcctgkgtgcacccttccttggcattcttccctgggtcagtgcacctctggccactgatgcataccaggcctccatccccagcctgagggccaagtctgactgttg

SEQ ID NO: 416551 - DNA, 201 bp, Homo sapiens
ctgtgaagatatgttcatccctagaaattctagatagaataaactagtgaatgatggatctgtaagatggataggtcaagtggaaaacgtttcaaatgttwccattgttcctgttgtttgaaattgatttgatggggtgataatatttatgtctatgaaggatgtttaatttgcaagggcataaaacataatgatttgagc

SEQ ID NO: 416552 - DNA, 201 bp, Homo sapiens
ggttcccctctcttaactagaaggtgtatgtacctctgtaaccttgccctactgatatagaattaatggaatattagacagactagcccatttccagaaasaatccaattttaagctgtatgttgactcataacccatttgaaatacagagaaagaagcaaaatatttctttacaccttaggttgcctgccagtgcctaca

SEQ ID NO: 416553 - DNA, 201 bp, Homo sapiens
aaacaatgttattacacttcttaattttatttttattttaaaaagttcatcctacatatatataattatatagatatgtaattaatatatatttatgtatwttatatatatatatatatatatatatatgactctctgcctttttgaatgtgtgcccacattccttttatcagttgatcttcataaaagacttgtcaagta

SEQ ID NO: 416554 - DNA, 201 bp, Homo sapiens
ctcaggcttcagtgctattcctaagccaaaatgctaccaccatctaccactggccacagaacacactccagaaaaagaaagctaatcctaatctgtctccrgcaatatgctgaaggactgtgacccaggttcatcacccaccagtgtccatctgtgtcatcctgggtgcacccttccttggcattcttccctgggtcagtg

SEQ ID NO: 416555 - DNA, 201 bp, Homo sapiens
gctcatcttttgctcctgctttattgatgttatcctgatatctgatcatgatgctgacaaacaaattgggctaggaagagttttaaaaacttgccaccacmtggtgaaactgaaccttaaacaaacagcaacactgctggtaacactggcaagttccactgagcgcttattcccaaaaggcaaatgggggctaagagacag

SEQ ID NO: 416556 - DNA, 201 bp, Homo sapiens
cgccatctttgacctgggcatgtctctgtcttctttcaacctggatgacactgaagtagccctccttcaggccgtcctgctgatgtcttcaggtgagtacrcctagactcgttagtgggcatccaaagagcttttgcttgtctagcgctaattccaatcacttgagttttcagtccccctttagcttcagaaacatagctc

SEQ ID NO: 416557 - DNA, 201 bp, Homo sapiens
gcagccgtgtaaacatgtaatttccacagaatgggacaagaagtatgatcaaggtttgaagtcattgctgcagcattagatgtggagacagagcatgaatrgctatgtataaatctgtgttgtaaacataatccacacacttcctctgcctcgttctttttcttctccaaccagttatttaacaagattgttcctcccttt

SEQ ID NO: 416558 - DNA, 201 bp, Homo sapiens
caattagtgacatctgtgttatttgtatttgtatggaactaagtccagttgttttccacagaaaaaaactcagaagtctgcttgatgatgtgtcaaaaatygggaacaacacatttgaaaactacaaacaagtaagcatgaaaaagggaaattaattcaatagcatttatttttattaggtcacattattatatatgtcct

SEQ ID NO: 416559 - DNA, 201 bp, Homo sapiens
aatttggcagcttacactatgctatatcaacttcattcatcttattttatttagttgttcaacatatattgttgagtacctgttatgtatctgacattccrctcagtgtagaagatataaacatgagaaaggcagtctctgccataaagagattacagtgtggtgggaaaggcagccgtgtaaacatgtaatttccacaga

SEQ ID NO: 416560 - DNA, 201 bp, Homo sapiens
cttggtgtcaaattgtgattttcaacattttttttttttgccaagatcctcttattttctcccaacacacacgtcccttgaaccccgtgctttcaaacatyttacctgccaagccacttttatgaagtaatagcattcattgactggtttttaatcatcaaagacatatttggttactaatctgatgttttcaatgagcag

SEQ ID NO: 416561 - DNA, 201 bp, Homo sapiens
tttatggacccaggttctttccttcttacatccccatctacctctaggacttcagaattttctccactaaacagaggcaagagaaagacaatgaaacaaarcacataagaggtgtttcacaggccagacctggaaatagtgcccaatgctttcattcattctattggctagacctcagtcacatggccgtgtctcactgca

SEQ ID NO: 416562 - DNA, 201 bp, Homo sapiens
ttggctagacctcagtcacatggccgtgtctcactgcaaggttgctgggaaatgcagtctagctgtgtgcccaggaagttaggagtatgcagattttgatratgagtctgtgtcataaagggctatacaaatgcctaataacgttatggagatcagttcaggaagggcttgatctttacagtgaagtcatctttttgttta

SEQ ID NO: 416563 - DNA, 201 bp, Homo sapiens
tgtctaactataatatattaatattatatgtctaactataatatattaatattatatgtctaactataatatattaatattatatgtctaactataatatattaatattatatgtctaaatataatatattaatattatatgtctaaatataataatatatgtctaaatataatatattaatattatatttctaaacatta

SEQ ID NO: 416564 - DNA, 201 bp, Homo sapiens
tatatgtctaactataatatattaatattatatgtctaactataatatattaatattatatgtctaactataatatattaatattatatgtctaactataatatattaatattatatgtctaaatataatatattaatattatatgtctaaatataataatatatgtctaaatataatatattaatattatatttctaaac

SEQ ID NO: 416565 - DNA, 201 bp, Homo sapiens
atattatatgtctaactataatatattaatattatatgtctaactataatatattaatattatatgtctaactataatatattaatattatatgtctaactataatatattaatattatatgtctaaatataatatattaatattatatgtctaaatataataatatatgtctaaatataatatattaatattatatttct

SEQ ID NO: 416566 - DNA, 201 bp, Homo sapiens
aatattatatgtctaactataatatattaatattatatgtctaactataatatattaatattatatgtctaactataatatattaatattatatgtctaactataatatattaatattatatgtctaaatataatatattaatattatatgtctaaatataataatatatgtctaaatataatatattaatattatatttc

SEQ ID NO: 416567 - DNA, 201 bp, Homo sapiens
agtaatggaaagaaaacagactttggcgtcatgtgtccttgggttcaaatccccagttttccactaagtaaccttgtgacttggagcaagttgcgtaagcytcaattttctccttgtaaaatgggggcagatagcatcctagagttgtggtgtgaattaattaaatcatttagtaaacacttactgagagcctactacatg

SEQ ID NO: 416568 - DNA, 201 bp, Homo sapiens
ggaagcatgagaatagatcctacaggctccttcccaccagttgagaattgtggatttggtctctgtaattactagtagttaaaaaaaaaagggggggggggcggggggagacactttgaacacttactgtatttctgcacaaggctagaccttgtccatgtgttggctcatgtattcttcacatcaacattgtgaagtact

SEQ ID NO: 416569 - DNA, 201 bp, Homo sapiens
tgagagaaaggggaagcatgagaatagatcctacaggctccttcccaccagttgagaattgtggatttggtctctgtaattactagtagttaaaaaaaaaagggggggggggcggggggagacactttgaacacttactgtatttctgcacaaggctagaccttgtccatgtgttggctcatgtattcttcacatcaacat

SEQ ID NO: 416570 - DNA, 201 bp, Homo sapiens
caagattaagaatgtgctttgcttcctgaccctgtcaagccccatcccttctcaagaattttccatgtgccacaaatcaactaaataaaggcttttgaacwccacatgcactggccaagaggacaaaacctaaactggctacagtatgaggctcctggacctgggacagcttggcccagtccagtgataatttcaccaaac

SEQ ID NO: 416571 - DNA, 201 bp, Homo sapiens
atatattaatattatatgtctaactataatatattaatattatatgtctaactataatatattaatattatatgtctaactataatatattaatattatatgtctaactataatatattaatattatatgtctaaatataatatattaatattatatgtctaaatataataatatatgtctaaatataatatattaatatt

SEQ ID NO: 416572 - DNA, 201 bp, Homo sapiens
ttacatttaaggttaatattgttatgtgtgaatttgatcctgtcattatgatgttagctggttattttgctcgttagttgatgcagtttctttctagcatygatggtctttacaatttggcatgtttttgcagtggctgctactggttgttcctttccatgtttagtgcttccttcaggagctcttgtagggcaggcctgg

SEQ ID NO: 416573 - DNA, 201 bp, Homo sapiens
aatatattaatattatatgtctaactataatatattaatattatatgtctaactataatatattaatattatatgtctaactataatatattaatattatatgtctaactataatatattaatattatatgtctaaatataatatattaatattatatgtctaaatataataatatatgtctaaatataatatattaatat

SEQ ID NO: 416574 - DNA, 201 bp, Homo sapiens
tagccagaagacattggacaagcaccaatagtcaatgccccagaaggtggaaaggttgacttggaagccttcagccattttacaaaaatcatcacaccagyaattaccagagtggtggattttgccaaaaagttgcctatgttttgtgaggtgaggatgttgtttttccttctgcattattcttaattatagtttcatcag

SEQ ID NO: 416575 - DNA, 201 bp, Homo sapiens
tcttattagtcttgctagaagtctatcaattttgttgatcttttcaaaaaaccagctcctggattcattgattttttgaagggtttttgtatctctatctycttcagttctgctctgatcttagttatttcttgccttctgctagcttttcaatgtgtctgctcttgcttctcctagttcttttaattgtgatgttagggt

SEQ ID NO: 416576 - DNA, 201 bp, Homo sapiens
taaatccaagggcacaaatgaaatcaccacagccacatctctatttccccatccctagaacagactcacttcctgtagcacacataatgccatcagccccctcacccttacatcacttagcttgaatgacaacatttttatagacatatgccaaagaggacagtcactggcccaacttgggtcatgtgcccctccctgtgt

SEQ ID NO: 416577 - DNA, 201 bp, Homo sapiens
ctcctgatgaaggtgacagatctgcggatgataggagcctgccatgccagccgcttcctgcacatgaaggtggaatgccccacagaactcttccccccttygttcttggaagtgttcgaggattagactgactggattcattctcataattcctacagcactactgggtgtcatttcattccattgcctagctcttttttg

SEQ ID NO: 416578 - DNA, 201 bp, Homo sapiens
tgtttgtgtcctctttttttttttgttgagcaatggtttgtagttctccctgaagaggtccttcacatcccttgtaagttggattcctaggtattttattytcattgaagcaattgtgaattaaggttcactcatgatttggctctctgtttgtctgttattggtgtataggaatgcttgtgatttttgcacattgatttt

SEQ ID NO: 416579 - DNA, 201 bp, Homo sapiens
agagacagctgggctgagagaaaacaataatgcccctgcctgattcagtttctgcctcactcacagtgaatttctcaggagcccaaattactggaggataraattggtctaattcaaccttgcaaacaaaaggagaaaaattggtcaaagaatcagcaaattgggacattgagaggctatatgagctttttctttaagctt

SEQ ID NO: 416580 - DNA, 201 bp, Homo sapiens
ttttttcgttccatatgaactttaaagtagttttttccaattctgtgaagaaagtcattggtagcttgatggggatggcattgaatctataaattaccttrggcagtatggccattttcacaatattgattcttcctacccatgagcatggaatgttcttccatttgtttgtgtcctctttttttttttgttgagcaatgg

SEQ ID NO: 416581 - DNA, 201 bp, Homo sapiens
atcctcctttcaccattgctccacccccaagtgttctgctagatgttatctgaatgagatttctttgctgtgaatgatttcttataacacttcatggctcrtcttcgtctccagaagttcttaaagttgtaacagtatcctacacataagaatgcagaatttgataaatggttagataagatcgtctcccttatataacaa

SEQ ID NO: 416582 - DNA, 201 bp, Homo sapiens
gattgtcttggcaatgcgggctcttttttcgttccatatgaactttaaagtagttttttccaattctgtgaagaaagtcattggtagcttgatggggatgkcattgaatctataaattaccttgggcagtatggccattttcacaatattgattcttcctacccatgagcatggaatgttcttccatttgtttgtgtcctc

SEQ ID NO: 416583 - DNA, 201 bp, Homo sapiens
taaattatactaagggtggaaattatactgagggtgaatgattttatggatgtctatcctctaaaggtggtcatagattttcacacaatcaaatccctacyaaattttatcctcctttcaccattgctccacccccaagtgttctgctagatgttatctgaatgagatttctttgctgtgaatgatttcttataacacttc

SEQ ID NO: 416584 - DNA, 201 bp, Homo sapiens
tgaagccaggtagcgtgatgcctccagctttgttcttttggcttaggattgtcttggcaatgcgggctcttttttcgttccatatgaactttaaagtagtyttttccaattctgtgaagaaagtcattggtagcttgatggggatggcattgaatctataaattaccttgggcagtatggccattttcacaatattgattc

SEQ ID NO: 416585 - DNA, 201 bp, Homo sapiens
tttgtatcttaagctgtgattttttttccaaaaattatgtcatttttttttaatattttaagttctagggtacatgtgcacaatgtgcagtttgttaattwtgtatacatgtgccatcttggtgtgctgcacccattaacacgtcatttacattaggtatatctcctaatgctatccctccccgctccgcccaccctatga

SEQ ID NO: 416586 - DNA, 201 bp, Homo sapiens
tgtaagatggataggtcaagtggaaaacgtttcaaatgttaccattgttcctgttgtttgaaattgatttgatggggtgataatatttatgtctatgaagsatgtttaatttgcaagggcataaaacataatgatttgagctgcaaacaaatacttgttcagtcccaacaagagtaaacagaaacatcaaattggagagcc

SEQ ID NO: 416587 - DNA, 201 bp, Homo sapiens
ctggtctcgaactcctgacttcgtgatccacccacctcggcctcccaaagtgctgggattacaggcataagccaccatgcctggccaatttttgtattttyagtagagacagggtttcaccatgttggccaggctggtctctaactcctgacctcaggtgatccgcctgcctcagcctcccaaagtgctgggattacaggc

SEQ ID NO: 416588 - DNA, 201 bp, Homo sapiens
cctgaggaccagaagggcagtaaatttgcagcagcccctcctactcactgacagatcagaaggggcaagcaaggtccccaagagaaggaggataacaccawgtcggcatctcagccactgatgcagccttggtctttgggattcagagactggtgagggtttttgcctgaggaaaccggcaccttcggtgctctttgactc

SEQ ID NO: 416589 - DNA, 201 bp, Homo sapiens
ttaaatgtcttcaagtccacttccaagagttaatttctgttactttttaaaatgaagtggttccttatcatacatcaaaatatgctttaattatagcttawgaaaggccaacattttaagaagaaaatcaagaaaaaacaaaaaaaagaaaggccaacatctttaaaaggatttggtccatgaagtgcccaagacaagtca

SEQ ID NO: 416590 - DNA, 201 bp, Homo sapiens
aagcctacacagtgtgccatccaaatataggtccacggcagtccagagagaagacagcctgaggtttacggtgacaggacattttgaatacctaacaaatsggctgtatcatatcaaagcccaccagtcaatattagcaatgaagggaaatgaaagtaaggtttgttgagggaacaggaagtttcctgtactgtttctccc

SEQ ID NO: 416591 - DNA, 201 bp, Homo sapiens
gttgtaagattcaataaaaagatgcacataaaagtgctttggaaatggcaaaattctcagcggggtcgccaccatgagggcagtagaacacagaagaaagkagcgttgctttggagccagattgtgagcatgccaatttcagcatggctgccctgtgcgaattatgtagcctctctgtgtgccaggatccacatctctaag

SEQ ID NO: 416592 - DNA, 201 bp, Homo sapiens
cagaggatgaacgctttgaatcagaagcattggaaactcactaacctcacagtttctcagtctcagcactgttgacatttggggacagataattctttgtkgtgggggctgtcgtgtgcagtctaagatgttgagcaacatccctggcgtgtacccactagatgccagtaacacacacactccaagttgtgaccaccaaaa

SEQ ID NO: 416593 - DNA, 201 bp, Homo sapiens
aataataaaaggctaattatagcattttcccaagttgtgggattactataatgggaatgatggcacatgcaagacctaacacatttatcaaagagctggcrggatgtctacaaaagtaaatattatatatgctgatatgtcatgtgctgatcaacatagtaagtctagctggacagctgctttagtttaagataagcaaag

SEQ ID NO: 416594 - DNA, 201 bp, Homo sapiens
gtgctagagacacagtaatgaccacaacagtgctcatccctatttctgtcatgcttacatttccagtgaggacagacaaaacagttcccattggtgacaartatgatgaagaacctaaagtaagatgatagagagaaaatggttggagagctggtcaggaaaggcctccctcaaacctcaatgacagggagctggtgatat

SEQ ID NO: 416595 - DNA, 201 bp, Homo sapiens
atcaatgaatcattgcctttttcccccttcctctggcatgttgtcatcagtgggagatggcttatgggtaggggtatggggagctttgagtaccaagagcrcatggtctaaagcagtgggtttgctatacaaatatagccttgagacatctctggttcctccttcctagcagattgtcccctctgtcacacctacgaagac

SEQ ID NO: 416596 - DNA, 201 bp, Homo sapiens
gatgtttggttttccattcctgagttacttcacttagaataatagtctccacttgcatccaggttgctatgaatgtcattatttcattcttttttatgtcwgagtagtattccatggtgtatacatatatatcacattttctttatccatgagttgattgatgggcatttgggctggttccatatttttgcaattgcaatt

SEQ ID NO: 416597 - DNA, 201 bp, Homo sapiens
ctgccactgaacagattcctgcttgttgagtattgcttattgctgaagctatttttataagcactgccaaaagcctttaatcctctgtcagttgagtgtawcttttgggttgtttttgttgttacagctaaccttttggcagagaatggggcagacaaaaaaaaagggggggaattgagataggaagcagtttgtagaaag

SEQ ID NO: 416598 - DNA, 201 bp, Homo sapiens
gtaattatgagcttgtaattgcctcccatgaatgaagcccttttcccaaaccatctcagctgcttttctttggaaaatgaaagcaatcctatcccttaccwcaccccaagtgtagccttccttgcttagaaaaaaaccccttcttgctggcccaagggacatggtaagcaagctttaataggctgcactttaaggggcaat

SEQ ID NO: 416599 - DNA, 201 bp, Homo sapiens
gtggaacaggattcctaaaccccctgaggaattcctaaccccttgacccaacctcagagctatattggtgtggcctacaatccatatttggagcatttctwaggatacagtttcaacctaagcagacagagttgtaatggaatgtaatgatgcactcatttttgcaacatgtgctttttgatagcctactgcatgccaggc

SEQ ID NO: 416600 - DNA, 201 bp, Homo sapiens
gacaaaggaatcgtgtgttgattgttactttgttactattgttcatggttttctcctggagtagaaatacaatgtgcatgggcattggcattttctcatartaatatgaaaacccggaagggtaaatgcaactttcaaaagtgactgagtaatttacacttttagagaaaccatcctaaccaacattagctgaagacatct

SEQ ID NO: 416601 - DNA, 201 bp, Homo sapiens
aacaacagctcaccaaagtaatgccaactgggctggagagggtcaggttataatgtgttaagggagtagactctgaaaggtttagtgaatattggtgtacmtaaatggggaagtgaggactttaatctactgtccaggttgcaggcctaaatgattgtagatttggaagacatgaatgaatgatggcataactgaggggaa

SEQ ID NO: 416602 - DNA, 201 bp, Homo sapiens
atgttattacacttcttaattttatttttattttaaaaagttcatcctacatatatataattatatagatatgtaattaatatatatttatgtatattatwtatatatatatatatatatatatgactctctgcctttttgaatgtgtgcccacattccttttatcagttgatcttcataaaagacttgtcaagtagacaa

SEQ ID NO: 416603 - DNA, 201 bp, Homo sapiens
tattgataaatataggaaaattattttacaagacgttgtgtcattttatgcttccattagcattgtagaagaatgtctgcctccctatggcctcgccaacrttatttaatcttaacaaactagaaaccccaatagtgaggctgctttaatgtgtactttactgattatttgtaaggttggacatttttcactttttgttga

SEQ ID NO: 416604 - DNA, 201 bp, Homo sapiens
acaggcgtgaaccaccgtgcccagcctcaatttccttttctataaataaagttgaactggtgtggtaataaggtcctttttagcctgcaaatattgtctgmattttattactcagagcccattgaactaggaccaattgatctggttaatttgcctctgaaactgggcatgaaatattgctgcacatcatcttagcataca

SEQ ID NO: 416605 - DNA, 201 bp, Homo sapiens
gagttattcatactaaaaatggagaattggggccaatattctacctatgagtttttaattccaagaatttaaaaataatattatatatatatatatatatattttttttttttacaaagtaaagattgggaagcagctgggcatcaggctgagaggctggctaaaaagaaaacagctgtgttggtcttaagtctgagctga

SEQ ID NO: 416606 - DNA, 201 bp, Homo sapiens
gtgagttattcatactaaaaatggagaattggggccaatattctacctatgagtttttaattccaagaatttaaaaataatattatatatatatatatatatattttttttttttacaaagtaaagattgggaagcagctgggcatcaggctgagaggctggctaaaaagaaaacagctgtgttggtcttaagtctgagct

SEQ ID NO: 416607 - DNA, 201 bp, Homo sapiens
gtccaagtgttctcattgttcaattcccacctatgagtgagaacatacggtgtttggttttttgtccttgcgatagtttgctgagaatgatggtatccagyttcatccatctccctacaaaggacatgaactcatcattttttatggctgcatagtattccatggtgtatatgtgccacattttcttaatccagtctatca

SEQ ID NO: 416608 - DNA, 201 bp, Homo sapiens
ctactgccaataaaatgtgtttaaaagcactggcttcccttaattcaatttcattttacttgcttggtgtcaaattgtgattttcaacattttttttttttgccaagatcctcttattttctcccaacacacacgtcccttgaaccccgtgctttcaaacattttacctgccaagccacttttatgaagtaatagcattca

SEQ ID NO: 416609 - DNA, 201 bp, Homo sapiens
tggagatcatgtcccttcgcgctgctgtgcgctatgacccagaaagtgagactttaaccttgaatggggaaatggcagtgacacggggccagctgaaaaakgggggtcttggggtggtgtcagacgccatctttgacctgggcatgtctctgtcttctttcaacctggatgacactgaagtagccctccttcaggccgtcc

SEQ ID NO: 416610 - DNA, 201 bp, Homo sapiens
ctagtgtcacatacaaatttagcaccctagctagaattttctaaaagaattttccgtacagctaaggacttttcttttttaaaaaaaaaaaaaaaaaaagagagagagagagagagacaaaaaatttatttgttattctttatggaaatttttttttgttttttgtttttttttgagacagagtcttactctgtcgcccag

SEQ ID NO: 416611 - DNA, 201 bp, Homo sapiens
actagtgtcacatacaaatttagcaccctagctagaattttctaaaagaattttccgtacagctaaggacttttcttttttaaaaaaaaaaaaaaaaaaaragagagagagagagagacaaaaaatttatttgttattctttatggaaatttttttttgttttttgtttttttttgagacagagtcttactctgtcgccca

SEQ ID NO: 416612 - DNA, 201 bp, Homo sapiens
cactagtgtcacatacaaatttagcaccctagctagaattttctaaaagaattttccgtacagctaaggacttttcttttttaaaaaaaaaaaaaaaaaaagagagagagagagagagacaaaaaatttatttgttattctttatggaaatttttttttgttttttgtttttttttgagacagagtcttactctgtcgccc

SEQ ID NO: 416613 - DNA, 201 bp, Homo sapiens
tcactagtgtcacatacaaatttagcaccctagctagaattttctaaaagaattttccgtacagctaaggacttttcttttttaaaaaaaaaaaaaaaaaaagagagagagagagagagacaaaaaatttatttgttattctttatggaaatttttttttgttttttgtttttttttgagacagagtcttactctgtcgcc

SEQ ID NO: 416614 - DNA, 201 bp, Homo sapiens
accacactcagctaaatgtttttattattattattttttgcagagacagggtctcaccatgttgaccaggctggtcttaaactcctgggctcaagcaatcygcccacctcggcttctcaaagtgctggaattacaggcatgagccaccacgcccgagcttagaatgctattctatgctgctttaatgtattgtctttagat

SEQ ID NO: 416615 - DNA, 201 bp, Homo sapiens
cataatttatactgacaatgttttaaattgagtgtgttctgtgtgtccaatactgtactatatgctgagaataaaaagttaaatgcacaccccttttttcrtaggatttttcaaacagaaaatgttggcagagcttcgagtctaggcttgcaatgagcagtaactctgttgacaaccaagcgatgatgaaaattctattgg

SEQ ID NO: 416616 - DNA, 201 bp, Homo sapiens
tcccttcgcgctgctgtgcgctatgacccagaaagtgagactttaaccttgaatggggaaatggcagtgacacggggccagctgaaaaatgggggtcttgrggtggtgtcagacgccatctttgacctgggcatgtctctgtcttctttcaacctggatgacactgaagtagccctccttcaggccgtcctgctgatgtct

SEQ ID NO: 416617 - DNA, 201 bp, Homo sapiens
ctgggactacaggaactcaccaccacacctagctaatttttgtattttttgtagagatggggtcttgccatgttgcccaggctggtctcaaactcctgggmtcagctgatccatcccccttagcctcccaaagtgctgggattacaggcatgagccaccacacctggccactctaggagctttttaaagtcctgatgtcca

SEQ ID NO: 416618 - DNA, 201 bp, Homo sapiens
ctgcaacctccaccttccaggctcgtgtgattcccccatctcagcctcccgagtagctgggactacaggaactcaccaccacacctagctaatttttgtaktttttgtagagatggggtcttgccatgttgcccaggctggtctcaaactcctgggctcagctgatccatcccccttagcctcccaaagtgctgggattac

SEQ ID NO: 416619 - DNA, 201 bp, Homo sapiens
ccaaaggagagcaacgatgcagaatgccaacacgaccctcggctccgcttcccacagtgccatagagctgggaggctttagatagatggacacgctcctggcatagccattctgaagggaaatctggaggtttattgcaatttctcctgaattcctgtctccccagatgtgaccaaaaataaaacttggccttggattcca

SEQ ID NO: 416620 - DNA, 201 bp, Homo sapiens
aatgggctctttggaatgtgttagcacttttatttcaacatgtagttctttttaattagacgcaggaatgacttgcttaaggttgaggatttttctctctcatacttacctttaacacttgcattgttacctttgtgcaccaaacactcacacaaagtggtgagcctctgaggcaagggaggggcaaacctgattggtgga

SEQ ID NO: 416621 - DNA, 201 bp, Homo sapiens
tgggctctagacggatgcatggatccctggagctggacctaaccagccctgctgaacccaggcagtcaggcctttacacttttatgtcaatcagggacctycctgaaacagtgaaacccaaggggagaaacaaggcagggactcacccacctccctggtggactcagaaaaaggagagcagccatcagtgatctcacagaa

SEQ ID NO: 416622 - DNA, 201 bp, Homo sapiens
cattttaaccagcttttaatgcctagcaatatatcatgaacattttcccatgtcattaaatattctgagtcctgactttcattggctatagattattcttstttatagatgtatcataatttattaaaccagtcctcaagatttagacaagttaaagtaattttttaaacaatatcttatgtcagcaaaggggaaaactat

SEQ ID NO: 416623 - DNA, 201 bp, Homo sapiens
atgcctagcaatatatcatgaacattttcccatgtcattaaatattctgagtcctgactttcattggctatagattattcttctttatagatgtatcatamtttattaaaccagtcctcaagatttagacaagttaaagtaattttttaaacaatatcttatgtcagcaaaggggaaaactattaattcatgctcttcata

SEQ ID NO: 416624 - DNA, 201 bp, Homo sapiens
tgaatgagtattttaaaaggtggaggattaaaaagcttgtgcccttccgccagtactaccatctgctccatccatctctgctctctactctgccccactcrtcatacatcaggatctgcagtcccaactgagagtgccagtgattcttatacctcaagggcactctgggaaccttagcaatcaacatgagaacgatggctc

SEQ ID NO: 416625 - DNA, 201 bp, Homo sapiens
gtctgtccactggggaatgttccaataaattgtggtacatccaaagcattcaccagaaaaattaaaaacaggcttttttaaaagaagtgattttaggaatmcttattgaaagtaagcatgcattaagaatagtgtaatcccatttataacgttaaaagtctatataattgtgtgtttacaaatgtgcacagaaaaaagttc

SEQ ID NO: 416626 - DNA, 201 bp, Homo sapiens
ctctgtctcaaaaaaaaaaaaaaagaacctaatgcgtgagaatggagacaaagtttccgaagtcaatttctgcaagagctttgcaatgtagccccatgtcycctgccccccatttgacactgaagaagtagtaaacagttatatttattaggataattttattttcatcttcaagggaatttcaggagcacagcagtcttc

SEQ ID NO: 416627 - DNA, 201 bp, Homo sapiens
tttttaatgctgattgtatttcttaatgcatctaatcacagaaaatctgtcaaaaaggaaagctttggtctcaaacatatgcttgggtttctgttagcagraaacaaatgtccaaatatgattgcataccagctcacacacatgctcatgcacgtgctcacacttgcactcaagtatggatccaagtgtgaacctggtgac

SEQ ID NO: 416628 - DNA, 201 bp, Homo sapiens
ttaccgaaaacaccacgtgacacacttttggccaaaactcctgatgaaggtgacagatctgcggatgataggagcctgccatgccagccgcttcctgcacrtgaaggtggaatgccccacagaactcttcccccctttgttcttggaagtgttcgaggattagactgactggattcattctcataattcctacagcactac

SEQ ID NO: 416629 - DNA, 201 bp, Homo sapiens
caatgggctctttggaatgtgttagcacttttatttcaacatgtagttctttttaattagacgcaggaatgacttgcttaaggttgaggatttttctctctcatacttacctttaacacttgcattgttacctttgtgcaccaaacactcacacaaagtggtgagcctctgaggcaagggaggggcaaacctgattggtgg

SEQ ID NO: 416630 - DNA, 201 bp, Homo sapiens
ctgataaaggaggacagtgtgagagcaagtgctataaggatggctctctactccatgataatttgcccacctgaaaaagtgtccaaagatctggactcaaagaacataccccaagacatatgaaatggcaaaacatggtgtaaaagtaggtaataaaatggtcttcgcttgctgtggggattagttctaggtacagtgcag

SEQ ID NO: 416631 - DNA, 201 bp, Homo sapiens
gtgatggagaggaaatgactattcatttttagccatcctttagccattgcacactaagtttactattttcttttcttttttttcctttttttttttttttytttgagacatggtcttgctctgtcacccaggctggagtgcagtggtgcactcacggtttactgcagccccaacctcccagggctcaagtgattctcccac

SEQ ID NO: 416632 - DNA, 201 bp, Homo sapiens
tgctaggtgtcaatccttcattagcgtagccacccctttctaactcaacaactccttgacccttcctcctcactgacctacaaagcccttcgctgtttttstttccttcctggcaaataaagaaactcagcttgctttacttttaagttcttttggactttcttttctcctttgatcccatgatttgctggtgagctccag

SEQ ID NO: 416633 - DNA, 201 bp, Homo sapiens
catggtaccctcattccttaggaattaatttccctgacatgatgaatgtgtttccaatccgttcatcacacacacaccccacacacccccccccccccacmcacacacacacatacacacacaccctctttagcagggagaagttaccctactctccaccaggtgtcagtagagtcagttttaacagcatgctttggccaa

SEQ ID NO: 416634 - DNA, 201 bp, Homo sapiens
gtgtgtgctataccatgcacctgacacctcacagaaagccactggaatttctgataaagagccaacagaacctttaccaagcagaattaaacaagaacctratgtgcgactgaatgcagtggctcacgcctgtaatcccagcactttcagatgccgaggtgggcagatcacttgaggccaagagttcaagaccagactggc

SEQ ID NO: 416635 - DNA, 201 bp, Homo sapiens
cctttgaacactatatcaattaccgaaaacaccacgtgacacacttttggccaaaactcctgatgaaggtgacagatctgcggatgataggagcctgccawgccagccgcttcctgcacatgaaggtggaatgccccacagaactcttcccccctttgttcttggaagtgttcgaggattagactgactggattcattctc

SEQ ID NO: 416636 - DNA, 201 bp, Homo sapiens
tcagtggaatcacctgagtggcttttctaagtacgcattattgggcccaggcctggagacggtgagcaaagctcctcagatgattctgccgtgaaaacccctccttgagaactgagaatgctttttctgcatcctgtgtggttgtgccccatacttacaagtaagcagagtgcaaagccaatcttttggaaaatacaaaat

SEQ ID NO: 416637 - DNA, 201 bp, Homo sapiens
ctcagtagttttataaatggcagctaaccagctttattcattgtactattccaaacctttcctttaaacaactactgatgtcctaaatttccaaatatctsttggcttttcgagaaaagagtattttctttattagaggagtattcatttgtagtccctttagaaatgtctccagcagcatcaatatggggttgagcctga

SEQ ID NO: 416638 - DNA, 201 bp, Homo sapiens
ttggccaaaactcctgatgaaggtgacagatctgcggatgataggagcctgccatgccagccgcttcctgcacatgaaggtggaatgccccacagaactcwtcccccctttgttcttggaagtgttcgaggattagactgactggattcattctcataattcctacagcactactgggtgtcatttcattccattgcctag

SEQ ID NO: 416639 - DNA, 201 bp, Homo sapiens
cacagactagctagagcaacttcagcctttactaagacagtggttctcaaacttcggctagtatcagaatcccctggagggcttgctgtccccaccccccmgagtttacgatccagttggtctggggtgggctgcagaatttgcatttctaagaagttccaggatatgctaatgctgctggttcagaaaccaccatttgag

SEQ ID NO: 416640 - DNA, 201 bp, Homo sapiens
aggagatgatgatggattggactgcgagatggcagcggagagaaggaagtagttggattaaacatatattttggaggaagaaccaatgaacttgctaatgrattggatttaggtagtgaagggaagaaaagagttgtcttgaaggttatttgcttaagctcccaggtggatggtggtgccaagatgggactactgtgagag

SEQ ID NO: 416641 - DNA, 201 bp, Homo sapiens
attttggaggaagaaccaatgaacttgctaatggattggatttaggtagtgaagggaagaaaagagttgtcttgaaggttatttgcttaagctcccaggtrgatggtggtgccaagatgggactactgtgagaggaacaggttttagaaagaattaagttggagatgccctggttgggcaaatggagatgtcaagttgatg

SEQ ID NO: 416642 - DNA, 201 bp, Homo sapiens
caaaaactagaatctgtaatttttactatatataatgttattctataacttccaatcatgaaatattaaggggattacagcatgaaatatatttagagttkctcatcttgatttttatttataaatatagagttttgcatccttttgaaggtcatcagaatctcatttattacaagggatacacagggtaagtcccctaat

SEQ ID NO: 416643 - DNA, 201 bp, Homo sapiens
tacagagtgtggatttagagagatcttgagggactggaatggtgggtccaaatcaagaaggcctgaaaaaggatttaaaaccacaacattgcattagatakatgttggaggcccaaattctaaaagactatcaattattaatttagtatgcactgataagcatgtagatgccttaacccctattgcagatttaagctccat

SEQ ID NO: 416644 - DNA, 201 bp, Homo sapiens
ttggatgtggctctgtggtgcccatttctgtcctttacctaccggaccatattgccacatttggcacagcagctgatctgcacctccatgtccatctttcygcatctgctttctctgacatcatcctttttaatctcctgtgtccctctgcctacgcatttcctgtctgcttccttgccttactttgcccaagtggttctt

SEQ ID NO: 416645 - DNA, 201 bp, Homo sapiens
acttcctttagaagactataaataaaaaatgatagaaagtgtcaaactgtaattacattgagggttttagtaacctcataaaccataagaatgaaataccaaaaaatttttttcaactgccaccatcaaaatctcatttgctgattccatttttgcagcattgatggaagtaatccagttaggctgacatttttatagagt

SEQ ID NO: 416646 - DNA, 201 bp, Homo sapiens
cagaaagaatccaattttaagctgtatgttgactcataacccatttgaaatacagagaaagaagcaaaatatttctttacaccttaggttgcctgccagtkcctacatagctttggtggggttaaggaggcctgccttccttggtctctctctttttcttttctttccttaacttgttttatgtatgaataaatgtacatc

SEQ ID NO: 416647 - DNA, 201 bp, Homo sapiens
tttagtcttgcagacattataaacaataacaaaccatgaccacaagagcggattcttaaaaatgcaagaaatttttactactagagaaatctgctgttacwatagatgctatcaataggttaaatgagaaaatttctatcatttttataggtgaccaaagtacttgatttaatataattgctgataaaaactcttaatgta

SEQ ID NO: 416648 - DNA, 201 bp, Homo sapiens
aaaatcaaagtgtacttgttagtcataatcaattagaaaataaacaaaaaacacatatcacattagcaactctaaaatagaaaataactaggactaaatayaaaaagaaatttataagaccactttaaaatatatataaaataatttggaagatgacatttaataagaaaatattctatactaattgacagaaagaatcaa

SEQ ID NO: 416649 - DNA, 201 bp, Homo sapiens
aaactcctgatgaaggtgacagatctgcggatgataggagcctgccatgccagccgcttcctgcacatgaaggtggaatgccccacagaactcttcccccmtttgttcttggaagtgttcgaggattagactgactggattcattctcataattcctacagcactactgggtgtcatttcattccattgcctagctctttt

SEQ ID NO: 416650 - DNA, 201 bp, Homo sapiens
actcctgatgaaggtgacagatctgcggatgataggagcctgccatgccagccgcttcctgcacatgaaggtggaatgccccacagaactcttcccccctktgttcttggaagtgttcgaggattagactgactggattcattctcataattcctacagcactactgggtgtcatttcattccattgcctagctctttttt

SEQ ID NO: 416651 - DNA, 201 bp, Homo sapiens
tgttcttttggcttaggattgtcttggcaatgcgggctcttttttcgttccatatgaactttaaagtagttttttccaattctgtgaagaaagtcattggkagcttgatggggatggcattgaatctataaattaccttgggcagtatggccattttcacaatattgattcttcctacccatgagcatggaatgttcttcc

SEQ ID NO: 416652 - DNA, 201 bp, Homo sapiens
ggaaatgactattcatttttagccatcctttagccattgcacactaagtttactattttcttttcttttttttcctttttttttttttttctttgagacakggtcttgctctgtcacccaggctggagtgcagtggtgcactcacggtttactgcagccccaacctcccagggctcaagtgattctcccacctcagcctcc

SEQ ID NO: 416653 - DNA, 201 bp, Homo sapiens
taagtttactattttcttttcttttttttcctttttttttttttttctttgagacatggtcttgctctgtcacccaggctggagtgcagtggtgcactcayggtttactgcagccccaacctcccagggctcaagtgattctcccacctcagcctcccaaagtgcttggatttacagtaggccactgcacccggtgtatgt

SEQ ID NO: 416654 - DNA, 201 bp, Homo sapiens
attcccattttacagctgaagaaactgtggctttgagagattaagtaaattccacagagttaggtagttattgagaagcagagtcattcattctttatctstggaactgagttagtagaaataaaaaataaatgatataactgaattcaagataaacattatatcattagatatttttagaccaaaaatatactaagcctg

SEQ ID NO: 416655 - DNA, 201 bp, Homo sapiens
catttgttctttgctgacatgaactggttcttttcagctgccatgtgaagaccagatcatcctcctcaaaggctgctgcatggagatcatgtcccttcgcrctgctgtgcgctatgacccagaaagtgagactttaaccttgaatggggaaatggcagtgacacggggccagctgaaaaatgggggtcttggggtggtgtc

SEQ ID NO: 416656 - DNA, 201 bp, Homo sapiens
gctgctgcatggagatcatgtcccttcgcgctgctgtgcgctatgacccagaaagtgagactttaaccttgaatggggaaatggcagtgacacggggccasctgaaaaatgggggtcttggggtggtgtcagacgccatctttgacctgggcatgtctctgtcttctttcaacctggatgacactgaagtagccctccttc

SEQ ID NO: 416657 - DNA, 201 bp, Homo sapiens
atcatgtcccttcgcgctgctgtgcgctatgacccagaaagtgagactttaaccttgaatggggaaatggcagtgacacggggccagctgaaaaatggggdtcttggggtggtgtcagacgccatctttgacctgggcatgtctctgtcttctttcaacctggatgacactgaagtagccctccttcaggccgtcctgctg

SEQ ID NO: 416658 - DNA, 201 bp, Homo sapiens
gtcccttcgcgctgctgtgcgctatgacccagaaagtgagactttaaccttgaatggggaaatggcagtgacacggggccagctgaaaaatgggggtcttrgggtggtgtcagacgccatctttgacctgggcatgtctctgtcttctttcaacctggatgacactgaagtagccctccttcaggccgtcctgctgatgtc

SEQ ID NO: 416659 - DNA, 201 bp, Homo sapiens
gatcatgtcccttcgcgctgctgtgcgctatgacccagaaagtgagactttaaccttgaatggggaaatggcagtgacacggggccagctgaaaaatgggvgtcttggggtggtgtcagacgccatctttgacctgggcatgtctctgtcttctttcaacctggatgacactgaagtagccctccttcaggccgtcctgct

SEQ ID NO: 416660 - DNA, 201 bp, Homo sapiens
aaaactcctgatgaaggtgacagatctgcggatgataggagcctgccatgccagccgcttcctgcacatgaaggtggaatgccccacagaactcttcccchctttgttcttggaagtgttcgaggattagactgactggattcattctcataattcctacagcactactgggtgtcatttcattccattgcctagctcttt

SEQ ID NO: 416661 - DNA, 201 bp, Homo sapiens
gttcctgactggcatttttgcatttgttctttgctgacatgaactggttcttttcagctgccatgtgaagaccagatcatcctcctcaaaggctgctgcayggagatcatgtcccttcgcgctgctgtgcgctatgacccagaaagtgagactttaaccttgaatggggaaatggcagtgacacggggccagctgaaaaat

SEQ ID NO: 416662 - DNA, 201 bp, Homo sapiens
ctgacatgaactggttcttttcagctgccatgtgaagaccagatcatcctcctcaaaggctgctgcatggagatcatgtcccttcgcgctgctgtgcgctrtgacccagaaagtgagactttaaccttgaatggggaaatggcagtgacacggggccagctgaaaaatgggggtcttggggtggtgtcagacgccatcttt

SEQ ID NO: 416663 - DNA, 201 bp, Homo sapiens
tcgcgctgctgtgcgctatgacccagaaagtgagactttaaccttgaatggggaaatggcagtgacacggggccagctgaaaaatgggggtcttggggtgrtgtcagacgccatctttgacctgggcatgtctctgtcttctttcaacctggatgacactgaagtagccctccttcaggccgtcctgctgatgtcttcagg

SEQ ID NO: 416664 - DNA, 201 bp, Homo sapiens
ccacgtgacacacttttggccaaaactcctgatgaaggtgacagatctgcggatgataggagcctgccatgccagccgcttcctgcacatgaaggtggaaygccccacagaactcttcccccctttgttcttggaagtgttcgaggattagactgactggattcattctcataattcctacagcactactgggtgtcattt

SEQ ID NO: 416665 - DNA, 201 bp, Homo sapiens
ttcctgactggcatttttgcatttgttctttgctgacatgaactggttcttttcagctgccatgtgaagaccagatcatcctcctcaaaggctgctgcatrgagatcatgtcccttcgcgctgctgtgcgctatgacccagaaagtgagactttaaccttgaatggggaaatggcagtgacacggggccagctgaaaaatg

SEQ ID NO: 416666 - DNA, 201 bp, Homo sapiens
gcatttctttttaatttctgaagttagctatcacagttctcctaatctcttctctcagttgaatatctcaaattcaagttcacttagccattcgtgtgaartggattttcaacaccccagtgtctacattaactttcccgggaagctctttattttttcaaatacttctcataaaatatatttccaagaattgaacatgct

SEQ ID NO: 416667 - DNA, 201 bp, Homo sapiens
attttacataaatgattccattctgtatgtatgcttttaccaagattttttcactcaatgttatgacattctgtttttcagagatctatgttgttatgtakagatctagctcatatatttttcttgctgtgtgacaaatgtatgaatttattgctgtgtgacaaatatatgaattcctggattaacgaatatttagattgt

SEQ ID NO: 416668 - DNA, 201 bp, Homo sapiens
acagactctttattcacttttgagaaaaagtgaaacacccaagtctgaaaatcaaagtttgtttctcagtgactctttcaagaaaaactaaattatgttatatgaagaaagcaggtagttcagcttacagttaatcagtcacacaagtgcttttcctcaagacaaccctcaaacttctatctgcaacagcagtgccatatg

SEQ ID NO: 416669 - DNA, 201 bp, Homo sapiens
tcccatggggcgtggatagtacctagaagggagggattgtaggggactggtaagcttcagatttttgatctgggtgccagtgacacaatttgtgatccttyctcaaggcactcactttcaatctctgcatgtgtctatttttaagtatgtgacactttaataaaaagttgaaaccaaaataaataaataaatatcctctat

SEQ ID NO: 416670 - DNA, 201 bp, Homo sapiens
atgacactttcatggaacccagaaaagttcaggatggttgcaacacagtggcaagatggaggaagtggagagaagaggagcaaggtatgagaagtaattgstggcctgtgcgtacaaagccttataagccattgcaaggtctttggacctactactagtaaatgagaggttttaagcagtgagattacatacgtgttgtag

SEQ ID NO: 416671 - DNA, 201 bp, Homo sapiens
atatccatagcttccctactcataaggattgtttctggcttttatttttagaacaaagtaagtcttccgtggtgtaatcttggataaaatggagatatgcmggctgatagtatttaggaaatttcacaagttgaacaaccatatgcatgagatgtttttgtggattagcagcagactagagagggttgatctgccaaagcc

SEQ ID NO: 416672 - DNA, 201 bp, Homo sapiens
gaaatattgctgcacatcatcttagcatacatgtccctagatgagggtcggaaaaacaaagagtctgaagaacaagataaagacttcatgaagtcactccrgtgtggcttagccaaggtaggatcactttggtttggcaccatcataagctggcaaaaagaatacaatcttcagtttctaagccttctcattttagaagac

SEQ ID NO: 416673 - DNA, 201 bp, Homo sapiens
ttgctgacatgaactggttcttttcagctgccatgtgaagaccagatcatcctcctcaaaggctgctgcatggagatcatgtcccttcgcgctgctgtgcdctatgacccagaaagtgagactttaaccttgaatggggaaatggcagtgacacggggccagctgaaaaatgggggtcttggggtggtgtcagacgccatc

SEQ ID NO: 416674 - DNA, 201 bp, Homo sapiens
tcacgatcaacaaaagttttaagtaaacagactaaaatagaaaagtattagagtatatcaaatgtatttgaaacatttgtttcatccaaaaaatgtgaaamcacacacacacacacacacacacacacacacacccctttatatgtatgtcctggatcatgattgcaaaatggaattctgactggggttacagtaaaaaaa

SEQ ID NO: 416675 - DNA, 201 bp, Homo sapiens
tcacttgaaactttatgcagattctaaaagattatgcctgtcacagttaaagcaggtataaaaataagttacccaaacggttttccattctttactcgtayctcactctttaccacgtgctcatagtttgttgctcttcaacacttttctctaaataagttaataaaatgtattcttctatacagtagctatttcttgcct

SEQ ID NO: 416676 - DNA, 201 bp, Homo sapiens
gacccaaggattcatacatagttggcctagacctgagacccaagcctcaggaaccccaagctggcctcattaacactctgtgatacggggttttcctaagycaaagaaaatgaagagggctaacaagtttcaattgaattcaaaagtgcagagtagccattaagtagtgttatacaggcaaacttactgaaataaaatttg

SEQ ID NO: 416677 - DNA, 201 bp, Homo sapiens
tttgctgacatgaactggttcttttcagctgccatgtgaagaccagatcatcctcctcaaaggctgctgcatggagatcatgtcccttcgcgctgctgtgygctatgacccagaaagtgagactttaaccttgaatggggaaatggcagtgacacggggccagctgaaaaatgggggtcttggggtggtgtcagacgccat

SEQ ID NO: 416678 - DNA, 201 bp, Homo sapiens
tattgcaatatccacgactgcagtggtctaaattcatacctgcagtatctccaaagtgtgcctgtagttgagattggagggtactctaaacaagaattagrtaaatgtgtgcatactgaacacggagccagcagaactcttccccactgggtttccggaaccctaccatccaagccttcactctccaggtggtagtttgaa

SEQ ID NO: 416679 - DNA, 201 bp, Homo sapiens; identical to SEQ ID NO: 224810

SEQ ID NO: 416680 - DNA, 201 bp, Homo sapiens; identical to SEQ ID NO: 224813

SEQ ID NO: 416681 - DNA, 201 bp, Homo sapiens
cttcgcgctgctgtgcgctatgacccagaaagtgagactttaaccttgaatggggaaatggcagtgacacggggccagctgaaaaatgggggtcttggggwggtgtcagacgccatctttgacctgggcatgtctctgtcttctttcaacctggatgacactgaagtagccctccttcaggccgtcctgctgatgtcttca

SEQ ID NO: 416682 - DNA, 201 bp, Homo sapiens
gggagtttggctctagagaccatgttggacaagactagtcaatggcagtttgctggtgaggagagaaactgtcccagtgtgacccaccccgaaggacccartaagccatctgtgcatcagtggtcccactcctgaggctccaggaagtgcagcttgctgtgtatcttgggagcatctgtgtgccttgtctcatctttctcc

SEQ ID NO: 416683 - DNA, 201 bp, Homo sapiens
cttttattgtctttactccccatagagaagggatactagtccaactaaacttgtttaagtagtcataaggtgcttctttccagactttaaagatttgttcytttatttaagaaacatttattgagtggatactatgtgccagaaagtaaataagtcaggcacattcctctagtgggaggcagataataagagataaacaaa

SEQ ID NO: 416684 - DNA, 201 bp, Homo sapiens
taaacagtgtgatgggatgaagagtttgtgaactggaagtggggagagacttcatttctgtgaacatggtggtcagaagaagcatctctgaggagatgacrttgtgctatgtctggaagcagagaaaccacctctataaagcaaaatataatcaaatatcttcgtgctgtgtggtcacaatatctagtcattagaaccagt

SEQ ID NO: 416685 - DNA, 201 bp, Homo sapiens
acatggtggtcagaagaagcatctctgaggagatgacgttgtgctatgtctggaagcagagaaaccacctctataaagcaaaatataatcaaatatcttcrtgctgtgtggtcacaatatctagtcattagaaccagtcttgaggtctgcactgttcacttaaaggctcctaacagttcaccagcctgaccatctatggaa

SEQ ID NO: 416686 - DNA, 201 bp, Homo sapiens
cctgctatggcatcccaaagtgttggaattataggcataagccctatgcccagactataggaaaattttaaattgtccgcaatcctatccatccaaagatkatggagctaaattattaatgagtagccactatcttctaaacataataacccaagaccatcataatcataatagctaataatcaaatattaacttaggacc

SEQ ID NO: 416687 - DNA, 201 bp, Homo sapiens
aaatatgttagtaatactttttaatgaagacatttctaagataagtattctttgccttagcaaaataatttaatggacattattataaaccttgattattrtacagtaccatataagtagataaagagaaatcctgcacctgattagacttagaacataaaattttgaataaatttaaatatatgtccctcactaattttt

SEQ ID NO: 416688 - DNA, 201 bp, Homo sapiens
tgctaactcagtggttctcaaagagtgggcccagagcagcttcatcagcacaccctgggaacttgttagaaatgcagattcccaagctccatccctgaccygctgaatcaaatacactggggatggggcccagaaatcaagtgatactgacgcacagtgaagtttgggggccactatgttaggctagtctcaccactggca

SEQ ID NO: 416689 - DNA, 201 bp, Homo sapiens
cctattcatccccctgattccaggcattgagaaataatgatagcaatagattccatttattctgcacctatgctgtcctagttaccacactcaggtgctcrggtttgcccacattcaatctaatccttctaaccgatttgcagggttgcttgtattaaccccattttcagacggggacaatcaagatcaaagagattaagt

SEQ ID NO: 416690 - DNA, 201 bp, Homo sapiens; identical to SEQ ID NO: 224806

SEQ ID NO: 416691 - DNA, 201 bp, Homo sapiens
gtgctcgggtttgcccacattcaatctaatccttctaaccgatttgcagggttgcttgtattaaccccattttcagacggggacaatcaagatcaaagagwttaagttatccaaatgtgacatcatggttagagcctaggtctgtattcttctcagtgcatatcccagtgagatgactgtgtggtcgtttcttaatcctca

SEQ ID NO: 416692 - DNA, 201 bp, Homo sapiens
ctctcaagcagttatcagttgaagttataatacaaacccccaaactgaggggttattagcacagtttcacacacgactgtaatagcagttggagaactgtrtctgtcataaaagcaatgcaaactcctgaggttaaagttggtgaagattacagtcaactttgagtatgaaaaatggttgtcgaaagtctgcagccaagta

SEQ ID NO: 416693 - DNA, 201 bp, Homo sapiens
catcctcctcaaaggctgctgcatggagatcatgtcccttcgcgctgctgtgcgctatgacccagaaagtgagactttaaccttgaatggggaaatggcartgacacggggccagctgaaaaatgggggtcttggggtggtgtcagacgccatctttgacctgggcatgtctctgtcttctttcaacctggatgacactga

SEQ ID NO: 416694 - DNA, 201 bp, Homo sapiens
cagctgccatgtgaagaccagatcatcctcctcaaaggctgctgcatggagatcatgtcccttcgcgctgctgtgcgctatgacccagaaagtgagacttyaaccttgaatggggaaatggcagtgacacggggccagctgaaaaatgggggtcttggggtggtgtcagacgccatctttgacctgggcatgtctctgtct

SEQ ID NO: 416695 - DNA, 201 bp, Homo sapiens
tgcatggagatcatgtcccttcgcgctgctgtgcgctatgacccagaaagtgagactttaaccttgaatggggaaatggcagtgacacggggccagctgawaaatgggggtcttggggtggtgtcagacgccatctttgacctgggcatgtctctgtcttctttcaacctggatgacactgaagtagccctccttcaggcc

SEQ ID NO: 416696 - DNA, 201 bp, Homo sapiens; identical to SEQ ID NO: 224812

SEQ ID NO: 416697 - DNA, 201 bp, Homo sapiens
aatgagaaaatttctatcatttttataggtgaccaaagtacttgatttaatataattgctgataaaaactcttaatgtaacaaacatagaaggttaattakttttaaaagattcttttttaaaagattaaatatccacttaattataaaattctctatatatttcaaaatgagaaataagaaggaatataaattaatgata

SEQ ID NO: 416698 - DNA, 201 bp, Homo sapiens
ttcaattagtgtctatttcctccccatgacatgccaaacacagtaacttcttcttttagaggaagcctctctgcatttgcactcatcattctttttccccraaatgtccttcttgttttctccagctagtaaagatgtcctcttctttcaagaccctcttgtgaaggaagttttgagggttgcttcatattgaagtagcac

SEQ ID NO: 416699 - DNA, 201 bp, Homo sapiens
tttagaggaagcctctctgcatttgcactcatcattctttttccccaaaatgtccttcttgttttctccagctagtaaagatgtcctcttctttcaagacsctcttgtgaaggaagttttgagggttgcttcatattgaagtagcactttctctgtatgtcaactgagtgctgtctgagtctctatcacaacatcccaccc

SEQ ID NO: 416700 - DNA, 201 bp, Homo sapiens
acacttttggccaaaactcctgatgaaggtgacagatctgcggatgataggagcctgccatgccagccgcttcctgcacatgaaggtggaatgccccacakaactcttcccccctttgttcttggaagtgttcgaggattagactgactggattcattctcataattcctacagcactactgggtgtcatttcattccatt

SEQ ID NO: 416701 - DNA, 201 bp, Homo sapiens
ccatccccagcctgagggccaagtctgactgttgctcttggatctcattaaggtagtggtgaggtggggagttcagctctgactaggacaagtcataaatrggcagatgagaatatggattcagttctctagggcagtgtgtctatgacttgaaagtgcacatgaatcacctgggggtcttgtccaaatgcagattctgac

SEQ ID NO: 416702 - DNA, 201 bp, Homo sapiens
acttcttacttggctgttgatttccaagagaaagagtcccaagcacacgaaaacagaagttgcagatcccatgaggcccagtctcaaatcacacaggatcmcttcatccacactggattggcccaaacaagtctgagtgccagccaggactcaacggtccccctgtagatgggaggatagcacagaatgggcagccgtctg

SEQ ID NO: 416703 - DNA, 201 bp, Homo sapiens
gccatttcggttacacaatatcttagactttttcttcaaagacttttccaagagccactacttctaagttccttggtcccacagtgcaaagagaaaaaatraaaatgatctgaaagacatttctttaagaacttttgtcttaaggagttaaaatggtcttcagtctttaaaatgtttctctcttcataaacctgttcagtg

SEQ ID NO: 416704 - DNA, 201 bp, Homo sapiens
ttgtttgacttttaagggaggcctggggaagctctgtaatctagtttggacatatcaagtttattaaagtagacaattagatatacaagtctagagttcawggagaggtctggggtctatagagacacatatttgggaaatgtaaccttatgaataatatttaaagccattgagacagaatgagatcaccaagggagtaag

SEQ ID NO: 416705 - DNA, 201 bp, Homo sapiens
cggggcttgcctgtgttgagagaatagaaaagtaccaagatagtttcctgctggcctttgaacactatatcaattaccgaaaacaccacgtgacacacttytggccaaaactcctgatgaaggtgacagatctgcggatgataggagcctgccatgccagccgcttcctgcacatgaaggtggaatgccccacagaactct

SEQ ID NO: 416706 - DNA, 201 bp, Homo sapiens
ttaccgaggtgttttcccagctcctgggtggctcctgtgcatatgagcaactcccttaatggggctgccttaagaattaattaataactcatgaacgtatkgagctcattatgtgctagaaattgtgctatgagcccagaaatccaagacggatccagctggttctggagtgaaatagatgttttgataggcaattaaaga

SEQ ID NO: 416707 - DNA, 201 bp, Homo sapiens
caatagaaaacacctgcagaccatgtgcacacttaactttcctgcccaacctgcctccccaacggcccatgctagaatagcttgtgcccagaaaacaaacrgtgacacttcatctcttcagcgtcagaaaatgggcatagaatgtacccatgcaattgaatgtatctcattctccactggcatagtagatataaactattc

SEQ ID NO: 416708 - DNA, 201 bp, Homo sapiens
tttcccagctcctgggtggctcctgtgcatatgagcaactcccttaatggggctgccttaagaattaattaataactcatgaacgtatggagctcattatrtgctagaaattgtgctatgagcccagaaatccaagacggatccagctggttctggagtgaaatagatgttttgataggcaattaaagaggcagggaatac

SEQ ID NO: 416709 - DNA, 201 bp, Homo sapiens
acttagattcagttatgttctgaaattatccaagttggcttttcgcacagcctgcagtgactaagtagattctggtcatccatcggctaattttgtgctgwacagtcctatctgcaggaaatacttgacaagaatataccagtgatcagtccattcacttcctgaaactgaacctaaattggcctacttacaagacttcat

SEQ ID NO: 416710 - DNA, 201 bp, Homo sapiens
ggtccaataaagacaatggaaagaatgggactagaaggaggccatgaacagggtaaggatagcaagggataagagagaaggaaaagaataataataaggarcaggactgccaagtaacaagtaatactgtgcagcttgtcaggttgtgagcagcactcacttcattgtcaaggctctaaagacaaatgtcacctatctcat

SEQ ID NO: 416711 - DNA, 201 bp, Homo sapiens
atatatattctctccaaaagacagcaagctccctaaaggcagatattattattgtatatgtgttgtattgtatatgtatatattgtattatatatgtgatrtacatgttatttttgttttacactgcatgcctagcacttagcacaggggttaatcagtaaaaggcactcaaagaatatttcacaaaaggatgcatagagg

SEQ ID NO: 416712 - DNA, 201 bp, Homo sapiens
ggtcattatttaacccactacagataggtattgttattattcccattttacagctgaagaaactgtggctttgagagattaagtaaattccacagagttasgtagttattgagaagcagagtcattcattctttatctctggaactgagttagtagaaataaaaaataaatgatataactgaattcaagataaacattata

SEQ ID NO: 416713 - DNA, 201 bp, Homo sapiens
ttaggtggatgctggatttggctggattcgagttgaggttattgaagaaacactatgtaggctgacaagtatgaaagtacacatttaaatagaggataaargaagtaatttttaagaaagtcatattgtacatcctgtcatttcacatgaagtaacctgccactgtggctatggtctgtgaaatgaagtatgtgaactttc

SEQ ID NO: 416714 - DNA, 201 bp, Homo sapiens
tctttctagtctatattttctttctttcttttaggacttaaatgtcttttttaaagatttcactgaagtaaatatatacacatataactcactatctttarcattttaggtatagagttcagtggtaataaatttatattctttaaaaatgttgtctttacgtttaagcatatatttcatctggaatggattcttgtgtta

SEQ ID NO: 416715 - DNA, 201 bp, Homo sapiens
cctttagaatgtttgtgcagaagacaccactgaaagtctatgactaaagctcctggatcctttgctagggcctccctccacaatacatctgattgtattgkcgtctcctttccagataaggatttttctgaagatccttctatatgtggttcttctctaccctcttgtcttaggagaactggaaatattgaccagggctgg

SEQ ID NO: 416716 - DNA, 201 bp, Homo sapiens
acacatagcagcagtccccaagagtcttctcatatcatcacgttgctcacatcttagggattcccaaaagagaaggttgaagccaggactctggatagccycctgacctttgttcaaacagaccctttgtgcactgatgggcatatgtcaagattttgagcagagaaacaggcagaagagcagaaagaaagtttccccctt

SEQ ID NO: 416717 - DNA, 201 bp, Homo sapiens
acgccttttttagaagtagacatctattaacattttagaggatattacaaaaattatacgtattcattgaaggtttatttatacaacataataaaggtaakgatttatggtaacactaccacaagattttggcacctattttagtcttttttcaaatatttgtgtgtgtgcacacacacatatacacatacatacatatat

SEQ ID NO: 416718 - DNA, 201 bp, Homo sapiens
ctcaatttaatgtcaggtgaagcagttgcatactaatcaataacctcagatgcacacatttgtgcctatttaaatgcctgccctagtaatcctatactgtrttattgtgtagtaaaatagtccccaaagaaaaatgtaccttcttgcatcttcgaagtatacatgcatgtggttagggctatcacttaccatctttagata

SEQ ID NO: 416719 - DNA, 201 bp, Homo sapiens; identical to SEQ ID NO: 224807

SEQ ID NO: 416720 - DNA, 201 bp, Homo sapiens
agacttttcagactatgaatacatatcacatggtctctaaggtacagttgtacattatacccgtggaagttttctttcttaaataattaaacgagattttyaattgtataaaataagaatcttaaatattaagttatgatgctttctttaagagtgtctagtttccttccttctctctcccttcttccctctgtttacttc

SEQ ID NO: 416721 - DNA, 201 bp, Homo sapiens
aaatgagcataaatttgcctgccattatgtaaatataatggctcatcaggtaattttcttcattgaaatgggaagacttgtataagtgttgaaatggagaytgaattttacttgcatttaaaatttgttttttattgtcaaaggggtatttacagggatccctgggacaaattttcctaatattaatgtatgtgttataca

SEQ ID NO: 416722 - DNA, 201 bp, Homo sapiens
aaaataaaagttttattaaggttaaatttgttcctgtgttagaaagataaggtttattctcacatgcctgaactagttccttccaacatgtttgctagctyttctgttgacacaaaatgtcaatggcctgagaaagactttacaccctcaaaagagagataaaggaaactcaagaccatgagcttctttatcacagtgata

SEQ ID NO: 416723 - DNA, 201 bp, Homo sapiens
ggtctcaaacatatgcttgggtttctgttagcaggaaacaaatgtccaaatatgattgcataccagctcacacacatgctcatgcacgtgctcacacttgyactcaagtatggatccaagtgtgaacctggtgacatagtggcacttagagccaaatactaaacatatgtcgaaatttggtgtgatcacaacagcagaatg

SEQ ID NO: 416724 - DNA, 201 bp, Homo sapiens
gaaaaagtacactgcttcctcctccagagaaaaccacatgcatttaaaggtataaactctggtatgtttgctaaaaaaaaaaaaaaaataaataaataaawaaaaaagcatacttccccagaagcctcaaggcttcctggaatttctgttaagaattcagatgtactgatgataaatttctaaataccacaatttcagcca

SEQ ID NO: 416725 - DNA, 201 bp, Homo sapiens
cactgaaaaagtacactgcttcctcctccagagaaaaccacatgcatttaaaggtataaactctggtatgtttgctaaaaaaaaaaaaaaaataaataaawaaataaaaaagcatacttccccagaagcctcaaggcttcctggaatttctgttaagaattcagatgtactgatgataaatttctaaataccacaatttca

SEQ ID NO: 416726 - DNA, 201 bp, Homo sapiens
gaatgtaagactggagagatacatagagatcatttagtcaaaccttcttaattctaaggaataatatctggcccaaaagaaaggaggtaacttgtccaagsctatcccttaaaggtgcctgtgtcttgggctcaagcccaagtccttgccatctggggccctttttgggataacatgctgctgaaaagtttttttttttta

SEQ ID NO: 416727 - DNA, 201 bp, Homo sapiens
atgttggaggcccaaattctaaaagactatcaattattaatttagtatgcactgataagcatgtagatgccttaacccctattgcagatttaagctccatyaaaataatggttctcaaacttgagcggcgttataatcacctggagagcttgttaacatacagattgctgcatcacatccccagagtttctgattcagtca

SEQ ID NO: 416728 - DNA, 201 bp, Homo sapiens
catgctatgcaatttacccacttaaagtgcacacaattgagtgatttttagtatattctcagtttgcagctatcaccactattaattttagatcatttttrtcactcccctcaaaaacctcacactcattaacacttgctcctcattccctcctccagctctgggcaacaactaatctactttctgtctgtatgaattatg

SEQ ID NO: 416729 - DNA, 201 bp, Homo sapiens
tagccaggtttgatagagagatggcttctgggacaattcttttcagaggccaaggtggctgatgagccacttgctccactcatttccctgtgagatcatgsagtaaaattagaggaacataaaaggcgaaggcttccttacatccttagaaggtcatgaccagtgtgtccagcttctgatttctcatgacaatattgtttt

SEQ ID NO: 416730 - DNA, 201 bp, Homo sapiens
gagatcatttagtcaaaccttcttaattctaaggaataatatctggcccaaaagaaaggaggtaacttgtccaagcctatcccttaaaggtgcctgtgtcytgggctcaagcccaagtccttgccatctggggccctttttgggataacatgctgctgaaaagttttttttttttagccattatgttctaatgctttttat

SEQ ID NO: 416731 - DNA, 201 bp, Homo sapiens
aataactctcccatgttttccagagtaaccaccagggtccaccttgacataggcatgaggcaatgccttggttcagcataaaaatgccaccaggaaacctrtgtcatcttggtccaagaaacttataaataccattcattcaaaatgggcacatgtgttgagtgaggcagcagtgagtccaggacagcaacaagattatac

SEQ ID NO: 416732 - DNA, 201 bp, Homo sapiens
gattgaggtataggaaggaaaaatggggaggaatggggctgtgcagctgggtaatgtgatgggtttcttggagctcagtctgaaggagacaagatgatgaygtctctcgcccccacctggatgtctgagctcttattattttgagatatgtcccatcagtacctaatttattgagagtttttagcatgaagggctgttgaa

SEQ ID NO: 416733 - DNA, 201 bp, Homo sapiens
aatttagcaattgtttatatgatagcagaagcactgttttcttgggcattttagttaaatttgagacataggaagttaccaggtagttagggttaaatggycagtattcctgggagaaaataagattaatatggcatcagaaattggttctatggcttttttttttaattacactttaagttttagggtacatgtgcacaa

SEQ ID NO: 416734 - DNA, 201 bp, Homo sapiens
gacctaagtttgtcctgctcaaacttggctgcatattagaatccctctgggagctttctttttgagacagggtctcactctgtggcccaggctggagtgcrgtggaatgatctcagctcactgcaacctccaccttccaggctcgtgtgattcccccatctcagcctcccgagtagctgggactacaggaactcaccacca

SEQ ID NO: 416735 - DNA, 201 bp, Homo sapiens
attgtttatatgatagcagaagcactgttttcttgggcattttagttaaatttgagacataggaagttaccaggtagttagggttaaatggtcagtattcytgggagaaaataagattaatatggcatcagaaattggttctatggcttttttttttaattacactttaagttttagggtacatgtgcacaatgtgcaggt

SEQ ID NO: 416736 - DNA, 201 bp, Homo sapiens
tcatttagtcaaaccttcttaattctaaggaataatatctggcccaaaagaaaggaggtaacttgtccaagcctatcccttaaaggtgcctgtgtcttggsctcaagcccaagtccttgccatctggggccctttttgggataacatgctgctgaaaagttttttttttttagccattatgttctaatgctttttattatt

SEQ ID NO: 416737 - DNA, 201 bp, Homo sapiens; identical to SEQ ID NO: 42010

SEQ ID NO: 416738 - DNA, 201 bp, Homo sapiens
tattagggaattaattcattttctatcttaaacagtatatatatttttctcaatttagtacatatctcttctttttgtttatggcaatatttaaccttaayttttcttcctttgaaataattttatacttacaggaaagttgtaaaattaatacaaagaatttcaagccatcctttaccctaagtcttaaaatgttaattt

SEQ ID NO: 416739 - DNA, 201 bp, Homo sapiens
tcttccaacatggtgaacatcttgtgctcatttgtctgattttcacctaagaatgtgaagtgttcagtatctagccagcttctcagctatggttggcatcygtgtaatttccagtgataatctgacttactgcatcctcttctcagattatataagggctgtgttcttttactttttagattcttcgtcacagcctcccca

SEQ ID NO: 416740 - DNA, 201 bp, Homo sapiens
agatttcattcattccagaatgatttctgcctatttagctacctactctactttatatttcaaaacagagggatgttctgtatccaccagtgattttacayagtaggacctcaaacaaggcttggcaaagacacttaaaaccttcgtaacaccctaaccttgtattgttaagcctccctaattctttcatagaattccaaa

SEQ ID NO: 416741 - DNA, 201 bp, Homo sapiens
ctcaacggaatgacatcactttatggaaaccctaaacaccaataggccttctgctatagatttttgaggaacagaatgggagtgaatgggaaacaagtggrcatgaatgtaatgctcataagaaaaatgctcttatggccaaattcactcatgagctctgtatctgtaccgatctgggactgatacatttattagcaccca

SEQ ID NO: 416742 - DNA, 201 bp, Homo sapiens
tggacttttgcaattagaagtggcacattctaattaaactaatggtaaattatactaagggtggaaattatactgagggtgaatgattttatggatgtctrtcctctaaaggtggtcatagattttcacacaatcaaatccctactaaattttatcctcctttcaccattgctccacccccaagtgttctgctagatgtta

SEQ ID NO: 416743 - DNA, 201 bp, Homo sapiens
taaatatgggtgtccctactagctaggtgataagatctgagaaaaaattgcttaatttttctgagattcaatttctaattctgtaaaaatgtttttaaggmaaatgtcctactctgtaggactatgaagactaaaaatacctgaaagagaaaagaaactcttcttagcagaggtatgcctttggtctgaaggttttgaggg

SEQ ID NO: 416744 - DNA, 201 bp, Homo sapiens
tgttaagtgctttctgtgctttaactcatttagttctctccacaaccctgcaatatagaggctgttatcttcctctttgtatagatatgaagaaactgagkctttctgttcaggtttaagcaccttgcttaagatttgatgacaagaaaatggtagcccttggatttgaaccaggttgcctgaagccaaattctggtgtct

SEQ ID NO: 416745 - DNA, 201 bp, Homo sapiens
ggacggaccagctgacccaataagcttaaagaggagtaaacagaataatagaaattaattaggtttggaatttaaatggaaatgaatgccctgtttatacrtatattctaaactgagataagtgtctttcttggtactggcagaaatattattagcaacatttaccattgtttaaaaataaaatattttgaacaatcatta

SEQ ID NO: 416746 - DNA, 201 bp, Homo sapiens
cctacattattctgttccttaagtggttgtaaagtcttcattctttggcagaggataggacctcaccttttggggtcttcctgccaccttaagtaaaacaytgctactgtccatgactttgctgatacgtcagcatttcagtgaagtacccagctgtttaaaacagcaggtatttattttctttactgtgaatatgcaagg

SEQ ID NO: 416747 - DNA, 201 bp, Homo sapiens
cccaggcagattcccacttcacctcatcctgatgagaataaaaccaatcaaatgtaatggggttggagtagagataacgttacttgcaaagaaatcaattmaatagccagctaacttttcattagcaacaatagacgctagataccagcagaatgtgtttttcagaatcctgagcaaaatcatcgacccaaaatcccatac

SEQ ID NO: 416748 - DNA, 201 bp, Homo sapiens
tccccatccctagaacagactcacttcctgtagcacacataatgccatcagccccctcacccttacatcacttagcttgaatgacaacatttttatagacmtatgccaaagaggacagtcactggcccaacttgggtcatgtgcccctccctgtgtccaagaaataggacatcctatttcctttggtcacttggccactag

SEQ ID NO: 416749 - DNA, 201 bp, Homo sapiens
ccatgtgaagaccagatcatcctcctcaaaggctgctgcatggagatcatgtcccttcgcgctgctgtgcgctatgacccagaaagtgagactttaacctygaatggggaaatggcagtgacacggggccagctgaaaaatgggggtcttggggtggtgtcagacgccatctttgacctgggcatgtctctgtcttctttc

SEQ ID NO: 416750 - DNA, 201 bp, Homo sapiens
gcattgcatcatatgtccagatcacagctgtctgttttgcttgaagggcttgttctagtgtcaaagctggttgagcaatggatggcaagttaactccttgytttatttaaagtcattctgattctttgatttgattcctcattcagtctacaaatatttatgtatctactatgtacctggctctgctagccatttttcagt

SEQ ID NO: 416751 - DNA, 201 bp, Homo sapiens
atttaaagtcattctgattctttgatttgattcctcattcagtctacaaatatttatgtatctactatgtacctggctctgctagccatttttcagttcarcatgcagcccagtgacctatgagacaacatattaatacaaaaggattctgaaattgtctccattgtgatgagatgagtatacctgttggagtctctcata

SEQ ID NO: 416752 - DNA, 201 bp, Homo sapiens
gagaggagaggagtgttaaaaaatagcccagcataggggtaaaatactgctgcagtgtgatatttagaccaatggatagacttctatcgtatgccgtcttmcaatttaagttgtttatattattttctactcatgttttctttctataatcattcccaaaatgtagaattccttgttgtgaaggcaatgtgtgcaataata

SEQ ID NO: 416753 - DNA, 201 bp, Homo sapiens
taagttgtttatattattttctactcatgttttctttctataatcattcccaaaatgtagaattccttgttgtgaaggcaatgtgtgcaataatacatgcyttacagtcaatatagacatgagttcaaacctcagctctgcaactcacaagctgagagcctgggatgtgttgttaaatcttaattttctgttttgcaaaac

SEQ ID NO: 416754 - DNA, 201 bp, Homo sapiens; identical to SEQ ID NO: 42011

SEQ ID NO: 416755 - DNA, 201 bp, Homo sapiens
ttcttcatttaaatctttcttttttctcctccttagccagaagacattggacaagcaccaatagtcaatgccccagaaggtggaaaggttgacttggaagvcttcagccattttacaaaaatcatcacaccagcaattaccagagtggtggattttgccaaaaagttgcctatgttttgtgaggtgaggatgttgtttttc

SEQ ID NO: 416756 - DNA, 201 bp, Homo sapiens
gctcccttcaacttcttcatttaaatctttcttttttctcctccttagccagaagacattggacaagcaccaatagtcaatgccccagaaggtggaaaggwtgacttggaagccttcagccattttacaaaaatcatcacaccagcaattaccagagtggtggattttgccaaaaagttgcctatgttttgtgaggtgagg

SEQ ID NO: 416757 - DNA, 201 bp, Homo sapiens
caagatagtttcctgctggcctttgaacactatatcaattaccgaaaacaccacgtgacacacttttggccaaaactcctgatgaaggtgacagatctgcrgatgataggagcctgccatgccagccgcttcctgcacatgaaggtggaatgccccacagaactcttcccccctttgttcttggaagtgttcgaggattag

SEQ ID NO: 416758 - DNA, 201 bp, Homo sapiens
ttatgtatctactatgtacctggctctgctagccatttttcagttcagcatgcagcccagtgacctatgagacaacatattaatacaaaaggattctgaawttgtctccattgtgatgagatgagtatacctgttggagtctctcatatggcccctaaaaatagttattttatatctgaggaggtgattgtttgtgatttc

SEQ ID NO: 416759 - DNA, 201 bp, Homo sapiens
ccggtgagcttctgatttaaaatgttcattctccaatttaagttcccaaacttgttagtcaattttggcatttaaacaagtgggggggagtatccaaatcrctgagtcacaagtaatatatttccatatcttcctctcaggaacctggccaactgacagctagaatagtgatctatgctcaatgctaatgttgtttggtcc

SEQ ID NO: 416760 - DNA, 201 bp, Homo sapiens
aaacattgattttcaggtttattctttttttgattaattgaagtttttaatctacctggaacaagaataacttaaaatgtgaaatgaccttggtaataacratagttctgtttaatgaatgttttgtcagtagcaaccactgtcctaagtgatttttcatatattatctcatttagtttacgcattgtcagctgggaaaac

SEQ ID NO: 416761 - DNA, 201 bp, Homo sapiens
ttattttattctagttatttgaaaattactgaacaatggacaatgtgcaaatcattgacatctgtctcagatctgctgagacaatcgtgatttagagattaaaaaaaaaaaaagaaggcaaattcatggtccaactcatcacagtgaagaaacttgtggcttacatatctcaacttacgtttgtcttgctgatctgcatgt

SEQ ID NO: 416762 - DNA, 201 bp, Homo sapiens
tgcatttgttctttgctgacatgaactggttcttttcagctgccatgtgaagaccagatcatcctcctcaaaggctgctgcatggagatcatgtcccttcrcgctgctgtgcgctatgacccagaaagtgagactttaaccttgaatggggaaatggcagtgacacggggccagctgaaaaatgggggtcttggggtggtg

SEQ ID NO: 416763 - DNA, 201 bp, Homo sapiens
tttttatttccttgataaatctgtgtagttcatagtatgcaaagagtgttgggaacttgctgatgaatcctcatatcattatcagcacattattaacatgtttttttttttttaaagagaactaaaatttaaaatagagatgtcagaaagcaaaggccagacctgattcttggtatgttgacagaggtactgaacccattt

SEQ ID NO: 416764 - DNA, 201 bp, Homo sapiens
ataatttcatctgatagactatgtgtttgacttctttctcttctgctgcttcttcttattgtctgtaaaattataaaagacagacagccaaaagcaagaarcaagaatttaatacacagtctgaagagatagaccctgactacataagagcctgctgaaattatcgattttattcattttattttgatgttcccatttaat

SEQ ID NO: 416765 - DNA, 201 bp, Homo sapiens
caggccgtcctgctgatgtcttcaggtgagtacacctagactcgttagtgggcatccaaagagcttttgcttgtctagcgctaattccaatcacttgagtyttcagtccccctttagcttcagaaacatagctcactcttcttcagtaagaaattgcaggtttgccagtggactgggaacttaaagggggggcgtcagatg

SEQ ID NO: 416766 - DNA, 201 bp, Homo sapiens
tgaagaccagatcatcctcctcaaaggctgctgcatggagatcatgtcccttcgcgctgctgtgcgctatgacccagaaagtgagactttaaccttgaatrgggaaatggcagtgacacggggccagctgaaaaatgggggtcttggggtggtgtcagacgccatctttgacctgggcatgtctctgtcttctttcaacct

SEQ ID NO: 416767 - DNA, 201 bp, Homo sapiens
cactatatcaattaccgaaaacaccacgtgacacacttttggccaaaactcctgatgaaggtgacagatctgcggatgataggagcctgccatgccagccrcttcctgcacatgaaggtggaatgccccacagaactcttcccccctttgttcttggaagtgttcgaggattagactgactggattcattctcataattcc

SEQ ID NO: 416768 - DNA, 201 bp, Homo sapiens
gttagggagaggggaagtgttcacctccacatggggatgctcagggccctggggggtttggatgtggctctgtggtgcccatttctgtcctttacctaccrgaccatattgccacatttggcacagcagctgatctgcacctccatgtccatctttctgcatctgctttctctgacatcatcctttttaatctcctgtgtc

SEQ ID NO: 416769 - DNA, 201 bp, Homo sapiens
catgtcccttcgcgctgctgtgcgctatgacccagaaagtgagactttaaccttgaatggggaaatggcagtgacacggggccagctgaaaaatgggggtsttggggtggtgtcagacgccatctttgacctgggcatgtctctgtcttctttcaacctggatgacactgaagtagccctccttcaggccgtcctgctgat

SEQ ID NO: 416770 - DNA, 201 bp, Homo sapiens
aaagtaaagataacctaggagcagttggcactagagaattcagacactagctacaagataaaccatcagagaggaacaagagggtggacttagaaagcatktattggactacctaagtaagcacataatctttgcattttagagctggaacaatcaagcctctaattatagctgagggatagaggcctagagaagtcgagc

SEQ ID NO: 416771 - DNA, 201 bp, Homo sapiens
cctagtatcctcttgggggcaaaatcatccctgttggaaaccactgtttagactttagttctacctcttaatctctccccaccccctaagcttttcatcasttatagctgctttttcatcatgatgatcttcgccctcatggggtagggggagatgtttccaaatccggaaaattggaacattttctccggttgattctga

SEQ ID NO: 416772 - DNA, 201 bp, Homo sapiens
tgttcctgactggcatttttgcatttgttctttgctgacatgaactggttcttttcagctgccatgtgaagaccagatcatcctcctcaaaggctgctgcwtggagatcatgtcccttcgcgctgctgtgcgctatgacccagaaagtgagactttaaccttgaatggggaaatggcagtgacacggggccagctgaaaaa

SEQ ID NO: 416773 - DNA, 201 bp, Homo sapiens
aagtatatagtaagatgtaacatgttatttttaaaattacgttcatccattcattcttttgttatcaaatatttattcagcaccaaatatgtgccagaggyatgcttgggtacagtagtgaacaacatattccctgcccctccagatacttacaaaaaatgatgacataaaagatagcttcctcaaaactaaaaatatttt

SEQ ID NO: 416774 - DNA, 201 bp, Homo sapiens
caaagctgaattctttctgacccttcaaaacgtatgctcccaggagtcttaaggcggtgtgttcctctctcgtcaaagcagcatacacatacactgttaaraacatgttcatttctgcttctgtcagctttgtgtctgagcactaatagtgtccatggtttcacttttgcatgaacgtttttgctctaagcttagggaagg

SEQ ID NO: 416775 - DNA, 201 bp, Homo sapiens
atgcagttacacttggtaatctgtgaaaaacagagatcagatagagttcttgatcttttcaaattttttgcatattgtataggatacagcatcgggtctgsaccaactacaggacacttacaaataagttattcacattaaatttcttgaaaagcatccaaagatcaagttactcattctccttcccccaggcaaggctgg

SEQ ID NO: 416776 - DNA, 201 bp, Homo sapiens
ttcattcttttgttatcaaatatttattcagcaccaaatatgtgccagaggtatgcttgggtacagtagtgaacaacatattccctgcccctccagatacwtacaaaaaatgatgacataaaagatagcttcctcaaaactaaaaatatttttattttatcaatatatgcatactccaaaatctggagactgaaagtacaa

SEQ ID NO: 416777 - DNA, 201 bp, Homo sapiens
ggaaggaaccaatgccagaataccaaaaaggaagaatgtgtaaagttactacatgaggagaggagggaggaatgaagaagggagagtaagaggtaggtccmaatttttctgccagatagattgcaatagtggtggtaacaatgatttttgaaaggggataaggggggaacctggaagtaacagggtttaaagagaacaaga

SEQ ID NO: 416778 - DNA, 201 bp, Homo sapiens
acctaattgttaagacagttatatttgagttgctggattttggaatattttgttttctttatgcttatatatatttctagatttctccctaatattctttrtcaaaagatacatgagaataaaattgatagagtaaaatttttattaataacgttagtttcctagaatagtatttatgaatagaaaataattcatacatgt

SEQ ID NO: 416779 - DNA, 201 bp, Homo sapiens
gttttctttatgcttatatatatttctagatttctccctaatattctttatcaaaagatacatgagaataaaattgatagagtaaaatttttattaataamgttagtttcctagaatagtatttatgaatagaaaataattcatacatgtttattaatgagctttttagttggaaattctcagttcatatatttcctgtct

SEQ ID NO: 416780 - DNA, 201 bp, Homo sapiens
ttctcagttcatatatttcctgtctgtggcatctcccatgtgtctccctgaagcctttctcaactgctccccttctaaagaggaaaggctcaatggcctayatacacccaaccttgagcaccgtcatggcaggaaacagataacagtgtttttataggtcactaggatttatctttattcatatttccatttctcacttct

SEQ ID NO: 416781 - DNA, 201 bp, Homo sapiens
tctctcttctcagtgtacagggaggaggagggaaggtaagagattggcccaagacacagctttttaacaaggagccaggactatcaattttcagctatcamatgttgactctctcactagaaagttacattgtgggtcacagtgtagcatgtgtgctaacttgagcatctaaggctctatcagaactattgttgttaataa

SEQ ID NO: 416782 - DNA, 201 bp, Homo sapiens
gttaataatccagaactaaaacacttctgaatttcaccatatcaggtttgcaaaatccttttgacagagctaaatccaagggcacaaatgaaatcaccacrgccacatctctatttccccatccctagaacagactcacttcctgtagcacacataatgccatcagccccctcacccttacatcacttagcttgaatgaca

SEQ ID NO: 416783 - DNA, 201 bp, Homo sapiens
tgcaaaatccttttgacagagctaaatccaagggcacaaatgaaatcaccacagccacatctctatttccccatccctagaacagactcacttcctgtagyacacataatgccatcagccccctcacccttacatcacttagcttgaatgacaacatttttatagacatatgccaaagaggacagtcactggcccaacttg

SEQ ID NO: 416784 - DNA, 201 bp, Homo sapiens
tttgtagccctcaaacacccttttctgctcacagaatagctgtttggggtaggtctcacatatgattttcttaatatttgtctaaaggctcaagaaacccsctatacatgtttctagagttcttttcttgtgcagcttcctctctaatactttgctccacaaattcctaccatatctgccacccaaaaatcaggtctcagt

SEQ ID NO: 416785 - DNA, 201 bp, Homo sapiens
tcctccttagccagaagacattggacaagcaccaatagtcaatgccccagaaggtggaaaggttgacttggaagccttcagccattttacaaaaatcatcrcaccagcaattaccagagtggtggattttgccaaaaagttgcctatgttttgtgaggtgaggatgttgtttttccttctgcattattcttaattatagtt

SEQ ID NO: 416786 - DNA, 201 bp, Homo sapiens
aggtaaccagtgcatgagtttgtttggtgaatcttcattctgactgcattttctggacaactgcacatggttacagtatggaacattctttattcctttgsctcagacagttttgttgagcctggcatcaatgcacacatctggagtactttctcctttatggcaaatttctttgagtgctcaaggggcacacttcttaaa

SEQ ID NO: 416787 - DNA, 201 bp, Homo sapiens
agctcatcttttgctcctgctttattgatgttatcctgatatctgatcatgatgctgacaaacaaattgggctaggaagagttttaaaaacttgccaccasctggtgaaactgaaccttaaacaaacagcaacactgctggtaacactggcaagttccactgagcgcttattcccaaaaggcaaatgggggctaagagaca

SEQ ID NO: 416788 - DNA, 201 bp, Homo sapiens
catatgagctctgtgcacaatgttgctatcatacagcaaagaacattctttagccaatctctgtaggatggctctgaaatagcatctgtgcctgagaatarcaacactgtccaatgtgtcaatgttcagtgcttagcttaatgccaggcacatagtaggtactcaataatattttgtttattgacagcaggaggacaatgc

SEQ ID NO: 416789 - DNA, 201 bp, Homo sapiens
gaaaagtaccaagatagtttcctgctggcctttgaacactatatcaattaccgaaaacaccacgtgacacacttttggccaaaactcctgatgaaggtgayagatctgcggatgataggagcctgccatgccagccgcttcctgcacatgaaggtggaatgccccacagaactcttcccccctttgttcttggaagtgttc

SEQ ID NO: 416790 - DNA, 201 bp, Homo sapiens
tgtccatggtttcacttttgcatgaacgtttttgctctaagcttagggaaggacactcttttccatgccgtagttgaaatgtgtaacttgtccctgtttaraaaaatgccgccacctacttgcttcatgtatctggtgatttaaagcaactcctgaatcattcaacttggccagcttgtctttgtgtaggaacaatcccaa

SEQ ID NO: 416791 - DNA, 201 bp, Homo sapiens
gaagttgcagatcccatgaggcccagtctcaaatcacacaggatcacttcatccacactggattggcccaaacaagtctgagtgccagccaggactcaackgtccccctgtagatgggaggatagcacagaatgggcagccgtctgtaagccactacacatcaaaccctttcagggaagataattttaaatagaagtggtt

SEQ ID NO: 416792 - DNA, 201 bp, Homo sapiens
tgagtgttcttcctctggccctaaggaaagctacttccttgacattcctcaagtcaaagtccacacattgcttctcaaaggggccttggctgaccttcctwtctcctgcctccccatgtattatcatgtcacctccagacttatcacaaattcttccacgaatacatgtttcttatttattgtctatctcccctcactaca

SEQ ID NO: 416793 - DNA, 201 bp, Homo sapiens
ccactttgatccacagggaaccattagtggtgaaaacatggaatatgcttcttggaaaatgcattgcttcaacagattaaaggcacataagctggagcaaktatgcaaaccttcctagtttgaactaaaaagaaaagaaacaaaggaaggaattaatggaaattttcaaatctaagtctcttctgatatttcaaggaaaac

SEQ ID NO: 416794 - DNA, 201 bp, Homo sapiens
cagctatagacaattaatctaaaaatcaattcagtgttctgctttgtgagaggaaacgacataaacctgtcttagagcatctcgggtacactatttttatrgcttgtctgctgaaggtgggtttctaggatggaagcaaaaaaatcgattcacatggctagctttgcagtcattattcagctaacaaaagccagattggtt

SEQ ID NO: 416795 - DNA, 201 bp, Homo sapiens
caagcatacaaatggtgtgtgtttgtaaatcaaacaaaagtttcacaaaacaatcctaactcttaagaaacgcagtgaactgacgctttccagtctacttyatttcattttttaaaaggcactgcttgctacccactaaattgatttcacaacccacttatgtgttgggacccatagtttgaaaaacactgctttagtgta

SEQ ID NO: 416796 - DNA, 201 bp, Homo sapiens
attcacatggctagctttgcagtcattattcagctaacaaaagccagattggttttcctgcccttcacatttaataaaatgaggtgaatcaccaaaaaagyaagttgatgctggagccttattcagaaactcatttccagagtatgtcctgggtttggtagagattcaacccaattttatataactaccaatattgtggtg

SEQ ID NO: 416797 - DNA, 201 bp, Homo sapiens
ttttaagaaaatcaaacaattcatcaagattttgaatgtattttcacagttactgaaagtcatctcttataattattctaatcctcagtatacataaatarttccctttctttttcctaattttgtgaatttgttatttctccctttttttctccactaggttaactgctagttcatctatttgttgttttgttcttggtt

SEQ ID NO: 416798 - DNA, 201 bp, Homo sapiens
ctaggaatctgatttttaaggtaaatgtgcaggtctcagatctgcttaaaggagagtgggtaaagctgaaggcgctgggtaggggacgaacagagttattsagtggcaaaggaaagaatatgaaaaggaaatgtgtgtaagatatctatgtagaacccactgcattgggtctgcaagtggtggtagatattctgaaactct

SEQ ID NO: 416799 - DNA, 201 bp, Homo sapiens
ccatacctttaatgaaacactcatcttaattcaagagaaaaacaacaaatgtaggctgcccaaaggacattcattaacttgaagggaataatacctttgawtccaaaagaaattcgccaggttatgggagacacaggatgttcccaaattggtagtgcggttccgtaaatgatacaaacttgcaactaattttttggaatt

SEQ ID NO: 416800 - DNA, 201 bp, Homo sapiens
atctcttataattattctaatcctcagtatacataaataattccctttctttttcctaattttgtgaatttgttatttctccctttttttctccactaggytaactgctagttcatctatttgttgttttgttcttggtttttccaaagaatcagctttgggatatctttacacatgagacctgttaaaatgttttctagt

SEQ ID NO: 416801 - DNA, 201 bp, Homo sapiens
tctgtattcttctcagtgcatatcccagtgagatgactgtgtggtcgtttcttaatcctcaagaataagttaaatgcccctcatagaaccaggctcttaayatccccacaaatctttcgtcttttcctataagctcactcttgcttgtcccatcttcagggcaccctgtagagctgtcccaccggagttcttcgactttcc

SEQ ID NO: 416802 - DNA, 201 bp, Homo sapiens
tttctagagttcttttcttgtgcagcttcctctctaatactttgctccacaaattcctaccatatctgccacccaaaaatcaggtctcagttttcttcacscagctgctctctgggttccacttccccaggttgcaatttgaaaagtgccccaaggcaaaaagccaaggtaaacataaagcttatctcctgtgtcttcctc

SEQ ID NO: 416803 - DNA, 201 bp, Homo sapiens
ttttttaatcaaatggggttatgttttctggaaaactttaaaaaaatttcgtaagattcttgtctcttgctctgtataccttcaagaggacccagaaagayaccaaatagagagggtcacggacagctgtgagcctcttaggtaagcaggctgagtgataagtgatcctggtctcacctaaaaagaagctaagtttcctca

SEQ ID NO: 416804 - DNA, 201 bp, Homo sapiens
ttctaatcctcagtatacataaataattccctttctttttcctaattttgtgaatttgttatttctccctttttttctccactaggttaactgctagttcwtctatttgttgttttgttcttggtttttccaaagaatcagctttgggatatctttacacatgagacctgttaaaatgttttctagtcctataagctttct

SEQ ID NO: 416805 - DNA, 201 bp, Homo sapiens
cttcaagtccctgggtgactttagatgaagcttatatctctgggcctcatgggcaacatgtatctctgccaacaaccctctagctttgtgccaagaggctmcaagagcaaacgtgcttcaaaaaccaaaaggaagcccagttgccagctaaacagtagggtaagctgttacctattcaagctacaagacaaaaaaccaaac

SEQ ID NO: 416806 - DNA, 201 bp, Homo sapiens
aatgcagttacacttggtaatctgtgaaaaacagagatcagatagagttcttgatcttttcaaattttttgcatattgtataggatacagcatcgggtctstaccaactacaggacacttacaaataagttattcacattaaatttcttgaaaagcatccaaagatcaagttactcattctccttcccccaggcaaggctg

SEQ ID NO: 416807 - DNA, 201 bp, Homo sapiens
tgtcctgtatttccctcaggaaaagagttttatcctttgggaaagagggataacagatccctttggcagtttgatgttatttaaaaaaaagacctctcctsagaaaatacatttattataaatgcaaaattgccacataatagcagggatctcacaggaccctgtaaaatacatttaaagatctcttgttttagatggtag

SEQ ID NO: 416808 - DNA, 201 bp, Homo sapiens
agggatgtggaaaccagatgaagagaccctgcttttgggcctcctctgaatggatgcaggaatgaagtggagtctgcagggatgtgctattaggtcattayagtaacacaactggttatgttatttaagcctacacattgagatggagactgggggtgtaaaactgggcaaagtcactcactttgataaggttcatggact

SEQ ID NO: 416809 - DNA, 201 bp, Homo sapiens
ataactgtaaaaaaaattagtactattctttcaaaaattcataaacctaccccctaaacttatctttcatatcactcttcgggatacactgcctagggatstggaaaccagatgaagagaccctgcttttgggcctcctctgaatggatgcaggaatgaagtggagtctgcagggatgtgctattaggtcattacagtaac

SEQ ID NO: 416810 - DNA, 201 bp, Homo sapiens
ttaaagttggtgaagattacagtcaactttgagtatgaaaaatggttgtcgaaagtctgcagccaagtagggaagggaaaaccatgggctcaaagaatgcrggacaaatgttaatcacagaaggttattcctattgcttttaagatactgtatgttgttcctgactggcatttttgcatttgttctttgctgacatgaact

SEQ ID NO: 416811 - DNA, 201 bp, Homo sapiens
ctagactttggtctttgttggggttttctaactttttttttaagttgtagaaccctctttccaaatgaaatcttaatctgactcccagtatgtaaaacagwggaatacaaagggttttaattcacatttgctgggggactccagagtcttgcccacttaggctgatctctttctatgttgctaggcccctcggccccttga

SEQ ID NO: 416812 - DNA, 201 bp, Homo sapiens
ctcctcaaaggctgctgcatggagatcatgtcccttcgcgctgctgtgcgctatgacccagaaagtgagactttaaccttgaatggggaaatggcagtgayacggggccagctgaaaaatgggggtcttggggtggtgtcagacgccatctttgacctgggcatgtctctgtcttctttcaacctggatgacactgaagta

SEQ ID NO: 416813 - DNA, 201 bp, Homo sapiens
tctcacagatttgtcatggaagtccaaatatgtgtgaaggtaccaaagcaaaacagatgccactggaagtggcagcattatgatttccggtgttattgggkgcatagagaaagaacaagaggagcaagcatgaactgaccctgttttccctcaagaaacagaataagtgccactcacgtcttataaacacaaaattgtata

SEQ ID NO: 416814 - DNA, 201 bp, Homo sapiens
caaaacttagtggcttaaacatccaagatggctggagttcagctgggacatcaaacactggttcaggcctccctctatgcggcctttcctccggcagggtrgacttcttacttggctgttgatttccaagagaaagagtcccaagcacacgaaaacagaagttgcagatcccatgaggcccagtctcaaatcacacaggat

SEQ ID NO: 416815 - DNA, 201 bp, Homo sapiens
ttcttcatccataaaatggggtaaataatagtttcccttttctacagctcttttgaaaattacctgcaaacagagcttaattaatgttaggctattaaccwctttaaagaatgagtcaaagggtgatttggcctaaattcaaatgacgacttcagttgggatcttgaccagcaatgccattgtagtgaagctggagccaga

SEQ ID NO: 416816 - DNA, 201 bp, Homo sapiens
tctgtcatgcttacatttccagtgaggacagacaaaacagttcccattggtgacaagtatgatgaagaacctaaagtaagatgatagagagaaaatggttrgagagctggtcaggaaaggcctccctcaaacctcaatgacagggagctggtgatataaggatttggacaggggcactgcagcataggaaagagcttctgc

SEQ ID NO: 416817 - DNA, 201 bp, Homo sapiens
tgcagcataggaaagagcttctgcaagatgctgctgtgggaatgggcttcctatgttagaggcagcccatgtggctggaggatagagagaagggggcagarccatgggtgaggagctcagccagagggaggctcagtggggccttgaggccactgtaaggcctgaagattttattctaatattggtgggaagtcatcagat

SEQ ID NO: 416818 - DNA, 201 bp, Homo sapiens
cctcaaaggctgctgcatggagatcatgtcccttcgcgctgctgtgcgctatgacccagaaagtgagactttaaccttgaatggggaaatggcagtgacayggggccagctgaaaaatgggggtcttggggtggtgtcagacgccatctttgacctgggcatgtctctgtcttctttcaacctggatgacactgaagtagc

SEQ ID NO: 416819 - DNA, 201 bp, Homo sapiens
aagtaagttgatgctggagccttattcagaaactcatttccagagtatgtcctgggtttggtagagattcaacccaattttatataactaccaatattgtrgtggcccctatagcagttatagtccctaccagtgacatttgtgagggactgtggttaagaaaggacataacataaagttattttatttaattataatgat

SEQ ID NO: 416820 - DNA, 201 bp, Homo sapiens
gaagaccagatcatcctcctcaaaggctgctgcatggagatcatgtcccttcgcgctgctgtgcgctatgacccagaaagtgagactttaaccttgaatgrggaaatggcagtgacacggggccagctgaaaaatgggggtcttggggtggtgtcagacgccatctttgacctgggcatgtctctgtcttctttcaacctg

SEQ ID NO: 416821 - DNA, 201 bp, Homo sapiens
gccccagtctaggttgtccaactggtagcctgtagagccaggacttgggctttctgtgtctcattctctttgcacaatggaaaatttagaataatcccccrtaggcaccacaagatctctaataatcagagaaggactaaattttgttcagcatagctcaggcctaggaaaggaaaatggatactgattgttgccagattt

SEQ ID NO: 416822 - DNA, 201 bp, Homo sapiens
tctatttgttgttttgttcttggtttttccaaagaatcagctttgggatatctttacacatgagacctgttaaaatgttttctagtcctataagctttctracttttattaatttctctttcagctttcttttatctgtggttctttttctacaaatgcttaactcatttatttttaagtcataaaaatgtataaaactat

SEQ ID NO: 416823 - DNA, 201 bp, Homo sapiens
catccttccccatctacttcagttatctattgttatataacaaaccatcccaaaacttagtggcttcagataatgatgatttattacttcttacaattctrtgggtcaggacttcaggtaggattggccaggcaggttttgcttcattggtcattgattgggggtcaccgactcaggcttattctgctggtggctgggctg

SEQ ID NO: 416824 - DNA, 201 bp, Homo sapiens
cagattctaaaagattatgcctgtcacagttaaagcaggtataaaaataagttacccaaacggttttccattctttactcgtacctcactctttaccacgygctcatagtttgttgctcttcaacacttttctctaaataagttaataaaatgtattcttctatacagtagctatttcttgcctggttttcttacacctca

SEQ ID NO: 416825 - DNA, 201 bp, Homo sapiens
ggaaacttcatctcttcacctgtaaaatggagatgataacgtaatctgcagacagggtgctttagaggaagggatcattaaatgagatgatgatgcaaatrtattagaaaacaaattgccactacaagctacagatattttacttccattaatttcattaatagcatcatcatcattttacgttgtaataaaggcaattca

SEQ ID NO: 416826 - DNA, 201 bp, Homo sapiens
caccttgccactgtcagcctgcatcactttatgtcaccaactcagctcacagcccaccagcctcttctattacccagcaacacattctctcatcacccccrctcccaaccagccctgccttcaaaggcagatatcctttgttttatacaatagctctgaatcatttgtgtaaaccacctttgaaaagtaatatattatata

SEQ ID NO: 416827 - DNA, 201 bp, Homo sapiens
atctgcagacagggtgctttagaggaagggatcattaaatgagatgatgatgcaaatatattagaaaacaaattgccactacaagctacagatattttacytccattaatttcattaatagcatcatcatcattttacgttgtaataaaggcaattcactatgcttagttctgaagtgtccatgcattaaaataatcaatg

SEQ ID NO: 416828 - DNA, 201 bp, Homo sapiens
ctctttggtttccgccaaaatgtattagatgtgctttcagcacttcagtggtaagatcgagactcatgcttctttacatttttaaaggaaactttcctcawtttgagtagttacttcaaagggcagcaaatgtctcaatcctttttatcatctcttttggggcagagatgattggcactgatgatggttacttgtaattcc

SEQ ID NO: 416829 - DNA, 201 bp, Homo sapiens
acttcagtggtaagatcgagactcatgcttctttacatttttaaaggaaactttcctcaatttgagtagttacttcaaagggcagcaaatgtctcaatccyttttatcatctcttttggggcagagatgattggcactgatgatggttacttgtaattccataacctcaactgaggtaagtttaataaacagctctatctc

SEQ ID NO: 416830 - DNA, 201 bp, Homo sapiens
caccaaacaacagattcgcaatgtagaaaaaacagccttctgttggaagaagaggccaatctaggactttcatagctagagaggagaagtgaatgcctggtttcaaatcttcaaaggacagactggcccttttgttagaggttaatgcagcagatgactatgttgaagtcaatgctcatttgccattatgaatacctgagg

SEQ ID NO: 416831 - DNA, 201 bp, Homo sapiens
actcatgtgcacacctcacacacgtcctgccatgatcatcttgacacaataccacagtaaagccagtgacagaggggcacaaaggggaccccacggtgctrtgaagtaagggagtatgccagaaagaaaagccatccacgtatttttttcaaaataaagatttcagggcagtgacataccatgggcaggatggtgagaatg

SEQ ID NO: 416832 - DNA, 201 bp, Homo sapiens
tacatgctttacagtcaatatagacatgagttcaaacctcagctctgcaactcacaagctgagagcctgggatgtgttgttaaatcttaattttctgtttygcaaaacgagagtcaaacctcccagcagagttgtgataactgaattcaacgtagcatgaaaagtgtgtgccatatgtttcatatagtagatatgatgtta

SEQ ID NO: 416833 - DNA, 201 bp, Homo sapiens
gagatcaagaccatcctagccaacatggtgaaacttcatctctactaaaaatacaaaaattaacctggtgtggtggcatgtgcctgtaatcccagcttctygggaggctgaggcaggagaattgcttgaacccgggaggctgaggctgcagtgagccgagatggtgccactgtactccagcctggtgacagagagagactc

SEQ ID NO: 416834 - DNA, 201 bp, Homo sapiens
gcctctgtctcccagccctccctagagaggaccagccatagttctcatatcaaaaaacactatttgtaatttatagaatgttcaagaaaaagagatcactragaatcttcaagacctatggttctctaagtgtttttcatctttacaaatagccctctccttttcccattggaaatcttccagtggcccccaatttgtaaa

SEQ ID NO: 416835 - DNA, 201 bp, Homo sapiens
gccaccacgcctggcctagaattctttttttaaagctaatctagaaatgtatttactataggaaatttagatatggcagacttttaaaaaaagaaagaaakaattctttttattatggaaaatttcaagggtaagcagatagaatagcataatgaactcccatgtacactgtggcacccagactccagaccggcctcctac

SEQ ID NO: 416836 - DNA, 201 bp, Homo sapiens
caatgcaatcaatctagctcaggcttcatatgatttagtgaaaaaccagagatgagagagagagagagagagagaaaagaaggtggaagaggaggaggaaraggaggaggagcaagaggaggaggaagaggcggagaaggaggagaaggagaaggaggaggaattaattttgctctaatattaacccctttaaaattgaat

SEQ ID NO: 416837 - DNA, 201 bp, Homo sapiens
ttgagtcagcaaaatggcgccacaggacactaaagaagccttaaaaccaagataatacgaccacctccacccaatcctgatgttcgcagggctgaagttarcagagcacagaccacctttagttagatgtggctttcagccttttagggaaagactcgaacaaattttcatctattcaagagcatgctgtttgcagcactc

SEQ ID NO: 416838 - DNA, 201 bp, Homo sapiens
taagggaaagtttccttgctagtccctagagtcaaacaaataagatttgtgtcatttgacttgaaatacagaattctagacccaaaatgacttaatggagytccttcacaaagcaggaactccaaggtagtgggtttaatttagttaattgggtggcatgacaggtcatcaaggtgccctccatcttgttgccctactatt

SEQ ID NO: 416839 - DNA, 201 bp, Homo sapiens
ctgtgctatagtcacagaaaaaaaatggatttgaaatcagaaaacctgatgaatagcagttcagataacttgacttccggatccttaaaatgatcagagtrcacgtgcttccaggaagtagagagactgataggttgatgggcaaagacatgagtgaagagagcaatcagcagccgttaggccttggtccctcactcccgc

SEQ ID NO: 416840 - DNA, 201 bp, Homo sapiens
aatcattgaaaggaacgcaggaaggaaggaaaaaaagaaggaaggaaacagggaggaaaattcacacaataagaaatacaaataatgtttaaacgtatcaraagatttacagctttacctacccaagatatatgtgaattctaactaggattccatttatctgctatcaaatagataaatataatgtttaataacatatta

SEQ ID NO: 416841 - DNA, 201 bp, Homo sapiens
aaaccaagataatacgaccacctccacccaatcctgatgttcgcagggctgaagttaacagagcacagaccacctttagttagatgtggctttcagccttktagggaaagactcgaacaaattttcatctattcaagagcatgctgtttgcagcactctttatggtctcctaggagcataacttggaatgtacaggaatat

SEQ ID NO: 416842 - DNA, 201 bp, Homo sapiens
tgtggccatgatgcacatccctgagcagccatattgctctccaaagaagtttcccaagaccaacctgcttcccctgctcacctgtcccaagggcaccactkctccttctgccagactgcacagtgcacctgcactctgcctgtgatgcaggctgggagaaatggaccctgaaaagattcagctttgctttttcaccagctg

SEQ ID NO: 416843 - DNA, 201 bp, Homo sapiens
  misc_feature (1)...(201): n = A,T,C or G
tgtttacattttgctcatgctcctctgatgccatttccaaagctaccccctatctcctggttcattttttaccaccatatgcttttccatattggtttgcngtgtagccttaaatgaataaacatttatattaagagtggcaaggcctttataactgaacccagtatgtactttgtttcattaagacttaggtagaattct

SEQ ID NO: 416844 - DNA, 201 bp, Homo sapiens
cagtgaaagttctgaggggcaactcaataaggtaaaattaaaggtatatgaatcacggatttcagagtttacagagacatttagtaagcatctgatctagycatttagctttaggatcaaccccattttgctggtgaattagccatggcttacaacaatgaaatatatatagacctacgattcaacctggagatctgtctg

SEQ ID NO: 416845 - DNA, 201 bp, Homo sapiens
tggccagaagtgggtagcagaaagaatggacagataaagccaaagtcatgctgagggccatggctgtccccacgcacatgggcaaagaatacaactcaackgaaaatgtgtttttaaaaataaaatacttatagttttgaatcatggcaatgtttccagtgacagaagtgagggaagtagaaaaaagattgtagaaaagtc

SEQ ID NO: 416846 - DNA, 201 bp, Homo sapiens
gttttttattttctacttttgttattgaggaaatatgttgttaccaaaaaaaaaaaaaaaaaaaggaagaaagaagggttggtgaatattttgaaacctcwtcccaaattaagtgtcaaatcagaccaaaaaagtagaacagcagttcccaaatttgacagtgcacagatgcattagagagcttgtggcaacccctcaagg

SEQ ID NO: 416847 - DNA, 201 bp, Homo sapiens
atcaaaccaaagaggattattctcaatcctaaagtctgattaaatttgtcttgctagatttggacttgctcaagatccttcaccctctccttttttcctakttctgtttggaatgggaatgtctatgctgtgtctttctcaccattgaattttggaagcacataatttgtctggtttcacaggttcacagctggagaagaa

SEQ ID NO: 416848 - DNA, 201 bp, Homo sapiens
ggaaattttaattttcttctttgtgttttttattttctacttttgttattgaggaaatatgttgttaccaaaaaaaaaaaaaaaaaaaggaagaaagaagrgttggtgaatattttgaaacctcttcccaaattaagtgtcaaatcagaccaaaaaagtagaacagcagttcccaaatttgacagtgcacagatgcattag

SEQ ID NO: 416849 - DNA, 201 bp, Homo sapiens
tcatagtaaatgctcaaccaaacattattctcctgtcctgcacgattctaaaaaaaaatcagttgaggcgtacatagtctgagaattcagcaaggctaaamcttatgggttgaagtaaaaaaattaaaatggaaatttgaggcttcatacctaatagtctgatgctacacaatgataattctacacactctctgggtttac

SEQ ID NO: 416850 - DNA, 201 bp, Homo sapiens
aagagcttctgcaagatgctgctgtgggaatgggcttcctatgttagaggcagcccatgtggctggaggatagagagaagggggcagagccatgggtgagsagctcagccagagggaggctcagtggggccttgaggccactgtaaggcctgaagattttattctaatattggtgggaagtcatcagattattttaagaac

SEQ ID NO: 416851 - DNA, 201 bp, Homo sapiens
ggagtttccatgataagccagactctgatatacaagtgctaagattatagaaactcctccagacccacagatgaccctgccatgtgtttttactaatataygtataccttgtgtacaccctttctgccttcaggtgaatgcactgagcctcactgcccatttggcgtgacctcactggcatctctctggtatagccaggaa

SEQ ID NO: 416852 - DNA, 201 bp, Homo sapiens
aatgaaaatttactctgaggttgtgtaaaatattggagtctgaagaaactacacgcttattcaaaatctgtcactaatttattttcttaccttaaatttaycttaaccctgtggatctcaaactctgttgggtatcagaatcacctggagaacttgatagatctatgcatgcccacaccctatccaaatttcaaaaagcct

SEQ ID NO: 416853 - DNA, 201 bp, Homo sapiens
aattaatattatggatccagctaaaactcctacatctcttccctagtctccttttgcagagattaaccgttatgttgaagtaagagtattctttctgtacrtgattttgtacttcccctatgtatgtaaagatccacaacagtatatttttattttgttttgaaaaaattttacataaatgattccattctgtatgtatgc

SEQ ID NO: 416854 - DNA, 201 bp, Homo sapiens
gtaaacttgctcctgggccattgctgtggaagtgggactggcgaaagtacagccttgccatgcaggaactaatgtctttctaggcatttaaaataaggggraatgtgttgattactccgacaggcaacccaactgcagtggctaaatgcccaaggctgacaaattctgcatcttatcactcccgtcaagtggcatgtgaat

SEQ ID NO: 416855 - DNA, 201 bp, Homo sapiens
ctcaaaggctgctgcatggagatcatgtcccttcgcgctgctgtgcgctatgacccagaaagtgagactttaaccttgaatggggaaatggcagtgacackgggccagctgaaaaatgggggtcttggggtggtgtcagacgccatctttgacctgggcatgtctctgtcttctttcaacctggatgacactgaagtagcc

SEQ ID NO: 416856 - DNA, 201 bp, Homo sapiens
  misc_feature (1)...(201): n = A,T,C or G
catttttgcatttgttctttgctgacatgaactggttcttttcagctgccatgtgaagaccagatcatcctcctcaaaggctgctgcatggagatcatgtnccttcgcgctgctgtgcgctatgacccagaaagtgagactttaaccttgaatggggaaatggcagtgacacggggccagctgaaaaatgggggtcttggg

SEQ ID NO: 416857 - DNA, 201 bp, Homo sapiens
ccaattgctcagccataaggaccacatcctactccttgtcctcctcctcccttcccagtctgagacgatatatccagtgctactgaaagtgtggtagtacmaatcagtggcactaggagaacctggagcttggtagaaataagattctcaggccccacccagactactgaatctctagagaggggcccagccttctatgtt

SEQ ID NO: 416858 - DNA, 201 bp, Homo sapiens
agtttcctgctggcctttgaacactatatcaattaccgaaaacaccacgtgacacacttttggccaaaactcctgatgaaggtgacagatctgcggatgayaggagcctgccatgccagccgcttcctgcacatgaaggtggaatgccccacagaactcttcccccctttgttcttggaagtgttcgaggattagactgac

SEQ ID NO: 416859 - DNA, 201 bp, Homo sapiens
acactatatcaattaccgaaaacaccacgtgacacacttttggccaaaactcctgatgaaggtgacagatctgcggatgataggagcctgccatgccagcygcttcctgcacatgaaggtggaatgccccacagaactcttcccccctttgttcttggaagtgttcgaggattagactgactggattcattctcataattc

SEQ ID NO: 416860 - DNA, 201 bp, Homo sapiens
catctgatgccaaacaagggaaagcaggtcactccaccaagggtagctcgcttctagacctccagtagcagcccctgacagcaacaatcttgtctattgayatcatttattattgtctgctgacattgtgtcattattctgctcccttaattttcatgcaaagttgtagctttgggtgaatgtctacccaagtataaaatg

SEQ ID NO: 416861 - DNA, 201 bp, Homo sapiens
aatgagatgatgatgcaaatatattagaaaacaaattgccactacaagctacagatattttacttccattaatttcattaatagcatcatcatcattttaygttgtaataaaggcaattcactatgcttagttctgaagtgtccatgcattaaaataatcaatgatggagattctgtccattttgcatgcttttctctctg

SEQ ID NO: 416862 - DNA, 201 bp, Homo sapiens
agataaccttggctaagtcatttggcttctctgagtctcaaataggaatcaaaaggggaagatccaaagccatagtaaaaaggtttttatcataaatgaaycctaaatagaattttttaatgcccagggcaggaagcctagattggctttccatctggagagaggtccttaagtaagaggaaggataggaatgagaataga

SEQ ID NO: 416863 - DNA, 201 bp, Homo sapiens
tgcagcagatgactatgttgaagtcaatgctcatttgccattatgaatacctgagggcccttaagaactatgctaaatctactctgcctaggctatatgartggaacaacaaagcctggatgacagcctagtttgctgaatattttaagctcactgttgagacctactactcagaaaaaacacattcctttcaaaatatga

SEQ ID NO: 416864 - DNA, 201 bp, Homo sapiens
cgtctattagatattcaccattcctagattaaggtagtctttccagaaatatttgtgggatgactgaacagccattactgtaagtgttaaatttgttgtamctatgaggaaaaaaatgtagtcccaaaagttagctaagaagtttccagctaattgagggcattgccctatgtacatgaaaaacatttatatttctgttga

SEQ ID NO: 416865 - DNA, 201 bp, Homo sapiens
caatgtaaacttcctactcaatactgccttaaaaaaaaaaaaaaaaaaaaaaaaaaaagtaagtccttattcccaaagtgactaatacaaaccaagcactyggtcaagggctactgagggaatgactgcaataaaaagcaatctctgtgtagacttcatccttgtcaattgttagcgactttggtcaagaagatattttgg

SEQ ID NO: 416866 - DNA, 201 bp, Homo sapiens
tcgttttatatttcctcctggaatgcatttttttattgccatgaaagtagagagcgggtgctaagataaaataatacagaggttattttagtttggggaamggggtcaagaaagtaccctgagacacattgaggatttgatgaagctgtcttgagggcgaggagaacactgcaggcagagggagcagcatgtgcaaaggcc

SEQ ID NO: 416867 - DNA, 201 bp, Homo sapiens
ctgcggtctgaattataaaatataaaccattataggaaaaatggaaattctaaacattcttaaagggtaacattctctcatagctctaggaaattgttggrctgtaataggccaccacccagaatcagtcatccaactagctgttgtgagctgatattttaattttcaaaccttaaatcagcctcagtacatttctatcca

SEQ ID NO: 416868 - DNA, 201 bp, Homo sapiens
gatctagattagagatgctaatacatcttagccactcttgggataaacagcaaatctgtgagctggtagctttcttaaaaatctgagatggaaaaatgtgmgcttgataaaaaatttatttttaaaacatgtttatagaaggaaccctgagatgaaaattaagaggtcttacaaatttacacatatcacatagcccaccta

SEQ ID NO: 416869 - DNA, 201 bp, Homo sapiens
gcagctgaaatttggggtaactttataactagcttaattctacatatttctagaactcactgaataacctttgttggtaaatgacataaatataactttgrtaacttttcacccaaaatcttgtatagatgaaaaaactcacataaatcatagattttagatttgagagggaatatatagttatatagaccagtcattctc

SEQ ID NO: 416870 - DNA, 201 bp, Homo sapiens
atctagattagagatgctaatacatcttagccactcttgggataaacagcaaatctgtgagctggtagctttcttaaaaatctgagatggaaaaatgtgcscttgataaaaaatttatttttaaaacatgtttatagaaggaaccctgagatgaaaattaagaggtcttacaaatttacacatatcacatagcccacctat

SEQ ID NO: 416871 - DNA, 201 bp, Homo sapiens
ataactagcttaattctacatatttctagaactcactgaataacctttgttggtaaatgacataaatataactttggtaacttttcacccaaaatcttgtrtagatgaaaaaactcacataaatcatagattttagatttgagagggaatatatagttatatagaccagtcattctcaaaatgggatcccaaccagcagca

SEQ ID NO: 416872 - DNA, 201 bp, Homo sapiens
tgcagcactctttatggtctcctaggagcataacttggaatgtacaggaatatttgtgtcctaaaaaaatcagctgcccttccaatatcatttttataacsttatggtttaattcaagttatacaaaggtgtgactcaaggatgtgcaggtattgactgatggaggccaacaaggaaaatattttttttcagtgagcccag

SEQ ID NO: 416873 - DNA, 201 bp, Homo sapiens
ataggagccatgatgtgaagttgttatgaaaatcgaatgagttaataatgctgtatatgcatcacaagagtacctggcacatagtgaatgctttaataacygttgctgctattaattgttttgactactgaaatagacaagagttggtgatggtttggatggagaagaggagggaagtttcaaagacaactgacaggtatc

SEQ ID NO: 416874 - DNA, 201 bp, Homo sapiens
acaggcaatatgtaacaaataaaagctgtattccagtaaactttatttacgaaacaggtggtgggtcatgtttggcccacaggctgaagattgctgacctstgacctagagtatagactgagaagtagcccaagacaagacctaagagatatatattataatatatatatataatatatattattataattattatgtata

SEQ ID NO: 416875 - DNA, 201 bp, Homo sapiens
atcagctgcccttccaatatcatttttataacgttatggtttaattcaagttatacaaaggtgtgactcaaggatgtgcaggtattgactgatggaggccracaaggaaaatattttttttcagtgagcccagagaaattagaaatcttcaccaatgtcagtgactgcatggtttccaaaaattcacatagtattacctca

SEQ ID NO: 416876 - DNA, 201 bp, Homo sapiens
tagtataatgttttatagaggtggttatagaaattatccttgaattattcttagtcttaggggaaactttcaatattcatcattagcatgtttgttatacrgtttcatcaaattgagagcgttttcttccaatcccagtgtgttgtaaattggagagtaaatcccccttgtgaggtctttaaggatcacttcagtaaggcc

SEQ ID NO: 416877 - DNA, 201 bp, Homo sapiens
gtgtgactcaaggatgtgcaggtattgactgatggaggccaacaaggaaaatattttttttcagtgagcccagagaaattagaaatcttcaccaatgtcastgactgcatggtttccaaaaattcacatagtattacctcacagtaggaaggcttctttcccatttaggctcagagaacacttttacagaaatcaaaccta

SEQ ID NO: 416878 - DNA, 201 bp, Homo sapiens
tagtaaagaaagattgcaattgattagtcatctctgtggtgaacatgggagatgggcagtgatgatatatatgctttatgtttatcttagaactttctagyttagtaaattgttatggtatcttggaaacaggagttgctttgtctattttatagaaggaagaaaaagaataacagatggatgttgcccatagttaagcct

SEQ ID NO: 416879 - DNA, 201 bp, Homo sapiens
ttaattagaagggtactgcttaatttccaaatatttgtgtaatttttagttattttattattgatttctgtttaattatgctgtggtcagtaaacatcttrtgtttgatttttgatctttgaaatttattcagactcatttattatcaacacataaattttggtaaatgttcaatgtgtattctgtaattgttggctgtaa

SEQ ID NO: 416880 - DNA, 201 bp, Homo sapiens
tcctatcccttacctcaccccaagtgtagccttccttgcttagaaaaaaaccccttcttgctggcccaagggacatggtaagcaagctttaataggctgcrctttaaggggcaatgtcctcttggagtggagcccctgttagcatctctcagccaagcattgtttccctagggagtaatgactacccagtttggctgtttt

SEQ ID NO: 416881 - DNA, 201 bp, Homo sapiens
atttgtgtaatttttagttattttattattgatttctgtttaattatgctgtggtcagtaaacatcttatgtttgatttttgatctttgaaatttattcakactcatttattatcaacacataaattttggtaaatgttcaatgtgtattctgtaattgttggctgtaatgttataaatcaattaggtcaaatgtgttcat

SEQ ID NO: 416882 - DNA, 201 bp, Homo sapiens
agaacttcatggaaagcaagagtatatagggttccctgtaaggttagaggtgagctccaggcacttagtcccggtcaccatctgctctcatgtgtctagcrctacagacattgttacagaggtgggacaggaagtgtctgtcctacaggtgttaagcttctcattcccagcaccttgggtgccttgggatgaccttttctc

SEQ ID NO: 416883 - DNA, 201 bp, Homo sapiens
gaatttaagttcatcattctatcattagggctcttaatttgtcccacacctaaagcactatctgctttccttcatcggttcttattgccaacttgggactstactgaagccctttacaaaacttctatttgtaagattcccttctttttttttttttctttttgtaggccatcagaggtagaaggtggtaaaaacagagtt

SEQ ID NO: 416884 - DNA, 201 bp, Homo sapiens
ggaccaccaccacaccagtggaccagaagggcagagcatcaaaccaaagaggattattctcaatcctaaagtctgattaaatttgtcttgctagatttggrcttgctcaagatccttcaccctctccttttttcctagttctgtttggaatgggaatgtctatgctgtgtctttctcaccattgaattttggaagcacata

SEQ ID NO: 416885 - DNA, 201 bp, Homo sapiens
attcatgctcaaatgagaggttttaagttgttgtcttctactcattaaatccttgtgtcatcatcctgaaaggagagattatggtgttaggaggttgtcasctcataaggcaaaaaaaacattaaactggcctaagttcctgattgcattagatttaactgttctttacctcaggtcgcctccaccctgacagatgtcttt

SEQ ID NO: 416886 - DNA, 201 bp, Homo sapiens
ggataaccctgattgatacagctggtgtttgatggatatttgctgaattttttaaaccattttctatgtaggcatctctctctttttttttttttttgagygcaacagggataagccctctatcagttatctagtgcataatgacattatttggaattaccagggatagtaacaaattaccacaaaacatagtttgaaatg

SEQ ID NO: 416887 - DNA, 201 bp, Homo sapiens
tgtaggcatctctctctttttttttttttttgagcgcaacagggataagccctctatcagttatctagtgcataatgacattatttggaattaccagggakagtaacaaattaccacaaaacatagtttgaaatgattagcattcagtagctcatgagtatgagagttggctgggtgattctgccagtcttgggtgggctc

SEQ ID NO: 416888 - DNA, 201 bp, Homo sapiens
aggaggagcaagaggaggaggaagaggcggagaaggaggagaaggagaaggaggaggaattaattttgctctaatattaacccctttaaaattgaattcayttaaatttaaccctttaaatgctttgcaacaaaatatgcattatgtatttgctagtttgttctgtgcaatttcattcatacaaagttactgtcaaaaaac

SEQ ID NO: 416889 - DNA, 201 bp, Homo sapiens
tattccaaatataaatatgaatcagttacaaaacagattcctttgaaactacaaaataaccacactgttaatatatttgtgctccaattaaaaatgtgcamagaacacacattctgagctaaagctgtcccagggagtgattctcatttttgctttgagtcttgtgtaaacaaaactaggcagtctcctttgagccatgaa

SEQ ID NO: 416890 - DNA, 201 bp, Homo sapiens
gaacaacccagtccataatgtgtgtttaataaatgctgtgtatacaaacttattaattatatgagaatttttaggtttttcacagagtcaagttcagatayattgctcaaagcctaaatcaaaattacactctcaaaaaaaaatattgaggtccaatttttgcatccaaaatatctatatatatatagttttgtatttata

SEQ ID NO: 416891 - DNA, 201 bp, Homo sapiens
aaacagagattcatatcatataggtaaattaaaaatacacaaacattgttcattgccttcgatatgcatttatgtatgtgaatgttaaaaaggaaaaatastggtcttgaaagatacaaaccaactcacattctgggcttggtgtggggttgtcaaggagattatacctatgctccaatttttctaatttaaaaaaaggca

SEQ ID NO: 416892 - DNA, 201 bp, Homo sapiens
aagtttttcaaaggagtcaggatgtaggacgtatgtgtgtgtgtgtgcacgtgtgtgcgtgcgcaaaatacatttgtttgcaatacaattgagatttactyttagcgtatgtggccagattgtatctcaacattgtatgggctggcactaaaaccatgtcagtttacggtgaaacgccaacagaaaactctagcatccttg

SEQ ID NO: 416893 - DNA, 201 bp, Homo sapiens
agtccctccattcttggttgggcctgtctttgggcctagcttatctcaattgccagctggaaggtctgcttagtcactgcctaataacagatcaccctggracttgagcccttctgagaaccccacactgtttgactggggccctgatcctcccctgaagtcttacaaggcttcacccctctaccctctcatgccctactg

SEQ ID NO: 416894 - DNA, 201 bp, Homo sapiens
tcaaggataccacctcattttatttcaatcttcaggtcaggtgcctcaccataaataagagcctttacatttttagttaaattattggccataggtcaccragaatcatggctaggtgctgaaaatttttaagtctaagtctgtatatattgccaaagaataatttattctaagtctttaccttcctataacccatctccc

SEQ ID NO: 416895 - DNA, 201 bp, Homo sapiens
tacaggatattgcccttgatgtccaagcataagaaaatggcagcagggccaaaaggacatccaactagccctattccaaggaccccatgtagaaatgatamgaacaaaatagtcctgaggatacaaaagttaattctgcacaacaggatccaaagaacaaattgacttccttgaagctgtgcagtgagcccatctgccaga

SEQ ID NO: 416896 - DNA, 201 bp, Homo sapiens
gggaggaaggagagtggtccctaccttttgaagaccttctaatttgtggcgatgggcaggggagtgcaccaatactataaagcagtagttctcacactcargtgtgcatcagaaacataggacccgaaccccaccttcagagtttataactcattaggtctgggatagaggcggtgcatctgcattgccatcttgttccca

SEQ ID NO: 416897 - DNA, 201 bp, Homo sapiens
aatttagacccagtgttggcaacctctcagaggtggcacgccaagggagtgtttattcactcttgtgagcaggcagtacagctgccctagcttcaagaaawaactcatgttttttgagttcctactatgcactgatcagtgtgctaacttgtggggggaggaaggagagtggtccctaccttttgaagaccttctaatttg

SEQ ID NO: 416898 - DNA, 201 bp, Homo sapiens
gggaaatgtaaccttatgaataatatttaaagccattgagacagaatgagatcaccaagggagtaagtacagatagagaactgaagaataaaaggtatccmaggcgtaagtcttgtagcttgtaaaggctggatggaaaagaaccagaaaagtctgaaaaggattgttcagtgagaaaaatcagcaaagtgtctcatcctg

SEQ ID NO: 416899 - DNA, 201 bp, Homo sapiens
ggctaactcccctcctttcttccttctccccttcctccttcttccctcctttccttccttcctcattaattcttaaaatgttcatttgaatgcttagatgytagattgtctcatttctgcctctatgattattgcttataaatcaaagcagtaagtcccactaaaaacttaagagccaagttagtatcttcttttttagcg

SEQ ID NO: 416900 - DNA, 201 bp, Homo sapiens
ccgaaaacaccacgtgacacacttttggccaaaactcctgatgaaggtgacagatctgcggatgataggagcctgccatgccagccgcttcctgcacatgraggtggaatgccccacagaactcttcccccctttgttcttggaagtgttcgaggattagactgactggattcattctcataattcctacagcactactgg

SEQ ID NO: 416901 - DNA, 201 bp, Homo sapiens
gaaacagtgatatatttgaggaaaagaaggaggtctgtgagactagaatggagtgagtgaggaaaaacagccagagatgcaatcagggggaatggggaacwtggtttttaccctgagtgtgacaggaaagcattgcagggtttggtgcccagggattaaatgaactgacatgtaatttggccaatagacattaatgtcagt

SEQ ID NO: 416902 - DNA, 201 bp, Homo sapiens
ttttggccaaaactcctgatgaaggtgacagatctgcggatgataggagcctgccatgccagccgcttcctgcacatgaaggtggaatgccccacagaacwcttcccccctttgttcttggaagtgttcgaggattagactgactggattcattctcataattcctacagcactactgggtgtcatttcattccattgcct

SEQ ID NO: 416903 - DNA, 201 bp, Homo sapiens
ttattgtgtgtcatttagaaatttgtcttttcaaggccctagtttcttcaaacgtaaaatgaagctttgcagagagctcatgttcaaaggtcctgaggcasaagaaacagtgatatatttgaggaaaagaaggaggtctgtgagactagaatggagtgagtgaggaaaaacagccagagatgcaatcagggggaatgggga

SEQ ID NO: 416904 - DNA, 201 bp, Homo sapiens
ctttgccttcaaactcaagccattcctgctttgacttccttctgtcttacatctgtccttgaccttattttggctgttttgtttgccattctctaaattcrcatctttctggcctgcttttgcatgggcttctctgtcatttatttttaactagtggcatagagtccttccctgtcatctgctggcttgtgttcttactct

SEQ ID NO: 416905 - DNA, 201 bp, Homo sapiens
gacgctgaggaaggtggatcacttgaggtcaggagttcaagccagcctgaccaacatggtgaaaccccatctccactaaaaatacaaaattagccaggcayggtggcacacgcctgtatccagctacttgagaggctcgaacccggaaggcacgaggttgcagtgagccgagatcatgccattgcactctggcctgggcaa

SEQ ID NO: 416906 - DNA, 201 bp, Homo sapiens
ttttgctgttgttgtttctatttgttgttgtcagattgttttctctaatcaattcatctattcagtgtttctacttctatttgtggcaattttggtaattmatattatacctaaaaattgtccttctgtcagtatcgtttgtttgtttgagatggaatctcactctgttgccaggctggagtgctggtgtgatctcggctc

SEQ ID NO: 416907 - DNA, 201 bp, Homo sapiens
caattgattcaactgtacaccaagaactgagagccaatgcatttcactgtctcctgtcagtcagttcataaagtccaaagaaggggacagaaaagaagccrgcaaaaaccagagttggatggctctcaaaaacccaaacaaaaatacacattttcatctcgctcatgttggaatctaacaagaaacagaagtatggccccc

SEQ ID NO: 416908 - DNA, 201 bp, Homo sapiens
cgtgtaaatcaagaactaagcttacttgcttctttgctctttctcatttttctcttcaatcgatgagtagatggatagataaggaaaaatagatgaatgcrcaaattctcatacatacacataatttagagttcagatattgtacattttataagtacacaaagctcataaaacacaacataaaaaaaactgtctctctca

SEQ ID NO: 416909 - DNA, 201 bp, Homo sapiens
atgtgaatgttaaaaaggaaaaatagtggtcttgaaagatacaaaccaactcacattctgggcttggtgtggggttgtcaaggagattatacctatgctcyaatttttctaatttaaaaaaaggcattcttcatgttattttaaaatatacccttttttaaattaaaaaaaattagagcacaggtgacaaaatgtttatat

SEQ ID NO: 416910 - DNA, 201 bp, Homo sapiens
ggttggtagattcaaaaagatacatacatacaggcccatagttccttatccaaaatccttgccagaaataattcagttttgtttgcttgggtttttgaggrgtgggggggttcgggaagatagtattgtgctctaccgcaatgggtagaactctaccccagtgacatctgggggaacgccccattgcaaacacatgaatat

SEQ ID NO: 416911 - DNA, 201 bp, Homo sapiens
catccattggaaaggggtaatttctaaggttgcaagacttgctttttggaatgtggtgtaacatgttcttatttatccagacccctttgatctggaattcrtagtcctttaacaaagactgggctaaaggttgccattacatctatgaaaataatgtcttagggaatttaatgaatctaattacaagtaagttctggctat

SEQ ID NO: 416912 - DNA, 201 bp, Homo sapiens
tttttctaatttaaaaaaaggcattcttcatgttattttaaaatatacccttttttaaattaaaaaaaattagagcacaggtgacaaaatgtttatatttkgggtagtgggaacccagatgttttccctgctaacctctgtttttctaaaatttctacgttatttacaacaacaacaaaaattgtaggactgcagttagtt

SEQ ID NO: 416913 - DNA, 201 bp, Homo sapiens
aaaatgtgtttttaaaaataaaatacttatagttttgaatcatggcaatgtttccagtgacagaagtgagggaagtagaaaaaagattgtagaaaagtctrgagttgttaaactaatgagaaaattgtctagttttctactattagaaggaatggtggtttttaaacatggtcacaaattctttggcattctctcatcaag

SEQ ID NO: 416914 - DNA, 201 bp, Homo sapiens
gatatatccagtgctactgaaagtgtggtagtaccaatcagtggcactaggagaacctggagcttggtagaaataagattctcaggccccacccagactastgaatctctagagaggggcccagccttctatgttcttgccagcccagtgcagattcttaatacctgggtatcatgacgagcttgaaaatactcttcaact

SEQ ID NO: 416915 - DNA, 201 bp, Homo sapiens
acaggactgccaagtaacaagtaatactgtgcagcttgtcaggttgtgagcagcactcacttcattgtcaaggctctaaagacaaatgtcacctatctcaytgtttgtcaagggctgaccctgagcgtaggtttaaactacaaagagtttccagccaaatctagacaaatgtgtgaatgacgtaatgatcataggctatca

SEQ ID NO: 416916 - DNA, 201 bp, Homo sapiens
ccttttttaaattaaaaaaaattagagcacaggtgacaaaatgtttatatttggggtagtgggaacccagatgttttccctgctaacctctgtttttctaraatttctacgttatttacaacaacaacaaaaattgtaggactgcagttagttgaaaagcggcttgtcacttgccatgcaggcagccactcggcgacatcc

SEQ ID NO: 416917 - DNA, 201 bp, Homo sapiens
ctggtggaggcaccagcaagctgtaaagtggccagaagtgggtagcagaaagaatggacagataaagccaaagtcatgctgagggccatggctgtccccaygcacatgggcaaagaatacaactcaactgaaaatgtgtttttaaaaataaaatacttatagttttgaatcatggcaatgtttccagtgacagaagtgagg

SEQ ID NO: 416918 - DNA, 201 bp, Homo sapiens
gcacaggtgacaaaatgtttatatttggggtagtgggaacccagatgttttccctgctaacctctgtttttctaaaatttctacgttatttacaacaacarcaaaaattgtaggactgcagttagttgaaaagcggcttgtcacttgccatgcaggcagccactcggcgacatcctctgcggcatggcaggtgtcgtggtc

SEQ ID NO: 416919 - DNA, 201 bp, Homo sapiens
agcacaatctagacagctccatggcttcatgcttacattcataccctgatgaggaacccatcgcttccccacaggttcatatggcagtgccccacccgacrgctcaattgcagctcttatatgttgagacctattccaggaaccatccactgagataaagcaggattccctttaacgcacagtggctaaacagtttgaggt

SEQ ID NO: 416920 - DNA, 201 bp, Homo sapiens
gtgaagatccaacaatcctttcccatgtgtcttttccttgagtgctaaaaaggcaggcggatcatgaggtcaggagatcgagaccatcctggctaacatgrtgaaaccctgtctctactaaaaaatacaaaaaattagccaggcgtggtggtgggcgcctgtagtcccagctactcaggaggctgaggcaggagaatggtg

SEQ ID NO: 416921 - DNA, 201 bp, Homo sapiens
tttaaagatgagaaggctcctgcaaccccagtccccagcctcttcttcatcccacctcaatcaaggtgacctcagaggtcttccattcccaccaggaaacygggggcacctcccaatacttgcacactctttttacaaggcattctcctcaatttacagataaggaaactaagaagagatttctataaatgctgaaaacct

SEQ ID NO: 416922 - DNA, 201 bp, Homo sapiens
atgcctttctttaatttgggattttatgttgttcagtaatctctacttcactgatataaacctcatttttgtcatgcattactttaacatgtgcttttaamaatattcatcaaattcaaattcttcataattttttttaatcctttgctcctactcatctgactgctttttaaatgccctataaaatgcagacttctcata

SEQ ID NO: 416923 - DNA, 201 bp, Homo sapiens
aaggccctggttcatctaacttcagttttcgttgagatgcacacagagcagaggatggaccaccccacgctttccaaggccaactgaacagtgtctgtcaygccaaaggatgcagacgtacccaaccatacctctcatcatactctgtcccagggaaatacttacacagggcacaagtctgttcaaacatgttctttgcat

SEQ ID NO: 416924 - DNA, 201 bp, Homo sapiens
cctcagttttctcgtctgtaaaatgtggaccctctttcacagaattgtggaaagaaacaagctcttaaatgatctcatgggacacagtgagtgctcaataratgggagttatttttcttacaatgagccagaaagactatgagaaccacattggacattaggaatgcagaatgcccacgtcagaataatcactatattgtg

SEQ ID NO: 416925 - DNA, 201 bp, Homo sapiens
tgggaagtttaacattgatgcctactattttctaatctacagactttatttacattttacaaattatccttcctgccacccccttggagggggagttgagrtgaggaccagagctggagagaggacttgtctctaagaggttttcacaggcttcattcctctagatagggctgggagaggccaccaccaattgtcctctat

SEQ ID NO: 416926 - DNA, 201 bp, Homo sapiens
atgcatgatgttctttgagagatcaatagaacaatgaaacccaaaaatgaattgggggcatggagtcaggcaaggcttcctggaagataggatacctcagmtgagtctacacaggtgaagagaagttgtctggccaacagtaaatgtataggaggacaggcaggggaagtagaatatgcaaagacatgaaatgtaatttgt

SEQ ID NO: 416927 - DNA, 201 bp, Homo sapiens
tggttgagtttcacagttaatcttcaaaatatgtacttttagttttaatttgctttctgcctttatgcaaaactgctgccaaataacaagtttttttaaayggacaaatttgagttcactttctctgctcctgccaccctctggtggaggcaccagcaagctgtaaagtggccagaagtgggtagcagaaagaatggacag

SEQ ID NO: 416928 - DNA, 201 bp, Homo sapiens
aaagcttttatgaaatgccaagggaaaaaattagaaacaaattcagttaacaatatgttttaaaagagaagagctttgagtttctattcctactgaaacasacttaattcaagagcccaagaggccctggtcttgtcctgtgcccacctggggatttgcatttccatgtgtccagcctgcctcttctggccggcagctttc

SEQ ID NO: 416929 - DNA, 201 bp, Homo sapiens
atttagaaaagaaaggcataatctaggaaggcatgaaggggattactggagcacatctttaggggtctttgaaataaggccttggattaatagaaagaatrgccagctctggtgttctttgtaatgagtggttgagtttcacagttaatcttcaaaatatgtacttttagttttaatttgctttctgcctttatgcaaaac

SEQ ID NO: 416930 - DNA, 201 bp, Homo sapiens
tgaggcttgggtgtccaaggtcaaggtatcagcagattcactgtctggtaagggcccacttcctggtttgcatatggttgtcttctctttatgccttcacrtggtctttccttggtgcatatgtatgaagagcaaaatctctccatcttcatcttcacataagggcactaatcccatcatgaaggtcccaccctcagacct

SEQ ID NO: 416931 - DNA, 201 bp, Homo sapiens
ctctccctttcaagttgaccaggaagagctggaagagcatttttcaggatatcagaatcccagaacaactctcatctcacttacaaactaaaggacagtgrcctcatacaagttatgcttcactagaactgattttcttcttctctaggctgggaaagccactcttggcctacattgctcataaaatgaatgaaagtttaa

SEQ ID NO: 416932 - DNA, 201 bp, Homo sapiens
gacatgaactggttcttttcagctgccatgtgaagaccagatcatcctcctcaaaggctgctgcatggagatcatgtcccttcgcgctgctgtgcgctatsacccagaaagtgagactttaaccttgaatggggaaatggcagtgacacggggccagctgaaaaatgggggtcttggggtggtgtcagacgccatctttga

SEQ ID NO: 416933 - DNA, 201 bp, Homo sapiens
aaaagaatagattactgtacctttgtaacagaataaaaatgttcatgggacagataaacactacattcagcattatggcaaaatgatacaatttgattaaytgaggtagcatgtccttggattttgcaatattgtcttcttttcttttttgcatgtttgacatagtatataattttaaataaaatgacagattaccataat

SEQ ID NO: 416934 - DNA, 201 bp, Homo sapiens
ctagggaacacctttctccataataggggcaaagagcacattgtccacggtctgaagacttttctgaagattaaaaaaaagacacagccactttattctcgtctcatattttaactaaacattcttttctttccacaatccaatcatattacattacaaaacaactaagatcagagtatgtcttgataaccttgatattta

SEQ ID NO: 416935 - DNA, 201 bp, Homo sapiens
cttcagacaaatagattttttttcatctattaaaaaaatgtggctacattaggacaaatacctaatgcatgcccggcttaacacgtagatgacaggttgayaggtgcagcaaaccaccatggcacatgtatacctatgtaacctgcacgttctgcacatgtatcccagaacatgaagtaaaataaaaattttttttaaaat

SEQ ID NO: 416936 - DNA, 201 bp, Homo sapiens
tccaagattaagaatgtgctttgcttcctgaccctgtcaagccccatcccttctcaagaattttccatgtgccacaaatcaactaaataaaggcttttgawcaccacatgcactggccaagaggacaaaacctaaactggctacagtatgaggctcctggacctgggacagcttggcccagtccagtgataatttcaccaa

SEQ ID NO: 416937 - DNA, 201 bp, Homo sapiens
aaaaatttagcccacaaagttacagttaatctgttcagaatcctcattggtgaaaaagtggcagttctcacatgcttatcctacctgggtggatcctcacrtatctgcagatatctgtattccaaagtcagagataaagatttttttcttgggggagccagcaacttacagggaaggggctcaagtcttttaaaaatgttt

SEQ ID NO: 416938 - DNA, 201 bp, Homo sapiens
cacacttcctaatcagttttctctgttcttctcttctctctctcagaaactcttgccatttaagggtctggtctacttggcacccttacagttttttgctrctgttctccactcccattgttcatgtcataccgtatcgccagagttgctcactccgcttaaagaatggcattgtttgccactccccaggggcacactggt

SEQ ID NO: 416939 - DNA, 201 bp, Homo sapiens
cttgtcaacttactctacatgggaaaaaaatcatctttttattctgaaattatattctatatacctagaatatacctagaatgacctctgagtcattctgrcctttgtctccttggattatttttatttgtaaaactgctcctggttttatattctgtttttatattctaataaatgcatgtgactacaaatattttataa

SEQ ID NO: 416940 - DNA, 201 bp, Homo sapiens
agtcttttgcgtgtgttgtcacaaggaggtagtgattgactgaaaggcatcaacaaatatagagactctaaagtttcattaagtgtaaagaatatagaaayatatggatatggttttgtaaagtaggggataatacaacagatcccagacagaggatcccatgccatagttctcgtgagagggcgtccggctctgaattag

SEQ ID NO: 416941 - DNA, 201 bp, Homo sapiens
cagcctccatgccacaggacagcccttgaccagttaccacctgatgctgaggtacaacagctcaggccccttgcctctgtgcagaatgacctctgagtgayttacaccccagagctccctgtgggatcagactagacttctaaaaccacatctttgtcttttcccctgccctcccttgcttcccttactccctcatgtgtt

SEQ ID NO: 416942 - DNA, 201 bp, Homo sapiens
aacagcctcctgcaaatactaaaattattgttggcaggtcctggatagaaagagtggagttgtggtgtgtgtgggtgtgtgtgtgtgtgtgtttaattcakagcaacctgttacattctttctattagaaaaagcacgtgtacatttgaatgcttcacacggattcttccattgtaaacagaatttgggtaagggagctcc

SEQ ID NO: 416943 - DNA, 201 bp, Homo sapiens
ccactgtggtctttcaaaacgcaaacttactggctgaatatcttatcaagtcattagcttctccaaatggatgaattggataagattccttttactcttgrcagggtccaataaagacaatggaaagaatgggactagaaggaggccatgaacagggtaaggatagcaagggataagagagaaggaaaagaataataataa

SEQ ID NO: 416944 - DNA, 201 bp, Homo sapiens
atacattagatggtgcaaaaaaaaagctaagagttttgtgagaaaacaattcagaaaaagccaaagaaggaaggaccaaaattatttttgcagaaattatwaaggtacatgtcaaaatttaaaaattacacttaatttcttactgataaagtgggcatctccttgctcaaaatacttgtcaaggtgaataaaatagtgatg

SEQ ID NO: 416945 - DNA, 201 bp, Homo sapiens
gtgtaagtaaaagaagctactgccctttaagggaaaaataatacatgttaatttttgcagcaatttcaattgaatgggtttccagggaaacaggtatctgyaatgggttcatcccacttaatatttaagacaaaacatagggaatttctttcttgttatcttttccttgttatcttacacacgacatgctcattcttaaat

SEQ ID NO: 416946 - DNA, 201 bp, Homo sapiens
gcactgcactccagcctgggtgacagagggagaccctgtctcaaaaagaaaaaaaaaagaagaaacattcatgctggcaggacaggaaagttgaccatcargagtcagatcatgaaagtctaaggcgtttggatattaatctgatagcagtagggaaccattttaaaattgtaaacaaagtaattgtttgatccagtttta

SEQ ID NO: 416947 - DNA, 201 bp, Homo sapiens
gaagcaggagcatcacttgagcccaggaggttgaggccatagtgagatatgatgggtgtcattgcactccagcctggacaacacagcgaagataacttaartgtgtgtgtgtgtgtgtgtgtgtgtgtgtgtgtgcgcgcgcgcgcgtgtgagctatgatgagctatgatggtgtcgctgcactccagcctggacaacaga

SEQ ID NO: 416948 - DNA, 201 bp, Homo sapiens
tataatttacatgccatcaaattcccctgttttaagtgtatagttcaatgattgttagtatatttacagaggcatgcaaccatcatcaggatcttattttrgaacatttccatcatcccaaaagaaactttgagtcgtttacagttactccccattcctgtgcccagcctctggcaaccatttttctttcagtccctgtag

SEQ ID NO: 416949 - DNA, 201 bp, Homo sapiens
atgtttcctgcttatatatcttttcttcagacaaccttcaaaaagtgtttgaaaaattttttttgatctagagaaaatattttaatcttctatcccttgarcttcacgttttggtttagccaaacaccatacaaatgaatgtgttgtggactaagcactttgacccactgaaagctccagctccagtggattgcttaatat

SEQ ID NO: 416950 - DNA, 201 bp, Homo sapiens
tgacgcttaccagctatttaaccttggctaaatcaataattctctccaacaaagaatgtagtcagagattaactgaccacaaagaaatcaaatagatgaayctacactccatttttaaagtggccctccaatatgataatcatattttcccttgtggggaagacaaggaaaaatatattaaatcattaccagccccctaaa

SEQ ID NO: 416951 - DNA, 201 bp, Homo sapiens
tctccatggcactgacctgacataggattattatatattgtgaacctctgtccccatgacatttgtcagtatgggcttatataagggacttgactttattmaactttactgccttttaaaatacagagctgtgctgcatatgtgactgtttaactcaattgtctatatgataaagacacttggcatttgagtcagaatatc

SEQ ID NO: 416952 - DNA, 201 bp, Homo sapiens
gcacactaacatacctttgaaattgaagttaatcaatgaagaaaaacaggcagggattgttatatttagactgatcatcaaagacaacagcaagtgttctycttgctttttttagacagagtctctcactctgtcgcccaggctggagtgcagtggcataatctcaattcactgcaacctctgcctcctgggttcaagtga

SEQ ID NO: 416953 - DNA, 201 bp, Homo sapiens
acccttcctaagacatttctgctcagccatttcatatcttaggcctccactgatgatgtcctacatactcttccagctcactggtcacctcttctgtgaakccatccctggcactctaggcagattactcctgtgtccccatgccaagtttattacacttctccttgtatttcgttctttcctagcgtgcctccttttgtg

SEQ ID NO: 416954 - DNA, 201 bp, Homo sapiens
actttattcaactttactgccttttaaaatacagagctgtgctgcatatgtgactgtttaactcaattgtctatatgataaagacacttggcatttgagtmagaatatcatgtgtgggttgatggtttattagtctagactgcaatattctatgacttgcagattgtaccccaaccacccatagttgcctcagacatctag

SEQ ID NO: 416955 - DNA, 201 bp, Homo sapiens
ctggacaaagcaccacagagaagacaggaggctataaagttaacaaagtgacttctttctatgacctctcaggtcctcaataaagaaactgagatgtgcgrtgtgtgatcctagtagatctgctgtagaaatgacctacctgtgactcagttgaaactgagatgaagcgtggggtgagactgaggcaggtcaagtgcccac

SEQ ID NO: 416956 - DNA, 201 bp, Homo sapiens
ttagcagtcacctgggacaactagcagatgcagttcctgacatgaacagtcgtagcttccaggattgtgtctgtagtatttgtttctaggcagaatccaaygctgacattatgacactcatcagtgtccactcttggcaacaaaactaatgatacatgtgcattttccttagtttggcatactgaccattgtgtaactcat

SEQ ID NO: 416957 - DNA, 201 bp, Homo sapiens
atctgctgtagaaatgacctacctgtgactcagttgaaactgagatgaagcgtggggtgagactgaggcaggtcaagtgcccacaggggtggtatccaagrtggctggggagattgtagaaaactttcatattgggtgttcagaccaaggtggaagctggaagaggaggtcttttattaacagatgtagcacattatggtg

SEQ ID NO: 416958 - DNA, 201 bp, Homo sapiens
tttgaaagaactattagatagtaagtttggtccactgattgctttatttcaagatactgaaatgatttggggattgactcccatacttaatttctaaatcytcctatttagataaatttctacaactggtattatgacttctggagtattctagtggaggtcctggggagaatcttcatctgcttatgccaactattggtc

SEQ ID NO: 416959 - DNA, 201 bp, Homo sapiens
aaggaatggcaaagtcacattgccagagacatgcagggtggcagtgattattgcagccatttgtggaaacaatctaccacactggaaatccaagtaccagkcattttcagactctgaaggaaaacaagatggttggtaagaaagagtctgagtagggtgggtaattaacagtgagtctaaactaaacttgatgctgcagcc

SEQ ID NO: 416960 - DNA, 201 bp, Homo sapiens
acatgggccatgttgcctgtatggctaatggtgcctacccagaaggggaatttacattaataatgccagtgctaaaagtatgtaagaaattttctattttmttttatttttaagatgtcacttttataaaatataataatgtatattgcttaattatttatataatagaatgtagcacttcctgttaaaatttaaatataa

SEQ ID NO: 416961 - DNA, 201 bp, Homo sapiens
ttttccctagatcacaggatgtttggagcctggatcagctgaggttttcttaaaagaagaaatcgtgtagcaaaatctagattttttttcagattctgtgmctttgtctcaggtcagaatcctgtttctagggttgccttcattgtaaaatcagagaagagccttcccagggtacttgtgcggatcacttaatataatgac

SEQ ID NO: 416962 - DNA, 201 bp, Homo sapiens
ctcctatttagataaatttctacaactggtattatgacttctggagtattctagtggaggtcctggggagaatcttcatctgcttatgccaactattggtstttctgatctcacaggattatagaacaatgaacatggaaagtttcttagagatgatcctttgctgctcaaagcatggtttgtggctagaagcattggccc

SEQ ID NO: 416963 - DNA, 201 bp, Homo sapiens
tggagttccttcacaaagcaggaactccaaggtagtgggtttaatttagttaattgggtggcatgacaggtcatcaaggtgccctccatcttgttgccctrctattgtctccgtgttgccttttgttcccaggctgtccgctcagagtcacctctctaggcagcatatgttcacacagccacatccaaagaccaaaagaga

SEQ ID NO: 416964 - DNA, 201 bp, Homo sapiens
attaatggactcaagtgcttaggaacacagaacccaaatataatattgacagttttctgttagaacttgaacaatggaaatgataagggatttgcatataygccccaaaatcaagtctgttagtctcagttattcctgatgtttttctattttattctgctttgcccaatataaaatcctacctcgggcattttcataata

SEQ ID NO: 416965 - DNA, 201 bp, Homo sapiens
gaatgtaatgctcataagaaaaatgctcttatggccaaattcactcatgagctctgtatctgtaccgatctgggactgatacatttattagcacccaaatygtgtttgtgttacaaaaggtggcaggatattaggtaggagagatggagctaatcttttctgtgaaagattagatgattagatgcaggaccatgcaataaa

SEQ ID NO: 416966 - DNA, 201 bp, Homo sapiens
cttactctaaattgactgaatgtttaaccaccagtctgactttgaaggcttccccgatctcttgccatgtacaaatgctcaatccctcttcagtgtattcrttgacctctgtccctacttctaattgctgtgaaacatctccacgtcctgcttccagcctatgctgaaagttctttgaaggtagtaactctgaccatttgt

SEQ ID NO: 416967 - DNA, 201 bp, Homo sapiens
ttacttggcttttccaaatgttgtgaaatgttttttcatatttctatcttgagctagtttcgataatacaatgctgtgcctatgtttgacctcctataaaraatatcagcccccgttatatatttaaatctggtttccaggtggtgagttttcagacctaggacagcatttaaaatataattgtgtgaggaatttgagttg

SEQ ID NO: 416968 - DNA, 201 bp, Homo sapiens
tttaattactaaattattagatttttaattaataaagtattgcaagtatccatgtcttttcatttttttcactttcttcttggtcttggagctctcttatyactcagtataaagtagcaaaactcctcatagcttaatttagcaacacaattatgtcagtatatgaaatagaacagtataatttacttatatattcaatat

SEQ ID NO: 416969 - DNA, 201 bp, Homo sapiens
tttattagcacccaaatcgtgtttgtgttacaaaaggtggcaggatattaggtaggagagatggagctaatcttttctgtgaaagattagatgattagatrcaggaccatgcaataaaatgaacatgggactattctcatatattgatcagccatagaaaatacaagcttctgtaacaagaaatgacttccagtagaagga

SEQ ID NO: 416970 - DNA, 201 bp, Homo sapiens
ctttgctttgtatctaacattaattttctagtgccttatgtcttattagtggtagactaatgtcttattaatggtacattgtattagacaggataaagaaraatcttctcctcctgttcatttgtgcacactcttgtgcacactgtacacacatcctgccatggtcatcttgtcacaataccgcagtaaagtcagggggca

SEQ ID NO: 416971 - DNA, 201 bp, Homo sapiens
aaaattacctgcaaacagagcttaattaatgttaggctattaacctctttaaagaatgagtcaaagggtgatttggcctaaattcaaatgacgacttcagytgggatcttgaccagcaatgccattgtagtgaagctggagccagagtagccaaagctaaaatcaaacagtctcctagcttggggagcccttgtgcccatc

SEQ ID NO: 416972 - DNA, 201 bp, Homo sapiens
cagcaggcgagaacagtgagggaacctcacatcatttaactgcctcaagacgaagccgccagcatcccaccatttccctggcctgtggatgccacgtaagrcaagtgcttactatatgtttctgtaatgagtatgcatttgtttatagggccttcataactcgtctgggtcatcaccatctttttagcctgtaaatttcta

SEQ ID NO: 416973 - DNA, 201 bp, Homo sapiens
gcctttgaacactatatcaattaccgaaaacaccacgtgacacacttttggccaaaactcctgatgaaggtgacagatctgcggatgataggagcctgccwtgccagccgcttcctgcacatgaaggtggaatgccccacagaactcttcccccctttgttcttggaagtgttcgaggattagactgactggattcattct

SEQ ID NO: 416974 - DNA, 201 bp, Homo sapiens
ccaaaatttagacccacaaagagggtgtccaggttgaggaagccaccaggactgccttgatgagagtctcttgccctttggaaatctctcagttcaattaytgggcctgcttccatcagcttggtccctgagactgtcttgttcctgcttcaatgttctaatcagagccaatttttttccactgcaccagatcagaatcca

SEQ ID NO: 416975 - DNA, 201 bp, Homo sapiens
attattttcttgaccctgaaattcataatttatctaggatagggctaatggtgttgaagaaatgttactcaatgatgtttgttaattcatgataaggaagrctttcttcaggaccattgggatgggtaccgggaccacagcatggggtgttgcagtcagggagagagattgggctcaaccccaaaagcagcgtgggcaagt

SEQ ID NO: 416976 - DNA, 201 bp, Homo sapiens
attttaagatgaggatatggcgttacactcctttcttggttttgtggctcctggcaacactttgttttgacttgttttattttaatatatgtttttgttcrttcattaagtgttaaaagagggcagagactctatgatctaacttcactctacaaaattatcttttctccctgtcatctcaaaaaccatatcaatttctat

SEQ ID NO: 416977 - DNA, 201 bp, Homo sapiens
attttaatactgcattttctaactcaatatgtaaaatagtattccaacaagtaaccagcagaaaaatattaatgagatattctacattctatttttcatgstgtcttcaaaatctagtgtgtatcttatacttatagcacatctcatttgaactaggcaagtatgaagtgcctagcagctatgtgtggttagtgactagtg

SEQ ID NO: 416978 - DNA, 201 bp, Homo sapiens
ttttttatagttgaccttttggatttacataaattattttaaaaggaatctatgttatttctataaatgaaaaatgtatcatttattaaaagcaaaagatractgtaaaaaaaattagtactattctttcaaaaattcataaacctaccccctaaacttatctttcatatcactcttcgggatacactgcctagggatgtg

SEQ ID NO: 416979 - DNA, 201 bp, Homo sapiens
ttttagcaataaagacattccgagctgaagtcgtcctacccagttttcaaagtgctacagcatatggtggcgagattagcccttggggtctcttctccccrcactgtgcgagggatttacaccagtcactttaattaatctaatcataaaaataagaatcatgtcattcagaatgtgtggcctcccttttgccaggcatca

SEQ ID NO: 416980 - DNA, 201 bp, Homo sapiens
taacatgcacatgctaaagcatataaagctccatttttttatgtagttgtatacccatgtaactaccacttggaagaacatacaaaacatttccagcaacmctgaagtttgcccatgcccctctctgtcactgcctgccccataccaggattaccacttttctgaatttcatcaccgttgataaatgtttttatctgttct

SEQ ID NO: 416981 - DNA, 201 bp, Homo sapiens
gtttgcccattaaagaagaaggaatggagaatctttaaaaaggaagagggttatgttagagtgttaggctggaaatcctgggttaatccccacctctggcygagtattttctttatctttatctcttaaaggcctttagcccttgccaacaatatgcctgatagggatatgtgaatatgattgacttacagccaaatactt

SEQ ID NO: 416982 - DNA, 201 bp, Homo sapiens
tgtctctgaactctgaattttcgcttctactcactttttgaagccaaattgcatgaaattaggccccttccttccttccttcctttcttttcattcgttcrttcttttttgagacaaggtagagtacagtggtgccatcatagctcactgcagacccgacttcctgagggtcaggtgatcctcccgactcagtctcccagg

SEQ ID NO: 416983 - DNA, 201 bp, Homo sapiens
tatgtttttgttcgttcattaagtgttaaaagagggcagagactctatgatctaacttcactctacaaaattatcttttctccctgtcatctcaaaaaccmtatcaatttctatacaaaatgcagtactaaacagattttgaaagtttagggaagattaaaatttcaatgccagatatttaatttcattattatgactgtg

SEQ ID NO: 416984 - DNA, 201 bp, Homo sapiens
tggcagaagtgatatttaagttacttctaaggttgggtcataagaagccttgcagcttccacttgggtaccttgggggagggaagccacctggtctctcayagcagttgactatatattaaaaaataagaataataaaaaataataataaaggtccaactactctgagaccaccaggcagtgaggaatcccaagctagcca

SEQ ID NO: 416985 - DNA, 201 bp, Homo sapiens
agcaatttcaattgaatgggtttccagggaaacaggtatctgcaatgggttcatcccacttaatatttaagacaaaacatagggaatttctttcttgttaycttttccttgttatcttacacacgacatgctcattcttaaatttcctttgaagcgatcattctatgcttgagtcttatttgttctcccaaaaaaagaaat

SEQ ID NO: 416986 - DNA, 201 bp, Homo sapiens
cttggggctgggagcgggggtcttgtatgtgaagctgagaagtaggactttagcttgtacctggtgggaagtaattgagggttgttaagtagaggagagasttgataaaccaccctctggagagatctggtttggataacattgcaataattcaagagaggatgaaaatttgcagtgtaggttgtgtagactctaggggca

SEQ ID NO: 416987 - DNA, 201 bp, Homo sapiens
tcaaggtctaaaatcatgtgatttctgatcaattctttactgagaagcactgagacatttcctaaattattttcattatttccaaaaaataccacttttamtgtcttgatcagtgccctttggctttttcttcagagttcaaagtagcatagtgattcagtgaacaaactccaggatcagaaaggcctgggagctgctcat

SEQ ID NO: 416988 - DNA, 201 bp, Homo sapiens
tttgaactttttaccttttattatttttataacattttcaagtataatgtaggactggagcctttactgacaaagaataaatcttttgaaactacatcagytgtggcatagtctaaattttgcactagttgttcttaagggtgaaaaagcaaagtaaatgcaggtgattcaattgttcattcattattcctattattaggg

SEQ ID NO: 416989 - DNA, 201 bp, Homo sapiens
acccctcccatcaaattagtaaaattttaacttttttcattgacatatacaagcttgtaatatattccaaatacaaatctaccaaatatatgtattacagrtttaaaaaataattagcaaatatttcaaaggagcgataatatccaccactgcagttagatgaagagatggggggagtctaatacattcctgtggtctttg

SEQ ID NO: 416990 - DNA, 201 bp, Homo sapiens
aggaaactttaaacatatgaggatcataaaaccttactttaagccaaattatcgctgctctctgtgccagttataagcagcataattagtggagtgaactrcttctccctgcaattattattatcaggctggtgtaagtatatgggagttgagaggagagtaaagttctaatcgtaacagggtatgtagatgtggataagg

SEQ ID NO: 416991 - DNA, 201 bp, Homo sapiens
ttcaaccaaatctgatgagtaaaaggatatacagtagccatgtataaaggtggaaagacctggtatggcccatattgctgctgtgttaattctccaaactwaaaaggtaaccaaaagatactagccggtaagttaagtagaaatcgagaccaggaaagatcccttaagttattaatttcaagaattctttcctaattgctg

SEQ ID NO: 416992 - DNA, 201 bp, Homo sapiens
acaattcccttccacccacctacggttctggggccctctgctgtaaggaggactgccctcttgtggacttttaggatattgctactaaaagcacaaagtcyagttttttttttttttgcaacaagattgctgttttagggggttctctaagtgtcaaatatttgaaacattgattttcaggtttattctttttttgattaa

SEQ ID NO: 416993 - DNA, 201 bp, Homo sapiens
ctctgctagccatttttcagttcagcatgcagcccagtgacctatgagacaacatattaatacaaaaggattctgaaattgtctccattgtgatgagatgrgtatacctgttggagtctctcatatggcccctaaaaatagttattttatatctgaggaggtgattgtttgtgatttctatagcccatgtatattaatgta

SEQ ID NO: 416994 - DNA, 201 bp, Homo sapiens
ccaaattatcgctgctctctgtgccagttataagcagcataattagtggagtgaactacttctccctgcaattattattatcaggctggtgtaagtatatkggagttgagaggagagtaaagttctaatcgtaacagggtatgtagatgtggataaggtagcatgtcaggtgttagctgtccaggcagcctcccagtgcca

SEQ ID NO: 416995 - DNA, 201 bp, Homo sapiens
gaaagacctggtatggcccatattgctgctgtgttaattctccaaactaaaaaggtaaccaaaagatactagccggtaagttaagtagaaatcgagaccargaaagatcccttaagttattaatttcaagaattctttcctaattgctgagaatttaccatcttgaattgttggtaggagctagtagttccatcaagaaaa

SEQ ID NO: 416996 - DNA, 201 bp, Homo sapiens
atttcatatcatatgcacacatgcacaaacacctcaatacatacatgtctctgtgttctaagagtggactgcagacgaggcatacacaattaggaaaggaytggtctggactgaattgctcattcaacttcctacttcccaaagagggtcttcagggagtcatggcttctcttctgtgatcaagaatttaggcatttataa

SEQ ID NO: 416997 - DNA, 201 bp, Homo sapiens
tattccctaaaaggagctactgacatagttttcagtctaagaccaggacccattttcactttaagaccagcactcaagtcagaaatagagacagggctggscacagtggctcatgcctgcagtttcagcactttgggaggccaaggtgggtggattgcttgagcccagaagtgtgagaccagcctggtaaacatagcgaga

SEQ ID NO: 416998 - DNA, 201 bp, Homo sapiens
catgtcaggtgttagctgtccaggcagcctcccagtgccataggagtctcatttcactaggggtttaggttaccacaagctttgctcatcttcctgctgcratactggctcctatagaaggccgggaggcacagtgcagaatcctgagccagagagagcagcctggagtagtgagctgtttgcctgggtgcgttatgtggc

SEQ ID NO: 416999 - DNA, 201 bp, Homo sapiens
tgatgttacctaggttctagaattcttgggtaaaaatatcttcataagtattgcaaaggacaaacctatacctttttgggaggagtgctttaatcttaagytaagtttgtcagtttggatgtctgcctaatgtagataggtgttctaaccactctattgctcagaaatatactatacaggttaagagaatggatttaggaa

SEQ ID NO: 417000 - DNA, 201 bp, Homo sapiens
taatttcaagaattctttcctaattgctgagaatttaccatcttgaattgttggtaggagctagtagttccatcaagaaaaggtgctttaaggcaaattargttagagcttcctttgttcattaatcaaaatcaagagaatctgtttcctacacattgttcctttctgtgaaaagactttgacaacgtgactgaatttcct

SEQ ID NO: 417001 - DNA, 201 bp, Homo sapiens
tttgttttgatgaaagaaaaatatcagctgaattaaatttaatggagtttaattcagcaatggacgattcgtgaattgggcagcccccagaatcacaccakattcacagagactccagcacagccatgtagtgaaagaagatttataaaccaaaaaaaaagggaaatgatgtacagaaattggaagcgaggtacagaatgg

SEQ ID NO: 417002 - DNA, 201 bp, Homo sapiens
gcttcaaatatttgtgtccatgtttatagttgtttacgtccctttctccattatagacacacttaaaaccttttttttcaatatactgcaactgaagcacrcataaatttgatcactcgccaagcttggctctatctacaaagctacttcatatttacagaaagttttctcaaatactgaggacaagttttggcctctaga

SEQ ID NO: 417003 - DNA, 201 bp, Homo sapiens
ttagaatttatcagttctccaaaagtggtgttttggtcttaattttgtatctgaaggtccaaactcactcttttctagtcattctattatctgttcatctyatctttggctttattctttcatcacattcattctttgtaatgtcttttatgattcaaagtggatatttttctgtttctccactggtttttttttctagaa

SEQ ID NO: 417004 - DNA, 201 bp, Homo sapiens
caatgttattacacttcttaattttatttttattttaaaaagttcatcctacatatatataattatatagatatgtaattaatatatatttatgtatattwtatatatatatatatatatatatatgactctctgcctttttgaatgtgtgcccacattccttttatcagttgatcttcataaaagacttgtcaagtagac

SEQ ID NO: 417005 - DNA, 201 bp, Homo sapiens
cactcgcctgcccccgtactcagtagctttggggaagcaaagccagatgtctgcgcaaaacaatccttttctctatgttcttccttaactttcttttccayttgtttgttcacttaccccttttctacccaacacagcactgaataggggaatggagttttttaatttatttaatcagtggtatacatcctacgtatttta

SEQ ID NO: 417006 - DNA, 201 bp, Homo sapiens
ttgttttgatgaaagaaaaatatcagctgaattaaatttaatggagtttaattcagcaatggacgattcgtgaattgggcagcccccagaatcacaccagmttcacagagactccagcacagccatgtagtgaaagaagatttataaaccaaaaaaaaagggaaatgatgtacagaaattggaagcgaggtacagaatggc

SEQ ID NO: 417007 - DNA, 201 bp, Homo sapiens
gccgaggcaggaggatcacttgagcccaggagatcaaaaccagcctgggcaacaaagtaagacccatctctacaaaaattaaaataaaaaataaattagcraagtgtggtggtgtacacctatggtcccagctacctgggaggctgaggggagaggattgcttgagtctaggaggccaaagctacagtgagccgccatcat

SEQ ID NO: 417008 - DNA, 201 bp, Homo sapiens
aactggaagaagtaattgctaccttctgtttttcaggatcaagtcagataatgtattagaaagtgctttgtgtactgtacagttctttctaggtataagtkgttcttattcttatttgtctagatgagatacacagagacaaatgtaaagaatagaatgatatattctgagcactaaaatagtagaatatgtgttcatagg

SEQ ID NO: 417009 - DNA, 201 bp, Homo sapiens
atgtctccagcagcatcaatatggggttgagcctgatagctcaatgcgtggggttagggttcaagggcagttcatttgtatatactcctacccagttcgtrtactgttagggtccattcttatgaatttgacctcaaagtaataggaataatatcctaatcaaatggagcactgattattaatagaagttctaattttctg

SEQ ID NO: 417010 - DNA, 201 bp, Homo sapiens
tcagataatgtattagaaagtgctttgtgtactgtacagttctttctaggtataagtggttcttattcttatttgtctagatgagatacacagagacaaawgtaaagaatagaatgatatattctgagcactaaaatagtagaatatgtgttcatagggcagtatggttaagcatttagggctgttgtgaaaagtgaatgg

SEQ ID NO: 417011 - DNA, 201 bp, Homo sapiens
gtcagccatactccttggcttccttcctccatcttcaaagtcaacaatgttgcatctctccaacccttcttccatagtgacatctgccgctcaaggattcrggtgactagattgggcctacctggataatccagaataatatccccatctcaaaatctgtacccttaatcacatctgcaaagtcccttttgccatgtaaga

SEQ ID NO: 417012 - DNA, 201 bp, Homo sapiens
caaatgtaaagaatagaatgatatattctgagcactaaaatagtagaatatgtgttcatagggcagtatggttaagcatttagggctgttgtgaaaagtgratggacttgaaagggataggaattctctggtggagaggagggggaagggtacaatcaaagaagtagtaaatggagtatacctggtatgtttaaggaacgc

SEQ ID NO: 417013 - DNA, 201 bp, Homo sapiens
tggttaagcatttagggctgttgtgaaaagtgaatggacttgaaagggataggaattctctggtggagaggagggggaagggtacaatcaaagaagtagtraatggagtatacctggtatgtttaaggaacgctgagtatcacaattaattgaaatggcagggtcatggaaaagagtcacagaagaaaaactgagagggtt

SEQ ID NO: 417014 - DNA, 201 bp, Homo sapiens
accaagtacattccaaagccatctcaaaagaaagaatactctatgatcaagaaaaatttattcctggaattaaacatcgttaaaaattaggaaatctatcraaatatttgtccaatcaataaattaaaggaggaaaaagattataaaagtacatgtaggaaatgcatctgtaaaattcagcagccatttttaaaaaactta

SEQ ID NO: 417015 - DNA, 201 bp, Homo sapiens
ttcttgtatttgggctccttgatcacttccaaaagtttcaaaatcatttcccaaagctaatataatctttattctaaaatctgaccaagaaaatacagacwaaaaaaaaatatgagctaatttcacatatacacataagggcaaactttggaataaaatattaccaagtacattccaaagccatctcaaaagaaagaatac

SEQ ID NO: 417016 - DNA, 201 bp, Homo sapiens
gctaaatggcataagggcagcaaaacagagacataccattttggacataaatatggtatttgcatgcattgagaataccacttatcagtcttatgactgtsggcaagttatggaacctctctgagtctcagtttccttatctctaaaacaggaacagtcatatctacaagcaggattgctgtgaggcttaaatgatataat

SEQ ID NO: 417017 - DNA, 201 bp, Homo sapiens
ctgagtttatttaaggcagttggatgcactataagtgaaataactcttaagctgctctttaaataattagagcaggcaatcaagaaaataagacaacaacstcactgaagcttaccccatttgtgacacataatatgtttagattgctttactgactttacaaagaagcatgcaagactgaatcacaggtgacagatgtga

SEQ ID NO: 417018 - DNA, 201 bp, Homo sapiens
gcttgggaaatttgagataaataaatgacatcagacaaaaaaacataaggcctggatcctttttcctggggttttcagaaaatagttattgcttccaatgraatgttttgacatttccagtagggagaaaatgttaattgtaatattgtgtatgtgttcttagtaacactgaataaatctttcatttgttttaatggtaat

SEQ ID NO: 417019 - DNA, 201 bp, Homo sapiens
ttttcaaaagtatatttctttcttttttttttttttttgagaaagatctttccaatgtagatagtgtatggaatgacaatttagcagcagcagaatgcacytttgcagaaacacacaaacacacataactcctttgacaataacccagcatactgacctctctccaaacctgctttcttttttgttgtggccagactttga

SEQ ID NO: 417020 - DNA, 201 bp, Homo sapiens
ctgttctgatcaccttgcaaattttgtgatgcagccaccaccattcctagagtcgattttagccagatacatgcaggaaaatacaaagaatatttatgctrtttttctttgggataatttttcccttgttccccagcccatttataattcctgctttcagggaatctatatttatgacaacccaatcatcttggcctgtgc

SEQ ID NO: 417021 - DNA, 201 bp, Homo sapiens
ctcactgtgaggaaccagagccctctgtggaaggcagctttatagaggagaccacactgttgacagattcctgcctcctccctgtgggtggtctgaagcarggaaatctgagctttccagcgcaggcctggcatgtgccaggaaatttagattcgggggagctgctatctattacagttatgaaccttctgaaaaccagaa

SEQ ID NO: 417022 - DNA, 201 bp, Homo sapiens
tttgactttgcagctaggaaacaaaaccccacagatgacccctcttgctcattggcaaagctgtgctgagaggcagccaaaaatcttgctgctatagcagkggcaggactggtgctgcagacagtgtgcaaactgggatggggctggctggagcccacctggatcatcagaccttgaggtcaatctcattctttggctgga

SEQ ID NO: 417023 - DNA, 201 bp, Homo sapiens
agagtttctgattcagtaggtctcaggggaggacagataatctgcctttctaacaaggtcccatatgatgctgatgctgatgttgctgatccaggaaacayactgtgagaaccactgatctatataattcataaaataaactcaggaggttttcgtctttttcaatgggctagactagtttaaatagcattggaattatct

SEQ ID NO: 417024 - DNA, 201 bp, Homo sapiens
gattgctgttttagggggttctctaagtgtcaaatatttgaaacattgattttcaggtttattctttttttgattaattgaagtttttaatctacctggarcaagaataacttaaaatgtgaaatgaccttggtaataacgatagttctgtttaatgaatgttttgtcagtagcaaccactgtcctaagtgatttttcata

SEQ ID NO: 417025 - DNA, 201 bp, Homo sapiens
gagtgagttgcctttctgtattttgcatgtgtgtgtatatattgcccaaagtgactattgttggcttctttgcgaaagaaaatatgtgaaaggtttccttytggcgggtaggtgttgtggtgtttgaagtgagataattctctctagttcaggttcagattaaaaactcatttgacttttccttggcacttcattttgaaa

SEQ ID NO: 417026 - DNA, 201 bp, Homo sapiens
tttctgattcagtaggtctcaggggaggacagataatctgcctttctaacaaggtcccatatgatgctgatgctgatgttgctgatccaggaaacatactrtgagaaccactgatctatataattcataaaataaactcaggaggttttcgtctttttcaatgggctagactagtttaaatagcattggaattatctgttc

SEQ ID NO: 417027 - DNA, 201 bp, Homo sapiens
aagaagaaattaacattgcctcattaaacatacttggatatgccttttgtagtgttgtaagaaaatattggtacctgtcaatctatgtgctcattctgctrttcttaaaaattcctgcagaacgtttcaggctcttttctcttttatcttttcactgtattttcttcaaccaacactggggaatatttgcttataaaatgt

SEQ ID NO: 417028 - DNA, 201 bp, Homo sapiens
tcatcccctggtttcttgggaatctcctgctgagcaatctggttagaaatcctagccagctcaggtagagggacaatttgccagttttggatgccctatgrgtcctgggcacatgggtttttaagaggctaatcttgcagaagtgaaggaagagtgttgagtgattatgcagtgactagtgcttaataaccaatgcagagt

SEQ ID NO: 417029 - DNA, 201 bp, Homo sapiens
acaagttcagagtgtgttaaatttaggcttgagactaaagactgaacgttaagtcagcctggtttctggacttgtcttaaccagaatgtctgtggcctccscagagagtatgaggattaattagttaatctttgtaaagtgctttgaaggtgaaaagtgctctgtaagtggaatggctgaattgctattggggatataata

SEQ ID NO: 417030 - DNA, 201 bp, Homo sapiens
tgtaatatctcctgaaggacctgccttttaggaggtatttttacagttaacttaaaaaaaagataagtagaaggaatacactccaaaataacaataaaaastatagtatagtaaatacacaaaccagtaacatagtcatttatttatcaagtattattacatactgtacataattgtatgtggtagacttttatatgacta

SEQ ID NO: 417031 - DNA, 201 bp, Homo sapiens
gcccagcttcccttttgctgaatcctgctttctagaaataggctgccagtgaaagatgtgtgcaagtgtatatagaaatgcatacatatatgtgatagagwgggaaaatatcccagggagccatgattaccagagtactccaagaatgcagtattttggttaatggatttttctcagagtattaacctcttggtttcaggc

SEQ ID NO: 417032 - DNA, 201 bp, Homo sapiens
atcctaactctgtaacttaacagttatatgacctggtacaaattattgaactcctctgagcataggtttcctcttctgtcagctggagataatagcacccrtctcacaggactgtaaggaggagtgaaagaatacatgcaaagccctcagcacagggccagcacacggtacagatatatacatagtaattgtgacagtttc

SEQ ID NO: 417033 - DNA, 201 bp, Homo sapiens
tttctgtcttcactttattgggtgagtggcttatgggaagcactgagcgagaattaggagacctgggttcttatcctacccacggtctgaccttggacctyagatctaaccctcacattcttcatctgtaaaatggagatactaacatctaccagggtattatgaggatcagatgaataaattgctaggaaagtgtttatg

SEQ ID NO: 417034 - DNA, 201 bp, Homo sapiens
tcattatgaaatgcattgcaaacattcactctctgatgctagaaggagctgtctagtgagcgtaattaaattctctttaagtgacagaggatcttggcagsatgtccatttatcaccagaatgatcagttgtgctgttcaggactctaataacaacccatatgtctgtctgggtcttttacactcattataacatttaatc

SEQ ID NO: 417035 - DNA, 201 bp, Homo sapiens
tgattgggtcatgggggatcaacccttatgaatggatttatgtcattattgtgggagtaggttagttattgctggagtggctttgttaaaaatataagctytctctcgcatgtgttctcttctccttccacctgtccaccctagcatgaccctcactagataccagcaccatgctcttggactttccagcctccagaactg

SEQ ID NO: 417036 - DNA, 201 bp, Homo sapiens
tcaaatgagtagaaaagagagaattgtattggtcaatctcttttagctctaagatttcagactctgtggttatggattataaacatgagtcacagtatcartcttagtcatttgtatccaatgccaaaggaaaaaaaatgaaaatctcaaatttcagaatctggatgggaaacatggacacaagctaattcaatttcttca

SEQ ID NO: 417037 - DNA, 201 bp, Homo sapiens
ctctcaaaaaggggggatatgttctgagaaatgtgtcattagatgattttgtcataagcaatataaagtgtacttaacaaacctagatggtatagcctagyacacacctaggctatatggtttagcctgttgctcctgggctataaacctggacagcatgttactgtactgaatactgtaggcaattgtaacacaatggct

SEQ ID NO: 417038 - DNA, 201 bp, Homo sapiens
gagaaatagacaagttcagagtgtgttaaatttaggcttgagactaaagactgaacgttaagtcagcctggtttctggacttgtcttaaccagaatgtctrtggcctccccagagagtatgaggattaattagttaatctttgtaaagtgctttgaaggtgaaaagtgctctgtaagtggaatggctgaattgctattggg

SEQ ID NO: 417039 - DNA, 201 bp, Homo sapiens
tcacagggttgttgcaagaataagcaggatactgtacagagaatgtacttactttaataaatgtaatttaatgtacatactttaataaataaattaatgtrcatatatcggtgatgtgttaaaaaatattttactaatagacgtcaggcgtgttggctcacacctgtaatcccagcactttgggaggctgaggcaggcaga

SEQ ID NO: 417040 - DNA, 201 bp, Homo sapiens
atcataattaaaatgtagatcagggaggtatccaagaggtcatctattgcggttctctcattttatagatgggaaaactgggtgcctaaagcagaagggayctgttcaaggccatgcagcctagaagagaagccaggattaggcctgaatcttaattcaagtcttacgagtcttgagttgaagcttcctctcttctctttt

SEQ ID NO: 417041 - DNA, 201 bp, Homo sapiens
ttggatgtggaagtgatgctatttccaatggctgtgttcaggagatacagcctgtagctggccctgccctcttcctaccttcttggagaagcccaggccasagagcctcagctccctgaggctgacagtgatgcctgatgccccagcgttttaagaccagctttgctcctgcctatctgcaaggccttgccttgagacctt

SEQ ID NO: 417042 - DNA, 201 bp, Homo sapiens
ggctctctctgtgcctccagcccacgtgtgtgtccctgtgactctgaacaacctcaggaagtccttgcgaatgttcacttttgaagagccagtgtgaccamgtgaaaagtggagctgaggtcagacagacctgtgcatcccctgcaggacaatgactgagggcactgactctggttgccaggcccctgggtcccatcctag

SEQ ID NO: 417043 - DNA, 201 bp, Homo sapiens
ggggacacaaccattcagtctgtagcagccctttaggctttagggagggggcaacagatattttgtctctccttcctggagaaagcttctgggggagttayggtggtgaactgccagagggaggaggcctttgaagcaggaaagggcaggtatttattggagcaggttagggagtggtggctggtggtataaagcccactg

SEQ ID NO: 417044 - DNA, 201 bp, Homo sapiens
caaaagtgctaggattaagttttatgtgttctgttcagtgcagtagcccctagcacctaggacagcacctggtgtatagaaagtgctcaataactatttgytcaatattgtgaatgcctggatctgtttctatctatataggctgtgtgacttggaaaattatttgttttccttagttttgttttctctttggagagtagg

SEQ ID NO: 417045 - DNA, 201 bp, Homo sapiens
gaggttgcatggaagagaggcaagatactttagcaggaggcaggagagtggccatctatttttggctcggtcatgagtcagctttgtgactttgggtaagwccctcctgaatatccctgagcctcagtttcttcatctgaagaggggagttggaggtcacaaaaggtcctttaagttgcaaaatatatttgttcctaaaga

SEQ ID NO: 417046 - DNA, 201 bp, Homo sapiens
ctttgtaaactggctttagagagtgatagtcataatgttattaacactagcatttaagagtttacaaagtgcatttatgtttattgcctgccttttcatcrtaggcttgagaggttgcttgagcaagtttcattgcctctgcttgagttggctgggacttgtaagtttaaggttcttccattaggaaaggtgatgtgctgt

SEQ ID NO: 417047 - DNA, 201 bp, Homo sapiens
cagtgcaagagactggctcctttgccatctattcccatgtatatatgtccttgacaagtcacttgcacgggcctcaattcggaggttgcatggaagagagrcaagatactttagcaggaggcaggagagtggccatctatttttggctcggtcatgagtcagctttgtgactttgggtaagaccctcctgaatatccctga

SEQ ID NO: 417048 - DNA, 201 bp, Homo sapiens
ttgccatcttatatgggcatggttcatgatgccccaaaataattgcagtagtaacatcaatgatcattgattacagatcaccataacagatgtaataatamcaatgaaaagtttgaaatattgcaaaaattaccaaaatgtcacacagaacacatgctgttcgaaaaatggcgccaatagacttactggactcagggttgc

SEQ ID NO: 417049 - DNA, 201 bp, Homo sapiens
ttaaagttaataagatcacttacccctcagtgcaagagactggctcctttgccatctattcccatgtatatatgtccttgacaagtcacttgcacgggcckcaattcggaggttgcatggaagagaggcaagatactttagcaggaggcaggagagtggccatctatttttggctcggtcatgagtcagctttgtgacttt

SEQ ID NO: 417050 - DNA, 201 bp, Homo sapiens
gtgtctccggaaatagggaggcctgaggagagggagagagatggaagaagggctggtcggtggagcagtcagaacacaatcgattaagtttgccatcttayatgggcatggttcatgatgccccaaaataattgcagtagtaacatcaatgatcattgattacagatcaccataacagatgtaataataacaatgaaaagt

SEQ ID NO: 417051 - DNA, 201 bp, Homo sapiens
tttaggaagcttgtggttggatgagcaactaaatatttagtagaagaataaaaagattgtggccaagggccgaaggagtgacccagacactgcaggctctwggatttcaggggaaggagaggtcagtgtgggtgaagttggtcagggaagggtgtgaaattgtggttgggctttgggaaggtcacattttaatagatggag

SEQ ID NO: 417052 - DNA, 201 bp, Homo sapiens
gagtaagtaagcagtataatgaaaagtagactggtaagttttgtatttgaaatgtaaacagagggctttgggtttacagtcaaaggtacaattaagtcatyctggagagatgaaggcaaacacagctgagccctgaaggatgaagcaggattgaacaggaggagaatggagaaaagtgatccctgccctactcttcctgct

SEQ ID NO: 417053 - DNA, 201 bp, Homo sapiens
aataaagcgagtcacacaatttttttgtttttccagtgtatataaaagttgtgttatactatactgtatactatacctattaaatgcacaatagcattatstctataaaacagtgtacatatcttaattaaaacatattttatggctaaaaaatgcaaatcttctgagccttcagtgagttgtgatctttttgctggtggc

SEQ ID NO: 417054 - DNA, 201 bp, Homo sapiens
agcttttgacagtgatactacatttcggcaagcaattggaaggaaattcataggtatctttagtcctttagcagatatttgtgaaatgcttatctatatgyatatagtactatgctacagaatacaggggaatataaaatccagaaccacctttaggaagcttgtggttggatgagcaactaaatatttagtagaagaata

SEQ ID NO: 417055 - DNA, 201 bp, Homo sapiens
tggttcctgagaagcgagggtcaggaggccattctgggattcacagaagcagctacatgagaatacaacagcaatcataactctcacggaccacctttatyactataaagtactttcacatccatgttctcatatgaagttggcaagatgagtattattatccttacttcacacaagagtccctaattcgttaatggcatt

SEQ ID NO: 417056 - DNA, 201 bp, Homo sapiens
gtgctttggaattaatgatgcttgtgctttagaattttgaaaaccccatgagtgaaagtcaaactgagcccaaaggcttgttttgaaatggatactttttkattcttattaaagtcatgagtttttatcctagaatccttagaatgtcagtaatggatggaaacttagagatcatctggccttaattcctcagtttagaga

SEQ ID NO: 417057 - DNA, 201 bp, Homo sapiens
tagcaactaggggacaaccacatgtgacattgggcagctttgacaatggccaggcagtccagcccatgagcctgctctgtccttccttagacaggcactakcttcctgagcctgggcagcaccatcgtatctgcaaaactcagactcacagtattgcctctccgcatccacaggcctcagcttatgctagtgcccctctgt

SEQ ID NO: 417058 - DNA, 201 bp, Homo sapiens
tcagtgcttacaaatgctggttacaagtgctggttgctgacggtgtgttagaatttcaaagggaattatttacacaagatctaaaccttaatgtggagttkgtcagaatgtctagaatccagttgcttttggggtgctggaagctttccctgaatcatgcagtatcccaaagtagccttgtggtcttacaaggaatatgga

SEQ ID NO: 417059 - DNA, 201 bp, Homo sapiens
tgtccttttacatatgtaagtgaatactaagatatgtttttatccttccttttacataaatggtagcatactatactcatttctcagtgcctgatttttcycaacaatttttctgggagatctttccatatcagtataaaagctgtcctagttctttttttacagttacataatattccaaagttcctatgtatcttgatt

SEQ ID NO: 417060 - DNA, 201 bp, Homo sapiens
ttaagcactgtcagggagtccacttaagtgtgggtaacccttttccctgtggaagctgggatctgggaagcacagcttctacacaggaaaaagcctaggargccttgctgccccttctcacctatgaatgtgcagattggcttctaatgctgaaatgccttttgagctacactgtcaggggcctgagctaagaaccattga

SEQ ID NO: 417061 - DNA, 201 bp, Homo sapiens
gaagcatataatgaacttgtgctgcatatatggtcctgagtgaggcatagtgggagccctcaggtcaatcagacacagagccagccttaaaggagctcagrgactaaacaacctggaaatacttactggtaattaagcactgtcagggagtccacttaagtgtgggtaacccttttccctgtggaagctgggatctgggaa

SEQ ID NO: 417062 - DNA, 201 bp, Homo sapiens
cagatggctctaccataatttacataagcatttcccaattgttcgacatctgagttttctccagttcttcaatcgaaatatcttcctgtaacagacctagrgaaccagcctcattacagccaggaagcatataatgaacttgtgctgcatatatggtcctgagtgaggcatagtgggagccctcaggtcaatcagacacag

SEQ ID NO: 417063 - DNA, 201 bp, Homo sapiens
gtccttgagctagtcacttgccctttctgcccctctgttctcatatctataaagtgaaaggtctggatcagtggttttagtcacctggactattctatcaratcacttgggataattattaaacatatacattcctgggcccacttccagatcaatagatttgggaattgggtgcttagaaatttttagttctgatagtcc

SEQ ID NO: 417064 - DNA, 201 bp, Homo sapiens
aggaagccttgttcccattttacggatggtaagaaccctcagtattttcctgaccttgatgagcctgtagggactctcggggaagcaggggttgaatgtcrtatttaaagctcaggcactaggactttctgggttggaggtgaaggaatcagatgttggacatttcttttcatccttaaaataagattctcttctggtatg

SEQ ID NO: 417065 - DNA, 201 bp, Homo sapiens
ctccttggccctctgccagctgccagctcaccctgcattggtccaggaccccaaggtcacctacctttccccagatgccatcgaggacactgaatctcagraagccatggacaaagagagaaactggaaggaaagacaatcagaaacttcaacccaaagccaatctgactggtccagaaatgggggactgtgatagagaat

SEQ ID NO: 417066 - DNA, 201 bp, Homo sapiens
gacactgaatctcagaaagccatggacaaagagagaaactggaaggaaagacaatcagaaacttcaacccaaagccaatctgactggtccagaaatggggractgtgatagagaatctttaataaagtggcttttcccaccaaaagccttcccagagaattgttttgttgggctgtggggttggccgaagaagggctcagg

SEQ ID NO: 417067 - DNA, 201 bp, Homo sapiens
gtagagggtgtttgtattctggggcctgagggacagatgggagcagggagcagagcaggagggagattagtagatgtggaagggaaaggtggccgtcccaycctgggtctgccctggcaacccctccttttccataccatgaggccatggacctctagacaagccatttgaatgtgacaagcatttgtcacaccatctact

SEQ ID NO: 417068 - DNA, 201 bp, Homo sapiens
ataaggccaatgatcccattcatgagggccctaccttcatgacctcatcacctcccacaggccttgtctccataatattaagggttaggatttcaacataygaatttgatggggacacaaccattcagtctgtagcagccctttaggctttagggagggggcaacagatattttgtctctccttcctggagaaagcttctg

SEQ ID NO: 417069 - DNA, 201 bp, Homo sapiens
acttgcttctcttgctttctctttgtcctctggcaagacactaaactctctggtccctttcttccatctggccaatacgtttacataataatctttaaggrtcattccagctctgaaattctatcctataaaaaataaaactggcctaaagaaatagtcatggatgtattcaaagattaagtataatgccatttactgcag

SEQ ID NO: 417070 - DNA, 201 bp, Homo sapiens
tgattaagtcactttacctgtttaggcctcagtttcctcaactctgaagtctggtattaaaacctgcctgcattctacatagggctgctatgatgttcaartgaacgaatctgtgaaagatcccaactattgtaaaatgcatacataagtgatggctgcctggggtatgtaagtaaattaaagacttagtagttgctttta

SEQ ID NO: 417071 - DNA, 201 bp, Homo sapiens
cttgcccttaaggagtccactgtccactaggggtgatagacctgtgataaaattttactacattccagtatgagatgtgcaacaatacagctaagtacaargggcaaaagtcgcatagaaattagcagtagtcttgagtgattgggtgttcacaggtaggcatttcatggttagtcagtcttccaagaattgcagtacatt

SEQ ID NO: 417072 - DNA, 201 bp, Homo sapiens
gttgtgtgatattgattaaaaaagagtttatgcacagacactattggcgtctaatgggtagaggccagggatgctgctgaacatcctacaatgcaagggcmgtctcctataacaaagaagtatctagcttcaaatgttaatagtgtcaagattgagaaacactgctcaatactggacatccccagtggtaggtgcttagct

SEQ ID NO: 417073 - DNA, 201 bp, Homo sapiens
actatcaagttttattgggaagctacaaaatgcagtgaaagcagaagacctggcttctagtccctatttgactccttattagccatgtgatcctgaaaagkaatttaatatcttccagccttgattaatttatcttctagaacagtgctaatagaaatataatatgagccatagttcaaaaagtaaaaagaaacaggtggg

SEQ ID NO: 417074 - DNA, 201 bp, Homo sapiens
acaaggagttatttgactgtagttgttttcacaagctccggtggtgaattgttcctggaatgaacttgcaggccacatcagcacagaggctgctctcagtstcattctgggaggcattagttgtgtgatattgattaaaaaagagtttatgcacagacactattggcgtctaatgggtagaggccagggatgctgctgaac

SEQ ID NO: 417075 - DNA, 201 bp, Homo sapiens
ccactttctcctttatcctaaggccagaatggttaaacctgggatgtttgaatgtcctggtttttgtactgaattttgggtaaatgggagtttcctgttayatgattcaccaattttgtgttccttctagcagcagtggaggcccgtgctctggcccagtgtcgttgagaagaaacacccagggcttctatttaatcagac

SEQ ID NO: 417076 - DNA, 201 bp, Homo sapiens
cattgccactttctcctttatcctaaggccagaatggttaaacctgggatgtttgaatgtcctggtttttgtactgaattttgggtaaatgggagtttcckgttatatgattcaccaattttgtgttccttctagcagcagtggaggcccgtgctctggcccagtgtcgttgagaagaaacacccagggcttctatttaat

SEQ ID NO: 417077 - DNA, 201 bp, Homo sapiens
ctctagttgtctaatctcaaagtaacctgttttatccatctatatctttctaatccatttatcagtctccatttgtgtatctatctactctgtttacctawgtatctatttatctttaatctttgtaatatctaatctgtgtgtctatatatctaactctagatatatagttttgtaaatattttatattgttatatgttt

SEQ ID NO: 417078 - DNA, 201 bp, Homo sapiens
catgccatacagcttttggcatcttcatcttttcttgaatcttcgtttatttctcatctttcccttagggcagttctactttcctggccttcatattgttractttgtcctcagattttgttttttcatggcctctattcatccctgccttcctgcctgttgatttcacagagttccccagccaatttgaaattcccaaga

SEQ ID NO: 417079 - DNA, 201 bp, Homo sapiens
gtctaagctctctacctgtgtatactctctagttgtctaatctcaaagtaacctgttttatccatctatatctttctaatccatttatcagtctccatttrtgtatctatctactctgtttacctaagtatctatttatctttaatctttgtaatatctaatctgtgtgtctatatatctaactctagatatatagttttg

SEQ ID NO: 417080 - DNA, 201 bp, Homo sapiens
caagaactgatgaagtctagcctggtgggtggatgggagatcttatccctctggcattggggtttcggaatttgttttttgcagctctgacttcgcaggcygaggtccctgaacagagcagacctctctcatttctgggaagcactaagacagagcagctttccacagccacctttgcttctcaccccttacccttgggga

SEQ ID NO: 417081 - DNA, 201 bp, Homo sapiens
agtcacaggtttgtacccaaaaaggcaagcctgggttaagttaactccttccggtcctaagagcccatgaggttttgagaagggatccattgcagcaagcrtcatccagaaatttgtccagcttgttgggaagttcttactttgtcatagctatttgcatgtctaagtctaaattaaaagcatcagaaaatgttaagtgaa

SEQ ID NO: 417082 - DNA, 201 bp, Homo sapiens
tctttgctgccagagtttggaaccgattgaggcatagatgcaagtcaggtaggtggagattgaaatggtaactctagaactgttaaaagctaggttggaaracatgattagaggctcactatgactatatattgtcttcaaacccctaattctgaaactcagattgaatttacccaccaagcaccggggtacttgtataga

SEQ ID NO: 417083 - DNA, 201 bp, Homo sapiens
tcagctcttgccctggtccagctgtattttctaagaccccacccctaggagagttttaactggccttgcaagaactgatgaagtctagcctggtgggtggrtgggagatcttatccctctggcattggggtttcggaatttgttttttgcagctctgacttcgcaggccgaggtccctgaacagagcagacctctctcatt

SEQ ID NO: 417084 - DNA, 201 bp, Homo sapiens
atgaaagcttaaagatcagagatggggatactgggatctagttctgccaccagccagatatgtggcttttcctctcagagtcacaggtttgtacccaaaarggcaagcctgggttaagttaactccttccggtcctaagagcccatgaggttttgagaagggatccattgcagcaagcatcatccagaaatttgtccagct

SEQ ID NO: 417085 - DNA, 201 bp, Homo sapiens
gaaatatccctggaaacagctccttgatcattccagaggtgggcactcctagccccaggcaggatgttgtttgggtcctataaatctagggctctcccagscttacgtccctggcactgggcttgccagatgtaagggaactggatgggtggtttatttccatctaatatgagaaaaagaagggtacataccgttttgagg

SEQ ID NO: 417086 - DNA, 201 bp, Homo sapiens
cttcctgtgccccagaaaatagaagcacattgtttccagaatgaaaaggtcactgccatctggagtggatggacacacctggttgctcagacaggtgagayagtagcagagaacttacggttggtaagagcagctgggggacagctgtctaagcagccatgagtgcttggggttaagcctttttactgatgaaagcttaaa

SEQ ID NO: 417087 - DNA, 201 bp, Homo sapiens
ggcaggcgacagaactttgttgccactttgcagccgttcccctaagaaatatccctggaaacagctccttgatcattccagaggtgggcactcctagcccyaggcaggatgttgtttgggtcctataaatctagggctctcccagccttacgtccctggcactgggcttgccagatgtaagggaactggatgggtggttta

SEQ ID NO: 417088 - DNA, 201 bp, Homo sapiens
cacttttattatggtgttatttatatataaatgttgaatattttaattaagatgtattttaaatataagaaattaaatttcttttaaagtatacaaagaayttaagtttcatttaaagtatacaatttagtaatttttaatatattcacaaagtgaaatggtttttgatattttgaaaatgagctaaagattatggagatt

SEQ ID NO: 417089 - DNA, 201 bp, Homo sapiens
ttctataatgtcacatgcttgacatccaggcacttaaccaaactttagctctcttcttctcaccccaacttctctggaagatagcagaacctagttcaagmtcatttttttcacaggcatacatacaatgtgcttttttttaaaatgtatatataacatatacacatatatatgaaataaaatacaaattcaagcccacag

SEQ ID NO: 417090 - DNA, 201 bp, Homo sapiens
caagctatctgcttgcctcagcctcctaaagtgccgggattacagatgtgtgccaccgtgtccagcttgaagaactcttcatagtgaacctatgccagttsctaatgcttatagtctcctttcatatgttctcaaataatatataagtcctaaaatgtatctgtagaacagggtcaagcccaaagtgaattttattctgta

SEQ ID NO: 417091 - DNA, 201 bp, Homo sapiens
gacattcccttagaagggcactatgggaaaagcaagcagtctgactgcctggctagtttaattgtatatattatagcctaattactgtgtatattatattstaattcagtagacatttctcaagccctctccttatctgtcaataaactattggaaaaggaaatgaactgtttatactgaagaaggtttttttgtttgttt

SEQ ID NO: 417092 - DNA, 201 bp, Homo sapiens
ggaaaacaggtgaagcaaatgccttataaaagaacaatgggaaagtcatttagaacccaaggcaactcaaaagcctaaaccttcttgagccctcagcagtrggatctattgattcttcctttagaactcacatcctggtgacttagcttcactttactgttccttcctgctgcttctgactcctctgcttgtacctcctcc

SEQ ID NO: 417093 - DNA, 201 bp, Homo sapiens
catgtgcgggggctctatagagcatccttgtactcatgtgtcttacagaagagggatgcaaactactagatacacaggagacacataataattaatgtttsttcatttcttccttgcaacagctctctggtaagtaggaatgtggtttcaaggttaagggcactgcatttcaaatcaaggggaccaaggtttgaatcctaa

SEQ ID NO: 417094 - DNA, 201 bp, Homo sapiens
gctaacccacgggcagcgagctgcatgtggcccaggacagctttgaatgcagcccaacacaaatttgtaaactttcttaaaacaggggttttttgttctgtttttttttttttgtttgttttgttttgtttttttttaagctcattagctgttgttagtgtactttttgtgtggcccaattcttcttccagtgtggcccag

SEQ ID NO: 417095 - DNA, 201 bp, Homo sapiens
cgggcagcgagctgcatgtggcccaggacagctttgaatgcagcccaacacaaatttgtaaactttcttaaaacaggggttttttgttctgtttttttttktttgtttgttttgttttgtttttttttaagctcattagctgttgttagtgtactttttgtgtggcccaattcttcttccagtgtggcccagggacgccaa

SEQ ID NO: 417096 - DNA, 201 bp, Homo sapiens
ggagcaactcacatgttatgtgcatggttgcaggcaaaaaatgagagagcttgtgcaggggaatgcctctttttaaaaccatcagatctcatgagacttaytgactatcatgacaacagcacgagaatgatttgcccccatgattcagttacctcccaccaggtccctcccacaacgtatgggaattcaagatgagagttg

SEQ ID NO: 417097 - DNA, 201 bp, Homo sapiens
atccttaacataggcctttgtcttcaagattttctcaaggtccaagatggttgctagcaatattcagccagatagaagggagaaaggacaaagagaggcctttttttttttttgagacggtgtctcgctctgtcacccaggctggagtgcagtggtgcgatcttggctcactgcaagctccgcctcctgggttcacgccat

SEQ ID NO: 417098 - DNA, 201 bp, Homo sapiens
gtggtgcgatcttggctcactgcaagctccgcctcctgggttcacgccattctcctgcctcagcctcctgagtagctaggactacaggcgcccgccaccaygcccggctaattttttgtatttttagtagagacggggtttcaccgtgttagccaggatggtctcaatctcctgatgtcgtgatccgcccgcctcggcctc

SEQ ID NO: 417099 - DNA, 201 bp, Homo sapiens
ctactgcctcagcttcccaagtagctagaactacaggctcatgccaccacacctggctaattttttaattttttatctttgtagagacaaggtcttgctgygtagtccaggctggtctcaaactcctgggctcaagcgatcctcccacctcagcctcccaaagcactaggattataggcctgagcgcacctagccatcctg

SEQ ID NO: 417100 - DNA, 201 bp, Homo sapiens
aacatctaccagggtattatgaggatcagatgaataaattgctaggaaagtgtttatgtaaatgctgagagttaccctgttgcatctgtacctacttcttkgcttttcagaatatcttctttcctgttaccttccctgaccctgattccttttgtcctttattatgatttatgacatttttatcacttaaaagtctgtgat

SEQ ID NO: 417101 - DNA, 201 bp, Homo sapiens
ctctcagctgctcattagtgtactcatttattcattcctttgtttatacattcagcatcttttgagaatttactaatgctcaaagtcatttgaattcagtytaatggaggaagcagacttgaaataattataataccaattcagaaatgtttgtttttaccctagtttgttgcaaaaaggatttggggttcaatgatttgt

SEQ ID NO: 417102 - DNA, 201 bp, Homo sapiens
acctaaaccccgttactccccttccaccctggccatcatgtgtttccgcacgtacgcctcgttgccatagcacctgaaggcgcccgggctcattggcaccmggcgagaaccaatcagcaggcctcgctgtccatctggcaccctgggtggcctttgggctgcggctggctacccctctctggtagaggaaagcggcccctg

SEQ ID NO: 417103 - DNA, 201 bp, Homo sapiens
tgtctgtcttctacatgtagccaatgaaaggaatctaaagctggaagggcaggggacctttctgatgctcttgtgaggcaaagggattgagatcactgcaragaagctggcaacaggaggcccatcattttttcagtgggcaggacatctccattctgggtggaggaagacgcaaggctttggcaaatactaaaatgcttg

SEQ ID NO: 417104 - DNA, 201 bp, Homo sapiens
tgtctaggagtctctgatcaatagccagcattgcagaaaacccatttccttgccactcatcctttcactctggcctaatacctttgttatctggaagttcrtgatactgagttagacctgaggatcatttcccaaatctgtttttctggagggcaagattcagtgatgcggcgagaggtaactgaagagtaggaggtgatg

SEQ ID NO: 417105 - DNA, 201 bp, Homo sapiens
agagaatgttcacaaacatttcttatacaaaaagctcttccactttttgaagcaaactaatggtcagcaagtctacatctttatccagtggggaaaaatayagattcagtgtctaggagtctctgatcaatagccagcattgcagaaaacccatttccttgccactcatcctttcactctggcctaatacctttgttatct

SEQ ID NO: 417106 - DNA, 201 bp, Homo sapiens
cagggctggtcagccacagctctgctcactattccaaggctcttctcggaaagactcctgctgccggtgcaggccatctgtggagctcacatgaatgcgtmccggcttacaagcttaaagagaaaattcttgaaggaagctggaggaaatgcagtgagaatctgtggattggtagaaagaggccacaaacacacactcata

SEQ ID NO: 417107 - DNA, 201 bp, Homo sapiens
ctctgaaggagtgtcctggaactttttgtaggaagttatgtgatattggaatttgctttgatggtcttagtctgtcctgaagactggatttgtgattggcktggtggtaatccctgggccagttacaggacctcttgaagcaattgagcttctccataacactcatattaactgagaaagaattgggaatttctcatagca

SEQ ID NO: 417108 - DNA, 201 bp, Homo sapiens
accaggagtgcacgaggttccaatttttccaaaaactcaccaacacttgttattttctggtttttaaaaatagtagcatcaaaatgtgtatgaggtgatayctgttttcatttccctgatggttagcaatgttagcatcttttcatgtttttactggacacttgtatatcttcttggagaaatgtctattcaaatcctttg

SEQ ID NO: 417109 - DNA, 201 bp, Homo sapiens
ccctaatggtatcttgcaaaactatagtacaataacataatgaggatattaacattgatacagtcaagatatagaacagttccattaccacaggaatcctycctgttgcctttctatagccacacccatttctacctgcctataaccacttcttagccctaggctaagcactcttctgttctccatctctatgatgttgtc

SEQ ID NO: 417110 - DNA, 201 bp, Homo sapiens
aggaattagccactgcctggtcttcctgagcaaatctttccaggacctcatctccctgtgctgtcactgtgggatggacgctcagctctctaacccagcasttgggctttgtgggagcctagttgatgtgtacaaaatgaattgaactgaattgggcatagcaccagacacggaccagatactaagtaggtacaatattta

SEQ ID NO: 417111 - DNA, 201 bp, Homo sapiens
ctccatttgtgtatctatctactctgtttacctaagtatctatttatctttaatctttgtaatatctaatctgtgtgtctatatatctaactctagatatrtagttttgtaaatattttatattgttatatgtttctctaatttatctacttcatctctttgatctatctgtttttctgtcttaactgtttttttatccta

SEQ ID NO: 417112 - DNA, 201 bp, Homo sapiens
taggcagaaggaaccatgtaagcaaaggtgcaacggaatgaaacaggagagtttgggatatcgtaagtagtttagtatggttggaatataaggaagaggtkgaagttccagggtagagtgggtgggaatggggcaatcagggtggttgtatgtgacacatggtaagaacaacatggtagggaggtcagataggaagatgga

SEQ ID NO: 417113 - DNA, 201 bp, Homo sapiens
caggcctgcctgcactggctgagtctctcccacgcccaggtggtactggctgagtgccccctctctgcccagtttgttctgttataaatgtaattcagaaraacattttttcttttgtaggtctagagaattctaaagcaatgtgtgttcttgctggctcagaccactcagcttcattaacaggtaggtaccagctctttc

SEQ ID NO: 417114 - DNA, 201 bp, Homo sapiens
tactatgtttaggcagtgggagcaaagttgaataagacctgtcctagcagttgagagttttatagtttggtaggacatgataggcacataaatacttaaaygtaataccatgtcagaactatgacagatgcatgtatatccccaaaggagggagttttgagcatctgggggaaggtggggtgagaagaggcttaagctagg

SEQ ID NO: 417115 - DNA, 201 bp, Homo sapiens
actcaggcctgcctgcactggctgagtctctcccacgcccaggtggtactggctgagtgccccctctctgcccagtttgttctgttataaatgtaattcasaagaacattttttcttttgtaggtctagagaattctaaagcaatgtgtgttcttgctggctcagaccactcagcttcattaacaggtaggtaccagctct

SEQ ID NO: 417116 - DNA, 201 bp, Homo sapiens
ctagagaaagcttgggtctgcccctgccagcttgctgaactcagttgttggtctgtggactgttatttcgggtcatggttcccatggtatgcacaaagtckaggctctgtagtccctgaaggaagtattatagctcccaattgcaaatagatggccttgtaagcacctacatataagttataattaatttagcttaattat

SEQ ID NO: 417117 - DNA, 201 bp, Homo sapiens
ttagaatggatcatcagcttccagtcctcaaagtctttcacttttcgtcctcccgttctcacctcattgccaaaagttctggagctggaacccgggctgtyccctcctcacctggccattaggggcccagtacttcctctctggtgaacatgggtgaaaacatctgctttgtcctgttatcattccagaggacacttgaag

SEQ ID NO: 417118 - DNA, 201 bp, Homo sapiens
tatcctggagggcccatttgtgaccaggggtctgacagcaagcgtcttaaggtaattatcattgggtgacatggcttggatgtttgtcccctccaaatctygtgttgaaatgtgatttccaatgttggaggtggggcctgttggcaagtgattggatcatgagggcagatccctcttgagtggttttgtatcatctccttg

SEQ ID NO: 417119 - DNA, 201 bp, Homo sapiens
ctgattttgtactaagtctttgaactctggtatgcattttttacttacaatatgtctcagtttagtgtaatcacatttcaagttttcaagagctatgtgtwggtagtggctaccatattggacaaaacaagtgttaaacaggactcttggctctagttcagagctctttacttcagtgcatcatacttaaaatcacccctt

SEQ ID NO: 417120 - DNA, 201 bp, Homo sapiens
tagtagagacagggttttcaccgtgttaaccaggatggtctcgatctcctgacctcgtcatccacccgtctcggcctcccaaagtgctagacctagctcaratacacctttctcagtaaagaccttttcttttctagtgttcactgcattaacttcacatgcatggatagcacagtatactgttattatgaattgtctgta

SEQ ID NO: 417121 - DNA, 201 bp, Homo sapiens
tctggaattataccataatttgatttaaattgcagctatgccacctatgaactgtaatattgaaaaagttaacttctctgacctatggtttccttatgtaygtatactttatagaattaaatcacagattaaatgagctaatgcatgcaaacaaaattcctaagcccttttcctgtgacattatatacaccccatatatgt

SEQ ID NO: 417122 - DNA, 201 bp, Homo sapiens
tattctgtcttctccaggccccagttttctgttcggtagaattttgagggttgggccaatgatctgtagattcccttgctgctctgaaatttaactatagytcagtgtaggcatgattgttgtagacattttagaggaaggaggacttgagctgagccttgaaggctaggctaggatttggattagcccaggataagggca

SEQ ID NO: 417123 - DNA, 201 bp, Homo sapiens
ctccgcctcccaggttcaagcagttccctgcctcggcctcccgagtagctgggattacaggtgcctggcaccattcccagctaattcagtataaaaattaytaacaaggtattttatactgattttgtactaagtctttgaactctggtatgcattttttacttacaatatgtctcagtttagtgtaatcacatttcaagt

SEQ ID NO: 417124 - DNA, 201 bp, Homo sapiens
tgctttctcactcttctactttgtgaccgagtttacccaggcttggctgtaggaaaaacttgtataggagacttgtaactacttcttctgttgcctggaayaaatcagggatttttgaggatggtgggaaggggtgggggaagaataggaaagggtgggttgcagtgggagtgatgtaattgggtgttgagatcattctaa

SEQ ID NO: 417125 - DNA, 201 bp, Homo sapiens
agagaagaagaaacagcagagagaggaaacacttaagaaactattgccattgtccagtacaggtgttttgagggcctgaactagtagagtggcagtagagrtggaaaagaggggcaacatgagagcagaaccaggaaggcagaattacaggatttggtggttggccacacttggggagtgggaggaggaggtgattctgag

SEQ ID NO: 417126 - DNA, 201 bp, Homo sapiens
tttctgtcagctcgttgccatggagaagtgggttggggctggaagctctgtccttctctgtcagcatttctggacccaccagctgcctcctgccccttctrcagatggaggggggcaggaccacatttggtgggcagaccttttctctgcaagcactggaactgcacctcagttccctttgggatgctagtttcattcacc

SEQ ID NO: 417127 - DNA, 201 bp, Homo sapiens
ctttatggacctcttcctttgtaaagaaaaaaattatattttacaactgtgttggtataaagatggatattaatagaatccactccagatttagtgttatrtatgcattgttactatattatctttttctcatttaaaaataactaaaaattaagccactctgtgggcctctgaaagcattgtgggccctagacactgtgc

SEQ ID NO: 417128 - DNA, 201 bp, Homo sapiens
cttgtatagagttggccctactaaacttaacgcctgaccaagaggacatgaggatgtaccctctcttcaggcaggcacaccccaaagagggaacccaggargaccatgccttgcatggccagttccttctcccaaaaaggaagcaggagtgagtgaggatgtagacagaggggccaggagtgttcccacagggaaatctct

SEQ ID NO: 417129 - DNA, 201 bp, Homo sapiens
aatttgtatttagtatcttatttaattctcttgttattcctgtgagttagattgagttatgttcacgttacagatatggaaactgaagctctaagaaaaargtaacatgttctcctgctctgctgccatcctggtgctagacgcagagtggtgggtgggaactaaagtctttaagagggcaggagggataaagcacacaca

SEQ ID NO: 417130 - DNA, 201 bp, Homo sapiens
cccctcttaaggggctgagaggcaggagctgttgctttgcatgtgtgattttagactgagagtgttttgtgtctttattttaaaactggtttctcagtctyccgtgcagttttctgtcagctcgttgccatggagaagtgggttggggctggaagctctgtccttctctgtcagcatttctggacccaccagctgcctcct

SEQ ID NO: 417131 - DNA, 201 bp, Homo sapiens
tgggccagttacaggacctcttgaagcaattgagcttctccataacactcatattaactgagaaagaattgggaatttctcatagcagtgaggttcaaagrgcaatctagtcttatcctgatgtgcatcttctctgctttctcttccattctgttgggaagcgagtggcatcgtgttccagtgggggactggtttggcatc

SEQ ID NO: 417132 - DNA, 201 bp, Homo sapiens
tcagttcccatataggtttgtcataccagtcaaagtggactactcctgtctgctgcatgtttactcatttgttccctccatccctctctcccttcttcagygaaaaaatacagtaatgtttctttgcaaactataaagcatgcaaccttttatctgtccaacaaagtaccctgctatgtgaaagggaagaatggagttttg

SEQ ID NO: 417133 - DNA, 201 bp, Homo sapiens
ctagaatgtttcaggtggcattctgcctggaagtagagagctggactccattccatgacagagatttatactctgcaggtgatccaaaatgcttctcattktaatggaatgtggaattgcttttgccaaagttgaagaatgttttagatgggatctctaaggtagcaaaaggttgtgaaaagagctctggaccaagaatta

SEQ ID NO: 417134 - DNA, 201 bp, Homo sapiens
tcatccatcatgcagagtgatagactcccaacttttgaacttaaaacttggtaaagcaatcaggccaaacgttatagctctttcatcaatcaaaccttcarttcccatataggtttgtcataccagtcaaagtggactactcctgtctgctgcatgtttactcatttgttccctccatccctctctcccttcttcagcgaa

SEQ ID NO: 417135 - DNA, 201 bp, Homo sapiens
cagatgcatgtatatccccaaaggagggagttttgagcatctgggggaaggtggggtgagaagaggcttaagctaggtctcaaaagttaaatagaggtttmcccgtcttgggataggaggatgctcagagtgggtgcaaaagaagaacattctaggcagaaggaaccatgtaagcaaaggtgcaacggaatgaaacaggag

SEQ ID NO: 417136 - DNA, 201 bp, Homo sapiens
tcctgagtagctagaactataggtgcatgccaccatgccctgctaatttttaagattttttgtagagacagggtctcgctatgttgcccaggctggtcttraatttctggcctcaagcaatcctcccgccttggccttccaaagtactgggattacaagtgtgagccactgtgcccagcctgccctccgccttttaaaata

SEQ ID NO: 417137 - DNA, 201 bp, Homo sapiens
tcccttgtggcttccaccagccatagccgggtgtctgcgccctctttcctggaccactgtagcagcctcttagtgatcttctggtcctctgtcctttcatmcatcatgcagagtgatagactcccaacttttgaacttaaaacttggtaaagcaatcaggccaaacgttatagctctttcatcaatcaaaccttcagttcc

SEQ ID NO: 417138 - DNA, 201 bp, Homo sapiens
aaggttctgtctatggcttctgtttagagggagtttggaaataggtctagaaggggctcatggactctttggatcctgtaggcttatttctgggcctcagrctggtaagatttaccccttttttggggagaattgccctttcagtgctgaaatatgtggaaggagggggaagctctacgtgtatgtagctgtgtcctatgt

SEQ ID NO: 417139 - DNA, 201 bp, Homo sapiens
gagatactgttattgtacttaacaagtgaaatacctgagacctagagagtttaaatgaccaacctaaagctgcccagctaataaattatgagtcctaatgscagattttatccttccgaggaaagccaactcttaatttggaaaaggcatcaactctctggattctctttgcagataaaacagtttaggacctccttttgt

SEQ ID NO: 417140 - DNA, 201 bp, Homo sapiens
attaaatgaaatctctgtgctcctcctcactgatggtatgacttgggcaagtcacttgacccctctaggctcggttcttcgatgtaaaatgggggtgacgyaccttcactgcaggataggaaaaaaacttcagtgagacagtgtgcctgatggcactttggaatcagtgagccttggcccttgggatggctttgggtgctt

SEQ ID NO: 417141 - DNA, 201 bp, Homo sapiens
agagttaaagtgcttgtgtaagcttatacagggagtaacgtagagcttggatcagagcctgggatggtttggatcctaaggctcatattttttgcagggarctgcacagccttcctaatggattttattgtttattaatttaaaagctttaagtgagcttgtctcctgtactgtgagtgggtgatgggactgacagtctgt

SEQ ID NO: 417142 - DNA, 201 bp, Homo sapiens
agagacctcctgaaatcttctggtcctttctggcacatgagatactgttattgtacttaacaagtgaaatacctgagacctagagagtttaaatgaccaasctaaagctgcccagctaataaattatgagtcctaatgccagattttatccttccgaggaaagccaactcttaatttggaaaaggcatcaactctctggat

SEQ ID NO: 417143 - DNA, 201 bp, Homo sapiens
cccggccaaaaagaggcccttttaaggcactttccctgaagtggtaccaagcaatgtcaactaaaaactggccagagcctagttacatagccaaacctgtyatgagggctgggaagtgagacttttagctgggcatatgtttatcctgaataaaatttgaagtctgttaccaggaaagaagaggagaatggataataagta

SEQ ID NO: 417144 - DNA, 201 bp, Homo sapiens
acagtgaggacacaaaagaacaagcagtatttgaagccaggtatgattccagagcttctcctcagtgttctgcttgttctcaggggactaaaaaatacccscagtggagacaattgagtaaactcctgagtaccacatagtacgccaaaaactgaccagtatgaaactgccacccaaggagcaaaaagttgttaatgaaat

SEQ ID NO: 417145 - DNA, 201 bp, Homo sapiens
aactctgtttttgccaggtttttcttcatcatcatatcatgtaggcttccgcagtgagtcacagtccaggggttcagagagactagagtgtgacctgcagrgtttagaataaattttgaattatctatcttagagctgagagacctcctgaaatcttctggtcctttctggcacatgagatactgttattgtacttaacaa

SEQ ID NO: 417146 - DNA, 201 bp, Homo sapiens
agtatgtttataggagctgaaccttggcaccagtgctcagcagttgcttgtccatcaatgggttgtgttgttgttgcatgggttttggtgaattttttttgggggggggagttctttgaggaagattccacaagcagcctggcatggcactgccggggcagctcatcagggataaagcattccgaaccttggtctgctgtt

SEQ ID NO: 417147 - DNA, 201 bp, Homo sapiens
cctctacaatgtcagcttccattgcttgctgcccaggcctctcctcatttacttgtttgcatctcaggcttttatactaaatgttcattaaacattctacratctatctagggtaaccttgtcagaacagggagggaaaaaggaaatatctatcttctttcttgtcatttctctcagatgaatgaattaaatatttttatt

SEQ ID NO: 417148 - DNA, 201 bp, Homo sapiens
tgattatttgattgttagaagaatccagtaaagtagggaaaacaaatactatgcttccattttacaaaggagaaatctgagcccaagagagattaagtaatagtagtggagctactgacttcaaacaaatacttggcgtaaagaaggaaggcacctaacaaatatttgtgaataaatgaatgattgaatgaatgctgactt

SEQ ID NO: 417149 - DNA, 201 bp, Homo sapiens
gggaattgtaccacgcactatgctagatggctgtagatataaagttcagtatgacacagtctcttccatcaaggagcttgtgatgtagcaggtgagacagrtaagtcatagtgtcagtccaggatgctgagtgcaatgatgagggtgtccagggtgctatggcagcagagtgctgggaactaacttatcctgggggagggc

SEQ ID NO: 417150 - DNA, 201 bp, Homo sapiens
gattatttgattgttagaagaatccagtaaagtagggaaaacaaatactatgcttccattttacaaaggagaaatctgagcccaagagagattaagtaatagtagtggagctactgacttcaaacaaatacttggcgtaaagaaggaaggcacctaacaaatatttgtgaataaatgaatgattgaatgaatgctgacttc

SEQ ID NO: 417151 - DNA, 201 bp, Homo sapiens
attatttgattgttagaagaatccagtaaagtagggaaaacaaatactatgcttccattttacaaaggagaaatctgagcccaagagagattaagtaatagtagtggagctactgacttcaaacaaatacttggcgtaaagaaggaaggcacctaacaaatatttgtgaataaatgaatgattgaatgaatgctgacttct

SEQ ID NO: 417152 - DNA, 201 bp, Homo sapiens
ccctgcttaaaaccctctctagcttctcagcattctcaaacttctaactcctcacctggcatcccaaggccctgcttccccttgaatttttttttctttctttttttttttttttgagacggagtctcgctctttcgcccaggccggagtgcagtggcgctatctcggctcactgcaagctccgcctcccaggttcacgcc

SEQ ID NO: 417153 - DNA, 201 bp, Homo sapiens
atactatgcacagttaaaattaaaataactgaactagatctgtaactaccagctcagataaatttcgaaaacaatgatgagtgtaaagagcaacttgcagaaaaaaaaaaaaatatgtgaatgattctatttgtgtaagtctttaaaacaaactaaacagatcacaatatttaaggacacatctatgtagaaaaatatgaa

SEQ ID NO: 417154 - DNA, 201 bp, Homo sapiens
agcttaaaagaaggccttgaagaatcaagatgacaaaatgtattatttataaggacctaaaataagtgccagatcctccacttgaagtgagcaggcgacasccgtgcgctgtgtggagtagagcccagctgactccagctggatccacacggcagggctggtcagccacagctctgctcactattccaaggctcttctcgg

SEQ ID NO: 417155 - DNA, 201 bp, Homo sapiens
agtattgcctctccgcatccacaggcctcagcttatgctagtgcccctctgtatcacctgtcctatgactgctgtccctgctgcctcttgcctctggaatmctctgttcctccttggtgcacctaaagcccttaaatgtagaacagctatgactattcattcaccgtgctgtccctgggcagtgctttagcaacattcggt
